United States Patent Application Publication US 2009/0018031 A1 - sequence listing, part 7

SEQ ID NO: 3379 - DNA, 6000 bp, Homo sapiens
agcctcccaaagtgctgggattacaggcgtgagccactgcctctggcctctgtgtttaaccatttgcggaactgccaaactgttttccaatttggtggcaccattcattgtagattcccaccagcaatgccccagggttctcatctctccatctcctcgttagcacttgtaattgtctacctttgattatagccaccctagtgaatgtggaatggcttctcatggtggttttgatttgcatttccctggtgtttagcatcttttcacgtgcttcttggccatttgtatatcttcttttttttggagaaatgtctattaaaatcctttgcccatttttaaattggattgcttgtctttttcattgttgttcagttgtcattgcagtttaaaaagaggaaactgaggctcagaagggggacatgactggtccagggacactgggctcacaggcagattgagatggaacttgggttggtctccacctcccacccagcagattgggggccaccttctctccccccaccagagcacctctccccagcctccagtttcgacctggccctgccaggccatctcaggtcctatccttgcatttaaaggcgtagggccccacagcagagggtaagccggaaagcgaggaagcagcagttctgaggaaccaagctggtcctctcttcctctccaaatcacgcgggcctggctgacgtggcccgggaagaggggacagcccgggtcctgtggtcggggagcctatttatactggctgggccatgttgcaagcttttcctgctggtgagagggacgtcactgattgctgacctcaccagaaacgctgacgcatctttcctcacgcttggctgggatggtcagcggccaggcctcctcacctccgagccactccctgtcctcctgtgtatcacttcactctggatgctccgacagtggccccagcccctgtgccctccagctatgccttcctcttgcaggctgcatggactgaatggtgtcttccctgaactcatgtgttgaagtcctaaccatcgtgtgtcagaacgtgactgtatttggaagttgagcctttaaagaagtaattaagggccgggtgcggtagctcacgcctgtaatcccagcactttgggaggccatggcaggcagatcacttgaggccaggagttcgagaccagcctggcctacatggtgaaaccccgtctctactaaaaaaatacaaaaattagccaggcatggtggtgggcacttgtagtcccagctactcgggaggctgaggcagagaattgcttgaacctgggaggcagaggttgcagtgagccaagctggcgccactgcactccagcgtgggtgacagagtgagattccatctcaaaaaaaaaaaaaaaagaaaagaaaaaaaaaaagaagtaattaaggtaaaattggccaggtgtggtagcacatacctgtaatcccagctactctggaggctgaggcaggaggctcgcttaaggccgggagttcaaggctgcagtgagctatgaaagcaccactgtacacttaagcctgggcaacacagcaagactttgtctcgaaaaagaaaaaaaaaaggaataattaaggtaaaatgtgagtgggccctaatccaatgtgaatggtgtcctcataagaagagataaggccaagcgcggtggctcgctcctgtaatcccagcactttgggaggctgaggcaggtggatcacctgaggttaggagttcgagatcagcctggacaacatggcgaaaccctgtctctactaaaaatacaaaaattagcctggcgtggtggcacacgcctgtaatcccagctactcaggaggctaaggcaggagaagcgcttgaacccaggtggcagaggttgtagtgagctgagatcgtgccactgcactccagcctgggtgacggagctagactctgtctcaaaaaaaaaaaaaaatcgattaggccacggacaagcagaaggaacatgatgtggagatacggggagagacagtcatctacaagtcaaggagagaggccttgggaaccagcccttgatttcagacttcagcctctagaactgtgagaaaataaatctctgttacgtaagccccccagtctgtggtactttgttatgggagtcctagcaatgtaatctacctgctctccttaccttcagtgactctgagccctgggccctgtgcctgacaccctcattaactatgtgcaaagagtatggtctttgggcctcgtttgaatgccttcttttcttggtgggttttttgttttttgttttttttaaacagggccttgctctgtcacccaggctggagtcctgtggcatgataatggctcactgcagcctcaaccttcggggctcgagcgatcctcctgcctcaacctccctagtagctgggacttcaggtatgcactacgatgtctggataatttatttttacattttctgtaaagacacagtctcgaagtcctgggctcaaatgaccctcctgcctcggcctcccaaagtgctgggattacaggcgtgagccaccatgcctggccaaatgcccctctcctcttaactattcataggtgacctcagacaaagcaacctcctctctctgccatgaggagacagcacggcctccctggaccacaggatagatagaataagataaaggcatgtggctgtttctcaccaagcgtggtggtcggtcagccacagctgaaaatggcctagacccctctgctcagatctggcgctccttccttgagccagcccctaaacttcccagagcttcgagctcctcactgaagtgagctgaggtgtcactgcccagcggcttctctcccctggctgttgcaggatgagatcggtggctgggtgctgtggctcacgcttgcaatcccagcactttgggaggccaaggcaggaggatcatttgaacccaggagtttgttatcagcctgggcaacatagtgacaccccgtctctacaaaaaataaaaaaattagctgggcatagtgatgcatgcctgtggtctcagctactcaggagactaaggcggggagccttgcttcagcttaggagctggaggccacagtgagctacctacaatggcgccactgcactccagcctgggtgacagagcaagatcctgcatttaaaaaaagagaaaaaaagacgagatcagggatgtgaaatggagaaggatcccctcttggcatggccccaggaaacagcattgtgggggtgggcacagagatgaggacttcagcggaagcgacattctcaggatgagaatccagaactggcccctgggggtggtgagggggaggtatgaggcctggtgtggtgagtcccagcctgggtgccggggagtgggtaggggctgaagagcagcctcctgggcgtggggtcgcctatttttgcctactacgtgatcctcagacctgggagtggctggtgcagcatggagccaaataaaggtttgtcgaatgaataaatgagtgatggggagaatgggtggcaactgccttggtggccacagtgggcatcgggagcaggcatggacaggggtgcatccaacctcctcctttctggctgccccagctctccttgctcaggcgccccagaccccatgctccctccagctggagcagctcaggcctccctggcagcctccaggagtcccaccctgactccccagactcctgagggcctcctcccacccgggcttcttagggtgcaggccaaggaccctcctctgggcctgggagatgtgctgaccaggcagggtctataggcctgggccagcctcttggcctccctgtctgccttcacccaggcctcagtttaccccacagtaaagtagcagtttgactagggaggcgctgttcccagggccctttcgcagaggaccaacctaagatcgctatctttcagagaaagtgaaacctggtccccaactgtcaaggcggcaactccccctccccggcttcccctctgagctcacagcttccccatctcctccttcccccatcccgccccctcgacagctaatacttggaatcagaccttcatctttgctttttccttcagaggtcttttccttttatgtccatgctggcagcaaccctgtgaggtgggctgggaaaggcttttctcctcctcattttatagttgtgggtctctgaggcccagagaggttaagtgacttgcctcaggtcacacagcacctcagcaggcttgaaccctggcctcctgtttctcttgctccaagtgtccagttctccccagtggagcctgcctacaaagacaaggcctggctttggggagtgggcctggcagagggtgcacgatgggggaaaggagaccgtcgggagccgggctgggggatgctggtcctggggcctgaaccacaatctcggggctgccagcctgcgtctggctctgtgcccagagcccggtggtttccgctcacagatgtcccaacagccccggcgagagggcaggaagggcactcaagaaggaagatgtctcgctcccctcagcccccaaccaccgtgtcctgtgaggccaatggctcctgggccaagactggcctggggcctccagaggcccagctcgaagtccctcctgcccatccctggcccagttccctgaagatggcatggacccttttcctccccactcaccctaggaaggctgaggctgcggttttacatcatccttgggcgtagggctgacctcgaagaacgaattcgaagaaaacaggaggaggagcgggcatacaccgcgccctgcgcccattggccgcccgtggaaattttggtttttggggtcatgttcccagaaggcctgccctcccccctccccatccccacccacctcatgaggtgttggccaatcgccccagcgggcataaagtggctgccagcctgcagggctcccagccgagaggtgtcacccccagcgggcgcgggccggagcacgggcacccagcatgggggtactgctcacacagaggacgctgctcagtaagtacttccttcctccccgccagaacccgcctgctgggtctgcccacgggtgccggtggggagcagaggcaccctctgccctccgggaactggggaggccaggcgccaggcagaaggatgctgagaaggggagagagccaggaggtcaggcagagagagtggtccactgagaacctggcatctccacaggtagagaaggggcatccctggaaggcttccagggggaggtgatgtcaagatgtagaggcaactctgggaaccagggggtgagagaataggatgggcaaagaggctgggcaggagagggaggctcagaagctgggcagggaagtggtgtgaggtgtggaggggttgtggggcctccagcttgcccgggatgaatagaaagtcagccaggcctgggggccccagggcccacacaatcacacagcatgcacagccacacccacatggccacatgcgcacacagccatatgacgtcatctacagccctggatctcaccagcccaggaacccccacatgcagaccagagtccccatggtgaacggaacaggtctccctcacgccgcacacagacccagatgcacagccacacagaaaccccagtcccacgtgcgctgccacaggcacaggcccctgccagagcccggcagcagatacctggggaggcggcgagggtgccgtggggtcgctaagcctgggtgcctggccccttggccctccccaacagccagtcttccccaaagggccggatggttcttaggacgggaacgatggtgtcactgccttccgggccattgcgccataggccccttccgaccacgtggctgccggtgccccgttgggggtggtggtgagcggtaactgtacccgcccccaacaccttctgacaggctcacagcatccctggtgggcctgacagaaggagccacttatggagagaggaggg

SEQ ID NO: 3380 - DNA, 6000 bp, Homo sapiens
ctggctgacttgttgcatgaccttggcctctctgtggctctttcctttcttcaaatgaatgagagtttccacttcccagggtcatggtttcatacaggagagaggatgtgaagtgcttagcagatgcctcacatctaatgctcaatcaacgcaagttattacggcaaggaactcaataagtatttgctctttaggaagggtgagaaggagttcaaatccatctctgctactcactagctaggtgaccttcggtgtttcacttaatctcatttgggccctagtttccccatctatcaaatggggatgatacatggttattgtgaatatcaaatgtaaatgtgaaattaaactaattaatccctaaaatcacttagaacaaggccagccttaagtctgtggtcaacataggccagctgtgactattagagctgctcagaaatgggataactcgaattgctcaggagcccccatggctccaaaattctctgaccaccttaaacctagtgactctcattcagcttaccttcagtcacagaaatgtatagaaggcccttgggtccatgaggtgaagggggacagaattcaccatacaagtgtttaccatctctctagaaagttctacaatgctcttatgataatgctgactaaaatcacacagagtagcagcaacaaaagggagacagtgggtggggaacagagaacagccctgggagggaggtgtgattattacctgcaagagttaaagaaagaggcaagaaacatgaaaagtggctcaacagttaaatacaggtttattttggagcataaacctgagaggggcttctggccaatttcagtcaggagtgctctctcttacagactaagagtatttaagggtttagggcaagagagcttaccacaggcttggaatgtttctgtgtggaggagaagtttactgtggggttggaatgtctccggtctgagggtgggttatgttggggctgacatctctctgaccagaggggaggttatcttggggctgcatgtctctggtcggggggtgggtttatcttagggttggaatgtttctgattggagatgtcacttgtggtttatggtcattctgacattagccattaggctgatgccctttgggttgaatttaggccgtttttgatcaaggagaactttaaaatggcagtgcttgtccaagatggctatgctccggctctgtcattacccacctcgcaaaatgaaggaaccaaggcttcggaggctgccctgatgtgtgtctgtgtcttagctacgtggagctgcctcgggagggtgactcaccaaatggggtcctttaagggattaacagggtcactcatggtgaacaggttggcctggaggggagccggcaagaggaaggcagaagaccagaaagaggctttttgctcactcagacctggatgtctgagacagactcacgtgatgtcaccaaagaagaaaagcagttacgagaaatgaaggagaaacagacctttaccgtagcgccaggaatgaatcccaaggaaagaacatctcagacaacttgcatttactctggattcggggctgaaaccatcagccattcatagagtgtgtgtgtttattcccccacacaaggctggcagccactctgagatgcagagtggcggagaggtggaatgttctaggtgtctggagggaatgtggaactttcgcacaggcacctttgctgaggggctgctcttcccttcagcatcagccatcagaatcccaggggccctgagaaagtgagaacaaggggtacattcggccaaccagtgacagtgatgataaaccaaatctgtccagataagcttccgctctcccatccaccccacaatcacgtgtgcacctactatctcccaggcactcatacgtttctctccttccatctccacaaccaccccacaaggcgggttctcctaggcccatcctgaggctgagggatgaggtgacttgtccaggccagggatttaggtctctgaccccctaaccacgtgcaagaggcacccccaacccagtaaacgcgtacagagagcctccctgggtgacgggcaaacgaggttagtgatgcattctccttttgcagagagtaaatggactaagagcaaagtacgacttcaagtttccgagtctcaccgcttagccccatcaaagtgtatttgttctccctttgttcacaaacatcactttaataaaacaccttcatattttagattttaacgctcattacatctttgagcttttaaaatgagatttccctgcgggatgcggggcaaggactgcacttctccatgcactttaatagccgcgctgtgcagaacccgggaaccggggaagccgcgagaaccgcgcgaagtcagagcaagtcaaaacgacctctacagcggcggcctggcccactgcgcaggcgccgctccagaccgcctagagcccaacctgccccattgtaggcgaacccacttctagaaggacagcgggagtggcgaatccctattcctcccgaagatgggtcaagccagactctgaccaatcagaaagcttctcttgtcaccgcttctgactgcttgacgtggaggcttctttatctcgggactctcaggcgcagcgggggcgggatataaagctggttgacgtcaattacaaccactcgtcaagcagactgaacttgaagaactgataactctacgaattgcatctcaagaaaaggctgttatcccagctctctactcccattggatttttgtgagaccttgagggtgggagcttttggcggcaaccaatcgagggtcagcgaggaggaggaggaggcggggcaggtgggctatggttgcttggagagtgcatccggcccggtacttgtgatcggaggagagccggatcgtccttccttgaaccctctgggtagggctgtgctgaggggctgggcggggagcacaggccgtgtccgctcgcttgcaccttttcagactgccgtgtcaggcctcgagccgggcccacctggagccctcccctgcccacccgcccccagcgcccgatatccgcccccggcccagaagggccgggctcggtcatccccagtcccgtcgcggccactgacccttgagatcagccctcccctccccaccttcccgtcccaggccagcccagggcccgaagcccacccactcgcgtctctagcagccgctcttgtcctctgggtacggctcgcgggagtgttggttaccatggtgaagctggcagccaaatgcatcctggcaggtgagtctgaaaacttgcgcttgaatacggtggtctctggagtccagagccttcataattcatccagagcttttgttcacctaaattgcctaccttttcctttctctctcccaaaggcgagttactgcaattactgatacagtaaattacgttaggcgtggaagaatgatcttccagggcacttcgcagctccagtggatttccccctgctccctgtcacatactctgagaccaccttcaccagttgaggtgactcgttaaaaaatcactagttacaactctggagaagcagacttgttaaaacaaaacaaaacaaacaaagcttaagcaaaccttgagtgcttcagctaaacatatactgtaccccaaagttaggcatcagtgactttggtagtctttactatgggatttttcccccgacctcaccccctctgataacggtgacctgagtgtagtgaccagagtttgcaaaaggcacttgtgtgttgtctttaagacccaaagttactgtgctgccccactccaagaagggcataaatgttgagtctcccaaaggcaggaatctttgttttgttgactgatacatcccaagcacccagaacaatgcctggaacatagtaggtactcaataaatacttttagaatggatgaatatgtgaatatgtggcatgcacatttgtagtgtaccccttgtatcagtctgcacatttagaaaaacaatattttggattatagactgcgaaacacatatgcatgttactgagtgcttactgcatgtgaagcacacatatttcatgtaatcgtctcaccatagcacactgggctaggtactggattgtttttcttttttttttttttttttgagacggagtctcacgctgttgcccaggctggagggcagtggcgcaatctcggctcactgcaacctccacctccctggttcaagcaattcccctgcctcagcctcccaagtagctgggattacaggcgcaagccaccatgcccggctaatttttttttgtatttttaatagagctggggtttcaccatgttggccagactggtctcgaactcctgacttcaggtgatccacccacctcggcctcccaaagtgctgggattacaggcatgagccactgcgcccggccaggtactggattgttctgatcttactgaggcactgagagatgtcagccaaggtcaacccctagtgaaggccctatgcaggatttcagcccctagatctggccaactccaaaactcttaactcgtgtttctgttgaaacctgtgacctttccaggcttccctggccagctcaggaaagaagtggtgagaaattatatagagaaaaagagattcctgttttaaaaaattcccctcttccagactgagaataaatgataatatttttaatggcttttataatttgaaaataaaagggtcacacagaaagatgactgacagtagtaactgaatcatactggagcaaaataaattaatggttctcaggagaatctccagtttccagagcaccagaggaggcagtgttgtgtaacaaaagtaattttgcctgttcctcttattggctgtgtcatcttggacgaagcactttttgagctttaatttccttatggataaggtgggaacattattttctgaagttacttttttttttaaatgggcttctctctgggttctttttaaattcggttttcatcatggagctaacttactggcgctttgggtgcatcagctctgctagaccctcaatacaggtggtctcattgaatcctcatagcaaccctgtgggattggcattattgccatcctcatttacagatgaggcaactgaggcccagaaaaatgagaacatttgccatgggtcacagagctggaagtggcagagctgtatgatccagaccctgggtcccaatctgatttccagggctttagcccaagctactctgtcctcaagtagtgctcctctgtgtccttctattttttttttttttttttttgagacggagtttcactctcattgcctaagctggagtgcaatggcacaatctcagctcactgcaacctccacctcctgggttcaagcgattcttctgcctcagcctcccaagtagctgggattacaggcgcccaccaccatacccagctaattttttgtattttttagtggagactgggtttcaccatgttagccaggctggtcttgaactcctgacgtcaggtgatctgcccgcctcggcctcccaaagtgctgggattacaggcgtgagtcactgtgcccggacctttttttttgaggcgtaatttcactctgtctcccaggctggagtgcagtggtgcacaaccttagctcactgcaacttccacctcctgggtttaaatgattccctgcctcagcctcccgagcagccggggatacaggcacacaccaccatgcccagttaatttttgtatttttagtagagatggggtttcaccagttggtcaggctggtcttgaactccagacctcaagtgatccacctgcctcagcctcccaaagtgctgggattacaggcgtgagccacccactatgcccggcctctttgtgcccttctttacccccaactcccttgggtagttctttcacctgagtgcagccactgcctagttagtggctcctgaactccagcctgcgcctcaatctgcagc

SEQ ID NO: 3381 - DNA, 6000 bp, Homo sapiens
gctgctcttcagggatgtcgggacgtgttcaaccccaggatgattgaacaatttctgggaacaacttgtcagcagctgcccctccactcccctcttatccaaagccccagtaatcagccccaacagtctagtccctggctttgggaagcagcactgttaatacttcctcttccacagagcatatgggtgtagctaggggtgcaggctaggggtgggagaggacccaggatgaggttaccccatctgaatggtcattgcacatctctcagtagtaagcccattgcttgcccaaaaactgatattcaagagttggtgcttgttgaatgaatgaatacacaaccggaagggtaaaccctatgagagtcattcattcattcagaagtatttacggggtgcctcaccatgcaggggactgtcctagatactgggtgaacaaaagagaccaagtgtcagttctcatgaagcttaccttctagtggagggcgacagataccatataaataaactaataaatatggaatataggtggccctctgcatccacgggttccacatctctggattcaactaactgcacattgcaaaaataaaaaaataacaatacaacaataaaaataatacagataaaatacagtataccaatatttctatagcatttccattgtattagttattgaaagtaatctagaggtgacttaaagtatacaggaggacgtgtgtaggttttgtgcaaatattacaacattttatataggggacttgagtagccctggattttgatatccatggttaccaatcccccacggatacagagggacagactgtgtaatctctggtagtagtgaacgctatgaagaaagtaaagtaagtcaaggatattgagactgacagattgggggcgatgcttaaattgtgtgtttgggagggctccccgaaggcatgacgtttgagctgagatctgaagatcatgaaggagagtcatacagcctcattgggaacagtgcgtacaaaggccctgcggtgggaacgttcccgaggagcttgaaaaacagtaaaatgacccaatagagtagataaaggtgggtcctggcattagctaagaaaagcagttctcaacatgagcttgtgtcggagtcaccaggaggccttatggaagcagattgtgggctccacctccagtgttcagctggtcaggggtggggcctgggaaaatgcatttcttactaatccccaggtgatgctggtgtgccagtccagggatcagagcatagggtatttgttctttctgcaccacatcctcccctattcaacattgactacatgcaatcatagatcattactgcttgatcatctgccgctccactgggctagatggttctgtccacctctacgtcctagtgcttagcaagcactcaacagaatatttgttgaattaattcctcaaacaagggttctactctgggtcttgccattccaccgtgtgttccatctgctgccctcccagagctctgagcctttgcatgtgctgacccatccacccagcatttgccttcccctgtgtccacctcgcaaattcctacaaggctctcctttcagaatatccttcccgactccctctccatccacccagggttaggaatgctcctcgaggtgtacatagggagtcccatatccacctgtggcacagtgacttgtccacatgttggtcttcctttctttaccaaagatcgtagatgagcagcccccaggttgaaccggtcaacagaggtttctactgcagctacagtgttttaaatttaagttcattgccaacactaacaggtcaggggatttcacacaaaaatccagattcctggctcctctagaaaagtgtgcaaccctgggcccgtattcccacattgccgtgatatctcacccagaggtaaagcctggggctctgtcatccccacccttcagtggatccagcaaccaacaccatgcctggctgatggtaggcactcaagaaaagctaattaatgaaaatggagagactatgctggataatgggggaaaacaaagaaacaaacattggtccccagagtcaagagatctgaggctggttctggatctggctgacttgttgcatgaccttggcctctctgtggctctttcctttcttcaaatgaatgagagtttccacttcccagggtcatggtttcatacaggagagaggatgtgaagtgcttagcagatgcctcacatctaatgctcaatcaacgcaagttattacggcaaggaactcaataagtatttgctctttaggaagggtgagaaggagttcaaatccatctctgctactcactagctaggtgaccttcggtgtttcacttaatctcatttgggccctagtttccccatctatcaaatggggatgatacatggttattgtgaatatcaaatgtaaatgtgaaattaaactaattaatccctaaaatcacttagaacaaggccagccttaagtctgtggtcaacataggccagctgtgactattagagctgctcagaaatgggataactcgaattgctcaggagcccccatggctccaaaattctctgaccaccttaaacctagtgactctcattcagcttaccttcagtcacagaaatgtatagaaggcccttgggtccatgaggtgaagggggacagaattcaccatacaagtgtttaccatctctctagaaagttctacaatgctcttatgataatgctgactaaaatcacacagagtagcagcaacaaaagggagacagtgggtggggaacagagaacagccctgggagggaggtgtgattattacctgcaagagttaaagaaagaggcaagaaacatgaaaagtggctcaacagttaaatacaggtttattttggagcataaacctgagaggggcttctggccaatttcagtcaggagtgctctctcttacagactaagagtatttaagggtttagggcaagagagcttaccacaggcttggaatgtttctgtgtggaggagaagtttactgtggggttggaatgtctccggtctgagggtgggttatgttggggctgacatctctctgaccagaggggaggttatcttggggctgcatgtctctggtcggggggtgggtttatcttagggttggaatgtttctgattggagatgtcacttgtggtttatggtcattctgacattagccattaggctgatgccctttgggttgaatttaggccgtttttgatcaaggagaactttaaaatggcagtgcttgtccaagatggctatgctccggctctgtcattacccacctcgcaaaatgaaggaaccaaggcttcggaggctgccctgatgtgtgtctgtgtcttagctacgtggagctgcctcgggagggtgactcaccaaatggggtcctttaagggattaacagggtcactcatggtgaacaggttggcctggaggggagccggcaagaggaaggcagaagaccagaaagaggctttttgctcactcagacctggatgtctgagacagactcacgtgatgtcaccaaagaagaaaagcagttacgagaaatgaaggagaaacagacctttaccgtagcgccaggaatgaatcccaaggaaagaacatctcagacaacttgcatttactctggattcggggctgaaaccatcagccattcatagagtgtgtgtgtttattcccccacacaaggctggcagccactctgagatgcagagtggcggagaggtggaatgttctaggtgtctggagggaatgtggaactttcgcacaggcacctttgctgaggggctgctcttcccttcagcatcagccatcagaatcccaggggccctgagaaagtgagaacaaggggtacattcggccaaccagtgacagtgatgataaaccaaatctgtccagataagcttccgctctcccatccaccccacaatcacgtgtgcacctactatctcccaggcactcatacgtttctctccttccatctccacaaccaccccacaaggcgggttctcctaggcccatcctgaggctgagggatgaggtgacttgtccaggccagggatttaggtctctgaccccctaaccacgtgcaagaggcacccccaacccagtaaacgcgtacagagagcctccctgggtgacgggcaaacgaggttagtgatgcattctccttttgcagagagtaaatggactaagagcaaagtacgacttcaagtttccgagtctcaccgcttagccccatcaaagtgtatttgttctccctttgttcacaaacatcactttaataaaacaccttcatattttagattttaacgctcattacatctttgagcttttaaaatgagatttccctgcgggatgcggggcaaggactgcacttctccatgcactttaatagccgcgctgtgcagaacccgggaaccggggaagccgcgagaaccgcgcgaagtcagagcaagtcaaaacgacctctacagcggcggcctggcccactgcgcaggcgccgctccagaccgcctagagcccaacctgccccattgtaggcgaacccacttctagaaggacagcgggagtggcgaatccctattcctcccgaagatgggtcaagccagactctgaccaatcagaaagcttctcttgtcaccgcttctgactgcttgacgtggaggcttctttatctcgggactctcaggcgcagcgggggcgggatataaagctggttgacgtcaattacaaccactcgtcaagcagactgaacttgaagaactgataactctacgaattgcatctcaagaaaaggctgttatcccagctctctactcccattggatttttgtgagaccttgagggtgggagcttttggcggcaaccaatcgagggtcagcgaggaggaggaggaggcggggcaggtgggctatggttgcttggagagtgcatccggcccggtacttgtgatcggaggagagccggatcgtccttccttgaaccctctgggtagggctgtgctgaggggctgggcggggagcacaggccgtgtccgctcgcttgcaccttttcagactgccgtgtcaggcctcgagccgggcccacctggagccctcccctgcccacccgcccccagcgcccgatatccgcccccggcccagaagggccgggctcggtcatccccagtcccgtcgcggccactgacccttgagatcagccctcccctccccaccttcccgtcccaggccagcccagggcccgaagcccacccactcgcgtctctagcagccgctcttgtcctctgggtacggctcgcgggagtgttggttaccatggtgaagctggcagccaaatgcatcctggcaggtgagtctgaaaacttgcgcttgaatacggtggtctctggagtccagagccttcataattcatccagagcttttgttcacctaaattgcctaccttttcctttctctctcccaaaggcgagttactgcaattactgatacagtaaattacgttaggcgtggaagaatgatcttccagggcacttcgcagctccagtggatttccccctgctccctgtcacatactctgagaccaccttcaccagttgaggtgactcgttaaaaaatcactagttacaactctggagaagcagacttgttaaaacaaaacaaaacaaacaaagcttaagcaaaccttgagtgcttcagctaaacatatactgtaccccaaagttaggcatcagtgactttggtagtctttactatgggatttttcccccgacctcaccccctctgataacggtgacctgagtgtagtgaccagagtttgcaaaaggcacttgtgtgttgtctttaagacccaaagttactgtgctgccccactccaagaagggcataaatgttgagtctcccaaaggcaggaatctttgttttgttgactgatacatcccaagcacccagaaca

SEQ ID NO: 3382 - DNA, 6000 bp, Homo sapiens
taagcgctgtgccagaggcttataagtgcaaacacattatgttgtttcacagcctgcaaaggaggcactattagcccggtttatagagggtggagatgacgtcagctgatgaggcgtggggccaggatctgaacccgacaggctgacttgagagtccctactttcaaaaaacaattttttttttgagacagtctcgctctgtcgcccaggctggagtgcaatggcgtgatctcggctcactgcaacctctgcctcccaggttcaagcaattctcctgcctcagcctcctgagtagctaggattataggcatgtgccacaactcccgactaatttttttttttttaattaagtagagacagggttttgcatgttggccaggctggtctcaaactcctgacctcaagtgatctgcctgccttggcgtcccaacgtgctgggattacactgcgcctggccaaattttcttttcttataaggacactggtcagattggattagggcctaccgtatatattttaatttacttatgccttttaaaactttatctccaaatacagtcacattctgagatttttaggcattaggacttcaacatacacattttaacattatgaaattccacccataacactatctatctatatgtattattttcagaaccatgtcagagtaaattgcaaacatgatgccttttacctctaaatactctagtgggccaggcacggtggctcacacctgtaatcccagctcttcaggaggccgaggcagacagatgacctgaggtcaggagttcaagactagcctggccaacatggtgaaacccccgtctctacaaaaatacaaaatttagccgggcatgatggtgggtgcctgtaatcccagctactcaggaggctgaggcaggagaatcacttgaacccaggaggcagaggttgcagtgagccaaggtcgcaccattgcactccagcctgggtgacagagcaagactccatctcaaaaaaataaataaataaataaataaataaatactccagtgtatatttcctaaaatcaaggacacattctcttctatgaccacaggacaagcattgaagccaggaagttgggcatccatgcagtaattacctcatctacaaactccgtggcaatttgccccttactggtgatattaactttgatcacttagcgaaggttgtgtctgccaaatttctccactgcagagttattatttttccttccataattaattatcatcttgtgggtaaataacttgaaactatgtaaatactttctcatcaagctttcatatccattggtgattcttgctgcaacccatgattactatggtggctgcctgatggtcatttcttttttttttttcttcctcttctttttttaatagagacaagatttcgccatattgcccaggctggtctcaaactccgggctcaagtgatcctcctgcctcggtctcccaaagtgctgagaatacaggtgcgagccaccatgcccagcctgagctcccacttttaaataggacattgcaccatggcccttgatcttgaccagaaagggagctatgtctatgggaagcagtccctgcagggtggataatgaggcactgacccccttgttctggcaggctggggatgggagtaaaggatctaggcagcatggtgtccaggagtgttgttcaggtccactgagaattcactcactagctgagcacctacagtgttccaggtgtggccccagctcttgagaagctcataaaaaagggagtagattgggaggctgaggcagaaggaaggcttgaggccaagggttcaagatcaacctatgcaatatggtgagacctccatctctgcaaaaaatagaaaaattatccaggcacagtgatgcacacttgtagtcccaactactcgggaggctgaggtgagaggatcgcttgagcccagaagttcaaggctgcagtgagctatgatcatgccactgcactccagcctgggcaacagggcaagaccctgttttgttttgttttggttttggttttaaagggggtggggggtagagaaaatagacaactcaccattgtgcagtttctaaaactgagaactttcctaccccaaaggttaacctaggtggctctttctgctatgcacatggagaggactgagcaattggtttttagagatccttttgagtgctagacaaagctgcctcaacatttggtcacttgggaaactagtgggccaatttgcataccaaacccacagcctgtgggagggaacggaaagaagccatagtgtctggtggaccaaggcacagaggcaggaaagcaagacaagggcgctgaaatcgaatttgctacatcaaggaaagtggggggctgggcgcggtggctcacgcgtgtaatcccagcactttgggaggccgaggcgggtggatcacgaggtcaggagatcgacaccacggtgaaaccccgtctctactaaaaatacaaaaaaaaaaaattaggagggcgcggtggcgggcgcctgtagtcccagctactcgggaggctgaggctggagaatggcgtgaacccgggaggtggagcttgcagtgagctgagatcgcgccactgcactccagcctggggcaacacagcgagactccggctcaaaaaaaaaaaaaaaaaaaggaaagtggggatccttactggtgatcagggtgccacatagaggcctacccatttggagaggccctatgccctccacagtggagtaagtgccatgatgtcggcttcacaggagggactgtgggagcgatggaatttcaggcagtgggaacatcatgagcaaaggaaagcaggggatgaacagcaacatccaccccgcacgtggcctccaaagccatctcttttgggtggggcttcccaccacggcgcacacccctcatgtttatgtggccctcctcccctggttgcgatgtacccccaaacatctgggccaggaatcattcagacctggataccaattccagtgcttgtacttcctagctgagtgaatttagaaagtcaccttcacctctctgagcctccagtcatgtattccttcaacatgtatttactgtgggcctactatgtgccaagcactactccaggcactgggcaggcagtggtgaacaagataagcctggccaggcgcagtggctcatgtctgcaatcccaacactttgggaggccgaggtgggtggcctgaggtcaggggttcaaaaccagcctggctgggcatggtgactcacctgtagtccagctactggggggctgaattccttgaacctgggaggcggaggttgcagtgagccaagattatgccactgcactccagcctgggcaacagagtgagactctgtctcaaaaaaaaaaaaagaaaaagaaaaagaagcaaggcctgccttcataaaacatacattctggttggggaagacagacaataaccagcactcacatacataaatgatgaaacaccctacagaagtattaagataatataagaacaaatttcaaggctgggtgcggtggcttgcgcctgtaatcccattactttgggaggccagcgtgggtggattgcctgagtccaggagtttgagaccagtttgggcaacatggcaaaaccctgtctctacaaaaaaaaaaaaaaaaaaaaaaaaaaaaaaatacaaaaaatgaacctagcatggtggtgtgtgcttatggtcccagctacttgggaggctaaggtgggagaatggctggagtccaggagaaggaggttgcagtgagccgagattgtgccactgcactccagcctgggtgacagagtgagaccctgtctcgaaaaaaaaaaaaaaattcagaggtgaagactgctttaaccagggtggtcaggaaatgtctctctgaggcagtgacatccgggctgacgtgaaagatgagaaagagtcaggcaagtgaacagaagaccagacagccagtgccaagggcctgtcgcaggaatgagcttggtatgtttgggggacagaaagaagggcactgtggccgaagagcagtggatgaggagagagtggccaaagaaggtgtgtaaacaacctgagctttgttttgagaagaacattggctggtatagaaagaaagactttggaggcaaagtagggagcctcggaggctgctgccattgtccgggtaagctgatggtgccgagaccaggtgccatgactggaggtggtgagaaatggtcctatgcaggagacctggagacaccgctagcttgagtcctgaggtggggaggaagggagagggagggatggagccaggctccaaggttttggcttgagcagctgagatggggtggcaagggagcagaggtagggctgacgatcaggagcgggtttttgggccgagtcctctgcagtgcccatctgacacccactggatgcgcagagtgggcagctggctatgagtctggaactcagagaagctgttcgctccggaaatacaaacctggggctcatagccatataaatgtcatttaaagccacgggactggatgagatcattaaggcagaaggtctaggtcgaaagaagagggccaggaccactacctgtaaaatgagccaatgacacctacacccacggggctctcgcgaggtgtcacgtgaacgcacccagcgagccctggaaccaggcagagaatcgcggcagccccgggggcggggcttccagggggcggggtcatacgggggcggggccgagggaccaagcggccgctcctggccggagggcggccgggtcggtgacgtcaccgcatgactgggtttttatgaatgaaaggaatcctgtgagtgagtaattccgggaagctcgccttacaactccgcgcggcctcggccccctgcgccgcccgccccacaacaaaactcagcgcagcgctcccgggcgcccggttcagagcgacctgcggctcagagcggaggggagactgaccggagcgcggatcgggacagcggccgggacagcggcgagacgcgcgtgtgtgagcgcgccggaccaagcgggcccagaagcgggtgaggaacgcgggaccaggaggacggtgcgcgggaccccaaggcggcagggtttctgcgtcccgggatgcgcctggggtgggcgcccgggcccgatccgtcggggctcccggagctccatcgcccggacggctcggggcggggagaagggagcggccgtcccggggacgccgaggacggggccgaggccagctcgggggagtgggggtggagacggggccccttcccggggcgcgggcgggtaggcggcggcgccgggaggaaggggcagcgcaggccggcgatctccgcgtccgcccggcgggggcgggggcgctgtgctcctacgtgactcggtgggaacaggccctggcccggcgcccgcgggcggtgcgtgcgcggtttgtttacgtccgagggcgggcgtgtgttccctggcgggcggcctgggtatcctgcccggtgcgtgcgtgcgctgtgtacctcgggggcgtgtgtgcgtgtgttgtgcttgtgtgtgcgtgtccgcgcgcgcgctccctggggcctgtacaccagcagtgtgtacctcggagagggcgtgccctgggccggccaccggagtaaacgcggaacaaggacccgagcgaaggaagcggacccgtgcgtcttcgcacggggtctgggaattctggcccgggccgccccagtcctactacccggggctgtccgtccccggctctccccggagtttcccagggcctccgccacgtgaccccagtgtttgtctcccgcccagagcccgcgcccgcagccacagggtggggcaaggtatcaaagaccccacccagctgagctaggagtgagggatgtgagccacccccgcttggcaccccggtggatctggtaacaaagtgagttggagcccaggttcttgtccccagattttgggg

SEQ ID NO: 3383 - DNA, 6000 bp, Homo sapiens
tacgtttcggcttggaacccggcttggtgacaagctgggtgatggcgtcagagactctgaccatccacccttccccagtgcctgctccctgccaggtcttgagatgggtggcctcaagcacccagagctgactcagcctctccctgtctggtggagagacagcaaggaaatacaacccattacacacaggggtgggggtccctaacaagtcctagggatcagggagggcttcctggaggaggagatgtctgcacccagggccgaaggatgagtaggagtctgccaaacaaagtagaggggagtgaggggagagaaatatcatggggtgggaggtggctcagaggcaagaaagcgcgggtgggaggaagtgaaagaaattctgtgtggctggagcacagagtggaggtggcagtggtgggaaatgggcgtggggctggacacacagggcctggggtgctgggagggtgggtctggactccatccttaggatagtagggaaccatggaaggttttttttttgtttgcttgtttgtttttgtgtttgtttttgagatggagtatcactctgtcgcccaggctggagtgcagtgtcgcgatctcggctcactgcatgcttcacctcccgggttcacgccattctcctgcctcagcctcctgatagctgggactacaggtgcctgccaccacacccggctaattttttgtattttttagtagagacggggtttcaccatgttagccaggatggtctcaatctccttaccttgtgatccgcccgcctcagcctcctaaagtgctgggattataggcatgagccaccttgcccagccgaaccatggaaggctttaatctggctggtggcatggtcagattcgcgtggtgcaaagattgtccagctgctgtgtgggaatgagctgagaccagcagggaggtgtgctgggacctccccaggtgtgtgtagggtggtgagggtgaccacttaagaggcctgcattgggttgggcgtggtggctcacacctgtaatcccggcacttcaggaggccgaggcaggtggatcacctgaggttaggagttcgagaccagcctgaccaatatggtgaaactctgtctctactaaaaatacaaaaattagctgggcgtggtggtaggcgcctgtagtcccagctattcaggaggctgaggcagagctaatcgcttgaacccaggaggcggaggttgcagtgagctgagatcctgtcactgcactccagcctgggcgacagagcgagactccatctcaaaaaaaaaaaaaaaaaaaaaagggaaaaaaaaaaggcctgcattgaaaggtaggatcggtgaggttgacatgtaaacgtctccagatagtatctgaaaggtcagggtagccagcagatctcatatgacttttccaggtaggatgggagtgcacagaggcccccaaggagagctaggtgggcagccagggcctgagccccctaggatttggagtgctaggcagggaaactgaggccagagcccaggctaagccggcatgttcagcagtggggggtcgcagctcaggggtcaccccatgaagccactggtcttcaccgtggatccgcacaggggtctaaagctgcctgggtcctgacctggcactctgggtccacccagctacccccagcgaaacctgggtgacccctaagactctcctgcttaagggccacagtggctgcccctgtcaggggatctctgcaagcgccaacttccttctgtcccactccttccttccctgtgagctgccagaccccctgactgtgtgggctgggaggagctggggagtttcctgagaagccctggactgtccccaccttggcctgagtcacactgagaactcagcaaggattccttgagtatctgcgaggtgccaggcgcggttctaggcatgggggaggccgcggtgaatcaggtataagttctgccctcatggagctggcattctaatcggggggttgggagggacagacactgaacaaataaccaccatatatgtgagtgatgacaattacacatggggaaacctgaggtggggaagggacacagggagtgtgtgtgtgtgtgtgtgtgtgtgtgtgtgtgtgtgtccgtgtgtgtatcaggggttgcaaattctaaactgagtgaacatgagatttgaagagacctcaggaggtgatggagcaaactttgtggatatctagggaacaaggatgccaacagaggccatgcgtcgtggctcatgcctataatcccaacactttgggaggcggaggcaggcggatcgcttgagccaaggagttcaagaccagcctgggcaacatgatgaaactctgtctgtacaaaaagtacaaaaattggccaggtgtggtggcatgcacctatagttccagctactagggaggctgaggtaggaggaccacttgagcctgggagtttgaggctgcaatgagctgtgatcgtgtcactgcactccagcctgtaacggagtgagtgagaccctgtataaaaaacaaaaacaaaaacaaaaacgccagcagagggaccagccagtgcaaaggccctggagaggagcgtgcatcctgtgttgaggaagggcgggtgtggctgaggcaggggaaacaaaaggaagccaagtagggctgaggttggagaagggatgctggggagcactttcttttttttttttttttcagacggagtctcactctcgcccaggctggagtgcagtggcacaatcttggctcactgcaacctccgcctcccgggttcaagcgattcttttgtctcagcctcccaagtagctgggactacaggcacgtgccaccacgcccggctaattttcgtatttttagtagagacggggtttcaccatgttggccaggctggtctcgatctcctgacctcatgatccacccgccttggcctcccaaagtgctgggattacaggcgtgagccaccgcgcccggccactggggatcactttctgcagcactttgtgggccatggtgacaactctggctttactccagtgagccgtgggaaggtcctgagagaggtgtgacatgagctgacttaacacagctacctgtgtcacccagggggaaagtgaggcacagaaagagtggctgacctatcagaaccacacaactagagagcgagaccacccccaaaaggccccaggtgtgtctggcaccaaggtccatgtgctttccatttctgcaccttgtccctgggagacaccccggtcctgccagaatgtgtcagaggctgagccaacccgtgaggtcaaccctgtagacagctcaaggaaccaggacttggatctggcttttgccctctgctgtccacaaaactgggtgatgctctttccgatacggtacgtgtttataggatgctacagctcagatcacaaagcatcttcctttgttttctttttatttatttattttttttgagatggagtctcactctgtcacccaggctcccaggctggagtgcagtggcgcaatctcggctcactgtaacctccacctcccaggtttaagcaattctcctgcctcagcctctcaaatagctgggactacaggcatgcaccaccacgcctgggctaatttttgtgtttttggtagagacagggttttgccatgttggccaggctggtcttgaactcctgaactgaggtgatctgcccgtctcagcctcctaaagtgctgggattacaggcgtgagccaccgcgcccagcctatcttcctttattttccttggcttcttatcactgccccctccccttggagacagatgagaaaactcaggttctcatggcggagaacctgagaggattggcaaagtagatcctatcagctagagacagagaggactgctgctttaaaggggactttgggagatggtccccttctccagcccagagcaatgaccactgaccctccacgagttttattcacctttttctccccattaccaagtacatgtttggcaaagagctcaataaatagttgttgaaggagcatgtggctgtcaggcctgtgggagggaggattaggagatgagaggccctcattggtctagggatggctgccccatctgcctagggcatgctgagttagtatggggcagcccccaggaggttgggaaaactttcccaaaacagaggtctagatgaaggaggcctggggagagaggggactggctgatgttgtatcttacggggtgctggatgggctttgtgtaaaggcatttactggtgcacatatgctgtgtgtacttttctgtatgtaggttatactttaagaaaagttctgaaaaattggctgggcacagtggctcacacctgtccagcactttgggaggctgaggcgggtggatcacctgaggtcagtagttcaaaaccagcctggccaacatggcgaaaccctgtctctaaaaataaaaataaactaaaaatacaaaaaattagctgggcgtggtgacaggcacctgtaatcccagctacttgggaggctgaggcaggagaatcccttgaacacgggaggcggaggttgcagtgagccaagatcgcgcccctgcactccagcctgggtgacagagtgagactctgtctcaaaaaaaaaaaaaaaaaaaaaaaaagaaagaaagaaaaagagaaagaaaagttctgaaaaatcaaatcaaaggcacatgtccaagccccatgtggaagaatggtcaggagaggcacatctattcatttggtgcacacttactgagccatctactatataccaggcactgatttaggcatattgatgccgtggtgagacagggaaggcctctgccttcattggcttccgttttggtggaggaggagtgggaaggagaaacaaatcatagatgaggaaccaagcatgagaaatgcagaagaggtgactgttacaagggttaataggcggggttatgtgatgtgacacagaggcgtttagccagaatggtcaaagaggacctcctgaggaggtgacattgggcaaagacctaaatgatgaggagtcaccatggggctagaacagtaaagagcacagcctgtgcacagctcccgcggctggaaggagccattcaaggaggcctgtggaccaatgtggagagaggaaggtggcaggtatgaatcagttctaagatagcagaggccttgaatggcaaggtagtgagtttggattttattctaaatgggaaaccaaaaacaaaacagtgactttgacctcctttctaccctaggtctgcagcccagagggcaccttctgcaaacatgtctgtggatcccctatccagcaaagctctaaaggtgaggaggcagcctctgtcaacccagtgaagccctccctccctgcccatgcagagcctcctcatcccaacttccccttctttcctggaatcccctgggtggctcagcaggcaccaggccttcatgatgccaaagggaagggccacagccatgggctgggaccaggaggcctgggctctggtcacaggctgcatgtccctggggtaggtcacttccctctccaggcctccttccccatcgggtcaatgtcccctggggcattcaaaggtgctttccgacctgggtttctctggctgagtccagggcttggcgctaggttagaattcaggctgagccccggggtggcctccttttgtgtcccgatcctagtctggcccggtttccccttcccggattcctgctccccttcggggttttggatcaagtccacccaccacctcggcggctaaggcggtgaaagaggaacaccgcgggtggagcgggggggcccgtccccagtcccctggacctcagtttcctcatgcccgcagatcaagcgagagctgagcgagaacacgccgcacctgtcggacgaggcgctgatggggctgtcggtgcgcgagctgaaccggcatctgcgcgggctctccgccgaggaggtgacac

SEQ ID NO: 3384 - DNA, 6000 bp, Homo sapiens
gccaggactggggtctgcagggccgagagggcctccactttggttcccagaccccggcatcttgctttggcacatacgcaggtcctggagatggcttccatccccacagggcactccttgtcaggctagaagcttctagaagtgccccctggtcaagcccacccctggctttgctgtaaacgcgtcccttggtcgaatgcaacagacagtgggcgggatccgcaggatgagacgttctgtgagccagcggttctcaacaggcagctgttgtgtcctccaggggacaggggaccgcctctggaggtgctgtgggttgtcacgacctggtgaggagtgcttctgccagggcacaggacaccctgccacagaggatggcccccaccagaggacaagccagctcccgctgccaccaaggcagacagatgctcacagcagtccctggacaggggcctggacctcagccaaggcatgttagacagggaggcggccatggtgtgaacgtgggtctgctctgggaacacgaatcatggggtggggtccgcgcaggccgggaccacctatgcgtgctgcgtcctgctgtcctggatgtaccacatccccctgaagatgaccgttgcctgctcaacctcatgacagggccggtctaatagccagtgccagcgggcaaggcagagacacagccatggggcatcccatggccaggctgtgcatctccacaggggcccagaaccacagcaggagtcctcgacgcaggcacacactgaggatggcatgggcctcctctgcactgtgtttggggagggtcttccacaggcacttgaccttaacccctcctttaccacccgtgcctttggtctgcagagtcagatcgtaagtagcagccgggacaccggagttgggcttggacggcggtggagctggtcctgctctgtgcctgttcagagctgtccttttgtgtcccccagtattgggttggaacagagtccccaaatgtggaacatactgttccagctcccagaagccttccaggtgccgtgtgtcctggcgggggctgcaagaggcagccacttatctgtcctctgctttggaggggattttctcgctcaggagggcccagtgtgctcaccatgtcttggtcatctggtctcattagcacagcaccatcgatagagggggccagtgtgacatcctggggacattcattcagctggtgccagtctctggattattgtgagagagggcaggaacgttaccatagccctggggaggaactgagtgtttcctgttttgagttccaaggcagtgtgactgatcttcctgccagacaggagatggagaagaatgcacacccagcagtggcctcactgcacacctggggctggggagccttctctagcaaaggcgccacatctagctgggttgtttttgcaacagtccactctcctccaggacccacccacctgccttttgcagtggtcagattggtggaataaaaggagatccttggccgggcatggtggctcacgccactgtattcctagcactttgggaggccaaggtaggtggatcacctgaggtcaggagttccagaccaggaacatggcaaaaccccatctctactaaaaatacaaaaattagccaggcacggcggcaggcacctgtaatcccatcaactcaggaggctgaggcaagagaaccactgggactcgagaggcggaggctgcagtgagccgagatcgctctgctgcactccagtctgggtgacagagcgagactccgtctcaaaaaaaaaaaaaaaaggagatccttgcattcttttagatctttagatgtgtccctagtttcccccagttttgatttactattttgggtggggatggtcacagatttgcactggacttacccattatgatggccaaggaaatggtgtctaccatcaagaatgtcagctccatccgtcctgtgactggggaaatgacccactggatgaatgtgcagactcgaggctggtggatcagacctggcccgaattccactgcttccctggctcctgtcagcccctcgctctaacgggagccatgaggatgcttcaggccttcagatgccagcatcactcaaaccctgtgtccagcacttctgaagatgtgtgcgtatttccgttgcactgtgtctggttaccgaggtcggcggccacaggccgtctggtggtggtggcgggcgggggcgggggcagggggccagaatcatcatggtgtggatttgccttggcgttgcacatcttcctcttagggactcagccttcactttagtgagatttctctgggtcagaaacccactcaggtctagaaactgggcagcgtcatgactttttatttatttatttatttatttatttttatttatttgagatggagtctggctctgtcacccaggctggagtgcagtggcgcgatctcggctcactgcaagctccacctcccgggttcacactactctcctgcctcagcctcccgagtagctgggactacaggcgcctgccaccacgcccggctaattttttgcatttttagtagagacgggggtctcgccgtgttagccaggatggtctcgatctcctgacctcgtgatccacccgcctcggcctcccaaagtgctgggattacaggtgtgagacacagcacccggccctatttatgtatttttgagacagaatctcactctgtagcccaggctgacagtgcagtggcgcgatctcggctcactgcagcctctgcctcccggattcaagtgattctcctgcctcagcctcccgagtagctgggattacaggcatgcaccaccacgcccggctaatttttgtatttttagtagagatgggggtttcaccacattggtcaggctggtcttgaactcctgacctcgtgatccgcccacctcggcttcctaaagtgctgggattacaggcgtgagccaccacgcccggccttatttatctattttcaagaaagagtctctctgtgttgcccaggctagagtgcggtggtgtgatctcaggtcactgcaacctctgtctcccaggtttaagcaattctcctgcctcagcctcccgagtagctgagattacaggcacctgccaccacgcccagctaactgttgtatttttagtagagatggggtttcactatgttgagcaggctgctcttgaactcccgacctcaaagtgatccacctgccttggcctcgcagagtgctgggattacaggcttgagccaccacgaccggccctgactttttattggagcgagtacccttgacctccgcatcacacaaccctaatatattttgctccaacaagctgagcagtctcttgtgggctgcctgtccctctcccaggaacatgctgttctatcagccacctccacaaccccacgcagctctgaccctgggcccgctccagccctgcaactcattagagagctgccttcacagccactgatggtcaaatgctgctgcctggccatcacccccgtccctgtcagccagtccagtgctgtgaccgtcccctgctctcagttccagaggacagctgggatctgtggtgccacatgactttcagcccctgtctgcggtggctgttctgacattcacccctcctcacgtgtgtcccacactccaggagcctctgggccgtgaaacagagcagcagaggacaccgcctcctggggtcctagtcctcagaaaagggcccacaacccgtcagctctccgccgtccaccacatgcagcttatctggctgggcacggcttcgggtcccgggctccttcaggctgtggcccctttgtcactgggccagcacatccccaccaggatacactgcaacttaatcccaggagggtctcgggcaggtcctgggtaatcccaggagggtctcgggcaggtcctggggagccggggcagggggccggcctctcccacggaggaggcacggtttggagacatcctgtttcttcccagccagcaccgaggccggggcacagcagacccccggggatggggtcacctattggtggcccctctggtcactgagtctgtgcgtgttctcctggcctctccatgcagccttctgttgtttttccagagcttcaggggcgggcaccagcagccccccgaggacactgttctcaaggttgtgccccctggactctcaccccaggctcacccaccccaagagtgcaggccccttcccgtcgcgtccaccgccagtggtgcccgctggacagagtgcctttgcctgtacacctccctggcgctgcctgtctgtggctggctccagagtggcaggcggtcttggcgcctcagccatgtcctcagctgacctgggggctgggtgaggtgaggcaccctgagacttcttcagcgtgctgagctgtgaggagggggctgggcctttggccaccacaggatgactcaaagggtgtggccttcagtggggtgctctcctcagcctgcccctgctgctccctcagccccccggtccggctctgtcccttttcagactcccagaccccgcaggcctggggtggggactctgcctgccacctgggaagggtggtcgtcagtggggtgactcagggtggagggccctggcccagtggccctgccctcctcctcatatgcccgtgaccagcacgcgggtgtggactgagcctgtgccaggtgggccctgggggtcggggggcagaagggcccaggtcctgcaggggagtggggggcggtgctggggcccagaaaggcttactgtaatgtggctggtgggggccaccggctctcaggccacacactccccctccaggcccagcgcccctccccgcctccctggggctgcggtcttcccaaaccccaagccggctgctctgcaccagtgaggggccgggagtggcctggcctgaggaggctgcagggcacccacctctccagagaccccctccacccactcccgggggatccttctggagagaccgttcccagccgttgagcagggtccgctctcccccctaccccggtctggcctttgggaggatccccccagagccagggaggggtatctggcccctcacccctcaaacggcagtccagggccagcgtctttctgcgctcacccacctgcctgcgacggggctctctgggccacagggcggccaccactcgagggtcacccgcaagcctcggagtccctgctcggagcgggggctggtggtcgcggtgggggtggggagcgggcacccactggggattcaccccacccgggcccccctccagcctctgcccggcgcccgggtcttcggtccgccctttgcagaggaaggaccccgccctgcgcagagcgggcttgggggacccgggcgggcggcggggcgcggggtggggcgcggggggcggtgttgctcccgcgggcgggaagggcggggagcggccctgccgggaagggggcggtgccggaagcgtcagctgggctttccccggcgggcgggggcggggagcagatgggggcgctacgaggaggtggggggaggggacgcaatggaggtgccgggggtgcgctgaagagcgagactggggcagggggatgagggtctgggaaggagcaggtgttggggacggagggtgggggcggggagtgggggcgcggggaggagcagggtgggggcggaggggaggatgggggtccgggaggagcaggggcggggacggaggggagggtgggggtccgggaggagcaggagtggaggcggaggggagggtggggatgtgggaggagcaggggtggggcaaaggggagggtggggggttcaggatgagcaggggttggggcggaggggagggtgtggggggtccaggaggagcaggggtaggggcggaggggagcctgggggtctgggagaaggaggggtgcggggtgtggggcctggggtgagcaggggtgggggcggaggggagggt

SEQ ID NO: 3385 - DNA, 6000 bp, Homo sapiens
tgggacacacaggccacgcagctccggctcaggctgagtcgtggtctgggtggtggcaaggccacagctctccaggttggcagatccagtgaggctgctgcgctgaagccacagttcccaccatcactgcagcccccgggcgaccaacagaggcagcccccctccagctgggtctcagcgtctgctccactgaggacagggttcaggacgggacactcccacagcatcttctatgtttgtgcaggactctttctgcagagtccaagtgacggatgccaggcggccatgctcactggggcccaggccccgggtggcttatggaatataaatggtctgtgctggtagcaggtgggggtaacctggtgggaacagctgcctctctaacacaggccaggcctcagctgaggggtaaaactggtgtcctccaggcagggacagaggctggaagaggcagccaaagcggctgggcctgagttcatgcaggtcgcccacacccccagctcccactgactaggcgccccactccaccccaggcccaaccctgggatgcctttggtgaaacgttgcaaaatcctggcacagctctgctggctcctatctgcagcgggtgagaggctgcgacgaccgagagtggaggccagaggggaaagggcctctccccacaacaggcatcgcctgcccccgccactgccctgggagcacccagtcttggccgctgcagcctgtgtgggctggaagacgaggtgcagcaggtgcccctcccaagctgggaacagctgggggagtccggtctgcggggagatgacgcagagctccagcccagggcctggggcggccgtactgggacattgattctgggtggcagcaggtgctggtgggggccaggcccatgggctggggaggagggcctgtaccctggtggcccaggggagccacaaagggtccaaggcaggactgtgaggggctcacagtgggaaaaagaccatggtggccaagggggctcacactggggcctgggatgagggtgggagcgggcaggtggatcggcaggagggaggtttgggaatgggataggcctcggtaagggcttgggggcaggtgaggggacgccccctcctcaggcatggcctgggttggaagggcatcacatacaggcaggacaaggccgggcgaccctgtgggataggcacggggcaactggaaacaggctgattaaggaggccttggtcattggcttggagactgggggtggacaggatccccagggaaggagggaagaggggcgggatgggccggcgggaggcaggacagtggggacacagcctggggagcaggaatgggggtgcccgtggagcatgaaccctgttaacactcccctctgcaatgccccagctttgaggaggtgtctgtaagtgtgattctatgtgtgagtgtttgtgaattggtgcgtgtgagcagtgttagcatgcatgtgtgtgtgggagactgtaagtggccccagccaccttccattccacctcctcatcctcccgaatccaggcaggccagcctggcttgggtcaccatggcaagagcgtgaccctccttccagcaggccagggtacctggggggactcgccgtgtccactgcggagcaggggcggctgtttccaggtcaagcagtcgggatgggatggctcaggggctgggctggggactggggtgtgcagaccctctgacaagctctgctccactcccctgtccctgccctgggaaacacctgctccaaggacaggcagaggccctggccctggagcaaggctgcccctctcagcaggatagcccaagggaaggaggcacccatgccatgccggcctgagcttcaggtggggtggggggtgggaggacacaggaaggggctgggctgggccctctgcagtcagtacccaggtggagcggctcccgcaccaagaccccgccacgcccacctcctggctcacctcctatctgcaggagcggccccagctctggcccatgggctgggcctgcccatggggcccactggatgggccatccacgaaccaggaaaaaacaggcagggctggtgtcctgcactgctggggacttggccggggggtggggtgttgatgggacctgtgggaaaggggtggcccagggcagagggtgagaggccctgaggcctctcagatttttcttgccctgtatgcagagcgcagatgctccacaactgggatgacccatatctgtttgccaagctgaggaacaggctgggctgtgcccaatggcaggggaggggcacgacaaggtgagcagggttatctggcgttactggggaccccagcactccaactagatcagatgtggtggcctgggccagacacagtctaaaagaggcctcaatgtcaaacagtcccgggggagagggaagggctggggaccatgctgaccccgcacggagctcaccgtcagtgcaagggtcctcgctgcacacacaagcacgtacaacagtaaatcgacaacatacaccagtgtctggacagacgtggttacaaagatgtcacactttagggaaagggctgcctctggccctgccctgccctccactccagggccaggctgctggacccccacgcaggagccctccggaggctttcaccgaggcctgtgtggcaggaatcccatctggaggcctggaggaatctccagcacacctggagtgagcgggaggagggccgtggaggacaggcacaccgtgctttctgaaggagcaagtcctcctggatcttagttaagggacacttgagggtttcagagcaagacccggggcctagggagagccagggtggggtgcctgcccgccagagcctggtcttctacggccaggatgactcagggaagactggcctggagcctgacatgtcagactcaaggaagactagcctgacatgtcaggctgaggaccctcgcccctccagactgacatgaactcaactgtagtggtcaccccctagacctaccgtgctctccagcatctctgcccacctctgctgcgtgtccagcacagaagagggcagccccactggaccctcaggtaggtccccgggaggacccacatgggcagcagcccctcctccttcgcaggtgctgtgtggatactgctggaggggaaggcttggggtgtcatcctaccagggatctgatctcgggggagccctgtgctgggtgcgtggtgggtgggggaaggctaacccaccagccccaaccctgccctcgtactgcgggagagaactggacagagctctgggaagcagcggctggagggggaggggcctggggacaaacaatgtcgcgttggctttgatcctcaggacccaagggacaggaagagatgagctaggcaagagaggagcccccaggagcacaggcatgggcccaggcagcgggcgacgaagcgagccccagagggcgcccagatggcaggtgggcctgggccagtcccgagagccacagcctcagaagagctgaacaggggagtggtgtgtgagtggtcagcgcagggacagcgatggtgactgtatagagatgagaggtcagacttaggggaggctggaagctccgaggcaagtgtgtgtgcgcgctgacggtcacaccagaccgcccggggatgtctgccacaatatttagacccctgagggccactgagaacgcctggcagtgccaagaggaccagcccctgggccctctggcccccaactctcaacccactagccctggggctggcgggtggccactcacgtcctggaaccctgagctgctctcaggccggtgactttggaccaatgttggcaatctgtgggtttgcaccaaaccacacaggtgagtcagacttctgtacagagagcagggaaggggcacgacagggtgaagtccagaccagggcaatgtgtaccccggctgttcagcctttgagtgcggctgtcgcagcaatcaaggtgggctccctggtggaggtggacagcagctgctggagagcccggagggcagccaggaccgtgtcagacggcaggagtcgggcggggccactccaggcaccggccagcagggcagaggtaccagggagggccctcgggctgcgggcgtgaggtcagagcccagggtgaggaggaagcatctccagccaggtgcgctctcggcccccgccggggctgcgaggctgggggcgctgccgctgcgagggcttccagaggagccggcgctacctccccgcgcgcccggccacgtgcgcgacgggatgcgcagacagccggggacgcagactggcggcgtgtgtcacctcgaggccgcgggacaagcgcaggtcgcctcccgcactcccacacccccaggaaccctgctcggggccggcgggtgaccttcctaggcactgctgggggcggagccaggaaacggctcgccccgccattggctggggcgccggatttctttaaaaactccggcttccattggctcgtgcagtccctcctcgttctgcccgaggcgccacggccgccacccgcgcgggcactgcgcctgcgcggagtgagagcgtgagcgcggagagcggaccgacgcgacacgccgtgcgcctccgcggctgcgctacgaaaacgagtcccggagcggccccgcgcccgccgcacccggccctcgcccgcccgaagacaggcgccaagctgccccgccgtctccccagctagcgcccggccgccgccgcctcgcgggccccgggcggaagggggcggggtcccgattcgccccgcccccgcggagggatacgcggcgccgcggcccaaaacccccgggcgaggcggccggggcgggtgaggcgctccgcctgctgcgcgtctacgcggtccccgcgggccttccgggcccactgcgccgcgcggaccgcctcgggctcggacggccggtgtccccggcgcgccgctcgcccggatcggccgcggcttcggcgcctggggctcggggctccggggaggccgtcgcccgcgatgctgctctccaagttcggctccctggcgcacctctgcgggcccggcggcgtggaccacctcccggtgaagatcctgcagccaggtacgcgcggggccggcggggccggggccggggccagggcggggaccgggggcgccccgggccgcaccaaccccgcccgcgcctccctgcagccaaggcggacaaggagagcttcgagaaggcgtaccaggtgggcgccgtgctgggtagcggcggcttcggcacggtctacgcgggtagccgcatcgccgacgggctcccggtgagtcggaccgccgggcgggcccgggtttctcgcgcgccttgcgcctcgcttggcccggcctgacccccgcgtctccgcaggtggctgtgaagcacgtggtgaaggagcgggtgaccgagtggggcagcctggtaagttggggcacgggcggcggcggcggcggggggcgggcgcggggcttttgctgaccgccgtgtcccccagggcggcgcgaccgtgcccctggaggtggtgctgctgcgcaaggtgggcgcggcgggcggcgcgcgcggcgtcatccgcctgctggactggttcgagcggcccgacggcttcctgctggtgctggagcggcccgagccggcgcaggacctcttcgactttatcacggagcgcggcgccctggacgagccgctggcgcgccgcttcttcgcgcaggtgctggccgccgtgcgccactgccacagctgcggggtcgtgcaccgcgacattaaggacgaaaatctgcttgtggacctgcgctccggagagctcaagctcatcgacttcggttcgggtgcgctgctcaaggacacggtctacaccgacttcgacggtgagcgcgggcgcggggcagggaacgttccgggggccttgccggcgggttaacgcctgcaggggcggcacatggaggggctgatgactgttgggcggccgcg

SEQ ID NO: 3386 - DNA, 6000 bp, Homo sapiens
agaagcatctgggtcacagctatattagagctacctgtgttcccctgtcactgacattaaaacaaaaatgtccaatacgatccttcacagcgtgggagaggggaagatgaaggatggaaaggccaggcataaaaggatttcagaatttccgtccataaggaagtggctttgcgcactgtctgttactgcgtgcaaggtgaaatttgaagaatgaaaacgtgcagtaacaagggctcctttgtccaactcacctctccagataccaagtttcagacatgttgcattttaattgaaaggttgatataattttttttaaagaacacttgcggtgtttgaagtgacaaaggctgctgtgaccaaaaagcagggaaagggaatttttttttaaaaaagcaaacaacaacaacaaaaaccccacagaaaagcaaacaacaaacaaacaaaaaacagaggaagaagtcaaacaccctgggctgtgactacttccaggaaggggctacaagaggcagttggaaattctatttgctttgcaactgtgggttttctggcctgcttcctttctaaagtatattactctgcttttggttcatgaagttatccatttctgttttctggaacagctatgtattttctttatctatcatctatctatctgtttaccatctatcttttctgcctttcgctatcaagagcttgggtcaagcaggatagaattccagtgtatgttcactctaccatttaaaacaagagctcttgtaggcattctccatcacatcataaacctgagctttctaaaacagagtgtggcaaactaccatgcatggaccatgtctgacacagtctgcgtttgtaagtaaagttgtaatgggacacagccaatacatgtgttacataatgtctctggctactttcatggtataatggaagagctgagtcattgagagagagaccatatggcttggaaaacttgaaatatttaacatttagccccttgcagaaaatatttgctgactcttgttttaaaagatctctgtttagaatgctacctattgccttctggatagaatcacaactctttaccacaatcgacacagcttcagccctgcttctatatccagcctcatctatttctgctcctcctccttattttccttctggacatgctgatggattgtcagcttcccagatgtgcgagaatctctcctcccttcccaacattctcacaatctccctctgcctctcaagaacttcctgtcccatctctcatgacaaatcctttcttcattctttaagatgcagccccttggctctttccttaaggatgtctgtctggctctattttgggtgacgtgctccttctgcatctcccagagccagccggtgtgtgtcagctacaacatttctttgcatctctgtgtcatatatcaccaaatctgcctaagcttgcatgagtcaccgcatgacaacttcagactccaccagcattgtccccactaaccacaaggcttagacattcgtccagtatgctcggggttgtggggtggtagcagtaaccagctggtgaccatcatttcttacatcagaatcaaatctgtagatctctgccattcataagtatttggagtttaaaattagcataaagattttccttaaaataagaacaaatggcttgagtaggcttttggaacgtaggatgtttccactggttcatgtctgtgttcagtattcccacatgaatctaaacacgactctgctcttagtagctgtgtgaccctgggacagtcactcagtctccctcagctaaattttgttgtgtgagtaatgaggagagagttgtgatttgtatttagtgaataataacaaacaaaaggcatttagctttctggaacctggtatgtagtagaacctcatgaaaatactagctctgttgataaaactagactgaaaaaagctttcaaagtcaacaacagtatgaggcagtgaaggacgtagaggagaagctgctgctgcagcctgtagctcctgcaagcccgttttgtccatgatttagcaggaacgcattacctttccatgaggacactgcccacagaaaccaaggccattctttgaagacaaacatgtcttaatagcctttacattatgtaatagtgtaatacaaataataatttattattagtaataatgtgaaattatttacagtaccataaccctaaccataacccctaatcctaaccctaaccctaaccctaacccctaacccctaaccctaaccaacccctaaccccaacccctaaccctaaaccctaaccctaaaccctaaccctaacccctgaccttgaccctaaccctaacccctaaccatgactctgaccctgaccctaaccctgaccctaccctaaccctaacccctaaccctcaccccccaccctcaccatcaccctaacccaaccctaacccaacgactgtaagccgtttacaggaaactcaagccaaaacactacttgtttccaacgttttgtttgcagaggatttacaaattacactccaaaacaagatagccacagagcatactacttctcctctgaagtcgctctgagggcctccgcatcagtcctagaattggaagattggtggacaagaactgggatgttgatggggcactgaatatttgctggacaccaacctcctgttacctaaccttacagagggcccagatctcacctgcccaaatcagacattttaacacacacacctctcaacagcaggacttacagacacaaaactctgaggtaaaggattgtctcaactccctggtgtctcaacgaactaaaacactgcctagcgcaggtgcaccatcaaccttattcactaaatacacctctgtatatattcttcatctttgattgtggaaatgatataatcaacataaaaatgttttatagattggactaaagacctttgaggtctcttcacaggatcctatctggcggacccccaaatctgccaacacagaggtcatccgtaaacacgtgcaggacagaggccagacaaaaccatctctctcagcctcaaagtggcctggcagtcacatgtggggtctggcctgtatgaggaagtcaggctttcggctccaggcaccctactgcaccgcaaaaccaagttctgcctaagaaacaaaaaacagcctgctcactctccctaatatcccaggtggtaacctaagagcattatctgctagacacccctcctcctccaccctccatgtccaagctatcaccaaggtcctagcaatcttacctcctaaatgtctcccaaatccacttctctcccttcactgtccaggccaccagcatgacttctgcatgtgtgtagcagcctccgcgcaggacgtaaagatgcaaatctagtcgtaggctctctgaaaggaaaattttggggacccaaaattactaagctaaaggaaaagtcaagctgggaactgctcagggcaaacctgcctccctttctattccaagtcacctatctcctcactaagataggtgcatatctgattccctgctttggagaggctaatcagaaactcaaaacaatgcaacctttgtctctcacctacctgtgaccttggaagccccctccctgcttccagttgtccccagctttctggatggaagcaacgtacttcttacatatattgattgatgtctcatgtctccctaaaaccaagctgtgccctgaccaccttgggcacatgtcgtcaagacctcctgaggctgtgtcacgggtgcacctctttctaaattacctgaaaccatctcagatagggttcacacatccctttcccaaaccctcccaggagcccctcgtgggcgcccaggtcctgcgtgctgttgtggcccaggctcacctggagcaactcgactcttcgttacagcctcgtgaacctttcagttcctaaagctgtctagcctgtgaaaggaaaatgaatctgggggccccaaaatcactaagctaaagggaaaaaagctgggaactgcttagggcaaacctgcctccccatctattcaaagtcacccctctgctcactgagataggttaatatgtgatagcctcctttgcggaggctattcagaaacccgaaagaatacaacagtttgtctctcacctacctgtgacctggaagccccctccctgcttcgagttgtcccgcctttcccgagggaaccaacgttcatcttacatatattgatgtctcctgtctccctaacatgtataaaagcaagctgtgtcccggccacctttggcacatgtcaagacctcctgaggctgtgtcacgggcgtgcgtcctcaaccttggcaaaataaactttctaaattgactgagaccgtctcacatattcgaggttcacaagcccatgcatggggacgtcccctggggtagcgcccctcctccactgagctcactcgcttcccccttgtgtgttttcttcagaagaaatttcgcagctacttggtccacacctgtctgccccacaggaacctctcttctccacaggcacatgggcggcgtacctgctgggctgtgtggagaggaccgggttcctctcctgattcctgctcagttaataacgaatgtcgacaagtcgagaaaattgctcaaatttaccccatcaaagaattaaaaactggtgaaagcttgacctgcgccccccacccctgacgtgctcaccgctccactccctctaggcgggcggcacccgctgaagcctcggtaccacacccacagccaggagccccagtcccgcactcggccgcatgcgcactccctgcggccctcccgccaggcgccgcgctgggcagccagcgccccggcggggtccttcaggccttcggccgggcagcctccctcggggtccttgtgcggttgcgtagcagctgcgaggacgcgggccgagccggaagtggagtgcgctgcggcgcgagctgggccggcgggcgtggttcgagagcgcgcagagtccagactggcggcagggcccgaggggccgacccgcagcgtccctggtctctccagccctcactcggaaccgcacgtgagggcaaatccgccccggtggctggcttagcacgcggggacagcccctccgaggcctccctagcggtgtgggcgagagggcgtccgggtcgggggaagcacggaaaggtggcttcgcgaggctgttgtggggggcgggacgggcagcctggcgatgcctggacatggttggtggccaaaaacatttatcgaaagatagcttacccacttagatggcaaggacacggacaagcaagtcttcgcccgtaagcggtggctcacgcctatagtccagggatgccgaggagggaggatcgcttgagtccaggagttggaggctgcagtgagccgtgatcgcgccaccgcactccagcctgggcgacagagtgagaccctatctctaaacaaaagaaagaacgtcttcaagcatggagccatgaagctggatttggctttctgtcgctctctctacagggtacaggtgaaagggggcagacccctcatcatgctttccaggcatctgccacttcccaggaattgtctccctggataaacaaggcgaagtccctggctgtgcagaagcagtagctgtgtggtggcacagtcaggaaaactcgggggccctgttggtattttctacccctgacccgtgtgcatacttctgtcgtagctctcaccacagtagactctgctatcattgtgtcttccatcctctgaaccctgtgcaaggtctgctcatggtgaatgcccagtaaggctcacctattgctgctgtctcatcatcatatcatttctatgtgcccccctagctaagagtctggactgtggttacattctcaggaatgtttgcaaagtcatatttaggtgtgaggagagtaaaacagagctagacataatgttgcacacagcctttggcactggatgcctgg

SEQ ID NO: 3387 - DNA, 6000 bp, Homo sapiens
catgattttatacttctgatatttaaactgcagcttgaattgtaaaaggaggatagattttatttataactataaagaaacagcacccttactataaagaaaacacatcatcttcttagatcacgtagaaaattacacaaagaaattaccgcggccagaggttaagatggtcaatgaaaaagactcaagctcagaacactgtcttgagagggcacatgctcagaaagtgcaggaggaagaggagagatccataaacttgcctcatccaagcagaagcagtggaagaataaaaacacaggcacagagggattttcttaaggaaaagttgcctctggaagacaggatgaaggagggaaaaagaggccccagagactcattccctcccaacattctgcagcttagcagagaaccagctcggcaggcctgagctcaaaaacagagcaggcctacctccggaggctctaggaagctgcctctgtcactgtcacatacgcagatgttccctgtcttcttttcccaaaaatatttagagtaggcactggtcactggtggcctaagcacaactccctcaggataatgagagcttgggacccagggagtcacatggtgtgacttttctgcttgtaagtttcccccatcaccctagtctgtactcacaccatgtggccttagttttgggtggggggggtgtgcctttgccctctttgcacaacgatgataggcaatcattaacgggaatggaagaccctaaaggccaagttagacagctatcaaagaaaaaagacaacacatctggacctaactactcttaaagatggaatcagaaagccacgtcttgttggccgggtgcggtggctcacacctgtaatcccagcactttgggaggccaaggcagacagatcacttgaggttaggaattccagaccaacctggccaacatggcaaaacctctgctaaaaatacaaaaaaattagctaggcatggtggcgcatgcctgtaatcccagctactcaggaggctgaggcatgagaattgcttgaacctgggaggcggaggttgcagtgagccgagattgccccactgtactgcagcctgggtgacagagcaagactctgtctccaaaaaacaaaaaaccatgtcttgttattaagcagtatgatcacctggggtcaaaagaaatctggtcgggtgcagtggctcatgcctgtaatggcagctcaggaaggtggcatgtgcaggagcaaaggaaaagccttccacaggaggcagtgcccaggtctgaggtcacctgttcacagggggtaggggagctgtcatcagagccctccaacagagccctgagtggaatcaagaagcatgaacatgctgcatgagaaaaaaaaaaaaaggcaccttaaagaaagcctggtgactggggctgctactgttgtaaatttctgaactctgcaagaaggccgcactgccacaacattgctctctagaaatgaggccgtgtacaactgacgcccttcagatatgatgaacacaagtgttaacttttttttttttttttttttttgagacagggtcttgctctgtcactaggctagagtgcagtggcgcaatcatagctcaccacagcctggatgtgttaacctcttaatgggtgttttagcccaactgagtttagattcataggttagagacactgaaaattggcagtaattcttgagtccagtcaaaactgaaccacagtgttctcatgcactcaccttccctcagatgcactgtttccaccatggtctttgtatctgggacaaccttttgcctgagatactgctagtggatgaagactgccttgttttctaattgttgtgtctgtggaggccaatgttatggtaatctttgacgtcaagttaactacttggattcttattttttgttactgtttgaaatgaggcatataaagagactagcattgaacttgggagctgggtataccaagatacattctccgaaagttctgtttgttattaaagtggcaatttgctttacacctgcctgccatttctattctttgttgtttttaaacttgagtggggataaagggggtgttatttattgggtaaccttcccaaactacaacacctaccctcacttttactgtacaggcgtgctgttgaggatggtcaaagtaactataaaatactaaaccagaggccgggcgcggtggctcatgcctataatcccagcactttcggaggctgaggtgggcggatcacaaggtccggagatcaagaccatcctggctaataaggtgaagccccgtctctactaaaaatacaaaaataaaattagctgggtgtggtggcaggcgcctgtagtcctagctactcgcaaggctgtggcaggagaatggcgtgaacccgggaggcggagcttgcagtgagccgagatcacgtcactgcactccagcctgggggacagagcgagactccgtctcaaaaaaaaaaaaaaaaaaactaaaccagagctgcagtatgtgattgtgtggtggggaagagagagagagagagagagagacagagaattcaaattcatggagatggcctaaaaaccagcaaagcccccagagaattattcacagctacctgagtcaaaggacttgattataaaaatgaaggtagaaaccaaggtgggcctggagtacttgggagataaacgtgaccacttctctgggcaggggcaagtgtaccgtcatgctatgaaggcagaaatggacatgtgccctcagcagtcctaggcgtgagaactaggacgtctcatggagacaagctggcagcacggcagagcctcccttcacctctccgggtggcacgtaggcaccgaaattcattacaagaagaagccagtcttcacaatgattatagtcaatcgtcagttctacccagttttctctatttcagagagtccctccaagaaagcatctttaccacctttacccaatctgtcacggtggcatagtcacttttgtctttccattcccactccccgcccttgccatccctcagcccacaaaccacatacaatgtcctcagttgctccacacgttctctcagggctcagaggaaacattcaaattcctcagtccttatgacctgccccctccacctgacacacacaacggctcacgtgattcccctcgttcccccatgaacatctgggctccagccaagactgctccttcaccagccccaagaagccatgctcctctgcctctggaggactttttaaatgacctggaccctctctggggctggtatttattccctaatctcccaacatacttggatttgcccactgcgctgtctcccaggcagatgatcttcacgttgtcatcagcatcatacttcccttggtccaactcactcggtttggttttgtcttctgccattggctcctagctgtagagaggggtccagcccaagggaggggagggtattgtcactgtctgggaagatcaacaagaggctgttgtcagagataagtcccctcaaccaaatctccagctgtacctccctccagactgcttccctcagtgccagactgagatatggtatgcaattgactactagacttggagtagcagagtatgacacacaggcatcaataatatgttatacacaaatagttaagtcctgcgcaccccaaatgctgctcctcacgttacccatttgcacaagacattcaccaggcatccagtgccaaaggctgtgtgcaacattatgtctagctctgttttactctcctcacacctaaatatgactttgcaaacattcctgagaatgtaaccacagtccagactcttagctaggggggcacatagaaatgatatgatgatgagacagcagcaataggtgagccttactgggcattcaccatgagcagaccttgcacagggttcagaggatggaagacacaatgatagcagagtctactgtggtgagagctacgacagaagtatgcacacgggtcaggggtagaaaataccaacagggcccccgagttttcctgactgtgccaccacacagctactgcttctgcacagccagggacttcgccttgtttatccagggagacaattcctgggaagtggcagatgcctggaaagcatgatgaggggtctgccccctttcacctgtaccctgtagagagagcgacagaaagccaaatccagcttcatggctccatgcttgaagacgttctttcttttgtttagagatagggtctcactctgtcgcccaggctggagtgcggtggcgcgatcacggctcactgcagcctccaactcctggactcaagcgatcctccctcctcggcatccctggactataggcgtgagccaccgcttacgggcgaagacttgcttgtccgtgtccttgccatctaagtgggtaagctatctttcgataaatgtttttggccaccaaccatgtccaggcatcgccaggctgcccgtcccgccccccacaacagcctcgcgaagccacctttccgtgcttcccccgacccggacgccctctcgcccacaccgctagggaggcctcggaggggctgtccccgcgtgctaagccagccaccggggcggatttgccctcacgtgcggttccgagtgagggctggagagaccagggacgctgcgggtcggcccctcgggccctgccgccagtctggactctgcgcgctctcgaaccacgcccgccggcccagctcgcgccgcagcgcactccacttccggctcggcccgcgtcctcgcagctgctacgcaaccgcacaaggaccccgagggaggctgcccggccgaaggcctgaaggaccccgccggggcgctggctgcccagcgcggcgcctggcgggagggccgcagggagtgcgcatgcggccgagtgcgggactggggctcctggctgtgggtgtggtaccgaggcttcagcgggtgccgcccgcctagagggagtggagcggtgagcacgtcaggggtggggggcgcaggtcaagctttcaccagtttttaattctttgatggggtaaatttgagcaattttctcgacttgtcgacattcgttattaactgagcaggaatcaggagaggaacccggtcctctccacacagcccagcaggtacgccgcccatgtgcctgtggagaagagaggttcctgtggggcagacaggtgtggaccaagtagctgcgaaatttcttctgaagaaaacacacaagggggaagcgagtgagctcagtggaggaggggcgctaccccaggggacgtccccatgcatgggcttgtgaacctcgaatatgtgagacggtctcagtcaatttagaaagtttattttgccaaggttgaggacgcacgcccgtgacacagcctcaggaggtcttgacatgtgccaaaggtggccgggacacagcttgcttttatacatgttagggagacaggagacatcaatatatgtaagatgaacgttggttccctcgggaaaggcgggacaactcgaagcagggagggggcttccaggtcacaggtaggtgagagacaaactgttgtattctttcgggtttctgaatagcctccgcaaaggaggctatcacatattaacctatctcagtgagcagaggggtgactttgaatagatggggaggcaggtttgccctaagcagttcccagcttttttccctttagcttagtgattttggggcccccagattcattttcctttcacaggctagacagctttaggaactgaaaggttcacgaggctgtaacgaagagtcgagttgctccaggtgagcctgggccacaacagcacgcaggacctgggcgcccacgaggggctcctgggagggtttgggaaagggatgtgtgaaccctatctgagatggtttcaggtaatttagaaagaggtgcacccgtgacacagcctcaggaggtcttgacgacatgtgcccaaggtggtcaggg

SEQ ID NO: 3388 - DNA, 6000 bp, Homo sapiens
ttagccactccacaacgtatatatatttcaaaagatcatgttgtacacaataaatacataccatcttatttgtcaattaaaaacaaataaaataaattaaaatcttaaaaaacctcaccaggtcaatgagtatttaccaattgcttccaacaggccctagaattgttgaattctatctttgtttttagatggggtctcactgtgttgcccaggctggtctcaaactcctagcctgaagccatcccccgcctcagcctcccgggtagctgggactacaggtgcatgccactgtgcctggttttagctcactgaattctcacagtgatccacaacacagagattctcatccttatgctaggtataagactgacagcacacaggtccacagacttgcctgaagccccacagcttgcaagttgcagatcaggatttgaatgcaggtctgctagtcacttaatgccccacatttaacccctgggcaacactgccaatccggacagcccttcaatagggatcctaatgtaaacacaaggaaatggctgccgacccaaccatgcatcctgggagcagggagcgttctccttaaagtaaggtggcagactgtggtggagggtagccctgggtttgaatttcaacctgggcacttaataactttgtgaccttgggtgtgtcatgtcccctctctggcctcagtttcctcatctataaggggtgttgtgaccatatgaaataatgtctatttcaatgtcctgtctcggggctgccactctatggacacacccaacaaaaacttgttgtgttggtatctaaggaggccagcattgtttatcagagcctctgactggcaaacccttgacccaaaccgttgcacaacgctggtcctgatcatatgagcctttgcgccagagctcaggtcccctgagtccccatggccttatcctgagatgctgaggctccatgcctgtggcaatagttgcttcacatggcggcaactcttcttgcaatggggaacatggaggcagccaagagctcagtggggtcacctctgtgtgctctgtcccagagcgggcctgctgttcttggggattgctaaatatggccatgtgtccctggcaccattcagggagctcctgccagggctagagagggctggaggcagaaacagttcccagaggccaccattggtaggggcgtagatgttcgatcctgccatctcttccatttgtccaccttctaccccagagagatctgtgctccaatctaggttccatcactttttcactctgtgactgcggacagctcacttctcttcgctgagccttaatttcctcatctgtaaaacagggtataccattcctacagttcagggttgatgtagagattaaatgacatgatgagtgtgaagagccaggcccacgatgtggcccaaagagggtgctgagtacatgtttgcttcctgatgaccttggacaatccccttttctctctgggcttcagttttttcacatcaaacatgagatctgatggcctctgggggcctttcctgctctcaaggtctccaggcttgttcccaactggaacaacaatctaaggtggtgtcagccattaggcagaaaacagtggggcaggatcagctcaatgtcactcggccaccactggaggctctgggcgagttgcagagaggcctacagcttcctacccccaccctccaagcactaaggaccttccccttccagggtctgaatatgggcacagctggctctctgtccaccactaacttatctggagcttctccaaggccacttttagccacttgagccttttcaatttatggttctcttgaacactagcgtgtctggcctctccttattcaaactgtacattaactttcccaaaataatataagctcttggggaaaggggctgtggtgcagggcttgcatggtgctggggcacagtcaacagtcactaaatactgagtgcctgtacaagccagctctatgctcacactccaggaggatgcccagcctcctggcattcatgctcttgctcccttgttgcagtgaatagggctggcctgtgtgacctataggatcttgtgaaaataatggaatataacttccaaggctaggccataagaggcactgtggattcaccttgctcttttagattcctcactcggggaagccagctgccatgttgtgaagatgcagcagggaggtctacgtggtgaggaactgaggcctcccgccaacaaccacatgtacttggctgctacggctgccatagcaaaatgccacagcctggggaccttcaaaaaccgaaattaattttctcacagttctggaagctggaaggccaagatcaaggtggcagcagggctggtctctggggagggctctctcctgggcttgcagacagctgtcttctcgctgtgtcctcacaggtccttcttccctgtgtgtgcatgctcctggtgcctcttcctctttttaaaaagacaccagtcttactggactataaccatctttatgacctcatcaaaccttaattaccttcccaaaggccccaaatacaactacattgggaattaggacttcaacatacaaatctggaggggaaacgttcagtccataataccctgtgagtgagccatcttggaaatttgttatgcagcagtagaataactgatgcactagaagtataaaatgatgtatcagtctgattaactgttccttccctcttctgagggactctgacttgctcacatcctctggtgccaacacatgatattttatcctgcatggaaattttctgcaattgtgctttgctgcccagcatttttagggcctcctgggatgttggtctagaatgcagaccgttaagactctacatgagacctattttgcagatgcctatgcttttggtaccccgtgtcccatccctcagctcacttctgatttcagccacagctgagatggtgaatggtttggtgcaagctgagactcacttgcataatcaaagcccctcacaggtaaatgcagcacatctccttaccttctgcaccaggacattctcctttctctgactatgggagccttctctgcacataaataaataccatcaggatgcccctggggcaatcctcaaccaacagggatgaggcctgtccttcaaacgaaccatcttgggagtatttctctatggggagagcagcaactcttcctccctctttgtctcactctctcacacacgactggttcctctaaatctcctcccccacacactgctatgcccaagtccctgtctcaggctctgctttcagggagtagtaagatgtgctgggtgccttcattgcctctctggatccacgccccatgctttgcaccctgggaggctgacttgtatggtttgcatcaacaggcatcctccccctctggtttctggctggcttcagtcaatgagacatatgcaggaagccaggttggggaaacagagagggatccaagatttattcccccagttccttccccacggtgtccccacaggctggctgcctccctggaccatggtcaggctcctgtcaggccactgtcttcccacagctgactccctctacaggttctggtgacttgtggaaggtgactggtcctggactcggccccatccctgtggtttcactacactctgcccgcccctttgtaaatgatccctttattattaagcactcttcaaattacccacttcgagtgtgcctgctgtatcctggtgggatcttgacacaattctctttgtgctccatgtcctgttgtagatggaataaatcatgtttcccttaggtgactatagtggttgcaagatatttgctccagaaacgatttccttttcctttggcaacagccctggatttttgtttgcagaaattcttgtctgcccagtgtggttcgggtgggactccaacctctgcttcagggatgggcatgtgacatagggttaagcccattggctttttgcatccccctggacacagcaattgggtaggtggtgcatcatgtgaccttggatagaccaatcaggttgaagtttgaacaccagcaggtgctgcctaaaaaacatggcagtttctggtctggagctcccatgatcctgctagatttcttggcggtgactacttcaccttgagctgagctgcggtgtggtgtccctgccaatttaaaaactacgtgtccttgggtaaattacttagcaattctgtccctcatttacttcttaaaaaggtacatggtaatttaataagtgccttattgagctgtcgtgaaactaaatgagataactcatgaaaagaacttggaacagagattttattaaagcaactcttccaggatttaactggaggccttttctgttctaggacccagatagaagtcaatggagctgggctgggaagacatttgtgacagcctcctgctgaacttggaattgcacctcccaccacagaaggctttgctaccaggtcaagctcctcagaccggtcattcctcactcttttttttttttttgacagggtctcactctgttgtccaggctggagtgcagtggtacaaacacagttcactggagccttccagggtcaagtgatcctcctgcctcagcctcctgagtagctgagactataggcatgcaccaccacacctggctaattttttaattttttgtagagacgggggtcttgctatattgcccaggctggtctcaaactcctggcctcaagtgatcctcctgccctggcctcccaaagtgctgggatgacaagcatgagccaccatgcccactcaccactctttaagaggcttctggttgctcacaggtctggtttttggcagttccattccattggctcccggatgtacccaggtatgtcagaatcacccctccccatatcaacacaaattagcatccaaacctgattttccacacttcaaagagacaaggctctctgaagagggtggaagctgggtcctgggaagcatcattctggaagggctttgacggctggcttggctgacacaagggggcacagtgctgccctgcttgctgtccctctagtctaacctttcctcctaagcctcctcagtcattgctgcagagactacccccaggacattttgcaaacagccatttggtctcagccaggcctggacccttagtgaagcaggacaaggagaagggaaggagcttcctaagctgtctgaaatatgcccttgttagacgaccgaccttccttccttccttcccatcttctccttccttccttcccttcttcttccttccttcccttctccttccttccttcccttcttctccctccttccttctcttcttctccttccttccttcccttcttctccttccttccttcccttcttctccttccttccttcccttcttctccttccttccttcccttcttctccttccttccttcccttcttctccctccttccttcccttcttcttccttccttcccttctccttccttccttcccttcttctccctccttccttctcttcttctccttccttccttcccttcttctccttccttccttcccttcttctccttccttccttcccttcttctccttccttccttcccttcttctccttccttccttcccttcttctccctccttccttcccttcttctccttccttcccttcttctccctccttccttcccttcttctccttccttccttcccttcttctccttccttccttcccttctccttccttccttccttcctccctccctcccttccttctcttcttcttccttccttcctctttctttttctttttctctctttcttctttcttttttggtcccactatgttgcccaggctgagtgcagtggctattcacaggtgcaaccatggctcaccacagcctccaactgctggcctcaaatgatcctctggcctcaacctcctgggtag

SEQ ID NO: 3389 - DNA, 6000 bp, Homo sapiens
gcctcccaaagtgttgggattacaagcgtgagccactgcgcccggcctattttcctcctctgatctgacatcatgggcatgtctattcttccttcaaaccatttcagactcattccttcctcctattactcttctgagacctttcctaataactttagcacacttgacctctcctaccaccaaaccagaggtatctaaagtaggggatatgcaacccagcatgtaacacacatgttttagcacacacgatgcccaaaaaatggaaacagcccaaatgtccaccaacagatgaatggataaacaaaatgtggcataaacttacaatgggatattattcagccatgaaaatgaataaagtactgacacatgctaccatgtggatgaaccttgaaaacattatgccaggtgaaagaagtcagtcacaaaaggccacatattgtgtgagtccatttttatgtaatatccagaatagaaaaatccatagtgacagaatgcatattggtgattgccagacgttcaggggatggggaagaaactgcttgatgggtaaggggttttactttggagtaatggaaatgttttggaactaggggtggtggctgtaaaagactgaatgtactaaatgccactaaatgttcagtttaaaatggttcatttcacctcaataaattttttaaaaaatgaagtagccattcttccaggtgagctgaaaagtttgaatgaggcacaggctccttaaatttcttttttttttttttttttttttttgagacggagtctcgctctgtcgcccaggctggagtgcagtggcgcgatctcggctcactgcaagctccgcctcccgggttcacgccattctcctgcctcagcctcccgagtagctgggactacaggcgcccgccactacgcccggctaattttttgtatttttagtagagacggggtttcaccgtgttagccgggatggtctcgatctcctgacctcgtgatccgcccgcctcggcctcccaaagtgctgggattacaggcgtgagccaccttaaatttctaagatgtaaagtgctgggcaaatatcagctggggatgctgaaggaaggaataatcagaaggtcagcaagtgtggcttcgaaactctgcctcaagtaataatgataatgataattagagatagttataatattgacttctttggtttccttgtaaaccagtgttattttagaaaaagagggagatagctctagtaattacagctaacacttctacaatgcttaatatgaggaaggcactgttccaagtactttacgtctaaaacttactaaatccttacaactctaagaggtagtatcatcacatttccattatagatgagggaatggaagaattgagaagtttaaatgagttctccaagtcacagataaggaaatggcagagtccaaatttgaacccaggcaagtcagactctaggcactgaagtctcaaccaccaggctctgcactaagtgctctccaggttttatctcatttaatcctgcaaggaaagtgttattattcccattttattttatttattatttatttatttatttattgagacggagtttcacccttgttgcccaagccaaagtgcaatggcacaatctccgctcgctgcaacttctgcctcccaggttcaagcagttctcctgcctcagcctcccgagtagctgagattacaggccaccatgcccggctaattttgtatttttagtagacatggggtttctccatgttggtcaggctggtctcgaactcccaacctcaggtgatctgcctgcctcagcttcccaaagtgctgggattacaggcatgagccaccgtgcctggcctattattcccattttaaaaatccccctcatgctatccacattccacaccttctagtctttcttttttttttttttttttttgagacggagtttcgctctgtcgcccaggcagacggagtgcagtggcgccatcttggctcactgtaagctctgcctcctgggttcacgccattctcctgcctcagccttccgagtagccgggactacaggcacccgccaccacacccggctaattttttgtatttttagtagagatgggatttcaccgtgttagccaggatggtctcgatctcctgacctcgtgatccgcctgccttggcctcccaaagtgctgggattacaggcgtgagccaccgcgcccggcttttttaaaaatttttttattttttttatttttagtagagaccgggtttcaccgtgttagccaggagggtctctatttcttgaccttgtgatctgcctgcctcggcctcccaaagggctgggattacaagcgtgagcgaccgcgcctggccagtctttctcctacatttatttttacgttggtccacatactcctgtcattctcactttgcttcacttttcctttcttcttcttttttaagagacgggggcttgctatgttgtccaggctggagtgcagtgaggcaatcatagcttatgccatccccaactccaagtgatcctccagcctcagcctcctccctagctggattacaggagcatgtcaccatgcacactaattttcttttcttttttttttttggtagagatggggtctcatgttgctcaggctggtcttcaacatctgggctgaagtgaccccccttccttggcctctcaaagtgctgggattagaggctttggccaccacatccaacctgaattttattatttatattttcttttaatctcccattactagatggcagggattttgattactgttaattttccaatatccaaaataatgtgtggtacctaataggctctcaatatcgaaaagtaatagtgcacatggcattctgtagtattaggtaggtatcttgtgttcctgtgtttgcgtaaataagatcatacattatgttctgcttttttaacttaatggctttttttttcctttttttgcgacagagtctggctctgtcacctaggctggagtgcagtggcgctatctcggctcactgcaacctctgcctactgggttcaagtgattctcctgcctcagcctcctgagtagctgggattacagacgcgcaccaccacacctggccaatttttttttttttttttttaggcggagtctcactctgttgtccaggctggagtgcagtggcgcgatctcagctcactgcaagctccgcctcccgggttcatgccattctcctgcctcagcctcctgagtagctgggactacaggggcccgccaccacacccggctaatcttttgtatttttagtagagacggggttttactgtgttagccaggatggtctcgatctcctgacttcgtgatctgcccgcctcggcctcccaaagtgctgggattacatgtgtgagccaccgcacccggcctatttgttttgtattttttagcagagacaggtttcaccatgttggccaggctggtctcaaactcatgacctcaagtgatctgcccgcctcggcctcccaaagtgctgggattacaggcgtgagccaccacgcccagccatgtcttttttttttttttttttgagacaagagtttcgctcttgttgcccaggctggagtgcaatgacgcgatttcggctcaccgcaatctccgcctcctgggtacaagcaattctcctgccttagcctcccgagtagatgggatgacaggcatgcaccaccatgcccagctaatttggtatttttatttttttatatttatttattttttcgagacggagtctcgctctgtcgcccaggctggagtgtaatggtgcgatctgggctcactgcaacctctgcctcccgggttcaagcgattctcctgtctcagcctcctgagtagctgggattacaggcgcccgccaccacgcccggctaatttttgtatttttagtagagacggggtttctccatgttggtcaggctggtctcgaactcccgacctcaggtgatccgcctgcctcggccttccaaagtgctgggattacaggagtaatcccaaaaaaagcgccgggccctttttttgttgttttttaaattcagtaactatctagttcattcttggatggatgacaacccagattggatgtgtagcagcgttctcttaaccagtttcctattaatcttcatttcatccccagtgtttctccagaatgcaaataatatggcattaaatatcttcacacatagctttttgtgtatgtgtatacttatttctctagaattagtgtctagaagtgaaactgccgggaggaaggatatatacttttaacatgtccaagttccactgtgatagcgctgcgagggcacacaacaggtttcaatataccttggaccaaaccggatattatcagtttttttaacttgttgctaatgtgatgggggaaaaatgaactcggaatttacacacaaggaaaagaccgtttaaggttcagggactgtccacatagctgtcaagtggcggagccgtgatttggtattaaagtgcccggagaggacgcgtcaaagttggacactgtgccctgtgtcctgaggcacgtctggtgatcgctgggccttgcaatgctgggcaggcaggccttcctctccccttctaggcctctggccactcctggctggccgaaagccggttcttctcgattaccgagtgcctctcctgaaagcaagtcagcgtcgcctaacctcttcagcttcgaaatggcggccaccagatcgctaggccacgccccgggggcggggcctgagttcaggccagagcgatggatgcccgagccaagttagaagtcgactgccagtagggctcgcgcagaatcggagagccggtggcgtcgcaggtcgggaggacgagcaccgagtcgagggctcgctcgtctgggccgcccgagagtcttaatcgcgggcgcttgggccgccatcttagatggcgggagtaagaggaaaacgattgtgaggcgggaacggctttctgctgccttttttgggccccgaaaagggtcagctggccgggctttggggcgcgtgccctgaggcgcggagcgcgtttgctacgatgcgggggctgctcggggctccgtcccctgggctggggacgcgccgaatgtgaccgcctcccgctccctcacccgccgcggggaggaggagcgggcgagaagctgccgccgaacgacaggacgttggggcggcctggctccctcaggtaggtggcaggaccgggtcgtggatgccgggggagccgggcggcggggctgagggatcggcttccagggcgaccgggcctgggtggcgctgatggagcggccccgcggctgccgggcagagggcttgggccaggccgttgtcaccctggggtagcgttgggcgggggccccggagtccggtgtcatggccggcgagccgagttcccacatcccactcaaatttccttgtgtttggcggaaacgtgccaacgccacccttatgccatgcgcattcctcatatttggcagtgggaaaatccgcccagagctgccccatatctgttgtcacttggatgggccaattccttttctcttgggccgccgaatgtgggacccgggcttgcaccctttctcagggtacttcagtcaagtgacacccttttagagacgacgtgaggaatcgggtaagagaggaggaaactggccagtgccctaccacaaaggcacaggggcctcttcttgggtatcaggactagccttgggtatcaggactctgggttattaatgaaaggtttgggatacttatagaggattggcctcaggacgctttggaatgaagagccagggctgtcttttgtgtgacgcgagagccgccgggacgcttcagctctgcagctgctgaggctctgcgagcgagtcgatgcccaagagagaggggtttggacgtcgtgagaggcgaggcggccgtgttcattcattgttctc

SEQ ID NO: 3390 - DNA, 6000 bp, Homo sapiens
tccttttcaccctgcatcttaccttcccctcatctctgtcccaccataaccacccttgtcagtgcctactctttcccttcttctttcatctttttcttcaggttccattttcctgttatgtccctttccattaatcactttttctcttccctcagcttaggagcattcttacatatgcatctcagcagggagcacctgtaatcacagctacctgggaggttgaggctggaggctcacttgaggccaggagttcaagaccaacctggaaacacagcgagactctgactcttaaaaaaaaaaaaaaaaaacttgcctggcatggtggcatgcacccttaggtccaactacttggtgggaggctaaggcaagaagatcatttgagcctagagtttcaggctgcagtctgcagtgagctatgatccggacactgcactccagcctaggcgacagcaagatcccatctcttaaataccaaaaaaaagtacatctagcagtatttaattacatttaattttacaagtaagtataattatttgcaaatacttcagttatatagatcagaatttaaggttaccttttttactattcattttaaaccaatataattgagcacaaacatgtactgtattaatttgaagaagcttctagttgttagctagaaataggtatcaggtcaaatgttattacttgagacactgattctactcatgttttttatctgtattttagctacaatataaccacaagggattaaccaaacaatcaaatataaaaacacatcattttaacaaagataaaggcaagttttaaagctaaggtaagctgaacagctcttttcttcactctatgacttatttagctattcataatcacacaattggaacatcaaaatattttctgtcaatgtatgattcgattaaatgaagcagggaaaaaagaaaatctcacccccaatggtactctcttgaaattcatgaaattggcctttcacaaaacgaagcactaggcttgatttgccaacagcggactctcccagaagtactagtttgaactggcatattttatttcccgtatttggcccgttgggtcttgttgcgcctcgactagccatgtccaaatttgaaataagtccctaatttcagactcttcaatgaacttccagaattcaaggggccaatattcttctttctggaggtaaagaaacctgtaaagaaacaattatgaattaaatatacaaatcagtaaagcaaatttactattaatcactttaaatattgcctatagcatgattatcttaaactctactagaccttcaatgccctttagattatgtcactatcttttaaaggaaattcaaaggtataggatgtgagtccaaaattacttttttttttaaaggctaacctcaaagcttcaagtttgtgccaggcagtgctttaagtacttaacttctcaacaatcctataaaatgagatattattacaatccttataaatgaggaaacaagcacagagatgttaagaagcttaattgaggtcacacagttattgtcacagaagtgacagagccgagtttcaaacccaggcaacctgagagatgactcgagttcaagttctgtagccaggctacttggattaacattgttttgagaaaaattatgttattaataaatgggaaacttttagaacagatcctaaaatttagtattatttgaagttttctgttaaacgatgcatttttcatttaattaatggtaattttggacaacaaatattttcagtctcccaggtttgtgtgcctaacggcagacttaaaactgtttcctcatctgctcaagcacaccatacacagaaatgctaacagttgttctccatgtggtgattattactgacttatttacttacaataattgtaacttttttgtagtctttagacgaacaatatacatgccatttttaaaaaaatttttttggagaaagggttttgctctctcacccaggctggagtgcagtggcgtggtcacagctcactgcaacctagacctcctgggctcaagcaatcctcctgcctcaacctcctgagtagctgagactacaggcgctcagaaccatgccaggctaattttttggtagagacacttaactgctatgttgcccaggatgatcctgaactctcgggctcaagcaatcctcctgcctcagcctcgcaaagtgctgggattacaggtgtgagccaccacgcccagcctgcaggccattattttttatttaaacaacacattaaagaaatctagcctgaatggcgacttctatgctaatttttaatctctaaggaattagtgaatatttgaagaacctttttcaatccactcacaaaccaatcttaacagtttccttctatctttaatcaaaatccgaatacatgctaatatattaaacctgatgattccctctctaaaaaccctgctatatttcatttagctacctcatataagaaatacgtctttcacactggacagagtggcttataccggtaaatcccaacactttgggggtgaggcaggaggactctgagaccagcctgggcaacacagtgagaccctgtctctatattaaaaacaaaagaaagaaatatgcctttcccataaaatgagcttataatacgctcttcataatgaattccctaacatgtccacgagatcttagttcttaaggcaatgaaactacctccttgccttaactaaacaccagctttttagagtccttatcttttaccattacatactgaaatatttacagatttattgacgtaatatctgagttgcttccaaataacaaggtataaataaaaatgccccctcctccacaaacataccagatttaggggtgtaatcctggctataccaatttccgtctgggcaaactctttaatttccaagtttctattcccataatatctaacttgcatagctgatgtgacaattaaataaaacaatacatgtaaacaatctctaatatacatagtagggattgaaattgccaataatgtgctcctttgataagaaaatgataaaatatcaatagaacatcatatatactgaaaatgcaccaatacatcttcagatattacacacaatcaaaacattttccatttgtctttttatttaagaaaacaagaaattacttatcaaggacaatatgctccaaatttctacggcacttccaaaattttagggaaaatatcagactcccattaaaaaaaaaaatcaaacaagattctgatttcactttgacttttaaggtttaaagctacttaattgtggctactccccctaaggatctcaaacaggaaataactaaagttaatggtaaatatacacttagcataacactaaggttaaaaattacgtgcattcatttgtattcactgcttactgaaacttctgttttgcaaaacaagaattttgcataatatacatttgtaatcttttgaaaataactgttattcattctatagttaaaatccttctaagggttctttgatcaaaaaattgactgggcacttattttgtgccaggcactgttccatttactttgtttatacaaatgctgagttatcacttccattttactttaggaataaagtttatgagcagtcttgagtattcccagaggtgtacaagtgtttttttcttattatgtgaaaggcaactgattgaacgctttgattccatttaagcaagacaaaaaccaagtatgtgaactatgacgttcagaacttaacaagtttgaaagtctcagaggtaagcagcttccagggaagataacgccagagcaagttccatggtctctacccagtgaaggagttcagcggtcctgttatcttgaatttatttaacgctgtagttcactaccttccaaacagaaaacaagtctctagacagcctattttgacgagcctcccacccaccgacactactcatctttggaagttgaagataggcggagctccccacattgacacctgcagtaggcccaggttcctgcttggagagcacctgagtagctaatagccaactacagatcgcctggataagcagcactcgccaggtcccttggcctttccaacctcctcccccgaacctgccttgctttgaccgagacccccaggactgccaggacggagaccaggcggaaccgcggcctccagtacactttccacggcgccatcttgagaagggaaagggtgacacccgtcgctccctcagtcagtccccaaatcccggtctccagagcccctggaggatgagtcaccagggctggcagaacaagacgccgggttcgatagttctctggtccagggcactgctgcgcgtgagggagaaggggtggggggtctcagtaccggcagggccgcggacaggctggggaccgcggataacctggggtccaggcccccgctgcgcaggaggaggggcggttcggttacctgagaccgcagcaagccgagctgcggggccgaagcttcctggcagcaaggcccaggcgtggcccgtaggatgagagtgtatctatggcggtggtggtggcggcggcggcgtcgcctgctcttagcgccgctcccctcacactggactgtgcggggctcgtgccgtggtgccgcccctgtcgggctccgtctccgcctctcgccgctcccccttcctctttcctttctcctcctccgccgccgccgccgccgccggcgctggagttccgactaattcttcctcctcctcctccctctgcctcctcccctaaggccagccgccggctccttcacgaaccaaaacacaaacactcaagtcccaccgccggagccacttccgctgcccggtgccggccccgccgccacgtcgctgcacgcagcgaactgcgccacttcgtcacttcccatcatcgccagtccgcctgctccttccgcttcctcgccccttcccgaatccctccccgcctaggtttgttcgcggggcggggcgaggcaggatgtcacgtgaccctgcgagtggctcagatccgaactggccgcctttctccccttcccccaccccaggtacgcgcggccacgccctctccagcgccattgttatttaggctggggggtctctgggctcctggcggccggggtcgggggaaattcctttactattctttgggggaagatcaaaataacttgtgtttttttgtttgttttttgtgcccagcccttgtgggagcggcgaggttccctaaccccaatcctggcatctcggctaaggggctttattagagggaacttgtctagcacgagagaacctcctcccacaaaatggccctggggttgggtaggtcggtaaaggctgctaaatcgcatttaccccaaggaggaagaaaggaccctccctatcccaaaagccgcctttaggcgcctgacaataagaagtcgcttctgttaagagtttacgtggttttggtagggggcggggaaggccaaatcctaaaatagtgtctgccttttattcagaatttcccttcgctctttactgtactaaacgctttacaggaattatcccattgaattcttacactcgagtctttcattctgaaactaacttgttaatcgtctgttccctacattcgaattttagctccccttggtggtcctcaccgctgtaaatctatgtctagcccagtgcctggcagccaagtcttcagttctagttgtagatgttttataggtaaagaatttgagacacaagagattgagtaacttgtccgagatcacggctgtgtggtgcagaagctggattctgatctgcggcgggttggctccagaacgtgagttgttgaacacaattctggtgaaagacaacccaagatgttcgttaccctccacgggggacctactgaagatgtgctgctttagttgaatcccacaccacattcagtctctggcgaggcttcagccaccaccccctcccca

SEQ ID NO: 3391 - DNA, 6000 bp, Homo sapiens
accagtttcatggaagacaatttttccacagaccaagttgcagggggtaggatcgggggaagatagttttaggacaattcaagcacattacatttattgtgcactttatattattattacattgtaatatataatgaaataattatataactcaccataatgtacaatcagtaggagccctgaacttgttttcctgccactagacggtcccatctggaggtgatggaagagagtgacagatcatcaggcattagattgtcataagaagtgctagatcccttgtgtgtgcaattcacaatagagttcacactcctatgagaatctaatgctgccactgatctgacaggagggggagctcaggtggtaatgtgaatgatggggagcagctgtaaatacagatgaagcttcactgacttgctgccactcacctcctgctgggcagccagttcctaacaggccacagtccagtaccagtccatggccctagaggacacctttctggacagaagttttttttatctctcccttgtattctacttggaccttgggcctgccaacattattcactaccatgaagggccaatgcttcatatcagactggacaacagcataatcaagtctgtgtccaatcagcaatcagatttggcatcaaaaactgtgttcatggggttcattgcaacttgattctttgtggcatcactgagcaattgttcagtatcagtaaaggtgacatagcttggagtgattcaatttccctgatcattggcaattacctctatttttacatgctggaaaacacccacacaagagtagatggtgccaagatgaataccaactgcaggtcctttaaacagggttgtttgcatgtaggccggattggattctgaagaaagacataggaaccccaaaagtggccacagcattcaataaatccccataaattcttcaaatgactttgcagtatgtaaatccaggtaagggctcattcaattcattcattcattctacaaacaggtattgagtccctccctattttgtgtcagtgttgggaatacagttagccctctgtattccatcgaaagtatttgagttaaaaaatgaaaaaaacacaaaataatacaaattaaaaaaatacaactatttacatatcatttacattgtattacttattgtaagtaatctgaagatgatttaaagcatacagaatagcctacatgcaaatactacaccattttacatgagactagagcatctgcaaattttggtacccatatggtgggggaataagggagtgtccaagaaccaatcacaagcagatggactgactgtataacccaacccctatctcatggagcttatattctagtagggatagataaccattaagtggaacgatgcgtaatatcatatcaaatggtgctaagtgttatgaagacaatgcataatatcatatcaaacagtgctgttatgaagacaacagactacttcgatatgtaacaaagcatttagaattagtgggcttagaagtcccttaggtagatgacatttgagctgaagcctgaatgatgccctccaaagacacaagcttttgaaacatgactagcttaagttttcacagccttttattcactgacttgctactacgccaatgttagagttaccgttggtttgtctccaggaaaaattttgaattgtctccagacagttccagttaaaagtaaatgtaaccattcattatcatctatgcaaagattcattctttagctacacaagggaggacagatttcctggaagagaaggaaaaggttatgggatcctgtgaatggtagagagacacctgccactgggaatttgttattgagtatttagagatttgagggcagtataagcatcaaagacagtgtttaagtcttcatgattatttatccattttgtaccttccttaacaagttctatcaactggtaggactccacatttgacactaaaatatatacaattatcagtcctcctcagttatctggggctatgaaaaagaaaacataggcatattgcaagtggcaataaaacaacagagctttactgtgtcatttcaatttctctaaaactactaccggatctttagaaatgccagccaccagggcagcactcttccaggcaaacattatgactaaactgtaaaatattgtgaaaagtattcatgaaggaggtgaagacaaaatcactaaacaggaacgagtgaagaagcaacatactggaacgatgaaatagggagttttttgcaatttataaatttcagcatcaaatgtttttcattgtgaggtcttcttaatgttcgtgattctaaatgtaattaagttcaccaatactttgggggtccctattatagcagtcaagggtcttctgtgaagaactgaaatgatgaataactgatggtcacagcccttaaaaaccttataattcaatgaaaggctaaggagaaaagtccaggtgctcattagctattaaaataaggcagattttaagacagccattatacagagtaaggcaaagtattgtgaaattacagaaaaaataataattgaatccagtagaagtatctgcagatgcggtccaaaggaactggtgtcctggctaagacggagccagcagttatgggcaatgatagtgttccatgtggagaaaataaagtgatcagataccaagatggcaacacacaggcaatattcagggaacacagaccagatacgtgtgatcagggaacaaataaagagtatggggagaggaattctatagaaatagaatgaaagaaacttgggttgggactagagttaaagaactttagactgtcaagtaatgacatagcattgaacattttttagtagagtggctaaaatgtaaagaatggacagaaagaacagcagtatgcattaatttcagtttatataaacactaccatggaccaggtgttgggattagacttcaaatttggggattagataatttgttgatagaatggacaatggtttgtgaggagaagaaagaggtgaagctgattctgcagttccaagtctgggtgactgggaggatgttaatgccagtctctaagcagaagcaggtttggagtggaataggtttcgttttgggcatactgttgacatgacaaaactgatgtcacatatcctatttcctgactcctcctgggattgtcccagagctattaccatgattaatagttcatattgaacaactccttgagaataaaatgccacaggtatcatttacgtatgacacattacgttcttctggcaactaggtagttgatctgaaagacgggctgttcaaagttcaaatcatcttaattgcacaatgccgccgactgtacgcccataagataccttaacccggtacacttcaaagacaatattctcgcccttacaacagagctatacattgtaaactgcaaactgaaaagtagcctttattctgaaggaaaatcaatttaatattcttccactaaattatcaaaacaatttttttggcggaggctggggagggggtggtggctgaagcctcgccagagactgaatgtggtgtgggattcaactaaagcagcacatcttcagtaggtcccccgtggagggtaacgaacatcttgggttgtctttcaccagaattgtgttcaacaactcacgttctggagccaacccgccgcagatcagaatccagcttctgcaccacacagccgtgatctcggacaagttactcaatctcttgtgtctcaaattctttacctataaaacatctacaactagaactgaagacttggctgccaggcactgggctagacatagatttacagcggtgaggaccaccaaggggagctaaaattcgaatgtagggaacagacgattaacaagttagtttcagaatgaaagactcgagtgtaagaattcaatgggataattcctgtaaagcgtttagtacagtaaagagcgaagggaaattctgaataaaaggcagacactattttaggatttggccttccccgccccctaccaaaaccacgtaaactcttaacagaagcgacttcttattgtcaggcgcctaaaggcggcttttgggatagggagggtcctttcttcctccttggggtaaatgcgatttagcagcctttaccgacctacccaaccccagggccattttgtgggaggaggttctctcgtgctagacaagttccctctaataaagccccttagccgagatgccaggattggggttagggaacctcgccgctcccacaagggctgggcacaaaaaacaaacaaaaaaacacaagttattttgatcttcccccaaagaatagtaaaggaatttcccccgaccccggccgccaggagcccagagaccccccagcctaaataacaatggcgctggagagggcgtggccgcgcgtacctggggtgggggaaggggagaaaggcggccagttcggatctgagccactcgcagggtcacgtgacatcctgcctcgccccgccccgcgaacaaacctaggcggggagggattcgggaaggggcgaggaagcggaaggagcaggcggactggcgatgatgggaagtgacgaagtggcgcagttcgctgcgtgcagcgacgtggcggcggggccggcaccgggcagcggaagtggctccggcggtgggacttgagtgtttgtgttttggttcgtgaaggagccggcggctggccttaggggaggaggcagagggaggaggaggaggaagaattagtcggaactccagcgccggcggcggcggcggcggcggaggaggagaaaggaaagaggaagggggagcggcgagaggcggagacggagcccgacaggggcggcaccacggcacgagccccgcacagtccagtgtgaggggagcggcgctaagagcaggcgacgccgccgccgccaccaccaccgccatagatacactctcatcctacgggccacgcctgggccttgctgccaggaagcttcggccccgcagctcggcttgctgcggtctcaggtaaccgaaccgcccctcctcctgcgcagcgggggcctggaccccaggttatccgcggtccccagcctgtccgcggccctgccggtactgagaccccccaccccttctccctcacgcgcagcagtgccctggaccagagaactatcgaacccggcgtcttgttctgccagccctggtgactcatcctccaggggctctggagaccgggatttggggactgactgagggagcgacgggtgtcaccctttcccttctcaagatggcgccgtggaaagtgtactggaggccgcggttccgcctggtctccgtcctggcagtcctgggggtctcggtcaaagcaaggcaggttcgggggaggaggttggaaaggccaagggacctggcgagtgctgcttatccaggcgatctgtagttggctattagctactcaggtgctctccaagcaggaacctgggcctactgcaggtgtcaatgtggggagctccgcctatcttcaacttccaaagatgagtagtgtcggtgggtgggaggctcgtcaaaataggctgtctagagacttgttttctgtttggaaggtagtgaactacagcgttaaataaattcaagataacaggaccgctgaactccttcactgggtagagaccatggaacttgctctggcgttatcttccctggaagctgcttacctctgagactttcaaacttgttaagttctgaacgtcatagttcacatacttggtttttgtcttgcttaaatggaatcaaagcgttcaatcagttgcctttcacataataagaaaaaaacacttgtacacctctgggaatactcaagactgctcataaactttattcctaaagtaaaatggaagtgataactcagcatttgtataaacaaagtaaatggaacagtgcctggcacaaaataagtgcccagtcaattt

SEQ ID NO: 3392 - DNA, 6000 bp, Homo sapiens
gaaagggagagagggagaaccagcaaatctgcagagcagcttcatcaaatatgaaggaaaacacaagataaaaatgcacgaattgccatttgtgctaaataggggattccaaaagcccatatggtttgttagtttgtttagactcagaagggtgaattgagacattagccctgatccttcctttccaatgaagcagaaccctgtttcgattcctattgatacagacacctcaataattggacctttgaagtgtgaattcatttgatcagagccacaaagaacaaactgaagagaacttagcaggggcacgttgggcctcctggagctatttgaggaattcatccgggtttatagattatttttgtcagccaagtgtctgcagcccaactattccccagttgcccagcctccttgtgtcacccctttgtttgccacttttggaaactgacttgagcctctcccacatactatgggaagcccagtagtctgcacaggacttgggaagatttgctgggctttccagggtcccggtgtcttctcactccagctcccactatagctgttctcttctctgcatggggtgactctggcacagctcccctccccttttcatttcaattccaaaatcatgactaatacaaggctgctactggtagcaattttactaaaggcataagggaagggaaaggccagttcattgcagcctggaagacaacacaaaattaaacatggtgtttcttggtcctcaaggaaatgtcttactattccgcgttcctcctttggcctcaggcctgctgcaatgtccccagtcccttcatatatctcccccttctatgcatgtccacgctcatcctctcctctctgccaggcagccagtgaaaattcaaaattgttcccctcatcttgcagaatatttcagctatgtcaggcttctccttctgtaccctaggagggaggcatcacctttcacactcaagaaggtaattcacactcaagctaaactgtctaaacagagatatttatctgaacaaagtactgcctctcttcatataaatgatgccactcccctggtacctggtccctggagcaccagagttcacgctgcatccatgctcatggctaagagggaagaccctagatctgcccgccccccaataaaggcctggaattggacaaagcaagccttcccccttccatctctgaatcaatgtccatcttctctcttccccgcagatcgcccggggcttgcctgtgttgagagaatagaaaagtaccaagatagtttcctgctggcctttgaacactatatcaattaccgaaaacaccacgtgacacacttttggccaaaactcctgatgaaggtgacagatctgcggatgataggagcctgccatgccagccgcttcctgcacatgaaggtggaatgccccacagaactcttcccccctttgttcttggaagtgttcgaggattagactgactggattcattctcataattcctacagcactactgggtgtcatttcattccattgcctagctcttttttgtttgtttctttgtgttgggagggattatttgggagggaaaagggaagtagtccttggcatagacatggatgaaattgccccttgaatgcgggtacttgaaactattgcatttcgttctccggtcctgtgatgtgaatgctctgaaggttttatggttgtggaggtggggtgggggacaatcattaactcaccagcaccaagcatcaccagctcccacccgtccctggtccaagacttgagtcagcaaaatggcgccacaggacactaaagaagccttaaaaccaagataatacgaccacctccacccaatcctgatgttcgcagggctgaagttaacagagcacagaccacctttagttagatgtggctttcagccttttagggaaagactcgaacaaattttcatctattcaagagcatgctgtttgcagcactctttatggtctcctaggagcataacttggaatgtacaggaatatttgtgtcctaaaaaaatcagctgcccttccaatatcatttttataacgttatggtttaattcaagttatacaaaggtgtgactcaaggatgtgcaggtattgactgatggaggccaacaaggaaaatattttttttcagtgagcccagagaaattagaaatcttcaccaatgtcagtgactgcatggtttccaaaaattcacatagtattacctcacagtaggaaggcttctttcccatttaggctcagagaacacttttacagaaatcaaacctatttacagggtggcaccccttttctgtggcatctgatctgtcatctcccaagctcctgaagttctttatccaggttgtatctttgctgagctgacaacagatttctctatggatcaaatattctaatcaaggaaagatacggtgaaacttcagtcttcttctggagaaatgctgaggcgagattagtgcagctacattctgagttgaaggaaatgcagtgttctgagggcccctttgtgtcctgatggctggaggacgcttcctcctggttagatcctcaagctccttgcctcattgacaaatgtctcctagtcccctttttccctctgactctgaggaactaaatagcttgactatctctaaacagagactggccctgccactgaccctcctgtccctctcatagcataccctgacagatactcaatagaaaacacctgcagaccatgtgcacacttaactttcctgcccaacctgcctccccaacggcccatgctagaatagcttgtgcccagaaaacaaacagtgacacttcatctcttcagcgtcagaaaatgggcatagaatgtacccatgcaattgaatgtatctcattctccactggcatagtagatataaactattcctttgcctaccttttactgccttatcctggaaatattggggaaaataagccatatcagtgagatttacctaaaaacaaaggaaggaaagtcactatggaaaccaagtagatgctttttgtaagtttggtggagcataactggcccagaagtctgggtgcctgagttctagttcgtgctctgtcaactggtagatttgtaattctaggtcttggttttcttacctggtgaataagtcatgatctctaaaacccttcctgcccttaatattgtctgaatttcaaggggaaaaaaaaaatctggttcctttaattatttttttttaacacttaaattcctaactttattagacaagaagtatggcccacttaacagttaaggaacgtaaatttgttattggctcgaaataataatttgacacaatactagtcaaccatttagaggccttggaaaaagaagaggaacagcactgaaaattccaagtatgattggaaattatctgggagcggggaattaaatattcaatgcatgaaagcaattgtactggcttctgggaaaaaggaaacaagaacattgctatggaacttgttacccagagaaaggaagtgaaaagatttacaattataagcacgaaattcattggcagattacctgctttatctacagacagattgttttggggtttggttttgtctaggcagcctctggccaggctccttaattgcttgctctgctaatatttcagcttcctctcttgactccttgaggaaccaaccgctctttggaagacaaacacttagccacctctgtgctccagggtaaccctgagaagctctgctgtctggggcaagctttctttccaaagggaatgagaggaaggcaagcaggcagggtcctgcagcgtcaggccttctggggaaagtttcctcattttgtttgacagggtcctcagtacatcagacacccagatttgaatataagttcagagcctgatctcaagctaaatcagaatgctttggggactaaccatgatcgagaattggccaaatagtatggcatataaacagccatccagccagccgcaagtaaaggaacgtttgatccttggcaccttaaatgattgattgccttcaataggcaaactgctggtctggaaatctcgttgaaggctgaatacttcatgcggagtaggacaagccttagcccaccttcaggttgaaaggaaaggccataggactcaaaagataatgactctgaaactaaactccttccttctgaagctgacagaggtacttagtgcatctcaagactccatctcataaaactcatttgtgagggatttgctctagatttttctaaacattttttcatctattgtccagacttgcaaatccagtgtggacctgatggagatacccttcacacctgcgctcccaccccctcggcagggagacgtctcagtagaggagaacacacccattatgctgggatttgtatttataaatcacttcccttttagggatgagcggtgtggggcgtgtgtgcgtgtgagtgtatgcgcgtgcgtgtgtgaccctcaagtgtactttgctcaatttagacgtgcagtatttccagaaacaatgaaaaaagtaagatgttttcttctttatgattctgctcaaaacaccacgtgccgcctcagagctttttctagagcctcggtcctcaatgacgcgcttgacctgttgatgcctcagcccagcgaagcccctcacctgtgccccgggcgacagctcttcagtgtgcagtgcaggcctggggtggactgccaggccttcgctctgtgccagcaacgccgttcttgttgctcctccatgaacaggggtacaagccctggcccctcctcgacactaagccccccacagactcagcctccaaggaaccgctgagcacccttgaagcatgtcattgtcagtgatacctttttattctatggaactctaacctattcgtgtcatattgaccttttgctgcatgagtcataaattatgaaatcagtcttacagtttttgaaatgtagccagcatttgtaaggctaaacctttttcatgaactgaatttaagtgaataaccaagccacagttcctcctcaaatggagagtgatgatcgacatttgaatctctttgccctttccaacggctatggcatcaggttctaaaataagctcgtaatttttcctgttattttaataatatggaaatattagcatagtgtttcttttgatagtgatagactataatccatatttaaattttatagagaagaaattttattgtactgtgatgtagatatttattatccaggtaaggatttgcccggtgtgtattttttacaattgagacattttactttaatctttaaaaaaaatgcattaaaaacacactcaaaaaaaaaaaaaaaaaaaaaaaaaaaaaaccagactgggggaaaaaaggtttggccttatcacagaatttttactgtgctgtataaatgtttgcaaatgcgaaaagtgtgcatttatagtgtgtttccacattaattaatgccgccttcaagagcaatattgtgcaggtaaaacgctgtttgtggctttctgttgcacagttaaagctgacccaccctatgcacaagacaatcaaatataaatctgtcctcctcaggatgcagataatactcatgtaaattatggagcacaatgtaagacaaaaggagacactttacatatgtattgttgatacagaaattatcagggcatgaatgagctgatgtgacattatgccacttctttcttttggttctcccttattaacttggcatttttaatttgaccatagagccaaattagttctccatgctttcttcgtagaaaatccttttttttcccataatgttttcatgccctgagaatcagaaaaatactacagaatagaaaaagatttacagtcattggaagatttgtgttttgcaaacagtgttaagtgatattgctagatggtgatatttttttcagcctaaaactctgttgaaatctgtgatcaaaatgtttta

SEQ ID NO: 3393 - DNA, 6000 bp, Homo sapiens
gaagaaacattatctgatttgcagcctgtaaaacatcactctttggtggctgtgtcaagaaaatattaaagtgggccaaagctaatgagaaagccagaagggagtccagttaggagatgatgatggattggactgcgagatggcagcggagagaaggaagtagttggattaaacatatattttggaggaagaaccaatgaacttgctaatgaattggatttaggtagtgaagggaagaaaagagttgtcttgaaggttatttgcttaagctcccaggtggatggtggtgccaagatgggactactgtgagaggaacaggttttagaaagaattaagttggagatgccctggttgggcaaatggagatgtcaagttgatggttggatataggatcctggtttcagaggtgacatctgcgatggagatatccacatggatgttgcatataattagtatttaaagctgtgagacaggatgagatcagctagagcagggcttggcaaactttttctccaaaataccaggtggtaaatattttcagcaggctataaggtctctcttgcaactactcaactctgccatggtagcacaaaagcagccacaggcaatatgtaacaaataaaagctgtattccagtaaactttatttacgaaacaggtggtgggtcatgtttggcccacaggctgaagattgctgacctgtgacctagagtatagactgagaagtagcccaagacaagacctaagagatatatattataatatatatatataatatatattattataattattatgtatatataattatgtcacttactaggccagtcatcattctaagtgctttacttatataaactcacttaatcttcacaataaccaatgaagtgactaccgttatctgttttacaaataagaaaactgtgacctaaataagtttatttctgtctcgagaaaaaaagaagtccagaagttggcagtccagtgctagtatggcaattctgtgtatttcagcaacctagaattttccagatcattcttccgtaatccctagagtatagtcctcactctcatggaccaaaatgatggctggggctccagtcattgcagggagcagaaagtcaaaacaaagtagaggcaaatggaatgcaccagttgtcttttaatgtgtcttttaagtttcctagaaattgccttgcaacacttcttctattacatctcgttggccagaagttagtcacacagacacatattgacaaaggggaaactgggacgtatagtttttttctcaggggccatgagcccaactaaaatttagcggttcaattactaaaacagaaagtgagaacaatcattagagtggaagttaaaaggctctgaccagttgctttaaagcttatcaattatctttctttatgtgtatttttgcaagtacagttagttgatagcacccttcctaagacatttctgctcagccatttcatatcttaggcctccactgatgatgtcctacatactcttccagctcactggtcacctcttctgtgaagccatccctggcactctaggcagattactcctgtgtccccatgccaagtttattacacttctccttgtatttcgttctttcctagcgtgcctccttttgtgctgcctcctctgcttgactggttaactcaaaggcaggtgaagcctggttgaagtgtggagggtaaattgctaagaactaagggaaatatgtagtgaagctgcaaatgaagaaaaaggagttagtacacaggatttcctgctccttggtgaagggactggggtcagacacctagtagaacaagtggttctcaaatgttgctacttatgtaaataacctcaggaacttcttttaaaaatcttgatgctaaagtttcacccataattattaaagcggactttctataagtcacacctaggcgcatatatatatatatatatattattgattgaaacacttctaatcggaattattaaagtcctcctgagtttatttaaggcagttggatgcactataagtgaaataactcttaagctgctctttaaataattagagcaggcaatcaagaaaataagacaacaacctcactgaagcttaccccatttgtgacacataatatgtttagattgctttactgactttacaaagaagcatgcaagactgaatcacaggtgacagatgtgattgcttctatcaggatgtgaggggccatatttcaaattcaatgtaagtgttgagctccattttcaactaatagtaatgaaagttttgtgcattcgttacaagtaaagagtattcccacttggtatgaggagtgtttcagaatgttttgttctcttttctccaaacaataaacattcgtgaggaagtgagctctcttaaatatgttttgaaactttttttaatttaaagatttctgagggaattcaggattttttaaattcaataaaaatactgttgacctttctgacgtttagtaaaaagagagagaaagtttttcagcagctattctttcctttttcactgcagtatttatatccagttccaggggagaataactctccaatttttcaagcatatttagagatttctgaaaattatttttaagtattcctttggaataaaagttgagtctctgattttcgttgatattgttactgatgaaaagcaagaaattgcttggatttctgcctttaatgagaaagagagggagccaggaaatgcactgggcaaaactgcaaaatcgaatggattcaacacgcagctcttaaccagaaaaagagactttggaacatgtgcatttgccaaaaaagaaaactgctttattgaaaggttaattttcagattaggcttgggaaatttgagataaataaatgacatcagacaaaaaaacataaggcctggatcctttttcctggggttttcagaaaatagttattgcttccaatgaaatgttttgacatttccagtagggagaaaatgttaattgtaatattgtgtatgtgttcttagtaacactgaataaatctttcatttgttttaatggtaatcagaaagtaaaaacacgattaaaatgttagctgtgttctttattccttatggtaacttttcatgctttctaggatattgtgattcattttccaggttcaaatatataccaactgacgaacatgcttttgcttgttttatatcagttgcagtttttaaaggagtcttattactatcctccacataggtctgcctgggtctcttttctaattttgtcacatctttagctcattctacaattccccaccttttcccttgagtctatggctcctttactacatttataaaaagtcagcaattaaagacagcacaatggtggtccacttgactgtatatttaatatacatgctattaagctacttattgacagagacggtgattttttttttctgaacagccatctctgtagccaccaactccttgctttgtacttaacagacaccccataatttgttgaatgactgtaataccctccttacttctgccatatgtccctgtcccagaattccacgttgcaattgatgactggagctacatgtccaaagcaaaggtctcactgttgaaaattacagtattacattgttgatggtcctttagagacaaataccaacaaggtcacatgctcatggaccagcaggaagccaaatgtaaacgtaaccacctgaggccgagccctgaaaacaagctgcctaagaaacggaaggaatccctagtgtagaagagcagcatccgcccttcctgatgtcatgatctacaactatgcatatatgtgacatgcacacactggccaccatccacagggagaaaataccattagtaatcatcctagcaagcattcacaatctaatttggtatttgttaactccttagttaaaagatatgatgattcttacagaaaatgctgttccctttttgatcactatctttaagtaagtacatgaataccacttaaatcacattaaatcttgaaaataatctcaaaagcagatttgaatgggaataaagtggtaagtgtttacagttttccacgcactactgatcagagtactgttaagcaccaacagaaaaggaaagctgctatataataggggtattcctcatataggggcattggcatacagtctctcatgcctttataaagaaaacataaattacagaattgaacagttaatgtaagctttaggtctcatgtagattagtgcttatgaagtagaaaataatcatgcgcaaggaacagaataaaactcacttgcagacatcagcagcattttcaaccgtgtacttccttggcatgttttaaaaaccagcgggacctatgtgtcatgggaagatggttggatcctagtatgaaaacccagtcagtaacattcaacaacagattcaaccaccaatatttgcacagctagattaatgttttggagtcagtcagtcatcaggctcattactactggattttctctggttcatgctaataaactagattattgattttaggattttctttgtatccaaggatattctctaagatgtctttataatgtttcatgcttaagctgtcaaccaaaatgacataacaatgagtaatcgttttataatcatgttgaaaggggttaaaaacagcatataaaatgcatcttagcagcttcagagtaacattctcgctgtcacttccctatctgggtggaggtcattcctacctgcctgccatcttccccaggaattaactagctgcatgcacagcttaagacctttgatagtcataaatctgctttccaatatgtttggatggcagaagagctcaaaagacacctcggtctaaataggattttagcacatcaggtgctattacaaagtaaagcaggctgggttgctgtgttggtggtggtgtttattcatcttcccttcgcgtttcatgtgtatgtatgtatgcttctctgcgtatatgcccagctctcagggtgtatggggctggagaatgcatgcgtagactgtgtgtatatgtaaactagaaactgaaccagggaaacaaaatgaactactgtatgcaagaaatatatgaagtgcacccagctgccggcagcaattgctacatgcagtccactgattattacgcgtattttgaagatagtccgggttacagcggttgcgatgctcaggctgtgcccagtaacaacatatatatggaacaggcctgggcagtgaatcagccttatacctgtagttaccctggaaacatgtttaaaagcaaggactctgacttggacatggccctgaatcaatacagccaacctgaatatttcactgaagaaaagcctactttttctcaagtgcagtcgccatcgtattctcaaaaaaaaggtagggaccattttgcttaaatttgttcaaagtttcactgtttgttttcgtttcattttaaagttacagtttacatcagcttcgtcaaatctttgaatttgaacgctaaatatttgaaattaaaaacggcagtaagaggggttgctaggtgattgaaggactctgtgaacatcaagatttccaagcactttttttcttcatctttgaaagctggagtgagttgcctttctgtattttgcatgtgtgtgtatatattgcccaaagtgactattgttggcttctttgcgaaagaaaatatgtgaaaggtttccttctggcgggtaggtgttgtggtgtttgaagtgagataattctctctagttcaggttcagattaaaaactcatttgacttttccttggcacttcattttgaaagtttattttagttgactagttaactagtaaaatatttagtgatttagtgatttctttaacagtactatactaatgttgatttgctaggatctgtaaatgttcattttaatgtatttatttatccatgtaaacagtaaagaatctatttgtaac

SEQ ID NO: 3394 - DNA, 6000 bp, Homo sapiens
ctactaaaattacaaaaattagctgggtgtggtggcatgtgcctgtaattacggctaaggcacaagaatcccttgaacctaggaggtggaggttgcagtgagccgaggttgcaccactgtactccagcctggcaacagagcaagactctgtcgcaaaaaaaaaataagaaaaaaaaaagatttaaaccactataccaatatcatttaatttctggtaagcactgaccagcagacagtacaagattatcacagattatcttcttgcaaaagcctcaaatgcaagtattctgggttgctacaggtagatctgccttctgtgcaaatttaatgtgtctgagcaagggagatgagccctgttatcaagcacatctacatctatcagaaacactttccagggagtatatcagattgttaggactgactgtcatgatggaaaagctacaatatggttctcaggacagtcaaggttcctaggtcctaattccagactcccctgatttgctatttggaaaagatcctgaagttcacagcagaactcagtttctcaactcaataaaaatagcactgcacaagagctgacagtatataaagacttcaaagtcctttgaaattaggacagtagggaccaaacaacattagcattgagcatagatcactattctagctgtcagttggccaggttcctgagaggaagatatggaaatatattacttgtgactcagtgatttggatactcccccccacttgtttaaatgccaaaattgactaacaagtttgggaacttaaattggagaatgaacattttaaatcagaagctcaccggtctaaatatattcaactcccctactacttggatacaagagattcttgagtgaatctcactggaatttacattaatatacatgggctatagaaatcacaaacaatcacctcctcagatataaaataactatttttaggggccatatgagagactccaacaggtatactcatctcatcacaatggagacaatttcagaatccttttgtattaatatgttgtctcataggtcactgggctgcatgctgaactgaaaaatggctagcagagccaggtacatagtagatacataaatatttgtagactgaatgaggaatcaaatcaaagaatcagaatgactttaaataaaacaaggagttaacttgccatccattgctcaaccagctttgacactagaacaagcccttcaagcaaaacagacagctgtgatctggacatatgatgcaatgcaggcagcaaacgttcactctggacaaatccaagtccaaatatgacacttaataccaacccagaagggaaagagaagcactgccttttctacccttccattcattcttccaacagtgtttcacctgtgcccatgtaccaagctctttgctaggctatggggagtcaaagatgaataaacccacacatcgtgcctcatcacaacttagaggtgggaacagaaatggaaacaaactgccctgcagggtgataagagctatatagactaaagcccaaagcatcaggggccacatattcaggggtgtttatggccatagggtcattttcaagtacctcgttgtcctgtcctctcaaattgctctaatcaaaagttggctgacacactagatatttgggaaaattagcttacagagtgtggtaaccactcattcctctaggtttcctgagctttatttctgcattgggattcatcaccagaatctccactgataggccatagtagctcaggcccccaacaataaacatactgggttacttttcattattatgtcttctgcaatttttttccattccagagttggtaacaagacaagatcatataaagaacctcacttcactttatgtagaattgaagttcaagtattatccatgatataatttgatatttcatacgagtatatactagttggcaagcaccatggcaggcactctacatgtgtcatccttacaagtttaatgcatgccacctccagaccccctttttttctgttaacttggctactactaagaagctcagagccaaattaaatactctaaagcagtaagcacttaggattgtagtttaattatcttccctcctctacaagattttgatctttcttcccctcccatttttaacagtctgattttgtgaaatttttactatgcatttactcagcacacttatgaaagtcaatactctagacacaaaaacaaatcaccataatcttcaattataatttccttttgctctcaattggcaagagtttccatgaataactaatttgaagatgactcctttgatattatgctctggtcacttgaaaactcaaataatgcaatatttcccaccatcatttggttcagaatacttttatgaagcggcaaaagagggcaaaaagaggctggctgacttaactaataacatatgataaccatcaggttattttcaaagctatcaccaagacctatttatttctatcttgtgttggatcctgaccattacattttgccccctcaccaaccaccacttttgcagcccaaattgtaccaccatgcactggttggtccacttagggctgccattgccagaggcactgccaggacctgctgagtgagaagacactgccatcacccagtgaagtctagtccctggaatttcactcttagcactggcaatgcttctggaactcataaagattctgctgaaattcagggagttgaaggtcaatgtcttccagggatcaaggtaacatgtcagaaaaattctgctgctgaggatttccatgtattcaaggcaaatgcccttaggaggaactcgcagaaatagctctttgcattgtcactacacagaatggaagaccagcttttatttcgaaaagaaagagagagagagaaaaataaagagtgaaccatataagcatggaatgtgtgcaacacacacatacacatgcacacacagaatagatcttggcatgcccaactggcacccacttaggatgtgtagtcaggtatttttgagaacataatatttggacacaatcattaatttattcaccaaagagttatccagcacctactgtgtgccaagtattgttctagatgctggaaaataagagtgagtgaggcagtcaagagtcctgtgctcatggattcgatattctaggcaaggatacaggcgatcaacaagcatcaattgaaatgaacaattcagattgcaaatacaataaaggaaagaaaaagaagaacaaaacaaacaaacaaagagaaaaaccagtgtgatgggtctgaaaaggaatgagggaccgcctttgctcaagtggtcagggaagggctttctaagaaggtgacacgtaatcttacactagaatgagaagaccagggcgaagaaaccaatcacctttactctgatttccatcaaaaagatgggcttactaaaaaaagaaacatgcaataccatttgtggctccacacaactcatgctttaaacaactgcaaaaaccccaggagaggaaaggaatccacagctttctctgcttttaaggcgattttaagaaatcacctttcccaaagataatggattaaaaagttgtcttaattcatctctaattatggcagaatttactacaaagaaactgaaaggagatacatggaatattcattcctctacataatgtcagttgctttatgtaacaatattccaatgtcaataaaagtatacctttgcattgtaatgccaacaggaattatttcactttaaaaaaccagttctgtagctatactcagtattatttatttttcactggctataaaataaagccaaactgtatttactagcagatggtctcacttccaatatataataaacctctgagatcaggtaaaaatagattctgttagtatttctttaacatgctcaaattataaatgatcgttcaccaatgtctttgtataaaacactccaaacaaatcacttggtactggatttctgtttgactcaattaaaacacttagccacctggcatgaaaacatcctaaaaacatcaactgcttaaaatactttgcactgaaacacgtttttcattgtttcctagcctctgactgatttcggaattagaaagaattaagcagaagtgaattggggagcaggtcagtcactgaatattcagaatgaatcatgaacacgttaaaatgcaatttttatttctttgcagtgcattgcatgctatacattcttacaatttaaataagcatactaaactaaagccaaataatgtgaagattgcccaacaggtctacattacctaatacatttatcattatataaactgctgtgcttgatattaatacactgtgcaaggaatgcttaatttcttgaacttccacacaggtctttaaaactgaatctcactagtacccaagaccaataatgtgctgaggaagaaggtatttcaaatatatttactgattacacagtgtttgaatcttcaaaaattctaaatttatgtggacaaaggagaatggagaatctgaacttggctgttcatgcaaactctttcctttctttgactcactttatgaattgttatgtttctagatccttcttttaaaattttccatttggggaaacttgtacatttaaaaaaaattcatctcattttctccctccccctccttaaaataaataagaaggcttaagaattaacactaataataatcccacaatggtcattgggaaatcctcccccaaagtgacaactgccgctaagaagggcaaaatccactaagaatgaaaattcccccaaatgagtccttctccgagggggtggaggtcacacagttggcacaattggtatcacaaccaactcgaggagacccagaggaagatgctgcgccaagagaagcaaagcgaaggagcgcgacccaggaggctagcgaaatccccgccaagcccccaggaggcggagagaagcccagtcgccaggcaccggccacggcgcacgccaacatccaggataattctcctttccaagcccgggagttccggggcaggcgaaaaaggggggatgggagacccacagtccctttaaccctcccccctggcctgccaaccttttccgaacccccatgtcacacaacttcctcatcatggaaacttccactgggttcggcgctgaggatgccaaactccatttcacaaggaacatgtcaacagctgggcttggggtttgaggaacagagccgctgcgattggaacagagcccggccaccctgttccaccactgtccactccgtagctcccagcctgccgccgcgcggtgcccgaacacgagagggcacctcctcccagatccggggcgcagaagccccgcggaggcaggtaatcaggctgatgacacccccaccacccacgctcacccgcctgcccgcccgcgcgcgctcggcttagccgcccgcacccctccgggttcttgcgacgctccgtcaccatcccgcccaccctgtggacagttggaactgtcgccccctcctcctctcaccccgctgcctccgcgcggtcctctagccaaattaccagtgccctggagccggttgggttgagcgcccctgcccggggaaggtagcctgcgggctcttgccccgagcccgcggagcaggaggtctcttttccaagcgcactcacattattcatgcaaagttaatccccgccgcgtcacggccgcccgcccgaggatgtgcgccttccttggccaagccccgcagtctccaccctcctccgccccctcctcccggcggcggggtcccggggagcgccggcgactgggcgtcgcgcgagtcctgcaaaatgtcaactccttgggcgaagagaggcggccgcagccagggccgcgccgcacctccccggtctctccacttttataggcgtaggaagctactgcggctggggcaccagagtccccgcctctccgggtccc

SEQ ID NO: 3395 - DNA, 6000 bp, Homo sapiens
cggctgacaggtgtgttaagggagcaccaattactgcaacaaatcaacacttgcctttcagtgacttaacacaaaagaagttgattacttttctcggtaatagttcaacatgagtgctctagttctcctccacatggtggtaaaagactcttccagattgtggcttactagttcccgcccagggcctcagaatcttctacctgtagttggaaaacaaggtaagagaatgtgattagggagttttctagccaatgacataacatgttttctttagggctcttctgatcgtcccggtgcacagtagttccttaaatgaagggctagagagatgtctcatgactgccagaacatgctcaccttttccagcctcatgtgcctatccaataactccttgtgttgcatgcaggtagcatgatgagctggttaagagtataccctctgtcacccagtacccaggcctgagcttgagcagattatttgatcttcctaatttttaacatctggaaaatgaagtacataataatactgtttcacagggtcctctggcaaactttaaaagatgtatgaaatatttaggacagtacgtaaaacataatacatgtctaatacatgttagctatgttatgtactccttgctataaccagccatgccagcatgtctactgcatctccaacatgccctatgcttctaccacaataaaggatcaagttttttccccatggccagcttcatgggcatgtgatctggacagctgcatacaacccatgctgggaagggcttggtgcttgaggcctggcacttcatttaatgctctgttgtcaccgtaatgaaattcctaataattttatctttgaacttttgttttgtaaatgaaggctgatgggacaatggagcatgtgcatgaacagaggaaatacagataacatgcatagctgctgccattctttacttgttccactcacacatagcattcttgttgccccataagcacagaatccctgtgggcacacaatgtgtgggagttctgcaaaactcaaattgagtatgaggtaagcatgtcacatcaatgactaagtgaggacactgacaaccccaaaatggggtttgccacgctttccattccaaccaaagcctgatttgaatgcaaaaagaaggtaacaaccaaggaaactttctctgtcttttcttatgttaatacttctctgtaaccacttagtttgaaaatgatgacatagaaggaaagagaaagataaggcaacctatagttccttttcctttctggtctcctttattcaaaagtaagccaaaggcagagtgttggtaaaaacgggcatatatcaagatatgaaataaaaaagttagttttgtgctgtgaattagagtgtacttgaattagataattttgaccctgtcatcttccccaagaagctgtctttcctgaagggttggagttcttacccagctgctatggaccagaatcactggagccctcatagaaaaaataagttccaagaactaacaatgaacagacagaagcagaatctccagggctaggtcaggtggctgcacagccagcttgagaagtagctgaataagcaaaacaataccaggggttccagtcccaatactccctggcaaaatgtggtccatctttgatggattggttcaagtgccaccattttccatgaaatcttccctgatttttccctcccctcacgcccacgtctctaactccctgaccccaaatccttcactatatattaattatctttgacatctaggacattctaacttgaactttgcttctctgaaaagactctggtaacactgagggcatagcagggcagggactaggtttaggcaagtgaggcactcatccctggtgtgaaatttaaggggatgccaaaaaagaaaaaaaaaaaagcctcagtaaatcaggagaaatattttaatgcactattttaaaaatcaaaattaatgcaacaattattcatgatgaacaatacatcaaaattttaaataaaggcaggctcagaccctgcacttgtatcactggcctcactcacttctgcccaatccgagccctatgaggttctgtttcattcattttcttacaccagtagttgctaaataaataaatatatgaatgaattgctttcttgaactgagtcatcagcttaaaggtatagatcctggtaatgaggatgtctatggtgaaatatgggaatgggtcctggaaacagccttggtgtgccctctcaagtcagctggaacacatgaccacataatctaaagtttgaataaatgttcttccttcaatcaagtcatcatgacattctcctccattgtcctaccttgtgtaaaaccagaaaaataaatgacatgatctcttggtaacccttctttaccatcatcatgcagcctgtaggacagccctcagaggtcctgttcaaaatggaaccctagtagttcacgttatcattaacattgcagtaaaactgccctcccccattgttgtagaacattgttactaccacagtctcatggattgtttgaataatgccacgccctttatttatttcatgctttaattggctcatttctgaattttctgggcaaaatgagatcagaaagacaaagcccttgaacaaagagaagcaacagtttttgttacatttcattttgtcctctgtatgtctccttcttaaataatttagctccaagttatactcaggaagagaaaaaaattaaaagttccagtaggccgagaagcccatgatccaccgtgttgaaggaagatttgcttcacctcaccaccccccaaccccctcccgcccccccgcggtaatactaagctgttcacacgctgtgaagaagacccgaagactaggttgtcaactgttggggcctacctgcgccagacttcttcctcagtggccagctttctcaccccccgttagccaccagggggccgcctgcttggaacaagtggtgtagacgccacagcttttctccaaaccaaccaaaacattccggggcagctttggagcaaagcccaggaacttccctgcaaaggagaacagctctccaactacagaagcctgcaagtcctatggtgcagacttattaagagtagagaagaaagcacggacttctcaccgaggaccaaagggaaatggggtctctggggcctgcaactttcttaaaagtgcatcagtgaaaccctgcttatccagcggggtggttgttaatgctgtcagcaggggtggggggcctctcacccctttccctgggacgctcagaagaagcgagaataaaacatacatgtcactggctggaaatctagagaaccttccaataaataacctatacattgtcaggcagctgaggatccatatcgtcataactctattatactgcgtgttacacgaatagatgtgaatattaaattatgatgtcggaattattttaatactgtctataagaaattaattgtactctgttgtcaaagtagttttgttgcaactatagttccttattgactaccttttagctgagtgaggactcggtatttcccaagtatccttctagctcagaaagcaagtctcttcctggtctccaggacttaaggtcgggggcatttgagagacctatatttgcccgggaaagatctcttgaagagtatacattatttttgtcttcctggttttatctatacatttccagggcaaagacaaattaatagggcggccgttctgggacctgaggagtgtctcagccctgtacgcgcctctcccacgatatgcataatggcggtgggggcgggggtgtcctccttaagggcaacccaggcacgtcccaaacttccattcgtggggtggccgtggtggttaagagagctgccagatggtcggaccagcggaggccccaagaagagccagagcgccctgtattcccgacacgcgccacaagtggtttaggagcggagggaggagcgctgcggcacgggtcgggccggtcgggccgggcaaagaaggccgagacgtgctcctggaagactcgccctccggtcccggtgtcactcgttccccattctttcctcttctccaactagagtaatgacgcccaaacccgcacctatgcgcgcaggcaatcgggtgggtggacgcgcggccaccaaacccacagcaccgtcaccaaccctgggagggcacggccgggattaggaggagggggagcgcccacacctggggaggcaggtgcggaggcggccggcccggggacctcgagtgcgtaggactcggggtcggggtcggggtcggcaagccgggcgctgtgagcgcgtcggagcgctggcccggagcctggcagggggcgtctgtaccggctgggcagcccggggcggtggcgatggctggcggcggcggcggggtgtgcgccaggaggccatttcctcgctgcgcccctggcggagccgggtttgcctgctcttggccgccgccgccaccgccgcgcaagtcggacagccgtgagggctggaggggaaaccaggtcaccggttcgcagacgcggcgcggagcaggcgccccgggcccggagtaagacagcgcccgggaagcgggccggggcgggccgggcacgcgggggacccggagaggcggggactctggtgccccagccgcagtagcttcctacgcctataaaagtggagagaccggggaggtgcggcgcggccctggctgcggccgcctctcttcgcccaaggagttgacattttgcaggactcgcgcgacgcccagtcgccggcgctccccgggaccccgccgccgggaggagggggcggaggagggtggagactgcggggcttggccaaggaaggcgcacatcctcgggcgggcggccgtgacgcggcggggattaactttgcatgaataatgtgagtgcgcttggaaaagagacctcctgctccgcgggctcggggcaagagcccgcaggctaccttccccgggcaggggcgctcaacccaaccggctccagggcactggtaatttggctagaggaccgcgcggaggcagcggggtgagaggaggagggggcgacagttccaactgtccacagggtgggcgggatggtgacggagcgtcgcaagaacccggaggggtgcgggcggctaagccgagcgcgcgcgggcgggcaggcgggtgagcgtgggtggtgggggtgtcatcagcctgattacctgcctccgcggggcttctgcgccccggatctgggaggaggtgccctctcgtgttcgggcaccgcgcggcggcaggctgggagctacggagtggacagtggtggaacagggtggccgggctctgttccaatcgcagcggctctgttcctcaaaccccaagcccagctgttgacatgttccttgtgaaatggagtttggcatcctcagcgccgaacccagtggaagtttccatgatgaggaagttgtgtgacatgggggttcggaaaaggttggcaggccaggggggagggttaaagggactgtgggtctcccatcccccctttttcgcctgccccggaactcccgggcttggaaaggagaattatcctggatgttggcgtgcgccgtggccggtgcctggcgactgggcttctctccgcctcctgggggcttggcggggatttcgctagcctcctgggtcgcgctccttcgctttgcttctcttggcgcagcatcttcctctgggtctcctcgagttggttgtgataccaattgtgccaactgtgtgacctccaccccctcggagaaggactcatttgggggaattttcattcttagtggattttgcccttcttagcggcagttgtcactttgggggaggatttcccaatgaccattgtgggattattattagtgttaattcttaagccttcttatttattttaaggagggggagggagaaaatgagatgaattttttttaaatgtacaagtttccccaa

SEQ ID NO: 3396 - DNA, 6000 bp, Homo sapiens
gtatttttagtagagacggggttttaccatgttggccaggatggtctcaaactcctgacctcatgatccacccaccttggcctcccaaagtgctgggattacaggcatgagccactgtgcccggccttttttttttttttttgagacggagttacgctcttgttgcccaggctgaagtgcaatggcacgatctcggctcactgcaaactctgcctcccaggatcaatcgattctcctacctcagcctcccaagtagctaggattacaggtgtgtgccaccatgcccggctaatttgtgtgtgtgtgtatatataaatgtatatatgtgtgtgtgtgtgtgtgtgtgtgtgtgtgtgtgtgtgtgtatatatatatatatacacatactttttttcttttttgagacggagtctcgctctgttgcccaggctggactgcagtagtgcgatcttggctcactgcaagctccacctcccgggttcacgccattctcctgcctcagcctcccgagtagctgggactacaggcgcccaccaccacgcccagctaatttttgtattttttagtagagacagggtttcaccgtgttagccaggatggtctcaatcttctgatctcgtgatccgcctgccttggcctccgaaagtgctgggattacaggtgtgagccaccgtgcgcggcctaatttttgtatttttagcagagacgggatttcaccatgttggtcgggctcgtctcgaactcctgatctcaggtgatccacctgccttggccccccaaagtgctgggattacaggcatgagccaccacacccagccccattttctagcctgaatatgtcagtggtcagaacatggatcctagagtcccttccatcttggtctctctcgaatagtttgagtgcctccctgtgttctgccctgttgcataacagaggttgctgggttactcttaactactttgtttgggtttaacatattcaataactatttttgtgttttgtgctcagagggctgaacatgtccgagtttgtctgtaacctgtcagcaaggccttatgtgtacgacctcattgccgtgtccaatcattatggagccatgggggttggccactgtaagtattgacatctgcttccttctgagatgttgaaatgtgctcggccatcatctctcaccagtggaccaggcattgccctaaatgctttgcttatgcagtttcacaggcttcatgctgcacgctttcttcatactgattcccctctctgtttttttttaattctttttttttttttttttttgagacggagtctcgttatgtcacccaggctagaacacagtggcgcaatctcactcactgcaagctctgcctcccaggttcacgccattctcctgcctcagcctcctgagtagctgggactacaggcgcccgccaccacgcctggctaattttttgtatttttagtagagacggggtttcaccatgttagccaggatggtctcgatctcctgacctcgtgatccgcccgcctcggcctcccaaagtgctgggattacaggtgtgaggcactgtgcctggctggtttgctctttttttgagacagattctcactctgtcacccaggctggaaagcagtggcgcagtctcggctcacttgcaacctccacctcccgggttcaagcgattctcgtgcctcagcctgccgagtagctgggattacaggtgtgcgccaccacacctggctaatttttgtatttttagtagagacagggttttggcatgttgcccaggctggtcttgaactcctgggctcaagcgaaccaccctgccttggcctcccaaagtgttgggatcacaggtgtgagtcaccgtgccctgcctgtgttcatttttatttgctaatttttgcacacaaacataccatttgggcaagtttctcatcctcagttttctcatccatgaggttaggctggttgtgtgagggtccacattgggcctacagttggaacttcaaaattgaaagccaccgttgctgctattgtgtcaagcacagactgtgtgaactggccttgggcaccttctctgttgccctttcccatgatcctcaccaccactttgtgcagtcaatgctatagtgaggaaactgaggctgaagtgttaaacaccttacctaaaaccacacagtaagttgacactggatatcagatctccattgggttctgtagtttctgagagtctgggtggagcaggaactgggctgggattgctgtaataaacacatcctgcttgggaatagtgtaaagtcaagacaagaagcattgcctctgggaaatgcttgaatcattgtgggaaactgttacctaaccacagactctggactcctagttttagagaaagataaatttttttttttttggatatggagactaaggtatgttgttcacatcccagctctgcaaacccaaacacccaatgttcctctaactgggattattctgtaggctcccgaggcactaagcattctgttgatgttagtagccacctgcctagatgcaatgggggagactgacttggcatgtccttgtgagagctattgttttgcttaaatcttagaagtttcagctccttttatgggttccctggttttggattattgcacatagccatcctgaagattggcactgaatagctctgttttttctattagtttcccaaaattatagtttaaaatcttggtccctgacagctccatttttagccttttgatcctttttgagaaggaacagattagaaaagaaggtgagttgttttttggttgttaagacacacactgtaaacttttttaatttcaggggttttgttttggggatttttgtgtttatttagtgcaagcctaataagctagccagattaattctctggagaccgctagagtattttctttgttgacttggcagacactgcatatgcgaagaacaaactgaatggtaaatggtattactttgatgatagcaacgtgtccctggcctctgaggatcagatagtggtgagtaggccatgatatgtggttcttcctcatgtcgttatggattaaagctgggaagagcctctatcaggctagttggttatttcatcatcctgatgtgatagtgggagctaggtgtgacagagctggctggcattccttcagggaccttcataaatgagaagctcagctctcctcagagttctctgcacaaggctccttccatttcctgctgcctggcaggggcagccatcctcaggtggaagggtctcctctgtgtggatatggcagatccttgagggttttggacagctagagaaaagctggggaaaatgggtgatttttccaagcactgaatggtctttccccctcttgtatttcagactaaagcagcttatgtgctattttaccaacgtcgagatgatgaattttataagacaccttcacttagcagttctggttcctctgatggagggacacgaccaagcagctctcagcagggctttggggatgatgaggcttgcagcatggacaccaactaatgctgactccacgatcctgccaccctgtagcgccagtgtaatcccccaggagaacatctttgacactctgcagactgctagtgttctgtctaaaaaccagacaaggaaatacccttcttttatgagcagaaggaaacaaaaaaaaaaaaagaagaccgtttacctagaagaagctatgtcaagaggctgaattatttttatttttaaacaggtggtgagaaatttctgtgaaacctgtgaagctgaaaagggggtgggatgggggtactcaatggagtatgtctgatggatcccgaagaatggagaggaacacaggcgctgagtatggagcagcctggagacccaccccacctgcagggctgccctgagcgcctggatttctggttctgatgccaatactagtcaccccaagtagtctgctcacagtaacccaaacctcaagtaaactcccctttccctcgctatgtgcactgatatgggtttataattttctgaaagttacccactgaagcccatttctccgttgagtcatcttgtaatttccagctttctccccgctaaggaagatatctagtgttggggatcctggcccctcaacctcctgtggaacccagcagttctgttatatcccctgctaccctagatgaattaagacggttaaatactgtgtggaacttttattagataacacactttttattagataacgcttaaaggaagtcagtacataaaactgcccggtgctgtgtcccgtctagttgtttccatgttggcttgagaacagaaatctttgtgggagttagccgggaaagggctccagttcatggcgatttagggtagtaatacattttggtgttacccagatgctttctagaacgggttctttcctcatccctgccaagactcttcccggggcccccattcgaaagccccgtccccactcccaccgcggggccagccgctgcgtgtgggcaaggccttaaggaaccggacgtatgggtccgggattttttgtctgaccttcaacctaatccgtgggggtttggggcctgcgcggggcacgcgcatgcgatgaccgttggatgggtcggcgtcactgcgctgcgggtgaggacaaggacgtggctgccgactcgccaaagggggggtgccggtagggccagcggcctgggagccgcggtggggcgggaggcagcggcggggcgggccaggaagctgtgggaagtggggcggggcgtctttggggcttctggcagatggcgggttcctccgcgagagccgagaaccgcctactccaggaggaaagcccgagggttgtgggtcctgctatagccagggccaagctccaggaaatcgtggccattcaggggtagtttgcagcctcatttgtaacattattgtgttgtcctgtgcatttccaatgcattacataaagacatggtcgcttttaggagaaatgtctgaaaaactaagaagatgcagaaaggaactgactgcagccattgaccgggcctttgaaggagttagttattcccaggagtgcacaggccagcagaggctggaactgagcgccgcgccgctctccttctcgctgcccgtgcacaggctcctctgcagaagacatcctctggcagcctgctcttctgctgctccttttgctgctgtcccatgtgctcctgagaatgagaaccctgcctttgcaacaaaccatgccccggtaaatgcaaaaccacatgctctgtgccccgagagaaaacctctaaccagcaaggaaaatgtattgatgcattcctccattttggcacctgaaagagagtcttggagaactgcaggagagggggaaaactggagaaaagaaaatttaaggtgattctaattttgatggtttaacagctacaattaaggggattcttgtttctgaaaaagttgttgaagatcctagatttagttcatgacagtgctcttgcctcctcttggcagctctgtgactgcatttggggagttgacagacattcttcagaatctggcctaggaaacagttatattttgtgtatatgttccagttgaggggctagttgtcaatcgttgatgtcaaaaaccagtcatggaaaccactttgcagtacccaaaggggtagtggatgtaaaataaccgggttttaaaaataaccttattttttaagttgcagaaacaaaagtcttaattccatcttaactcctgtgtttgaatctggacactggggcctttgataccctcctttgcccacattagggagaggcttaattgaaggctgggccctacttcctggcttcatctttgcctctgctccccgctcttaccccagatctttttggaccatcaccaggtctcttctagactttttcttctcccgagtaacttgaaattgcctggtcccaggcaccttgacttggagaa

SEQ ID NO: 3397 - DNA, 6000 bp, Homo sapiens
taaatttttttttcctttttttgagatgaagtttcactcttgttgcccagactagagtgcagtggcgtgatcttggctcacggcaacctccgcctcctgggttcaagtgattctcctgcctcagcctcccaagtagctgggattacaggcgagcaccaccatgcccagctaatttctatgtttttagtagagactgggtttcactaggttggccaggctggtctcaaattcctgacctcaagtgacctgcccacctcagcctaccaaagtgctgggattgcaggagtgagccgtgcctggccctggtttttttgcctcctaagtagttgtgactacagaatgagattctgtctcaaaaaacaaaacaaaacaaaaaacggctcagcgtggtggctcacacgtgtaatctcaacactttgggaggcagaggtggacagagtgcttgagccctggggaacagggcagaagttgcagtgagccaagattgtgccactgcactgcagcggggatgacagaatgagaccctgtctcaaaaacaaaacaaaacaaaaaaccccaccatttatttatttatttatttatttatttatttatttattgagacggagttttgctcttgttgcccaggctggcatgcaatggcacgatcctggctcaccacaacctctgcctcccaggttccagcgattttcctgcctcagccttctgagtagctgggattacaggcccatgccaccacgcccagataatttttgtatttttagtagagatggggtttcgccatgttggtcaggctggtctcgaactcctgacctcctgatccgactgccttggcctcctaaagtgctgggattacaggcatgagccactgcgcccggccacccccaccatttaaatcaaacaaactggctaacaaagtttaaagactttgtaaataatggtgaccttgtagtccgggcacggtggcgcatgactgcaatcccagcacttgggaggcggaggatcacttgaggccaggagttcaagaccagcctgggcaacatggtgaaactccatctatactaaaaatatgaaaattagctaggtatggtgatgcagaccagtagtctggttagctaggcatggtgatgcagaccagtagtcccagctatttgggaggctgaggtaggaggatcacttgagcccaataggtcgaggctgcaagtgagccatgattataccactgcactttagcctgggcaacaaagactctgtctcaaaaaaaaaaaaaaaaaaaaaaaaggtgatcttccaactatggaattcactttattcttcacatttcaactaccagcattttgtaatcttttatttatttatttttctttttttccctccaaatacccagatatcaagaagaatattttgcaatcctaatattaatttttaagggctaccaataattagtgcgctatttttatagctattaaaagcactaaattcctgacttaaaaatattgtccaaatttttcatttttataattaggttttgtccccttttctagtggtgctgaggacttgtcctacttgtcttccttaagactgccataaatggtttggtgaaactgctaaaaaaagaagagggaagcagacaccctgaaatgtagattctgaaccgatgtcagtaaccaacttttttttttttttgagacagagtctctctctgtcacccagcctggagtgcagtagtgcgatcttgactcactgctacctccatctcccagtttcaagtgattctcctaccttagcctcctgagtagctgggattacaggtgctcgccaccatgcccaattaatttttgcatttttagtagagacagggtttcaccacattggccaggctggtctcgaactcctgacctcaggcgatccgcctgccttggctttccaaagccaaagtgctgggattacaggcgtgagccaccacgcctggcctcaactttctttttccataaataacaggactaaaggtagtgtttcttttttgataacatttttaagagtttcagccgggcacggtgcctcacacctttaatcccagcactttgggaggctgaggccagtggatcatgaggtcaggagtttgagaccagcctgcccaacatggtgaaaccccatctctactaaaaatacaaaaattagccaggcgtggtggcgcacacctgtaattctagctactcaggaggctgaggcaggagaatcgcttgatccagggaggcagaggttgcagtgagctgagattgccccactgcactccagcctgggggacccagcaagactccatctcagaaaaaacaacaaaacaaaacaaaacaaaaacgagtttcaaagaactttcatagaaggggacttgttagggttggctctgcagatgtagaatcatcatgtggtggtggtaactcttatctacaggggattaattactatgtggttatttaaggcagttttaattccatatttactttctcctactatctacccaattgccaagaggcctttcttatcagatggtgtgtgatggatgacccagggagtgcaaattaatttcaattggccaaacccaacataaaaatagtaaatctgttcaaatgacctaccgtattttcactgggccagttccccttccttcacccccgacacaaaacatagctcatcttttcaacaggaataggtagaaaaataagaataataaaataaaatagacatggcttctctgtttctcctcttctccctcacagccacctccatagtgagaggttcctaatggttctgtgtctgagttacaccaccgtgggcgtgaagcaccctcagccattttgtctctgcttcaaaacttcctataatgcctgcctgccttttaaggcaggatatatggtctgtctggcctcctttctagctttagatccccttaggctgttgtagcgttgtagtgcccgcctcaactggcctaatccccactctctgatcctgtcctgccttttccagaaattatcttctggtcccttgagtctcccctcctgtaacatgcatcctcatctttattctgccagcattttttttcaataccacactcaaatgttactcaagtcaaaggcttcctatgagagcaggggttgtgcctggcgttctacagcctttggttcacacccccttttttttttagagggggtcttgctctgttgcccaggctggagtgcagtggcgcaatctcggctcactgcaacctctgcctcccaggttcaagcgattcttctgccttagcctcccgagtagctgagactaggtgtgggccaccactaacggctaatttttttttttttttttgtatttttagtagagaaggggtttcaccatattagccacgctggtctcgaactcctaacctcgtgatctgcccgcctcggcctcccaaagtcctaggattacaaacatgaaccaccgcgccggacgcccggtctttttttttttttttttttaagacatttcggtctccacgttggtcaggctggtctcgaatgcccgacctcaggtgatcctcctgcctcggcctcccaaagtgctgggattacaggtgtgagccaccgcgcccggccggttcacaccctttatttgtatttatttttttttttttgagacagggtctcactttgccgtccagtctcaagtgcagtggcgccatctcgactcactgcaacctcgacctcctgggctcaagggatcttcctacctcagcctcccaagtacctgggaccacagacgcgagccactgcccggctattttttgtatttttttgtagagacgggatttcgctatgttgccgaggttggtctctaactcctgggctgaacctatccttccgcctcagcctcccaaagtgctgggacgacaggcttgaaccaccgcgcccggcctggttcacacactttaatggcacttaccacatactgctaggcattgaggttatttctgtaacatctcttcttttctactagattctatgagggcaggaactaggtcttatttttctctgaggacaaggactgttagacaagtgtatggagacgcatctagaccaactgcctgacttcctctttcctctgggtttacttctccctccaagaggagggttgtgtgtgtgagcggggcgactggaaaacatagtgttcaggacgttgtatcttgttccaggaactaagtacacgcctgggtaactaatgtggagtacctctccttcccctgttgctatcgcccctctgtggctgcttggcaagtagctcagtatgaagagctgacggaattctgcggtgggccaggtggctctggcgtcgactgtttaaggcgactgttaatgactacaacacaccattgagtcttggtcccaaggcgctggtgcacatggtacttcccgaaatccctgtagggccgctggagcaggagccccgatcccacgtttgggcagctgactcgcctaaggcctccagctgaaagcggaattgcaggggtgagaatgagcagacctaactaccgggcttctcgcacctggcctgcatttatttaggaccacgataacctcgaaggccaggctggggtgcccgatgggtcgtgggcttgctgcctaactccctgagatcggcgggctgaacagagcttcgaagtgtagcgccatcctgagcagaggaaggggcgcccgaaggccgcgtagcgggcggcagggcgggaggaagtagcagctgctgctccccgcccacccctctcgcgtgtgcctttccgctccactgttcgccggtgagctaggtggcgcgagagcggaggggagaaaagacagcggctgcaggagccgaaggccgcggctcgaggtggggcaggggcgggcacgcgagcgtgcgtgcgtgggcgcggtctatagcacgccgcgcgcggggcggatgtccgggccggctgggccggggccgcggaggagatggcggaaggtggaggctgccgtgagcgaccggatgcggagactcagaagtccgagcttggacccttaatgaggaccacactccaacgcggggcgcagtggtgagctcccggctcgctcttcctctatgcagaaccaggggccgagaaaaaggggcctcctttttctcggctagagtaggggctgggcggggatggtatgtagtgaccctggaagagtagcctgacacctgcccctcaggagaataactccaggatcagctctgggaaagcgcaggcggggcctgagtgtcgtctcagttcatttggagccctagggggcgggcccggcgggggccaggaggagggatgtggagaaggggaaggttggtggggaccctaagggtggggagagccctttaccatgaggactcgccgtgtgaccttgggcgaaggtgtcacagacctggattcctcactgttaaaaccaggatagcaatatttggctcaccgacctcagtgggttgaggggaaaatcagaagtagatactttgtaacttgtaaactgccaacagatgtcaaggtcagaagctgaacaaatgtctgagaaccccgattattttggtagcaagtgtcaaaaatatttgcggcagcagtgtcttggagtgggagaggaggatagcctaggtcctggagctagatagaagatgaagggtccagaatttagaagacccaggctgagttattaggcatcttaatagattgtttagtagaggggacaatactttgtactactggagagattcctgggtggtgtaattgtgtaggagtagaaaaactaaggctagactttgcatcgagtatgattgttacccatcttgtttgttttgttttgttttgagatggagtttcactcttgttgcccaagctggagtgcagtggcgtgatcttggctcacggcaacctccgcctcccgggttcaagcgattctcctgcctcagcctcccgagtagctgggatta

SEQ ID NO: 3398 - DNA, 6000 bp, Homo sapiens
aagaacaaaaaaccaaacaccgcatatatctcactcataggtgggaattgaacaatgagaacacatggacacaggaaggcgaacatcacacactggggcctattgtggggaggagggagcggggagggatagcattaggagatatacctaatgttaaattacgagttaatgggtgcagcacaccaacatggcacatgtatacatatgtaactaacctgcacattgtgcacatgtaccctaaaacttaaagtataataataataaaataaaaataataaaaataaaaaataaaataaaataaaataaaaacctgggcttcgggaggtggaggttgctgtgagccaagattacaccattgcactccagcctgggcaacaagagcgaaactcagtctcaaaaaaaaacaaaacaaaaaaacaaaacaacacaaaactgggctttgaaattcagagtacacagcctgtgttttggtaactgtgtaatcctgagcaaatcccttaaacaatttcaagccaccttttactcgctaagaagtaaggatagtatcaactacctcagtggagttgttgtgattaataagaatataattaaagtgcttaggaaggacagcttccatatcaacttaacatgttccaaactaaaaatggctagactatccacacagattaaatcaagttaaatttccctaggccacagggaatttgtttttcttttcatagagagagtgtcttgctctgttgtccagactagagttcggtggtgtgacttggctcagtgcagtctcaacctcctgggctcaagcaatcttcccacctcaaactccccagtagctgagactacgggtggacaccaccatgactgactaatttttgtgttttttgtagtgacagggtttcaccattttgcccaggctggtctcgaacttctgggctcaagggatccacctaccttgggggcttcctaaagtgctgggattacagatgtgagccaccacacccagcccacaggataattttttttttttttggagacagggtctcgatctgtcacctaggctggagtgcagtggcgcaagctcggctcactgcaacttctgcctcacaggttcaagcaatcctcctgcctcagcctcctgagttgctgggactataggcatgcaccaccacgcctgtctaatttttgaatttttagtagagacagggtttcaccatcttagccaggctccacaggataatttttaagagagacatcccattgaactatttcaatggagaatcatattctgttattaatactagtttcaactaacccttttatttgaaatcagtggttatcaacccaacagatttaatactctttttataagaaatatttttatatccacagtaccatactataaggaaactctatacaccaatctataaccaatctatgcatatattttggggggaaaatataaggcccttcctgtaataaaggaaaagtaaaagtcagtcaaaagaaaatacgtactttaggttataaatactcaggtatgactacatattgtaagatataacaaagtagcacctagatccaaatctgtgaacttagagccttcctgctaccccagggcttaaggatgcctgggaagtacctgggctcgacaccaaagtagtaccacagcatactactggacacacttttctctccttttcggtttggtctatacattgtacttgaaccccgttttcattttttgttgttttacatcctcaacagttgtcagaacacaacatatggcttcagaaacattcaacaaagaacagcagaaaaatgtcaacataacctgtttccaggattatttcctactattgtattctccttccctgccccatacatgccatgccccagactaatagttctcaagcctggttgtaaggcagaatcatctagggaacgttttaagaatactgatcctgggccccactcctaaaggttttgtctcaggtggtctggggcagccagattaggcatcacacaaatttttaaagctctttaggtgactctactatgcagcaaaagtccctattatatatcctgccaatgctcatcctgcatggagaggtccctgtgccacttattgctcagcctgtttcctttgcctaaaacaccctagggagctgtgaagactaaaataagggagtgatatgaggactttacaatccaacagttttggggtttaaatctcagttccagtatttcttaggccccctgacctcagaaaattctcagactcagtttcttcatatataaaaagtgattaagccaagtgcagtggctacagtggctaatacctgtaattgcaacactttgggaggccaaggttgggggactgtcagagcccagaagttgaagacaagcctaggaaacatagtaagaccccatctctacaaaaattttaaaacttagccaggtatggtgccatgcacctgtagtaccagctgaggtggatcaattgagccaggaggtcaaggctgcaatgagccatgattgagccactgcacaccagcctcggtgacaggacaggaccctcaaaaaaaaaaaaagtgattaatggtgccctgctcacacagttaatgtatgaactcagtgagataattaatgcaaagtgttctgctttcagggctggcataagagttcaattaagtactggcattcataataaatcccctatttagaaaaatgactcttataccaatatgaggaacggactcaagtgagtgaaggtggaggcagtgtggaatattgggggtataaaatctaaactaagaaggcaaaaaaattgcaagaagagaacagaatgaatgaaagttattacagaaaaaaaaatcaaaaggacccaacaaaatatattggatacagaatatgagagtaggaaaaatcttaaatagctctctgttttgagccagcgtagctaggaaaagtactgccatgagaaataggtgacccctgacgaggagcaggaagaaatgaggaaatcacttttagaagtgtctttgaggaaataccataggatattcctctgaatatgcccagcaggtagctgaacaaatgaaactagagctcaggaatgaaatcaagctgtgccactttgttcaaaatctctgcattctaaaatcctccttcctgaccactaccttctctcctccatcacttcccactcacgctgaatctccttactcaatctctagaggtcttaggtaagagttctcaaactggcagccccccacgcattgtatcacccaaagaatgtttcaaaaattttctgaattagttgtcaacatttaaaaattgtaagagttcacataaatttcaacttccagctcctcttgcaaaattggaaatatctgaggaaaaagtgagcccatgttcccacatggaaacaataagctgaagccgaatagcagctggcgttattagggaaggagtatggctggtctctggagacttctgagcgtgggacctcctaggacctttgtttcttcctttgatctccatagtccatgagtcagatcccagcctcacctccctaccccagcccagacccacgtgtattttaatcatatcaacatttaaggactactgtgcaccaggcacggagccagagaaacaaagttgaaaagaaggcaccctctgccctctgtctaccctgtcagcctcataaccagccacaccagcatattctcaattccatgagccacatgtgctttccctgcatcccaaggctttgcacatgctgttccttctgcccctacagctaagcccaaacccccttctcctaatcatccttcaagtctcaaatgatatttcctcatggaggccttcccagactccccattaagtagcatacaatcatcccctttcacgtgttccatggctctttcccccttcttgtactttctccatgtctatctctaagaccagacttcatcttgttcaccaattaatttccagcatctagcatagccagacaagtacttccataaaactttccatatgtctcctaggcacgttttgttccaacatggctcatcttgccagcttccccctgcttcacttcctccactcttgtttccaaggtagaatcggacaggctactgggcactctcttcttaaatttaaaacagttttaagcgggaggtgcgtggatcaaattcaggatgttaaaagattgtactgactgcagagtggagaaaaaaacaagaaaagtggatgcgaagagaccagttagattacttcagtaaatcgccactccagttctagaacaacttgggattctacacatctaactgcggtgttgtgttaccacatttcatggcactttccacgccttcacacacacagcggcaaactaccgcgaaacctccggacccagctgccctccacgagacgcgttcggtgatatgcactcctccccaatgcgagactccgagaccccaaactccctcggactctcccagttgggtccagggccacactcggcgcagccaagcccgccctacccgaggtcgcacacgggccgctccggggtcaatggttctttggaggaccaagaggaccaaggcaacagggtaattcattaggggaggatagttaagagggagcgaaaggaagaagaaatcatgaaatgcaatgcccggccagggaactccgaacaaggaacagggaacaaggtttaccaaggcgaatcctggaacactcccactacagctgcccccagcgcttcaactaccggcttaaatgaaccacgccccttgcgcgacaaagaaaacgcactattcctgcgaccagctggggaagcaccccgctaccttttaccagaccagccaatgagttcagtgaaaccttcgatcaagacagtcacgctccgagtggccaatgaaattgaaggctctgccctccatgcccaactctgattggcttacaatccaggaacaggcgttaacccagggaaggcagtggcaagatggcgtccctggatcgggtgaaggtactggtgttgggagactcaggtgagcggcttaccctacctctggggctccagacacttttgagttacccagtaaccctccccttagcttccttccctcaacttcctggctcctcggcccgtggctgaagtccctcccagggcctgaagactacacttcccaggggactttgctccgtgtgacgacgcggtggcggcggcgtcgtcgcgcgggtgggggtcgcggagcccgggtcttttgccttcgcggctttccgcatcggtctcccaggcgaccccagcctagagtgtattgtcaattcttttattaaaaaaaaaaaaaaaaaaagcaggcattgagtattgtatggggttctatgttaagggtacagaagttagtaggaccgtgccttcaagagattttgttcattaaggaagtcaaacgtgcactgagaaacgtgcactgagaaacgtgcactggcaagcgcttcgcatgtattaactcatttaattctgagacagtcctgttatcccattttacagatgagagtagtgaggcagagagatgtaaatgacagaatccttttgaacgcggagtccacgaacttaaacgctaagttataattatgcagtgacatattgggtagtggtcctgttttattcttaactgagcttaatttcctggttctcgtttgatcttcattgaaaacctattatgtcctagactgtacaatagagaaattaaagtaagagttttattctgaagcagctaggatttaacgctgagcccaatttaatcctagtgttaaatatatatatatttttttaatctcagtggatgcaaaaagaattcttttgacacctgggacatttgagaactacagctggcgtctggatttccagctcccacctcactgcccttatcttttcttccataatccccaattcagctctccttagtaacttcaataaatgctgaccttgcattt

SEQ ID NO: 3399 - DNA, 6000 bp, Homo sapiens
tgttggattttgatggaggtccgctccagaccctgtttgcctgggcatcagcagcagaggtggcagaacagcgaatattgctgaacagcaaatgttgctgcctgatcattcattcctctggaagctttttctcagcggggtactgggccatgtgaggtgtcagtctgcccctactggagggtgcctcccagttaggctactcgggggtcagggacccacttgagggggcaatctgtctgttctcaaactctgtgctgggagaaccactactcacttcaaagctgtccgacagggacatttaagtctgcagaggtttcaggctatgccctgccctccgaggtggagtctacagaggcacacaggcctccttgagctgcggtgggctccacccagttcgagcttcctggcctctttgtttacttactcaagcttcatcaatggcgggcgcccctcccccagcctcactgccaccttgcagatctcagactgctgtgctagcaatgagcaaggctccgtgggtgtggcaccctctgagccaggtcagagatataatctcctggtgtgctgtttgctaagaccattggaaaagcacagtattagggtgggagggacccaattttccaggtgctgtctgtcaccgcttcccttggctaggaaagggaattccctgactccttgcgcttctttggctcacacacagtgggctgcacccactgtcctgcccccacggtctgacaagccccagtgaaatgaacttggtacctcgttggaaatgcagaaatcacctgtcttctgcgtcgctcacgctgggagctgtagactggagctgttcctaattggtcatcttggaaccactcccttaattttaagttccttgagggttcttacgcagcttttttatctctagtatttagatcagaaccttaattagtatttattaaaagtttccatattattccaaaatcttcataaacatttaaagtatctccatagtacttcagaaagtaggcataaaaatttacttaatcattcttccattattattagatatttagggtgttttgaaatttttgatatgctagtgaaaggttatttctgtttaaacctttgtttaaaattaaaattatgtccttagtataccttcccaggagtaaactcagtacttaaaaggaaacatttaaagttcttgatatgcattgagaaataactttcatggggttatactgccaccagccatacacttgagcctgcaggtcttgttgcacctcaacagtatcatgtagttggcttttcatccttgttaacctgataaaggaataaaagtgacatcttggccaggtgcgttggctcacacctgtaatcccagcactttgggaggctgaggcaggcagatcacgaggtcaggagttcgagaccagcctggccaaaatggtgaaaccctgtctctactaaaaatacaaaaattagctgggcgtggtggtgggtgcctgtaatcccagctacttgggaggctgaggcaagagaatcacttgaacccaggaggcagaggctgcagtgagccgagattgcgccactgcactccagcctgggtgacagagcaacaatccgtctcggtggtggcgggcagtgggggagtgacagcttgctttagtctgcatttctttactttctgataaagatcaaagattatcattatgattattctggcaaatcagttgtttttcctctcataaattctctgttgatctactctgtacctttatctaccaggttttagtgtcattaatttatatgagctctttatctattaaatatattaatcattttacgtatgtgtaattgaatcaaacattttctcaggcttcccttttattactttttttatatagaaacatttaagatttttaaatactcaaaattatatttgtcattgaatttactgcattgtgtctaatatctgtaacttttaggatgtattgttgattctgtatttgtaaataggtttgtttatgttcaaggaatgtatctatccacttaattatcagcttgatgcaacacttgaggcctagtttagcttaattgtgttagggtaaacatttccaggcagtagaattgtatagctctccatgaattaactgctttgggtgataagtattagctaagaagggatgaaaccctaaacagtaagaacagttgaagtgctagggaataatggcgaatttcatttctttaagaattttgggagattctgattctatgttttcacctttagaactaaatttgatcaaaagaatgcacttgatttgcttgggggtaaaaaaggcccaatataaataaatgtcagctccaaatacagctgtttggtaatatgttaaactagtccctaatctctgaaagaaagagaaaaccgtatggtagtgagactttcagggttccttaccaaattaccaaatatctcaataggataaaaacaaatcaccaaatatcaacttattctttttatttttttttcttggagacagggtctcactctatcacccaggctagagtgcagtggcacgatcctagctcactgcagcctcaaattcctgggctcaagtgatcttctcacctcagcctcctgagtagcgggactacaggcgtgcaccaccatgcccggctaactttctgtactgtttttggtagagagagggtcttgccatgttgcccaggctagtcttgaactgagctcaagcaatccacccgcctcaacctcccaaagtgctgggattataggctagagccaccttgtctggctaagtcatttctttatatatttgtgaaaccctcaaaattttataagggaaatggcctttatttaaaaataaactttcgggtttgaaagaaaggctgaggaagtgtaaaaagtgcattctaaactgtcagactgtgtacttttaaatcgcagttaaaaggagactgacaaaattaccttttaaaaagataaaaagacaataactaactttgcacataaaggttaacattagtgaatgtgtgacaacatcaatcactttcctggccatcacagctgtgtcttctgctttacaactaaaccataacaggggaggcgggcagtagggaagcttatcaattgcctgattacttttccacatttaatgtagctgctaattctatccctgttatatgacgcattaattccacagttataaccccagaacctaatacagtgcctgttggaaagaaaataaattgactagttgcaacagtttgtaatatgaagggattgttagatacaatagaaaatggaattataaaggacacaaaacacccacttaacgtatcatgaagaagtctgttagttctggattgtaaattctactcagtgatactcttgccaagtccctttaggccacaattactttatctgtaaaactgagtgattttattaaattaacttcggcaccacttcaagctacctgatagaaatgaagtcgacataaattgtgattatgttcattaagtttcaaaaggcaactttcttaggggaatattaaataatgctctctgtaaaatatttcataatgcaaataatcctcagggcaatgtgaaaacattcttaacctatatttgctgcccacaattttatttagtttctattaagttttcaagcctctccacctccaagcatctagcacaacgtctttgctcacaacacatgctcttaggccaactccagaggagcgcttctataaaatgcaaggtcagcatttattgaagttactaaggagagctgaattggggattatggaagaaaagataagggcagtgaggtgggagctggaaatccagacgccagctgtagttctcaaatgtcccaggtgtcaaaagaattctttttgcatccactgagattaaaaaaatatatatatatttaacactaggattaaattgggctcagcgttaaatcctagctgcttcagaataaaactcttactttaatttctctattgtacagtctaggacataataggttttcaatgaagatcaaacgagaaccaggaaattaagctcagttaagaataaaacaggaccactacccaatatgtcactgcataattataacttagcgtttaagttcgtggactccgcgttcaaaaggattctgtcatttacatctctctgcctcactactctcatctgtaaaatgggataacaggactgtctcagaattaaatgagttaatacatgcgaagcgcttgccagtgcacgtttctcagtgcacgtttctcagtgcacgtttgacttccttaatgaacaaaatctcttgaaggcacggtcctactaacttctgtacccttaacatagaaccccatacaatactcaatgcctgctttttttttttttttttttaataaaagaattgacaatacactctaggctggggtcgcctgggagaccgatgcggaaagccgcgaaggcaaaagacccgggctccgcgacccccacccgcgcgacgacgccgccgccaccgcgtcgtcacacggagcaaagtcccctgggaagtgtagtcttcaggccctgggagggacttcagccacgggccgaggagccaggaagttgagggaaggaagctaaggggagggttactgggtaactcaaaagtgtctggagccccagaggtagggtaagccgctcacctgagtctcccaacaccagtaccttcacccgatccagggacgccatcttgccactgccttccctgggttaacgcctgttcctggattgtaagccaatcagagttgggcatggagggcagagccttcaatttcattggccactcggagcgtgactgtcttgatcgaaggtttcactgaactcattggctggtctggtaaaaggtagcggggtgcttccccagctggtcgcaggaatagtgcgttttctttgtcgcgcaaggggcgtggttcatttaagccggtagttgaagcgctgggggcagctgtagtgggagtgttccaggattcgccttggtaaaccttgttccctgttccttgttcggagttccctggccgggcattgcatttcatgatttcttcttcctttcgctccctcttaactatcctcccctaatgaattaccctgttgccttggtcctcttggtcctccaaagaaccattgaccccggagcggcccgtgtgcgacctcgggtagggcgggcttggctgcgccgagtgtggccctggacccaactgggagagtccgagggagtttggggtctcggagtctcgcattggggaggagtgcatatcaccgaacgcgtctcgtggagggcagctgggtccggaggtttcgcggtagtttgccgctgtgtgtgtgaaggcgtggaaagtgccatgaaatgtggtaacacaacaccgcagttagatgtgtagaatcccaagttgttctagaactggagtggcgatttactgaagtaatctaactggtctcttcgcatccacttttcttgtttttttctccactctgcagtcagtacaatcttttaacatcctgaatttgatccacgcacctcccgcttaaaactgttttaaatttaagaagagagtgcccagtagcctgtccgattctaccttggaaacaagagtggaggaagtgaagcagggggaagctggcaagatgagccatgttggaacaaaacgtgcctaggagacatatggaaagttttatggaagtacttgtctggctatgctagatgctggaaattaattggtgaacaagatgaagtctggtcttagagatagacatggagaaagtacaagaagggggaaagagccatggaacacgtgaaaggggatgattgtatgctacttaatggggagtctgggaaggcctccatgaggaaatatcatttgagacttgaaggatgattaggagaagggggtttgggcttagctgtaggggcagaaggaacagcatgtgcaaagccttgggatgcaggga

SEQ ID NO: 3400 - DNA, 6000 bp, Homo sapiens
gatatctgtgacccacaccttattcgtacattccctccccttttgaaagtccctaataaaaaattgctggttttgcggcttgtggggcatcacggaacctaccaacatgtgatgtctcccccggacgcccagctttaacatttctctcttttgtactctgtccctttatttctcaacctggccgatgcttagggaaaatagaaaaaaacctatgtgactatcgggggcaggttccccgatactcttctgcatctggttttatcatgtaacaatatctcttggagatccttccataccaatatatagagaattatcttattgcttttttatagttgcacagtatttcattgtcaagatgtaccataccttttttaccagttccctattgatagaaatttgaatgaaaattgtgcagggacgtgtgtgtgtgtgtacgtttgtacattgtgtaccacactaagtagtaaggctcttgatatcaatggccttgttttccttgtgtccttagaacctaacaaaaagcctagcatataggagattctcagtaaatcgtttgttgaaagaaggatgtacttgtccactttctccatgggcaatcctgttaacacccgttactttcatttccatctactcttaaatttctattttcagctgaggctaccctgaaggacccagaaacccaactcccatctctgcctcagcccaaaatgtctaactgcctcctccccatctccacttggatgtttcacggaagtcctctgtctcagcatttccagaactgaacttctcactcctaatctcctccaacatacctgctgtgctttggatatgatgtgttcgtgcccccaaaatcttatattgaaatgtgatcccaggccaggtgcaatggctcacacctgtaatcccagcactttaggaggctgaggagagcagattacttgaactcaggagtttgagcccagcctgtccaacacggcgaaccccgtctctactaaaaattcaaaaattagctgggcatggtggcaggtgcctgtaatcccagtcactcgggaggctgaggcacaataatcacttgaacctcatagatggaggttgcagtgagccaagattgctccactgcactccagcctgggcaacaaagcgagactctgccccctccaaaaaaaaaaaaagaaatgtgatccaggcaggctgagagtggtggctctcacgcctgtaatcccagcactttgggaggctgaggggggcagatcacttgaggccagaagttcaatatgggcctggccaacttggtgaaactccatctctactaaaaatacaaaaattatttgggcatggtggtgcacgcctgtacttccagctgctcgggtggctgaggcacgagaattgcttgaacccagtgggtggaggctgcaatgagctgatagcacctctgcactccagcctaggcgacagagcaaaactctgtctcaaaaaaaaaaaaaaaaaaaagaaatgtgattcctcagtgtggagatttgggaggtggggcctagttgggggtatttgagttgtgggggggttccctcatgaatagtttggtgccattctaggtagtgagtgagtgagtgagttctggctctggtgaggctggatgagttctcacaggaattgattagttcccaagagagtaggttgtgctaaagccaagatgtcccttggatttgggctgggatttcaggcacgtgccacagcgcccggctaatttttgtatttttagtagagacggggtttcaccatgttggtcaggctggtaaagaccaaaacacttctaatattaaatattaaagtaaatgtgaactatatatatatttaagacagattaatgaaaatgagcaagataattatttatccaattattccatctcagggtcacaggtggccagtctatcctggcagctcaggacaggaaccaaccctgcacaggatgccagcccattgtgtacacgtgtgcgcacgtgcacacacacacacacacacacacacagagactgggacaattcagacaagccaattcacctaaagggcacatctttgggatgtgggaggaaaccagaggaaccaaggaaaactcagacatggggaaagagtgtaaactacacagacaggggccccagccaggaatcaattttttctcatcaatgttataattgaaatgatgttactggaggccctgctctacttaactcccccaagaaccctaaaagtctcaatcccaatacatcactggctcataatggatcttgccatgtaaattgggtccagatgtggatgaggttcctcagatataattccttaagaacggctctgagcactgttcctctgaaggcctgtgagctagagatgttatctgctgtccacggacccagcatacagagttggcaagaagaagataagcatagtagacacttttgttcaaaaggggaaaaaacaggagcgacagctgccactgggtcatagtaattctgaaatcagcgaggcacgtgatgccagttccttgattcgagtcccctcctgctccttgggaatgattatctgcagctcctggctctatcctcttggctcatgggtttcttctaagttgtcctttctttcccataggaaatagtccatgtttgcatctgaatagccttctcagaaggcttcttagaaggctggggcccacatgtcccattttatttttgtgctctgccttttctggtataattgtcccttgctatttgtggtggattggttctaggactcagatgctcaaatcctgcagtcagccctgccaaacctggggatgaggactactgcattcccagttgctactttaccttcaaacctagcattttgattggctgcctaacggggtggaattatcataactcttggcctttgaaactattttcagttttcattcccctgaatactctgcaaattgtacacattgagcacctactgtaccccaacactgtttcaagaatcagggatatcgcagtgaatgagacagacaaaaatagctgccttgtggagctgccattctagtggggaagacagacaatatgcaaataagtgagtagtataagaggaaaaactttgggaggctgagtcgggaggattacttgacaccattacttgacaccaggagttcaagactgcctgggtaacatagtgaaaacttctctttacaaaaaaaaaaaaaaaattagccagccatagtggtgcacgcctgtggtctcagctactcaggaggctgagacaggaggatcacttgagcccagaagttcaaggctgcagtaagccctgattatgccactgcactccagcatgggcaacagagcaagaacttttctcaaaaaaaaaaaaaagaaaaagaaaataaaaaagaaaaaacagaggagaaaagcagtagggagatgtcaatttttgtgtttgtattgtggtgacagggagagggacttcagttttaaatagggaaggctatttcactgaaaaggttactttaaagtcaagaccagaggaaagtgagggagtggccaagcagatacctggaggaagagctttccaggtagagagaagtacaactgcagaggtctgatgtagatgtgtgccttctcttttcttttttgtttatcttttggaagagacagtcttgttatgttgcccaagctggtcttgaactcctgggcacatgcaaagtgaaagcagagaaagagtggacttaccccagaggcggatggttctgcagtgtgcaaggccatttcagaatacacatagagaaaacaggagaataggtggtgagggttttggggaaagagccaattttggttgaaaaagtaggggaaaccccagacattgtaccatctcagggttgagactgcttgcctagcttttgagattttttttttccccagacccctcaactcctgagatcttatcgggaagctgctgatcaccagttttaggtgtttttatctattgggagactgcctttctctggtctggctgcaaccaattattattttagagagacagcttaacctgacaaccacgtcatggttgcctcacattgctggtcggggagtggcccctctcctgccctgctcaggtctgactacttactgtaacaattgcaaggtttttggatggaacaattgaaagaatggagcttgcatgaaccaaaataagaaaagactatgagagggcattgttgaagatggaggcaaaaattctgagtggatcctgatgtgttcggatggggctggtgcttgggaggctgctctgtgcttacaagaagagttctacccggtccatctttatcacatcttctctaatactaagttcagagaggctttagctcattttccattttcttgggctgtctcctctgccagacaaagtgcctatttctcctgtctctatcaccgagccacacaattgctgtagtcatttgcagtctactagaacgataacacatattggcatcagacagatcttggttcaaaacctcgctccaccagtttctgtgttgagctagaccaagtgacatgatatactgagtctcagttccttatttgtaaaatggtgataataatttttggttaagtaattaaagtaaggataaatgatgcctttcgaagaaggacacaactggaatggccagtttaccccttgtcccctcttcggtggcattatttattctggagtaaggagggatggctgagggaatctgtctgtgggtccaacatggcgccgtcctgctccttgtatgagcctcaaagatggggacaaccatttgggggcagacatgtttgtagcacgagatccaggctcagtcccgaggcagccggaacgtgacgcaaggttgaggcggggctcctcccccgcaccctggcgtcgagcgtctcgtgacaggtacttccgctcggggcggcggcggtggcggaagtgggagcgggcctggagtcttggccataaagcctgaggcggcggcagcggcggagttggcggcttggagagctcgggagagttccctggaaccagaacttggaccttctcgcttctgtcctccgtttagtctcctcctcggcgggagccctcgcgacgcgcccggcccggagcccccagcgcagcggccgcggtaagcagcgggcccagcccggccggcggcctggccccatcccccccctcagcccctcggtcgccagggcctcgcgtcctccctgtcctcctgggcaggctccagtcccagccctggccacgcgggcacacccggcatcgctcaggcccccggagcaggccaagaccccacccggcttggagaggtcggaggtcgtcgggcgtgacctctggccgggttgcccgccccggccacccgtctcggacgctctgtttactgttggcctggatctcagagacccgagagggttccttgacttgggcggccctgcgccgcggcaggacgcgctggccagtggagttccttagcgcggcgagcaggagggtgtcagagcccacgccgcccgccgccgtgcccacccggcgggcatgggtcacaggcgctgggggccgagccgcgttcccatccggttcttcagttgaacagcctgaccctgttagtgggagttccctgacggcaactgagtcaaggcagtgagtcaggtcacgtgcgctgggctcgcctcgacacttgtgtacattgaggcgcctctggcgctgggagacagggagctttttgtcctaggcatgttacggtaaatcctgagagaagtttttcaacttaatcgaggaaagatggtagttggatgtagagttgtgtttccattccgaccgtgtttggggcctctttctgcattcattttaggcttgatacctaatggggtcataaggggaatattgagaatattgacagcaaatatttgagcgtttattgtatgctaggcagcgtggcaagaccttttaacagatcattatgtt

SEQ ID NO: 3401 - DNA, 6000 bp, Homo sapiens
ggtggctgtttgagtgtaaaggtaatgtgctcctctaagagtcacagttaagtataaggaaacaaaaacatctgtaatcccaccacatggaacaacttgctaatatttgtgtatattcctttctgcttcatgtgtaaccatttttacatttaaatctttactcctttgggaatctcttggaagaggagatgtagagatcttaattctcaccaaaatttttctggctcttaccatttagtgaattgttcatctttttgccactgaattttataatgccatatttgtcaaaattgttcatttctggtgtctgtttcattgatcggtttagtcctattccagcaccccactgttaatactgtatttttataacatgcttttcaagactgtaaaggcaagtctcttgtcatttgtgttttaggggaagggacatttcttgtgtatttatttatttttatgaataaaaacgggattgtttatattaaatgctccccagcctccccttcccacctcaaaaacaacaacaacaacaacaaccctggacttgtttaaataggagagaatgcatgaatgcaagtctttacattaaggctcccatagactgtttattcaaattctttttttctctgtaaaattatttttctcatttaggtcctgtactcgtgctaaccactgtaatagtgattgttgtataaatgggaaaaatctttcaggaaagtgaattagcaaaaatcatgaaaacttcttcatgttttgtttgtttttttttttaaagacaattttgctcttgttgcccaggctggagtgcggtggtgtgatctcagctcactgaaacctccgcctcctgagttcaagcgattctcctgcttcagcctttttggtagctgggattagttgcccaccaccacgaccagctaattttttgtatttttggtagagacagagttttcccatgttggccaggctggtctcgaactcctggcctcaggtgattcaccttccttggcctcccaaagtgctgggattataggcgtgagccaccgcgcctggccaaaactttgctctggactcagaaatcccatccctaaacagaatctgtgagttacagttgacaaaatcctttccttgcatgagaatttgacttttgtttaactttctagctctgtttccctgggagctagataaggcagaacataacatttgtttctgggcatggtccttgtggtaaaatgtcccctggttggtaaattacatttggatgggaaagagccatggataagtgatgggccacccaggcttttgtttcatggaacacagtgactctgctgggcatgtccttatggggagcctaaggagctgtcaaaagagatacttgcacccccaggattgagcattctgagtcaaggtattgagtcggcacagtctccctgtgcctgagccatcttctgtatggactcttgcaagaactgctgctgctgatgacctgccactgccctgcctgccagctttgtctgtcccagtctttctcagtgggcttgtgccacatgtggcctgtgataatcttacgagtcagaatctagaaagatctacccacccatcaaccctcacacaggtgttgctgtatctcaaggaagtaatcccatagattacagcattttttccaaatttttgttatattaaataaagagcgggaatggctatttaaatgcttaattcactcagaggaatattagacattaagacgtaaggtggtctcacggtcactgctttgtgacacgtgtgggtagagactcaaagggaaggaaacaaacatgaattctatcatgtaggagtctggaggttgaagtgtatttcctgttttttttctttttaatattattaaacagcattggtacaccagtgaaacctattaacaaagcaagttatgcaaatcccttttcccattcttaaaatcagtcactttcataaatattctccaaatatctttgcatatccttttatcatctttttatctattttctttttttttcctttttgaaaaagagtcttgctctgtcgcccaggctggagtgcagtggtgtgatctcagctcactgcaacctctgcctcctggatttaatcgattctcctgcctccgcctcccgagtagctgggactacaggtgcgcaccaccacacccagctatttttttgtgtatttagtagagatggagtttcactatgttggccagggtggtcttgaactgctgacctcaagtgatccacctgcctcggcctcccaaagtgctggcattacaggtgtgagccaccacacccagcctttttttcccttccccaccactcactgcaacctctgcctcctgggttcaagcgattctcctgcctcagtctcccgaatagctggaattacaggcacccaccgagctaatttttatttatttatttatttatttatttatttatttatttatttattcatttgagacagtgcctcgcactgtcacccaggctggagtgcagtggcgtgatctcggctcactgcaacctccgcctcccgggttcaaacgattctcctgcctcagcctcctgagtagctgggattacaggcgcgtgccaccatgcccagctaattttgttttgttttttgtttttttgagacggagtctcgctctgtcgcctaggctggagtgcagtggcgcaatctcggctcactgcaacctccacctcccgggttcaagccattctccagcctcagcctcctgagtagctgggactacaggcacatgccaccacgcccagctaatttttcatatttagtagagacggggtttcaccgtgttagccaggctggtctcgatctcctgatctcatgatccgcccgccttggcctcccaaagtgctaggattacaggtatgagccactgtgcccagcaatttttgtatttttagtagagacagggtttcatcatgttagccaggctggtcttgaactcctgaccttgtgatccacccacctcgggcctcccaaagtgccgttattacaagcatgagccaccgtgcccagccttttctatttttagtagagacggggtttcaccatgttggccaggctggtctcgaactcctgacctcatgatttgcctaccttggcctccccttctttctatttgaaacttgcccccattatcatcatctgatctctatcttgaaatatgataccagaccttagagtgtgacatttaaactttgaccagtcaaagcggtccctggggagaaaggtaggggaatagtggggctccacatataatggatagtttggggtatacctctcagtgctgattatgatggaagacagaactccaagtcatcttatactgcccctaactagcactagtaagaactttctagatgaatgctggtgggctgagataccgtgtcttcacagtccagccatgggcatgaggcttttggcagagaaacagcttgaccctctgcataggtcatgggacctggggtgtgtgcctagcaaaccatcctctagtctggctcctattcccatactgttcttgtagccagaaacagactctgaagccatcgaggatggttactttcaagagcgtaggccttcttagcaaatcctgccctttaggacagtagtcaggtctgatatttccttttagttagtggtcttgggtgtaataccacctcttgagaaagagaacaattgacagccaagcatctggaaagagagggatagctggattaccttgcctaggagctgtaacctgctgcttctctcactgtcttctggactctgtgttctgttactcatctctgtatttggcataccttaagatggtagcggccagtatttactagtcatctgctgtattctagttactgtcctgagcattttatttattcagtcttcacagcattcttaggacataagagctgtcatctctatattccctattccaacagagaaattaaatgactggctcaaggtcatatagctaaattaataagcggcaaaaccagaatagaaatccctgtggcctgggttcatatctgctgcttaagtcactcccactataggcactgctgtcagccttgccttcaaaaggtaggtggttaaagaggaaactaacaagtagttcttctgagtcccattcattttctggaagtcactgagtcataccctggcaaatgagaggcaattacagcaggagccctgtcttgatgagtagatagaccatgctgtggcaagtcctggaagacagttgagcagagatcaggcatttttcacatcttctggttatgagtagacaaggctgcctgaaagattttctggaaaagagtagtcactagagctgcagagtcaagtattcagacggtacccaacatttaataaatttctacttggcattgagtatacagtggggagtaaaactgtcttcatggagattgttagaaaagggatagactagattaatatagtacataaaaatgtcaattagtggtaagtgctctgaaggaaaagcaagcagagtaacgggatagagagcaaatgaggggttatgctgctttaaataaagcggtcacttctttgagaaagtgatactgaagcagcgacctgaatgaagcaaggaccaagctgttgagtaagttggagcattagttcaaattgccaatccattcaattgatccaccacccaagtgagagaatacattctctccaacagcttgcaggggcaggatggccctgctgtgctgttctgcctcgctcttgggtccagagttttggtgagtgatactgttttttatcagtgccccctggtggaaggaagatacctagcaggaaggttcagggccctgcactgttggggctgctcagacatttgtgcaagggaggtgttttgttttggtgtttccatcacactcacagtgatttctccttttccccctttagtttgaaggatgacctctaggaagaaagtgttgctgaaggttatcatcctgggagattctgggtaagttactcatgaatttgagctaacagattggcttagagctaagcctctctgctgtggagcccacactgtccgtgctgccacttcttgctttcatagtgaggcttagggccttacatgtttccctccacggcagaaatttagatgatcccttgttatataaccttttgttctctagtttttagcatgattttttatggggaacggatggctatttgaactcaactaaggataggcattttcatggaatcccttttctccaagctggccaggctggggagtcttccttacgtagatgtattgccattggcatctggcgtagcagatgtgctttttttttttttttttggagacagagtctcgctctgtcgcccaggctggagtgcagtggcgcgatctcggctcactgcaagctccgcctcccggattcacgccattctcctgcctcagcctcccgaggagctgggactacaggcgcccgccaccacgcccggctagttttttgtatttttggtagagatggggtttcaccgtgttagccaggatggtcttgatctcctgacctcgtgatccgcctgcctcggcctcccaaagtgctgggattacaggcgtgagccaccgcgcccgacccagatgtgcgttcttagtgcaccatacagtatcctcctgctgctgtgcctgcttcagatctatctgcaaaagagcctgggacggcagaactgggttctgattctagatgtgccactaaccatgtagctaactctaatggctcttaagattctgtggtaggttgggtgaggtggcttatgcccataatcccagtgctttggaggctgaggggaggattgcttgagcccaggagttggagacctgtctctacaaaaaaaatttagccaggtgccgtacctgtagttccagctgctggggaggccgaggcgagaggatggcttgagcccaggagtttgaggctg

SEQ ID NO: 3402 - DNA, 6000 bp, Homo sapiens
gccaccacgcccagctaattttttgtattcttagtagagatggggtttcaccatgttagccaggatggtcttgatctcttgacctcatgatctggccgcctcagcctcccacggcgctgggattacaggcgtgagctaccacacccagcctattttttattttttttgagacaggagtctcactgtcgcccaggctggagtgcagtggcctgatctcagctcactgcaacctctgcctccccgattcaggcaattctcctgcctcggcctcccaagtagctgggattacaggcgcctgccaccacgcttggctaattttttgtatttatttttagtagaaacggggtttcaccatgttggccaggctggtctcgaactgccgacctcaggtgatccacctaccttggcctcccaaagtcctgggattacaggcatgagccactgcgctcagccagtagggtaaataagtgggaccaggacagggctttacattctagcttgggggaaccagaggattcaagacctgaaggtggaaaaaatacaaagtgaaaacttaaaaaatgaaaatagtgaatacttttcacctttggcatttgaaaatacagaaagtacaaatcataaaatgttgaagattgattaatagattacattaaacatgtaaataacaagattcccagactaacaagaacaaaccacacaagcaggtgacaaagatgataatgcctaatagtatccaagcagtaggtaacctggtggatgctagaatatagggagtggaacagcctctggttgatggtaggagtgtagtaatgagtacaaccttttcagtagaaactgccactctgctccccagtgttgaacatagacatatgcagcaatccagagttctgagtctgagtgtatggcctagagaaacttatctctggacattatgagagagttgtaatgagagttatcattgcagccttgcatggggagtgaaaaactgcaaataactcaaatgatctggggaactaagtgagtctattaaagcagtggaatattatataactgttaacttttgggaatgaaaaaagacaagttgcaaaaagctgtacaggatgataatgtttatgtaaggcatctcttcaggagcatttacttgtggtgaagaaggaagaaaatgcaatgagggaagggttaactcttggaaaaaacggataaaaataacagtgttaatttttgtcacatcagaatattgggtagacagttataagggtataattttaaatggagaaaacaaaacattttgaaacaagcaggctggctggtttcctgttttgatgtggtctagagaaaaagaataaaagccccttactcaagctgtagcttacctaacttccaaacaatcagcaacaaaaaaccccgagaaactgttatcacaagttcctgcttcatggggctagggacctccctgggcccccccccgcccccagcatgtgcagttagacttcaacttcaacttatagttaccttttcctcattttaatgccaaaagtcacacccaggatggagatttaacctgctagtgctacacgcaatttctgaagaagcatgtttagccactgtgcatgcactagaaaaacccctcctatatacatatcctgacatcacccctccccacaggaaagccctttaaagttaactcccacactgctttcagagaacagctgcccctttccttttgcagtgctagctcactatgcataagctaatacactttcactttctctttgctattgtgtctggtgatctctcttgatttctatcatggaagattccaagaacccaggtcgctgttaacaatttcaattaaaatattaaaaaatttaaaaatcacagtcagccataggactgtacttgttgatgttttgataaatatggcctttacttttgtaaattcaaagttaaattaattttggtaactttctaggaacccgtcaacttgttgacttctttttgatgtattactttgccttctctgtgtatctgagttccagatgatgaattggttccacctaacagtaacagagttcttatgtaattttgcttgtaggagtctatctgaaaaaagccatttgacatacagagaaagctctctatgctaatgttcattgctgagttgtttataatgataggaaattgtcagcaatattttcttaaaaataggaatcgatggttcactaaatctgttgggcagcagtaaagtccagtgaacctgctctcccatgtcaccccatctgctgttgccagagtgccctagtgcgtgacggggtagaggggaggaacttgggagaatgtggagagtatcacatgtgcagtctaggagtgcagtctaggatttcagctacagaaaacctccgcgcatatgactagaacaagacatgaactccttcctgtgtgggaggatgccaagtgttcttttgtttgtttgtttgtttgtttgtttgagaatggggtcacttctccactgacagagatgcatacatattccatgtagaacattggagaaccaggagagcacagggatgagtaccaccagcagtcccgatcctgtttagtctacatgtgtggactttgtttattgtatctgggcaagggagcatttagtgccctagcctgccgagaggcagtggagtcattagaaataaatttgtcttttttgcccttcatccttatatctgagttgttatcatgttcgtccggctctgtttgagtgcctgttacggatctagggcagtaagtatacccagccttgctcttaaatctagcatggcagtgaatgaggtgaccagcttagagctgggcggtagtacctggtttaatctttactctggtgtgtgttctcattgtctttctcttgatctctttttgtcaagagtttttcatttgttttgttttttgaggtataatacaaatgaaatataacatgctaatcttttttgttgtttaggcaaacttttctcttttttttgagacagagtttcgctcttatcacccaggctggagggcaatggcacgatcttggctcaccgcaacctgcgcctcccaggttcaagcaattctcctgcctcagcctcccaagtagctaggattacaggcatgcaccaccatgcctggctaattttgtatttatagtagagacagggtttctccatgttggtcaggctggtctcaaactcctgacctccggtgatccactgtgcctggctaggcaaacttttcatacagtaaaatgcatagattgaactatatcactcgtgagtcatcacctcacttccctattgaactgtatcattcgtgagtcatcacctcacttccctatatttccattgctctcagaaagttcccagagtacctaagttttatttatagttcaaattttacacacttacctacatgtgaccactacttggatcaagatataagaaatttctagcaccctggagattggactcaatgtcactcgcttatagacagacacatacttaatcacaatatttgtgaggattgtttcagatactctggtgctgaaatttgcttcctgaagtctggtgtcatttgtctttgtgggtggccccacaatctagcctatttcttctggcaccccttgcatacatgctcctggtgctctgcctagcattctcccaaggaatgaatgttttgtctctcacagatatgggacacagcaggacaggaacggttccagtctctcggtgtggccttctacagaggtgcagactgctgcgttctggtatttgatgtgactgcccccaacacattcaaaaccctagatagctggagagatgagtttctcatccaggccagtccccgagatcctgaaaacttcccatttgttgtgttgggaaacaagattgacctcgaaaacagacaagtaagtaccaacgatgatagatattgtcacagacacctgctccccaggggccttgtgaatttggagggttctctgctaagctcacatggctctaggaggtgctggtgggagtcttcattaccatatgccagcccttcaggccaactgcctttaaggaccgggacccaggtgacctgggttaagtccccatcctgcccccagctggctgtgactttgggccattgtcttggctgtctcagcttcacttccctttctgcactttgaaggagggaattcggttttgtcattctcagtagtgccctcccagtacctccaggccatgcctggatctccatgtgtgcagaatattgctttgggctttgagtaaaattgctgtactgtagtttcaaataccatttctgttggaaacatagactctttgattaattacaactaggtttatttctgaccacagatcttttcttaagtgacttagtccttatctcttggctgaaaatgggctaggggttggggaaggaatgagaatgtgtgagtggcataggtgacatcacactagcagtaatggtgaagggactataaaccttaagaccaagctgctgggcatttcctgtcctgggatctctgaggtcccagtaaacactcttcatttcttcccggactggcttcttactccattcacaaatggcttttaagtataactgagggtcagaaggtatgagctgtagaccgagacaggctttgagctctctagctgaatcctagctatcctgagcatagctagcaggacaagtttggacgggtctgcaggtctcctccaacaccctctttccccatgtctgtgtcctcacctgtactacctgtagacgaggggccatgacacttcctggggaggatggagtcagtgctggctgcttctgtcatgagcctatgtgcaccctgcttcttctttcaggtggccacaaagcgggcacaggcctggtgctacagcaaaaacaacattccctactttgagaccagtgccaaggaggccatcaacgtggagcaggcgttccagacgattgcacggaatgcacttaagcaggtgggtctcccacagctgaccagcccactctggtgatgcctgaccactgacccagtccctgcctggcctcctgcccttaatcttcttccctaacccactcttttctgtatagccagaataccctatgtgttcatctgggaaggttatgacatgttctgcttaagcttccagaaatcccactttggggggaataatataaaagatgcagaggctgtgaagtctgaggctgcccttcttttactaggcttgttcttattttctttgctgtgattaggagatcaggtcactgggagaccccgaacagattgctgcttctatttaaggaggaaataaacttgaatatgaatcccagctctgctgcgtaccaatcgttatatctagtttgggcttaaaaaaaaattatggccgggcactgtggctcatgcctgtaatcctagcactttgggaggccaaggcgggctgatcacttgaggtcaggagttcgagaccagcctggccaacatggtgaaaccccctctccactaaaaaatacaaaaaaattagccagacctggtggtggtcgccagtaatcccagctactcgggaggctgaggcaggagaattgcttgaacccaggcggcagaggttgcagtgagccaagatcgtgccactgtactccatcctgggtgacagagtgggactctgtctaaaaaaaattaaaaattaaaataaaaaaaattatatctgaacttctaccccctcacctgaaaaatgggaatacctgcttttgcagggtgattatgaagattaaatgagacagactcttccagctctcacatactgactggtaacttttttccttaggaacagttaagtaaacaacacaaagaaggaagaagatgtaggaaaactattcaaggaatataatacctagaatttcttatttactgtttctgtgattagatacaaccactcatgcgagttgaaagtctgttttgatgtacag

SEQ ID NO: 3403 - DNA, 6000 bp, Homo sapiens
gcaatgtgggcttgctttcttctacctccttgccagcaagcaataggtgtcacctgtcactgctgacattgccgatctttgggtgtgtaaattgccaccatcgtgactactggtccctctgagttcccctccctggggcttagccatttggattttctctgctgcacacagccggcacacagcacatggttgggcctctctcagttctcatgagctgttggtgaattgaagttaactctacttgcatcttaagtgacttttccaactctgtggtctttttaagtcctttgaacatagggaaaaagtaattttttatttggttatgtcattttaagtttctatgtttcctgtgtctacctcagatttttctgtaattcagctggaatttgttttggcttatggcagaaaagagagacttgcctttcctctcaagagagctcagccagttgtttgaaatcattcagctatgttacacaagccgtttccctccctgaatagaccgtggcctgtgctaaatgctcgtatgtgctgggatctgtttctggtctctccagtctgttctggtgatgtccatgccatgttcccttatctggactgtgttgatttgactgcctgatgaggcaagtttcctcttgccacagtcttttttttttttttttttttttttttttttgagacggagtcttgctctgttccccaggctggaatgcaatggcgtgatctcggctcactgcaacctccgcctcccaggttcaagcggttctcctgcctcagcctcctgagtagctgggattacaggcatccgccaccatgcccagctaattttggtaattttttagtaaagatagggtttcaccatgttggccaggctggtctggaactcacattgtgaaccgcccgcctcagcctcccaaagtgctggggttacaggcatgagccaccgcacccggcctgccacatttcttttttaataattttgtttccaccattttcctctcttaccttccacaccccaaataaaactctgttgagattttgattggaatttttttcttcaagcccactgttttttcctcattgattgcagttttgttgtggctgttgcattagtctgctcaggctgcgttaacaaaaccccacagcctgggagggtccaacaacagacattttgttttctcacagttctggaggctggaagtccatgagcaaggtgctggcacatgtttctggtgagggtgcttttctgggctatcttctcactgtgtccctcccatgccctttctgctgtgtgcacagagagaggacacatgagcaaggtgtctctggtgtcacctcttcttataaggacacgaattctcagatcaggtccccatcctgcaacctcatttaaccttcattccttccttactccaaatacagccacctgaagggttagtgcttcaacacaggaattttggaggaacacaaacattctgcccagccgagtgcggtggctcatgcctgtaatcccagcacttcgggaggctgaggcgggtggatcaccttaggtcaggagttcaagaccagcctggccaacattgtgaaaccccatctctactaaaaatacaaaaaattagctggcgtggtggtgggcacctgtaatcccagctacttaggatgctgaggcaggagaattgcttgaacctgggaggtggaggttgcagtgagccgagattgcaccattgcactccagcctgggcaacaagagcgaaactccatctcaaaaaaaaaaacaaaacattccacccatgatactattttaggtcttgtttctgttccttcagtaagattgattgattctttttttttttagagacagggtcttgctctgtcagtcaggctgatacgcagtggtgcaatcatcactcgctataacctccaacttctgggctccagcagtcttcccaccatagcctcctaagtaggtaggactacaggcacacccatgctataattgatttataatatgatcctttgcctttcacagtaaacatattcctaggtactggtgggaatataaaatgtcactatttgtaatagccaaaaagtaagaacaactcaaatgtccatcaactggtaagtgaataaacagggcagcttatccatgcattctaatattattcagctataagaaggaatgaagtagtgacacatgctgccacatgggtgctaagtgaaggaagccagttgcaaaaagaccatatgttgtacgattccatttcagtgaaatgtccagcccggatgcagtggctcatgcctaaaatcacagcactttgggaggctgaggccggaggatcacttgaaaccaggagtttgagaccatcttgggcaacatagcaaggcctcatctctactaaaaattaaaaattagctaggtgtggtggcatgagcttatagttccagctacttgggaggctgagactggaggattgtgtgagcccaggagttagaggctgcagtgagctgtgatcatgccattgcactccagcctgggcgacagagcaagactctgcctcaaaaaaaaaaaaagaaagaaatcacagtccactagaagaaatggggaaaattaaaataaataaataatgtttaaaaattaagtgtccagaataataggcaactctattgagacagaaagtagatgagtggttgctgggtccaggatggtatagaatgggggtgggaaggaactactaatgggcatagggttttttggggggtgatgagagtattttaaacttaatgttgatggctgcccaactttctgaatatactaaaaaccattgaattgtacacttcatggcatgtgagttaaaacccagcaaagctattaggagtgcaatggcaccatcttggctcactgcaaccttgacctcccgggttcaagcaattctcctgcctcagcctcctgagtagctgggattataggtgcttgtcaccatgcctggctaatttctgtatttttagtagagacggggtttcaccatgttcgccaggctggtcttgaactcctgacttcaggtggtcgacctgcttcagcctcccaaagtgctgggattacaggcgtgagccaccatgctcagccaaagctgttatttttttaagtatgtattcctagatgttttatacttttatagttattgtgaatggaatgatttttttcctagataacttttaatgaatagaaacagttcctgctttatctccaaattctagaacagtcactggcacacaagtgctcagtgtttaagtgacattgttttcctgcacccaaaagtagaatgctgctcctcattggaagcatgttactttagcaaagtgccactaaaatgaccatagtccatgtgctctgatcacttgtcacagatggtgataaaattcattcacagcttcctttctaggcctgcagcatttgggagacaaaactctgctaaacctttggaagaaaaaagagaccagaggccattggtcccgaaaagtggatggaagatagggaggtagaaggaatgttacaggctgagagggcagctcacactcagctccagccacttcacctcgtgcacacactggctgagggttgccagatgtttgagaaaagctagaaatccagaccattgttaaccattggcaactatagggaacatacagaaagcatctgaactggatgtggtagagctcccagatcatgatctgattgagaatgtccatgaacttctgtcctgattgctcagtgcagactgctgcttcttctggcaagactcctctcttcacattgacctggagttgtcacaaaatctgtttttctcttgctactcccctgagcatggcaccttctgccagagcgctcccttaactgtgtgggcaggctctgcttcacagctccccgcccactctgcccaagcagaagtgagcccctcctgggcagaaagtgcccgcaatgagggctgaaatgtttctattccctgagtaaccaacctttctctgtttccttgtccaggaaacggaggtggagctgtacaacgaatttcctgaacctatcaaactggacaagaatgaccgggccaaggcctcggcagaaagctgcagttgctgagggggcagtgagagttgagcacagagtccttcacaaaccaagaacacacgtaggccttcaacacaattcccctctcctcttccaaacaaaacatacattgatctctcacatccagctgccaaaagaaaaccccatcaaacacagttacaccccacatatctctcacacacacacacacacgcacacacacacacacagatctgacgtaatcaaactccagcccttgcccgtgatggctccttggggtctgcctgcccacccacatgagcccgcgagtatggcagcaggacaagccagcggtggaagtcattctgatatggagttggcattggaagcttattctttttgttcactggagagagagagaactgtttacagttaatctgtgtctaattatctgattttttttattggtcttgtggtctttttaccccccctttcccctccctccttgaaggctaccccttgggaaggctggtgccccatgccccattacaggctcacacccagtctgatcaggctgagttttgtatgtatctatctgttaatgcttgttacttttaactaatcagatctttttacagtatccatttattatgtaatgcttcttagaaaagaatcttatagtacatgttaatatatgcaaccaattaaaatgtataaattagtgtaagaaattcttggattatgtgtttaagtcctgtaatgcaggcctgtaaggtggagggttgaaccctgtttggattgcagagtgttactcagaattgggaaatccagctagcggcagtattctgtacagtagacacaagaattatgtacgccttttatcaaagacttaagagccaaaaagcttttcatctctccagggggaaaactgtctagttcccttctgtgtctaaattttccaaaacgttgatttgcataatacagtggtatgtgcaatggataaattgccgttatttcaaaaattaaaattctcattttctttcttttttttcccccctgctccacacttcaaaactcccgttagatcagcattctactacaagagtgaaaggaaaaccctaacagatctgtcctagtgattttacctttgttctagaaggcgctcctttcagggttgtggtattcttaggttagcggagctttttcctcttttccccacccatctccccaatattgcccattattaattaacctctttctttggttggaaccctggcagttctgctcccttcctaggatctgcccctgcattgtagcttgcttaacggagcacttctcctttttccaaaggtctacattctagggtgtgggctgagttcttctgtaaagagatgaacgcaatgccaataaaattgaacaagaacaatgatcatctgcctttgccagagtctttttttccttcttcaagagccttggctcagtagagaccacatgagctaatcatagtcaatgccttatcaagcaagagagccctccataaatgggcacgtgtggtgcttcaaggcagaaaggccctctcatatctggtcctgtagtgcctgtccctagtttttttttgtttgtttttttttccgggggcgggggtgggtgtattttaatcacattgttggaggttgaggaccatggatggagaacgcattgtccctttaggagagcagccagaaactgctggggactctgagccatgcatatcctgtaggtgtaactgtaacctagtcatgtgttatgtgttttatttttagttgacctagttgctaacacttagatgtgtaattctgcatttgtcacaggagaggaagatttggcagcagaggccctgtattccaacatatgtaagcccccacctggaatggaatagttgccac

SEQ ID NO: 3404 - DNA, 6000 bp, Homo sapiens
aatgcataagtcgattgcacatcattctgagtagcatgatgaaatctcacgccatcctgctccgtcccacctgggatgtgaatcatacctttgtccagcatgtactgtatcacagtgcttgtgttcaaagaatccttattttacttaataatggccccaaagcgcaggaatagcgatgctggcatattgttataactgttctattttgttattaattattgttgttaatttcgtactgtgcctaattcataaattaaactttatcatgggcatgtatgtataagacaaaacatagtctatatagcgttcagtaccatctgaagtttcaggcatccactgggggtcttagaacatatccattgaggataagatttaacctggtgctgtgcagttctaaagctggccctctttccactatctctccaccagacatgctgtctcaggattctaagaaacctcgagaggcaaggtttattttgcaattaggatggctgtccctggtatcaagaacagatttcttcagaaaatcagcacgacctagaacttctttcttatctaacagtccttttgctatttctaatgaaaactgaaaaagtcaaacaaactttatccaaataggaaaagaacagatgagcagaactagactcttgattggaaggactgtgaatgcaaactttaaccagaaaccatttcctcttatcccgccctgccccctctttttgaagtgccaggagcagctacaaaaacaaatttgactcctagggcaaggggaagcttgagagtcaaggccaaaggtcctgaaatctggaggtccaggcccaagggcacagactttacctctatgaaggagagatctggcagcatccctagcgagcagacagtgagcctgagagagagctgaatagaggggtacagttccataaggctgacctctgcgctggacttgaggccggtgtgcctagtgatctgcaaaaacgagtttacataacaggcctttgtgttgtcccagataagagtgagtagaggagcttcagaatgttttaaggatttagagccagctgagatttcctgaggacactgaggtggggaggagggaggggtgggggaggggcaaattcagacctaatctgtctcatctagggaggaaaacagtaactgcagcaataaaaaaatatatatttataaatccttgtttttaaataagaaatgagtaacactgatggcttcttcttagaggacactgggtggcttacgggacaaacacggaagggagacttttcactatatataccctttgaagtttttaaaattttgaaatttgaaccatgtgaatggtttatctattcaaaagtaagtcatggaaactttattttaagcatgttcaaagttttctgacaaccctaagaaagaggcagagcaaagaccattagtcccatttcacagatgaggaagcctgaggctccaaggagaaaaaaaatgaattgcccaagtctgtggcagggttgaagcaagactcagaacttcagactcctagtccagtgctctctgtcagagactccacagtatgcaagataagcagcactcagattcactttataagtccagttctcatagctacagtcaaatgcatccacaagaacactggaaatgatcaccatatacaaagccttactgactcgtacagcagtgtctctgagccgtttgggtatatctacacgttttggttaataataaaccaaacaccctaaaactctttaactgtcaaccccaatctttctaaaatgccccattccacattcttctctcagtgaatgcaatggccacaactgcatttttattagatccattcactttcagaatctcacggtcatctttatgaactcagagcaaatcagaagggtggtcaagtaaaaatgaagactgggcttaggagccagccaaacccttggttttgccacagagttgtaagtgaccttggcctcagctttctctctataaaggaaccaattaacaggcacatattggacaccatgtgtttgacactggcccactggatccctgtgtcttcaaggagcttaccttctataggggcagacagaaaaaaacagttaatttgaagctgtggtaagtgttatgaccagatacaatagagttacagaatagaggacctgggagatcaggcaaggcctctctgaagatgtggcatttgcgttgggacctgaatgatgaagtagcagttacgtggggatctagaggcagagtatgatgggcacgggaagagatgcaaaggtcctgaggcaggggtaagcccaccatgttgaagggctagtgaagctggagagcaggcagtgaagggtagagatgggcctctgtctgcctctccaactttgtctccttccagaggtccatctctttggggaaggtgtttggaggttattctggttgtaatgggaagtggctacagaaataaagtaatttgattaaatctgtgattctcaaatgtttcggtttttttagcaggagaattctttagtcaaataacaagaatttcaacctacaactagataaaggtattgctctgactggttgggaagctagttaaagcccttctgaccctctctctgacctcttggcttttctccttacctttcagtacctccaagctcacaggagctagaaaaccaccaggtgatccatctctaagcttcctgaagctctaataaaacccagcatcattgtaaagaatcacagggaaagctttaggatataagactggatgcttgctggacaagcatctcgggcttcccaagacaggccctgagaaggtttattttattttattctaaatagataccacgtctcactatgctggccaggctcatctcgaactcttgacatccagcaatcttcctgcctcggcctcccaaagtgctgggattgcaggcatgagccactgcacccggcccctggaaaggttttacactgaatccctgatgtgcacttgctttccacagaaaaaacaacaataagctctggttcatcaaggctttcagttaaaatcacactgctgaaactacagagacaaaaaacagatcgggggttgccacaggatgaggtgaaaggaactgactacagaagaacaaaagaactttctgggttggtggaaaaattctccatcttgatagtgatgtggctgcttgtctgtgtaagtttgagaagttcatagacctgtaacacctcaagtggtgaaggtttaccgtgtgtaaattagacctcaaaaaacttgacttaaaatcacattgccaaaagactactcagaggcactttacagatggaggagggaaaatggcttgctcctgctgcggcagcggaccccaggaagcctgactcgaaggacagtgttccctcaagttcacggctgcccagctttaatttggagcctctgcagtgagttagacttcaggttttcctgccggcaaaatgaggtggtaaacaattgccagaggcttccccaccacagacaacgggattctgaaaagctgtccactatgggggagaaatctgctttggagtcagaaaaactgggaaaaatattcccacctctatcacttcttagctgtgtgcccaggctccatcctgtgtgagcgggggtaagaattccctccagtcagcagagaatgcacctgtaacccagctgattcccaacagcctctcaagaaggtcagcggctataacttggagaggtgtttaccacagctacacagctcttctgctccctgggccccgggctgcttcctaggaaggacaatctggaggcaaccataaggaaagaaaataacgaactgcctggccctgcattgcataacccgtgcgcagtaaaccaggagctctgctgggacacagtctgttatctcaacaggtaaacaggaaccctgccccctccctgaccaccgtcagcactgggccaccacagacactccagacacagaccgatagcacatgaggaggacaccactgctctttagcctgtattttcacactcccatttccctgcagctgctggcatcatcactgggcacactcaataacggacactccacccactccagcccttccctggctacctgctccaaaagggtggtcccgagtgactcaaagctgccttctgcaccttgctcttttccatccacggagaccaaaacacagaccccagaagacgattaaaatataataataataaaacccctcaggcaggagtttctgcttccccgtcacatctactgagaggcactgtggacacataaagactgttgacttacttttttctccaccttggggcaggagggaggcaacacccagaaattatcccaattttatagaaacaaagacaaagagctacatatcctagccaaaggcaacaaggagcaggcctagagccacccggagaggcagagcccagcagcagcaaggctccagtgactcccatctccctggcagagatcgtcccagccctgtgccctgagggtgtcctgaagatcatgggggctcgaaaccatgaaagcaagcaaagatttctgtacagtgcggttcagaaaagttactgagtgccttcagcccaggatctcctggttgattagggagtactaacacctaggttaagaaactctgatttcattcatcacaaatatttatcaaaccactgccaggacattgtggcaaccacatcctgctgtttttattcggagccattgccaaagcttggttctctcccccaccttccggtatctgtgaagttttcagtttctatcaaactccagctgggggagggaaccggggctggccctagtcgagtaaagttccaccaccaggtccacaaagagactgcagggaggcgtggccaggccggaaattctgacaaaaagttttggccctctggtcctaaaagcaactacttcctgatcgctcctagtcctggggtggggatgcagttctctggctgagtgccccgccggtgggctgagctgggggctgccatcgcggtggatggaggtggggggtctgatctccgcactccaaggcgctccgctagtacctggaacaggggagtctaaccccctgccttccaatggctaaagttattttggagcacagtcccctcctagggtgtgagctccggagggcagggccgcctcctccacactccctcgccccccccccccccagcaacccacggccggcgctttgaggacttgaacccggcccagaccccggggcccaggcctgctccgacccgaggaaggaaaaaggggaagccaaaggaaacttcagatggacgcggggtgcgctcgccgcggccaggggctccgctgcccccgccccaccctccgagggagcgccttccaggggccctggccggcctcccaccttgacccgcttgccctggatctccagcgtcttcatggtgaagtcgacgccgatggtgcttccctggcgctccgagaaggcgccggtcttgaagcgctgcaccacgcacgtcttgcccacgcttgcgtcgcccaccagcaccagcttgaacaggaaatcgtactgctcgtccgggtcccccgggcctgggcccggccctgccatggcctagaagaagccgaagggccggcgctctggacgctgggaccggcctgagctcacgcaagccgcgggccgagctccgcccgctccagcccacgggccgcctggctacgtggagccgccgcaacacctgaacccccagcactgccgaccgcctgcctcggcctcggccccgccccaccccggctggctcccgccccggcccggctcggccccgcccggacccggtgccccgcgggttcggctcccccccggacccgccaagccgggccctccgcaaagctccggccggtcctcagctccgtgccacaccagtctggcctgtaggcccgccccagcccgcccccgcccgcccccggctccgccctcaggctg

SEQ ID NO: 3405 - DNA, 6000 bp, Homo sapiens
aacagaccagggaggaagccaatctgatcctctaggggatggctgggtctggtcgggggctagcagtagaggtgtgagttcgggtgctgacccctatattttgagtcagatcctcaagtgtgagaccagtgccatcaacagaagcagcgagagtggaggtgctcatttgcccgtgtttatgatattttgggattctgggaggagagagtgggtgcctgcgttttctctggtcaccaggtgagtgcagagggctgtttatggaggagcctttccagccagcagtcagcaccagccagagcactgaagtttatgactgctgtagccgattgtgctttattcctacttttaattttcagagtccagagtgctcaccattacaacacggaatctcacaatcctacttttaattttgtaatattttgtagcaagcacccctctgtatgaaagacacagggtattgtggttggcatctggccttcatggtgttttttcacttgggggcacattttcagcactagccttggcatcaccacataaagaaaatttggggccgagcgtggtgacgcacacctgtaatcccagcactttgggaggccatggcaggagtatcatttgcttgagcccaggagttcaagaccagcctgggcaacataataagacctctacaaaaaataaaaaaattagctggatgtagtaacgcacgtctgtggtcccaggcctgtggccgagtacaagaggctgagttgggagtatggcttgagccctggagatttgaggtggcagtgagccgtgattgtaccgctgcactccagcctgggcaacagaggaagacgctgtctcccccacacccctacccccccaaaaaaagaagaaaacttgtctgatagtgttgtaggtttatattttaataatggcaagtgtagaaagaaaaagatgaaaggagaaagaaggaaggagaaaaccaggtacgaatgtccctttagccacttggaggaggtctgatccagggaacattgccagtatgggataccctctttatcatctgagatggtgccactgcatggcaatgacacaaacagttaaaatgcattcagctcacccaccactagctttaagaatgttaaattcttggccgggcgcggtggctcatgcctgtaatcccagcagtttgggaggctgaggtgggtggatcacaaagtcaggagattgagaccatcctggctaacacagtgaaaccccgtctctactaaaaatataaaaaattagccaggcatggtggctggagcctgtagtcccagctactcaggaggctgaggcaggagaatggtgtgaacccgggaggcggaggttgcagtgtgcagagatcgcgccactgcactccagcctgggcaacagagtgagactgtgtctcaaaaataaaataaaataaatatgtttcttggccgggcatggtggctcatgcctgtaatcccagcactttgggaggccgaggtgggcgggtcacctgaggtcaggagttcaagaccagcctggccaacacagcaaaacactgtctctactaaaaatacgaaaattagttgggtgtggtggcacacgcctgtaatcccagttactggggaggctgaggcaggagaattgcttgaggttgcagtgagccaagatcaggccattgcactccatcctgggcaacaagagtgaaactctgtctcaaaaaaaaagttaaattcttgaccaatttttttttctttctttcttttttttttttttttttgagacagagtctcgctctgtcgcccaggctggagtgcagtggcatcatgttggctcactgcaagctccacctcctgggttcacgccattctcctgcctcagcctctgagtagctgggactacaggcgccggccaacacacccggctaattttttgtatttttagtagagacggagtttcaccatgttagccagggtggtcacgatctcctgacctcgtgatccgcccatcttagcctcccaaagtgctgggattacaggcgtgagccaccgtgcccggcaactaaattcttgacctattttaaaaattttgcaatataggccgggtgcggtggttcacgactgtaatctcagcactttgggaggccgaggtgggtggatcatgaggtcaggagatcgagaccatcctggctaacacggtgaaaccccgtctctactaaaaatacaaaaaattagctgggcatggtggcgggcgcctgtagtcccagctactcgggaggctgaggcgggagaatggcgtgaatccgggaggcggagcttgcagtgagccgagatcgcgccactgtactccagcctgggtgacagagcgagactccgtctcaaaaaaaaaaaaagtgcaatatacattttttcaaatttggtgtattaaatgaaacataaatattttttaattgctgcatttcaaattagcatgattccatttcaaataaaatgccactgtgctactcaggaatttaccaccaaaagaggaaatgcagatattagacagctttattgaggtataatttacataccataaaacccacaggttgtaagtttacattttaatgattttaataaacttgaggagttgtgcaacccttaccacagtccaattttagaatcaccccgcaaaggcaagggagtggtgcctgggttttctgacaaaatctatactcagaccaacatgtcccctgccccagcccaaccagttccaggctagagcagtggaaaggccagttagctatccaaccaccgtctacccctacgcttcatcctggctcctggattccacaccattttgtgctgtggtagctgctctgagctgggggcaggccttgttttctggagttctggactttgacctgagctagtcccagcatgcagaaaccttccatcccatctcctgtctacttctaccctggagtggaggttatttcctgcctctctaactctccgctcccatcaggtgtaccaaagtggggctctcaattgcttttcagtggcactttggggtttcctgtctgattctgttgggtatttcccatgggagtggagttcaaactttcagaagaaacaactcttctgccttctccacggggtctgcctttgcagactgctcattcagtccctttctatcttgacctgaaaggttggctggggtcctcacagtggcactgggggacttgctctctgcgaagtctccttcagcttgaagactttccccttttctcctggatttttgtctgctttgtccacaggtgcattacaaggccccaggacaatgcccgcctgtagtagccattcattaaatatgttgaatacctggaattggagtgccacaaggaagctgtctagaggggtaaggggtgctgtcaattccttcccatcttcggagctgggaagcccagtcctgttggatctagtataagcttcttacagatgtttgggtctcctttctctgaggcgccctggttcactgggccaactcaggagttggtctgcccttcctcagaaatcccttcaagtttttctgttcctcttcctagactggtgctttttggctgggtcagtttcccaaatgggcctgtagctgctctgagctgggtcatccagccgtttagcagctgcttcaaccactgctaggctgccttttggagacaagagctcccagctcctccttctggcctagcttcccatcaaatggggccctgggtcctctcctcacaaggattttgggctcctccgcagttttgtagccagcctggattctggccttctgcagcctgctccctcccttcccttccgcccctgggaagagcgacccccaccactctcggagactgcactgcccgcctgtcagagtgggcactcaggtgacactgctgtggtcgtccccttcctccgtgatccattccggagggggtcattcttagtctaggcctgcaggcccggagctccagccatggtctccgcctgtccctgaccggcggtctgggaggcagcaggtaggggatcccgggcaggcggaccaggcctgggtggggggcgagcaggaggcgcgggacagcacctgggggtcccagctgatgaagggtcggggtgggcagcggtttgggggccagacggatccgcggtgtgggcgcgccggggtgttgatggaggaggggccgaggtgctgagggcggggtcgggctggggtcggggctgagggcggagtcgggtggggcggagtcagagctgaggtgagcctgagggcggagtcggggcgggctgaggtgggcctgtgggcggagtcggggcggtgtgctgaggtgggcctgagggcggagtcgaggtcgggctgaaggcggagtcggggagggctgaggtgggcctgaaggcagagtcgaggtcggagctggggacggagtcgagttcgggctgagggcggagtcggggcgggctgaggtggtcctgtgggcggagtcgaggtcgggctgagggcagagtcgggtcggagtcggggcgcgctgaggtgggcctgggggcggagtcgaggtcggagctgagggcggagtcgggggcggggacgtaggcggaacccgggtcgggctgaggtgggcccgagggttgggctgggggcggagtgggtgccagcctgagggcggagccgggggcgggcgggggcgggctggggcgggcctacaggccagactggtgtggcacggagctgaggaccggccggagctttgcggagggcccggcttggcgggtccgggggggagccgaacccgcggggcaccgggtccgggcggggccgagccgggccggggcgggagccagccggggtggggcggggccgaggccgaggcaggcggtcggcagtgctgggggttcaggtgttgcggcggctccacgtagccaggcggcccgtgggctggagcgggcggagctcggcccgcggcttgcgtgagctcaggccggtcccagcgtccagagcgccggcccttcggcttcttctaggccatggcagggccgggcccaggcccgggggacccggacgagcagtacgatttcctgttcaagctggtgctggtgggcgacgcaagcgtgggcaagacgtgcgtggtgcagcgcttcaagaccggcgccttctcggagcgccagggaagcaccatcggcgtcgacttcaccatgaagacgctggagatccagggcaagcgggtcaaggtgggaggccggccagggcccctggaaggcgctccctcggagggtggggcgggggcagcggagcccctggccgcggcgagcgcaccccgcgtccatctgaagtttcctttggcttcccctttttccttcctcgggtcggagcaggcctgggccccggggtctgggccgggttcaagtcctcaaagcgccggccgtgggttgctggggggggggggggcgagggagtgtggaggaggcggccctgccctccggagctcacaccctaggaggggactgtgctccaaaataactttagccattggaaggcagggggttagactcccctgttccaggtactagcggagcgccttggagtgcggagatcagaccccccacctccatccaccgcgatggcagcccccagctcagcccaccggcggggcactcagccagagaactgcatccccaccccaggactaggagcgatcaggaagtagttgcttttaggaccagagggccaaaactttttgtcagaatttccggcctggccacgcctccctgcagtctctttgtggacctggtggtggaactttactcgactagggccagccccggttccctcccccagctggagtttgatagaaactgaaaacttcacagataccggaaggtgggggagagaaccaagctttggcaatggctccgaataaaaacagcaggatgtggttgccacaatgtcctggcagtggtttgataaatatttgtgatgaatgaaatcaga

SEQ ID NO: 3406 - DNA, 6000 bp, Homo sapiens
ccatgttgctaatggtgacatcttggacagtgcagatatagaatatttccatcactggagaaagttctttggacagtgctgttctagaagtatcagtagaattggtttcccggatgtctgtgcattgggactctccaaagaacttgttaaaaacacacatctggggcccatccccacatctaccaaggtaggacccagtgagacgtatttttaacaaacatcccagaaaattttgatgcaatccatttgagaactattgctgtgcagtgtacaaaagtattgtgatcaaattgcgcatgagattgttttagtggtcgtaggtgacttcaatactgggcagaacgtaatgctgtaacagtggccaaccttcaagctagaccactagttctcaaccaggactgatagcccttccctcccctccccacaggggacatttggcaatgtcttcagacgttttggctcaccataaattgggggagggggaatggggtttaactggcatctcatagatagtggtcagggatgcttctgaacatcctccgtgcacaggacgccctcataacaaggaattgtctggcccaaaatgtcagtagtgttgagtttgagaagcccatccacaaggggcttagcacagccaggtcagtgaaagtagaaggctggggtcaagatagccttgggtttgtacctgggcacctcagcttcccagctggaaggtggctcttttactccccactgcacgaggtctaatgtggaagtgaggtagctctcagcaggagaggccactaatgcgtgcaccctggcccaaggaatgaggacatttttacaggtggagatggggaggaaggctgggtgtgggggagggagcatcacttctagaaggaaagaacagcatgaacaaaggaaagaaggaaagcataggacgtgtttaaagcagggaaaatctggttggtggagccttggtgtgtgattgagggaaggggataagctagcgtcaacaggtgcttggggtgaccctaaatggggaggccttaaatgccagagtgagaaatccgtggacactttgtttctgtagcagagtgtgacatgattgtcaccagagctggctttgggaagccaccatgctgagagagagctggctgggctcagaggggcactcagagaagaccaggagacctcaaggaggcctgtgcccaggccagcaatacagaacaggactgcactgccggcatgggccatagaactgcagctggcagagagaaacagcagggcattcctggcagtgggtttaccaaaaatgatgggcagtagagaagcaggctgcttgactagggtagagagaacaaaaggtgggctgcagtgggcagtgggaaggaaggcactggcttagtatctatttactcatttataggctgccatggtataagatacatatacatacacacaagataaagttgtatgtgtatgtgtgtacacacacacatggggaaaataaaggtaggaaaagcaaagaaaagtcagagataaagtcatactcaaaatgtatgccatggccgcatggttgttagaggtggccaaaaagttggctctgagcatcctcacagccaaggcaaggaaagagaatgtgaacttcaggagaagcatggcttttcatagtacttaaaacaaaagaacctctcctgttgtcctcaaataggagccacaaaagcatccttaggatgccagcaagaagttccaaaacagtgtttcttataccaccacaccccacacacccctgtcttaaggcaatccctgtccaggaagagcaattctgtgaggtatcaaagggcctgatcctcagctataattaggtctggtttgatgcaaggctaaaatctcacagtgttggttttgagcccgatgaggaaggcagagggccagcctggctgtgcatttggaaccagtccctgtggtggttctgataagtgcttctttagcccacagcccccgggggcaccagtggaaagggctggcgagggggctgtgcttaggccccatggatgtggcttcttacagtaaccatcctcaggatctaagtgatgtgttctgactaaagcttgaagggtttgctcctgctgccaattaggcaaggcccacatacccctgtgctttgagatgtgaacccagcaggctcttcatctccattgcactttgagtggggctgacaggtaactgggctgaggccagggctgggagctggcatttgagcactggtcgagggaaggcttctgggaaagggactccctggccttggtatagatggtgatcccacggcccaggcaagacaggctttgcttgggtggacaggcgctgggggaagtggacgggtgaagggaagaggaggcaaggtggagttggtattgcatccttcctagcccagccaaaccaagagccaagtccctaggtgtttgcagagaaacagagcagtagccaaagggtacagtgcacagggctaagtggggtggcagcttgtccaggagagtcatcttccttagcccgtccccctgcagtgatcgacatcaagctggacaaaccccaggagcccccggccagcgagggcggctgctcctgctaatgcagagccgacctgtggcttcccatgacactccttgcttgttgtgttgcttcctattggctagcttcctaaggggggagggaaccgagttatcaagatgggaggatttttcttttctctctgtctttaggagtagggtgggatggggagggaggctgggcatcagggatcacatcactcttaacggctgttacttaaacaactattttttggtttggttgtaatatattgtactttattaagattgccaaaaactgttaaaatttaaaaaaaatttaaatcatgtgtatacaattttttgccagataaaaatgtagtcatttttatttgaaagatgtgctttttgtttttgtatatttgtaaacttatagagaaccttttccacacacctcctccttcctgttctctttgaaccattcatcacctctgccttcctcctatccccagcccaataaattaaaacaattaactgagcaaattaattaggcttcagtctggggccatctggccccactctctaggccctactccagttaaatcaaacattggttgaacacatcagcctctgaaaaggtagctctgactcttgtctttccatggccagagtgggtcgtcaacctcgtgtggagctgagaccaaggtctgtgggctctaggcagcccggcagcagcccccagaggaactgctcccacctctccttctctttccctgaaaagccttgaagggggttgagggtacaggcaaccttgtgttctctgtgccctcagggactggcagagcaagaggccatcagaaggacgaggtgctgttggcaattgcagctgcgtggtgcgtggtttatagactggggtgccatgtgtacttctgaaaatattttaaccagcccacccagcagtcagtacacatgcctgggccaagtctaagaaactcagtgtgtgatgttgggcagtgtgccatcctgaagccttcctcctggatgtcagggaagctggaccacctggagttgatcctctgtgatggggaggcgggggggggggggggtgttgtctgcagaaccaccaccttgaaagatccatgttcttagagcctcagctgctaatattgttgagtgctttctggaaaagctgatttgttgctatgttttcaccccagtggcatggcgcagttgaagtctttgtggacatatctttgtggctactgtggctgcgctgtggtcacctgaggatgtggttcaggtggggtctccagaaggctgcttgcccccagagagccatctcttccatttttgattcattcctgagaatggcttagtcctgagaatctgcaaagtctctgaagagaactctctcttcccactaagtgatataacctacttggccagcattccaaatagactcagactcactgccctgagcctgcacagagccaggtgcaatgggcagtgagtctggccaaaatgtaaaccccaccctccctgctgtcattggctctccctccaggctgctgctgggcatgtcatagatgggatgaatgaccatctggggtatggtgggctgaactccacaaggtcgttggaatgaattttgaaacttctcagaaattaatctgaaatggcaggcagtaagtgcagcagaatctggcaggactgatatttgtgcagtgggcctgccacacaccctctgcctaggaggctgtatgccagagctcatctctagcaaggaatttatcttcaggtgaagaagagaggaagcaggatcccactgagcacctcttgcagaaggcaaggaccaatgtttgaacgtgtttcagatgtcatgtgtttagtttttatatgtgtgtacataattatatatagagatagacttgtgtatacaccttccacaaacacatcctcacggagatacatgtgctcaatgtatattcttgtttctcctgctctcaagttggaacttgcattgtgataagttttggaaattcaaaagtactgcaacgtgttgaaataagaaatacttaatattgtcaaataacttgtgattgtcttgccatcaataaaataatgcatagttgtgttaaactacaggcaaacatagcccacgggaatatctccaccatttctctatgtactttatatgcacgggtgtgcatgcctgtgtgggccagtgtccccccaccatgggcacacccccaagtggtgcttgttggaagagtgcttacttacctcgagagaatttacaggagtccacatgacagtgtcctgcctggttggcagcgggggccatcacctgtggcctctgagaccgccccatttacaggaatctgcactgggtctcagtgaatgaacgtatggtagatttttattttcttggcactaaagattagcttttttaaaaaaacatcccataaaacagtagaaactcagttcccttctcaggggcacacacatccaaggcaccgtggactgtgtttccatcctggcctagaggagcagtaaaagatagcatttggtttgacatggccttagtgagtcctgcctttcctagcatgcacacaacatcctctctttgagtttgggttctccccagccccttggcctctgaggctgagggtggcttcctcccatcctcccatctcagtggttccatggcgctcccttcggcacgtgcggtttccgcccctcccttcctggggtgtggaaaggcagccagacctctttttcagaagttgttggttccctgatttttgtcttgagcaggcaccatccctgtccccttgcttgcaggtagaattggcacagagttaaggttccataataaactgttaggtgctcttgaagaagatgtcatggcattgcctcagcaccccagcaagagcattgcatctttgctgaatccagatgggttagcagagggcaaattggaggattcctttgaggaaatgttctcaattgagcaattcagtccctctccccaaagactagacgtgacctggcagattagcaggatcctcttggccttcttttttggggatggtgggagtgaagggggtgaatcttaaaagcttatcaacaaagctcctgttctgcaggcatcaggaaagttgagtgtaagatggaaaaagcaaacagcctatttacaagtggaaacacattggttctgatcactcctaacttgctgggtgatcatacatacatcaacatgaaggtgtgacatcagaatcatgagcaccatggctgcagttgtgtgatccaaggctagttggcttggtagctgttggcagcagtttcccttggtcagaggcctccttgctatctatcgctgctctcttcttgtcatccttaaacattcagtcatgttcccaggtctgaggggagcaatggccagaccagtttc

SEQ ID NO: 3407 - DNA, 6000 bp, Homo sapiens
ttccgtctgctgcttgcaggtctagatggggggctgctgcacctcttcttcacgttcgagacaggaggacccctcagggccgctctggccaatacttctgcccagcagcaccctccactggtctgctctcaacaaagtaggagccaaggggccaccaaatggtagagccataagccccttactggttctacatacacaaccccccaacccccactttctacccaaatacagtatgcgcccatcacatgggccccagactgtttctgaacaaggctggcttacgcaaagaaagagcagtagtgtgggcacttcatgaagtggctctaagcaggtgaggacagtgacgccgcaaaccagatagagcatgctcaaggcctcccagctccttaattcagagctggaaccacatccaaatgactggattccacagccctgttgcactctctgatggggctgtggtgtgctttgacattccagatacagacaggattgtgctgcagtagagtcagaggcactgggattggggaagcatatccagcagtagggggtaagtttgtaacaggctgtctgggcccacccatcacttccaggaaccagggagaagggacattgggcactgaatgtggcccgtgatgggccacacttgacccagagggaagaggcgggtgtgctctggccatgcctgccggaaaggcacatatctaacctcttgaggcttgtgagaaaccgtgagtttccccttctgggacattatttagacatgggtccagtcattcttccctgtcctctcaatcagcgggcagcccctgagcactgcatttcagcagcatgtggcgtaacaaggaaggaggtgtcattaaatgagagcctttgggaaggctcctagcggaagagctgggcctgtgctctccaattctgcagccacatgtgggtgttccgacttaaattagttaaaattcagttgaattaaaagttcatttcctcacttgcactagcatccttgcaagtgcccagttgcccatgttgctaatggtgacatcttggacagtgcagatatagaatatttccatcactggagaaagttctttggacagtgctgttctagaagtatcagtagaattggtttcccggatgtctgtgcattgggactctccaaagaacttgttaaaaacacacatctggggcccatccccacatctaccaaggtaggacccagtgagacgtatttttaacaaacatcccagaaaattttgatgcaatccatttgagaactattgctgtgcagtgtacaaaagtattgtgatcaaattgcgcatgagattgttttagtggtcgtaggtgacttcaatactgggcagaacgtaatgctgtaacagtggccaaccttcaagctagaccactagttctcaaccaggactgatagcccttccctcccctccccacaggggacatttggcaatgtcttcagacgttttggctcaccataaattgggggagggggaatggggtttaactggcatctcatagatagtggtcagggatgcttctgaacatcctccgtgcacaggacgccctcataacaaggaattgtctggcccaaaatgtcagtagtgttgagtttgagaagcccatccacaaggggcttagcacagccaggtcagtgaaagtagaaggctggggtcaagatagccttgggtttgtacctgggcacctcagcttcccagctggaaggtggctcttttactccccactgcacgaggtctaatgtggaagtgaggtagctctcagcaggagaggccactaatgcgtgcaccctggcccaaggaatgaggacatttttacaggtggagatggggaggaaggctgggtgtgggggagggagcatcacttctagaaggaaagaacagcatgaacaaaggaaagaaggaaagcataggacgtgtttaaagcagggaaaatctggttggtggagccttggtgtgtgattgagggaaggggataagctagcgtcaacaggtgcttggggtgaccctaaatggggaggccttaaatgccagagtgagaaatccgtggacactttgtttctgtagcagagtgtgacatgattgtcaccagagctggctttgggaagccaccatgctgagagagagctggctgggctcagaggggcactcagagaagaccaggagacctcaaggaggcctgtgcccaggccagcaatacagaacaggactgcactgccggcatgggccatagaactgcagctggcagagagaaacagcagggcattcctggcagtgggtttaccaaaaatgatgggcagtagagaagcaggctgcttgactagggtagagagaacaaaaggtgggctgcagtgggcagtgggaaggaaggcactggcttagtatctatttactcatttataggctgccatggtataagatacatatacatacacacaagataaagttgtatgtgtatgtgtgtacacacacacatggggaaaataaaggtaggaaaagcaaagaaaagtcagagataaagtcatactcaaaatgtatgccatggccgcatggttgttagaggtggccaaaaagttggctctgagcatcctcacagccaaggcaaggaaagagaatgtgaacttcaggagaagcatggcttttcatagtacttaaaacaaaagaacctctcctgttgtcctcaaataggagccacaaaagcatccttaggatgccagcaagaagttccaaaacagtgtttcttataccaccacaccccacacacccctgtcttaaggcaatccctgtccaggaagagcaattctgtgaggtatcaaagggcctgatcctcagctataattaggtctggtttgatgcaaggctaaaatctcacagtgttggttttgagcccgatgaggaaggcagagggccagcctggctgtgcatttggaaccagtccctgtggtggttctgataagtgcttctttagcccacagcccccgggggcaccagtggaaagggctggcgagggggctgtgcttaggccccatggatgtggcttcttacagtaaccatcctcaggatctaagtgatgtgttctgactaaagcttgaagggtttgctcctgctgccaattaggcaaggcccacatacccctgtgctttgagatgtgaacccagcaggctcttcatctccattgcactttgagtggggctgacaggtaactgggctgaggccagggctgggagctggcatttgagcactggtcgagggaaggcttctgggaaagggactccctggccttggtatagatggtgatcccacggcccaggcaagacaggctttgcttgggtggacaggcgctgggggaagtggacgggtgaagggaagaggaggcaaggtggagttggtattgcatccttcctagcccagccaaaccaagagccaagtccctaggtgtttgcagagaaacagagcagtagccaaagggtacagtgcacagggctaagtggggtggcagcttgtccaggagagtcatcttccttagcccgtccccctgcagtgatcgacatcaagctggacaaaccccaggagcccccggccagcgagggcggctgctcctgctaatgcagagccgacctgtggcttcccatgacactccttgcttgttgtgttgcttcctattggctagcttcctaaggggggagggaaccgagttatcaagatgggaggatttttcttttctctctgtctttaggagtagggtgggatggggagggaggctgggcatcagggatcacatcactcttaacggctgttacttaaacaactattttttggtttggttgtaatatattgtactttattaagattgccaaaaactgttaaaatttaaaaaaaatttaaatcatgtgtatacaattttttgccagataaaaatgtagtcatttttatttgaaagatgtgctttttgtttttgtatatttgtaaacttatagagaaccttttccacacacctcctccttcctgttctctttgaaccattcatcacctctgccttcctcctatccccagcccaataaattaaaacaattaactgagcaaattaattaggcttcagtctggggccatctggccccactctctaggccctactccagttaaatcaaacattggttgaacacatcagcctctgaaaaggtagctctgactcttgtctttccatggccagagtgggtcgtcaacctcgtgtggagctgagaccaaggtctgtgggctctaggcagcccggcagcagcccccagaggaactgctcccacctctccttctctttccctgaaaagccttgaagggggttgagggtacaggcaaccttgtgttctctgtgccctcagggactggcagagcaagaggccatcagaaggacgaggtgctgttggcaattgcagctgcgtggtgcgtggtttatagactggggtgccatgtgtacttctgaaaatattttaaccagcccacccagcagtcagtacacatgcctgggccaagtctaagaaactcagtgtgtgatgttgggcagtgtgccatcctgaagccttcctcctggatgtcagggaagctggaccacctggagttgatcctctgtgatggggaggcgggggggggggggggtgttgtctgcagaaccaccaccttgaaagatccatgttcttagagcctcagctgctaatattgttgagtgctttctggaaaagctgatttgttgctatgttttcaccccagtggcatggcgcagttgaagtctttgtggacatatctttgtggctactgtggctgcgctgtggtcacctgaggatgtggttcaggtggggtctccagaaggctgcttgcccccagagagccatctcttccatttttgattcattcctgagaatggcttagtcctgagaatctgcaaagtctctgaagagaactctctcttcccactaagtgatataacctacttggccagcattccaaatagactcagactcactgccctgagcctgcacagagccaggtgcaatgggcagtgagtctggccaaaatgtaaaccccaccctccctgctgtcattggctctccctccaggctgctgctgggcatgtcatagatgggatgaatgaccatctggggtatggtgggctgaactccacaaggtcgttggaatgaattttgaaacttctcagaaattaatctgaaatggcaggcagtaagtgcagcagaatctggcaggactgatatttgtgcagtgggcctgccacacaccctctgcctaggaggctgtatgccagagctcatctctagcaaggaatttatcttcaggtgaagaagagaggaagcaggatcccactgagcacctcttgcagaaggcaaggaccaatgtttgaacgtgtttcagatgtcatgtgtttagtttttatatgtgtgtacataattatatatagagatagacttgtgtatacaccttccacaaacacatcctcacggagatacatgtgctcaatgtatattcttgtttctcctgctctcaagttggaacttgcattgtgataagttttggaaattcaaaagtactgcaacgtgttgaaataagaaatacttaatattgtcaaataacttgtgattgtcttgccatcaataaaataatgcatagttgtgttaaactacaggcaaacatagcccacgggaatatctccaccatttctctatgtactttatatgcacgggtgtgcatgcctgtgtgggccagtgtccccccaccatgggcacacccccaagtggtgcttgttggaagagtgcttacttacctcgagagaatttacaggagtccacatgacagtgtcctgcctggttggcagcgggggccatcacctgtggcctctgagaccgccccatttacaggaatctgcactgggtctcagtgaatgaacgtatggtagatttttattttcttggcacta

SEQ ID NO: 3408 - DNA, 6000 bp, Homo sapiens
gctgtgcctgccagcaaggggaagggttgcactgcccgctctccatcccaccagctcccaaggtgtggcacactggccggggtgagtggtgatcgtttcattcacattctcccagagtcgcgctgttgagggctccaggctgggcccacagtcaggtcagactgggctgagtgcagggtgacagtgagctcgtcatcgtcctggtatgcctagcgtttcatccagctaccactgacctttgggccccttgggagaaaggatacatggcaggttgcaaacagactgcacagggtgttgtgacctgtgtccctttttctagctaaggggtcccctcatctgggtagatgtacccccatcctttcacttctgcccaggagccagcttgctgggcctctcacgaggcaggtgctagagcggccaccagaggtcccagagggaccaggcagaggcagccgtcattctgcttctttcgggatggggtgttggcatttctgcttactcacagtccaaatccaggtgttttgaaggtgtgtgctttggggtcatgttcataattgtgttccacattgagagcagccacacagaagcactgctttgtggcgctgtataaactgttcacacctggcctcacttgctcagctcaggacttggtgaatgtgtggcatgaggtttccgtctgctgcttgcaggtctagatggggggctgctgcacctcttcttcacgttcgagacaggaggacccctcagggccgctctggccaatacttctgcccagcagcaccctccactggtctgctctcaacaaagtaggagccaaggggccaccaaatggtagagccataagccccttactggttctacatacacaaccccccaacccccactttctacccaaatacagtatgcgcccatcacatgggccccagactgtttctgaacaaggctggcttacgcaaagaaagagcagtagtgtgggcacttcatgaagtggctctaagcaggtgaggacagtgacgccgcaaaccagatagagcatgctcaaggcctcccagctccttaattcagagctggaaccacatccaaatgactggattccacagccctgttgcactctctgatggggctgtggtgtgctttgacattccagatacagacaggattgtgctgcagtagagtcagaggcactgggattggggaagcatatccagcagtagggggtaagtttgtaacaggctgtctgggcccacccatcacttccaggaaccagggagaagggacattgggcactgaatgtggcccgtgatgggccacacttgacccagagggaagaggcgggtgtgctctggccatgcctgccggaaaggcacatatctaacctcttgaggcttgtgagaaaccgtgagtttccccttctgggacattatttagacatgggtccagtcattcttccctgtcctctcaatcagcgggcagcccctgagcactgcatttcagcagcatgtggcgtaacaaggaaggaggtgtcattaaatgagagcctttgggaaggctcctagcggaagagctgggcctgtgctctccaattctgcagccacatgtgggtgttccgacttaaattagttaaaattcagttgaattaaaagttcatttcctcacttgcactagcatccttgcaagtgcccagttgcccatgttgctaatggtgacatcttggacagtgcagatatagaatatttccatcactggagaaagttctttggacagtgctgttctagaagtatcagtagaattggtttcccggatgtctgtgcattgggactctccaaagaacttgttaaaaacacacatctggggcccatccccacatctaccaaggtaggacccagtgagacgtatttttaacaaacatcccagaaaattttgatgcaatccatttgagaactattgctgtgcagtgtacaaaagtattgtgatcaaattgcgcatgagattgttttagtggtcgtaggtgacttcaatactgggcagaacgtaatgctgtaacagtggccaaccttcaagctagaccactagttctcaaccaggactgatagcccttccctcccctccccacaggggacatttggcaatgtcttcagacgttttggctcaccataaattgggggagggggaatggggtttaactggcatctcatagatagtggtcagggatgcttctgaacatcctccgtgcacaggacgccctcataacaaggaattgtctggcccaaaatgtcagtagtgttgagtttgagaagcccatccacaaggggcttagcacagccaggtcagtgaaagtagaaggctggggtcaagatagccttgggtttgtacctgggcacctcagcttcccagctggaaggtggctcttttactccccactgcacgaggtctaatgtggaagtgaggtagctctcagcaggagaggccactaatgcgtgcaccctggcccaaggaatgaggacatttttacaggtggagatggggaggaaggctgggtgtgggggagggagcatcacttctagaaggaaagaacagcatgaacaaaggaaagaaggaaagcataggacgtgtttaaagcagggaaaatctggttggtggagccttggtgtgtgattgagggaaggggataagctagcgtcaacaggtgcttggggtgaccctaaatggggaggccttaaatgccagagtgagaaatccgtggacactttgtttctgtagcagagtgtgacatgattgtcaccagagctggctttgggaagccaccatgctgagagagagctggctgggctcagaggggcactcagagaagaccaggagacctcaaggaggcctgtgcccaggccagcaatacagaacaggactgcactgccggcatgggccatagaactgcagctggcagagagaaacagcagggcattcctggcagtgggtttaccaaaaatgatgggcagtagagaagcaggctgcttgactagggtagagagaacaaaaggtgggctgcagtgggcagtgggaaggaaggcactggcttagtatctatttactcatttataggctgccatggtataagatacatatacatacacacaagataaagttgtatgtgtatgtgtgtacacacacacatggggaaaataaaggtaggaaaagcaaagaaaagtcagagataaagtcatactcaaaatgtatgccatggccgcatggttgttagaggtggccaaaaagttggctctgagcatcctcacagccaaggcaaggaaagagaatgtgaacttcaggagaagcatggcttttcatagtacttaaaacaaaagaacctctcctgttgtcctcaaataggagccacaaaagcatccttaggatgccagcaagaagttccaaaacagtgtttcttataccaccacaccccacacacccctgtcttaaggcaatccctgtccaggaagagcaattctgtgaggtatcaaagggcctgatcctcagctataattaggtctggtttgatgcaaggctaaaatctcacagtgttggttttgagcccgatgaggaaggcagagggccagcctggctgtgcatttggaaccagtccctgtggtggttctgataagtgcttctttagcccacagcccccgggggcaccagtggaaagggctggcgagggggctgtgcttaggccccatggatgtggcttcttacagtaaccatcctcaggatctaagtgatgtgttctgactaaagcttgaagggtttgctcctgctgccaattaggcaaggcccacatacccctgtgctttgagatgtgaacccagcaggctcttcatctccattgcactttgagtggggctgacaggtaactgggctgaggccagggctgggagctggcatttgagcactggtcgagggaaggcttctgggaaagggactccctggccttggtatagatggtgatcccacggcccaggcaagacaggctttgcttgggtggacaggcgctgggggaagtggacgggtgaagggaagaggaggcaaggtggagttggtattgcatccttcctagcccagccaaaccaagagccaagtccctaggtgtttgcagagaaacagagcagtagccaaagggtacagtgcacagggctaagtggggtggcagcttgtccaggagagtcatcttccttagcccgtccccctgcagtgatcgacatcaagctggacaaaccccaggagcccccggccagcgagggcggctgctcctgctaatgcagagccgacctgtggcttcccatgacactccttgcttgttgtgttgcttcctattggctagcttcctaaggggggagggaaccgagttatcaagatgggaggatttttcttttctctctgtctttaggagtagggtgggatggggagggaggctgggcatcagggatcacatcactcttaacggctgttacttaaacaactattttttggtttggttgtaatatattgtactttattaagattgccaaaaactgttaaaatttaaaaaaaatttaaatcatgtgtatacaattttttgccagataaaaatgtagtcatttttatttgaaagatgtgctttttgtttttgtatatttgtaaacttatagagaaccttttccacacacctcctccttcctgttctctttgaaccattcatcacctctgccttcctcctatccccagcccaataaattaaaacaattaactgagcaaattaattaggcttcagtctggggccatctggccccactctctaggccctactccagttaaatcaaacattggttgaacacatcagcctctgaaaaggtagctctgactcttgtctttccatggccagagtgggtcgtcaacctcgtgtggagctgagaccaaggtctgtgggctctaggcagcccggcagcagcccccagaggaactgctcccacctctccttctctttccctgaaaagccttgaagggggttgagggtacaggcaaccttgtgttctctgtgccctcagggactggcagagcaagaggccatcagaaggacgaggtgctgttggcaattgcagctgcgtggtgcgtggtttatagactggggtgccatgtgtacttctgaaaatattttaaccagcccacccagcagtcagtacacatgcctgggccaagtctaagaaactcagtgtgtgatgttgggcagtgtgccatcctgaagccttcctcctggatgtcagggaagctggaccacctggagttgatcctctgtgatggggaggcgggggggggggggggtgttgtctgcagaaccaccaccttgaaagatccatgttcttagagcctcagctgctaatattgttgagtgctttctggaaaagctgatttgttgctatgttttcaccccagtggcatggcgcagttgaagtctttgtggacatatctttgtggctactgtggctgcgctgtggtcacctgaggatgtggttcaggtggggtctccagaaggctgcttgcccccagagagccatctcttccatttttgattcattcctgagaatggcttagtcctgagaatctgcaaagtctctgaagagaactctctcttcccactaagtgatataacctacttggccagcattccaaatagactcagactcactgccctgagcctgcacagagccaggtgcaatgggcagtgagtctggccaaaatgtaaaccccaccctccctgctgtcattggctctccctccaggctgctgctgggcatgtcatagatgggatgaatgaccatctggggtatggtgggctgaactccacaaggtcgttggaatgaattttgaaacttctcagaaattaatctgaaatggcaggcagtaagtgcagcagaatctggcaggactgatatttgtgcagtgggcctgccacacaccctctgcctaggaggctgtatgcca

SEQ ID NO: 3409 - DNA, 6000 bp, Homo sapiens
acatcattagtcattggaaatgtagattaaaaccacccacaatgagatattactacattcctctcataatggcttaaaatattgacaacagcaaatgctgatgagggtgagaagaggctggatcgctcatccattgctggtggggagtggaaagtggtagaaccactctggaaaagtctggcagttcctttaaaaaacaaacatgcatatgacccagcaagtgcactcctgggcatttatcctggagaaataaaaacttcctttcacacaaaaatctctacatgatagttcataacagctttatttgtaatggccccaaactggaaataatttcagatgcctttccacaggtgagtggttaaacaaactgtacgtccatactattgaatgctactcagcagtaaaagggagctaactattgctacaaacaataacctgggtgaatctccatagaattatgtgaaaaaaaaaataggacatgcagtggaatagtaaccagcagggaaaatgaaagaactgctgctacatgaatcaacagatggatctcaggaacataatgttaagaaaaatgcaagtcataggacagaatatacagtttgagacattatataaaattcaaaagatgcaaaacaaaaaagtattgttggaggacacatccaaatgtgataaaaactcaaagaaaagccacagttctggattttcaagctggggagagagggaggggcagaaacacctgagggcctcaaaagtactgtaatatttgagtgctccagccaggtgaagtgaaaaaaacaatcccaaagggtgatatactgtgtaatgccacttatataagattcttgaaataacacatttattgaaatgaagaacagattagtggttgccagaggttaggaaggggttgagggtgggaggaaagtgggtgtggctataaaaggggaacatgagggctctttgtgtgtcaaggtacagaacagaaatgtaccttgactgtcttaattccagtatccacattatgatactgtagtataaagttctgcaagatcttactcttggtgaaaactagataaaggatatacagatctgtcttttttttttttcctgtttgtgaatctacaatgatctcaaaaatttaatttaaatatatatatatatatatataacacagcaaagggctcaggaaaaccaagatcttgaagaaaatgaaaaatatagatgatgctgtagtgctatatgatctaacgaatatctttgaaaaatagtttggcacaaaattaaacgtacacttgtttttataccacaatttacctactgacacatatcttagaaaaacttcacagaggcatcaagagacatgtaaagaatgttgatggcagcattgtttgttaatagcagaaacaaaactgagtgcattttccaatgttaatttcctggttttactaagcaatgtggttatgtaagatgttatcactggggtagcttggtgcaggatacatagtaactccctgcactgttttttataacctctatgtgagtataaaattatttaaaataattttaaaaaaggccaggcgtggtggctcacacctgtaatcccagcactttgggaggctgatgcaggcggatcacgaggttaagagattgagaccattctggtcaacatggtgaaacctcggctctactaaaaataaaaaaattagctagacctggtggtgcgtggctgtagtaccagctactcgggaggctgaggcaggtgaattgcttgaacctgggaggcggaggttacagtgagccgagatggcgccgctacactccagcctggtgacagaccaagactccatctcaaaaataataacaacaataataaaataaaataaaataaaaattttaaatgacacattttacagaaaatcatttaaaaattggggcataactagaatactaaccagcagtgaaaatgaaagaactgctgctacatgaattaacaaatggatctcagaaacatgatgttaagaaacatgcaagtcaggacagaaaacacagtttgataccttatataagattcaaaagatgcaaaacaaaacaaagtattgtgaaggacacatccaatgtgataaaactcaaagaaaagctaagattctggatttccaagttggggagggaggaaggagaagaaagcacctgggggcctgaaaagtactataatatttgagccctccagctgtgtagagggtaaatgggcactcagagtgataggttttctttgtaacttacatatacacagcacatactaaataggaagatttaaagaatttttttaaatggaatgcacagattctatgatatggaagaaactctttctagtgaggttgccaggctgaggttcagtggccccattttccacctggagaaagtctgtctgctttagggcaggttaaggacaagactcaaaatcaggggagataagcaatgatagttggaggagagagacttggagcagagcaaacttggagtctctaaggctctcatttccacagcatgatgactgcattctgagagcaatgccagtatctgctccagcgacgtgagcccggtagtcggagccgggtttttgtcatttgaactggaagaattatgacagagtcccccaaagtaagctggaccatagtcagcccagctggacctggtaagcatatgggatgacttggaggcttagaggtgcccagaggggccctgccccagccctccctcccctactgccataccaccttacatgtgcgggaccagatgatcagaggaggtacaggacctgcctaggcttacccaaaagatggtgccttttctggcacacctcagctgttttgtcttgccaccgatgatctcatcaggtcaggatgagagggtacagggagacagcactagatgttaggagaaggtgcaggttggaggagtgttgcatggctgggtaccttggccagtagctcactggcccttctttggagggatcacttatagagacgggaagggctgtgacttgggagtctcctctcctttcagagctttcttcaaccccaagctggatatggtctcctaagagagcaggagccccagagaagtgggtgggtgtctggagggttaccctgagcctggtgccagccacaacggggcagatattctaggtgatgacttacaatccctggggttccaaactaaaggtaattatgagaataggacagttattttgatttgagttctagatgttcattcaaacattcaacaactatttcttaaactctgagctatgtccttgggatgcagtggtggagcttcaactactgcttttatggaacttgtggtcaggtttctaacaagaaataggaaagagattcgaggtgagcacaccagggagacagataggcttgcccaagcaagccccataagtcaaaaagggggtaacaagtgtccacgagaaatctggaggtgaaggttgtgtctcactcctctttctctttctataacacatgcgtgcacacaccatcgtgttcaccgacatgcagattattatctcaaataaatgctcactgaacagccataaatgaacaagaccacgctgtggcagaacagtaagggacagctttgtaaaacctcaattaaccagcatgccttaggctcgggctgtcttgggagtgtttctagcacttggcgtctgctctttgctctcactcactcacaacttggtctgtgtgcctcgatggaccaggcaagtagaggccaaggagaggtcgcccacatgtcctcagatagctcattgtccagatacacctaattgccagggtggggagtggcattgtcagcctggcgaccccgggatcaagaaacgcagggcactgtcctggagatagtggcactggcattcagagcgtcaccgttccttctctcccatggggcaggttaggatttggcataaaatgatccaaatgagcagctggtttgaggtaggcgcgcctgatattggcagctcctctctcgctggccaggtctgcgggggcacccacagactccacaagaggccgcccaaataaagggtctaggcctcgagagggaagggcgggctagaagccacggggggcaagagtcgagccccatctgcgccaagtacgccaggtttccctaggtctgaccgccctgacgggcctcgccacaccctggctctcccccaccttcgttcctttccgccctgtcggtcggacgactgcgctgtgcatcggtgtctcgcgaggtggaggaagggactggcatctaggtttaaaagaccagaaacaaatgtcccctgacaatttctgtcattttctggattcaaaagaggggtagagtggggaagacagacgcagcggggcagcgagacacggtcccccccggggggctctcaggggtacggcgaggaggttctctcctgcccgggtgcgggctcgggtgggcgggcgcacgccccccagccccgcagccccgcgggccccgcatgacatcagaggctggggagcgcacagagcgcaggcgccggcggaggaggcaggcgggagggggccgactggcgcggctctggagagcgctcctccgccccgcgcgccgtccctgcgccccgctccgcccgcgcctctctcccagcgccgcgcctcgggcgtaaagagcgcgcccctcgcaccgcagccagtgccgaccgcagcagcccagccccagccttcctccgcctccgcctctctctcctcctcctcctccgccgccggacacgcagccgcaggccgggaccgggacgcagctggggagtcagggacgcgcgcagccagcccttccccctccggctcccgcaccgccggccgcctcccctcgccctcctactctcccctccctgctccttcgctttttcctcctcctcctctcccggccccggctgccagcaccatgtccgcagggggagattttgggaatccactgagaaaattcaagttggtgttcttgggggagcagagcggtaagtacccggcttaatctcttggcttgtcgccgagtcgacccccgccgcccaatcgcccaccccattgggacccccggcccaggctcggaaaggcccctccttgccagggtagaggagagggacagggatggggaggtcggggcggggtcgggctggggaggggccaagggtgaggacggaggaggcgctggagcctggggtggaggtgagggtgggctctgggtggggggcccggggtgtgggtgcaggtgcggcgctgcagggggcccggagggcggcggctggctccgcggcgctggccagggcgtgaaggaaccgggctcgctggctagctcacactgcggcaccggctgcgggcgaccgcgcaggtggctgggtgctggcgggggtggggagagcgacgggcgccccccttggagaacgaagcgaagctggggtctggccgggcctcactccgctgcactggaggggtgttccctgcggaccctgctgggaaccatgcgaaagggcacgtccagggcgtgggacaaacagccaccggggagaaaagagcgacacctgtctctgctcgaaagagcgagtgcaggccatgggggaacggggagcctacctcccctggctcacgtccgactgggcacagaaggttctagacccgctgcccttcgccggcgcttgttagtctccttgctgcccagggatctgggcaattgcagtgagggctaccccaactcgaggcgatttggggaatgatacaggggcacctcacaccgagaggctgtgaagtctggctctgggcagagaaaggcccaggcgacacgccctgcctagcttcccagcactcctccagagagcatcggtggattcttcccacccccacctcccagctcaccgcccttcttgggggaggggaggtcaccctggcagtcggccagagctgggggagggggagactgcttctccgctgcccg

SEQ ID NO: 3410 - DNA, 6000 bp, Homo sapiens
taggcaaacttgatcatcagcaagtgccccaaactcacaaatgtcctggggatgagggaacagctggggagcctcatctcattttgttgcctgctaaatcctacctagaagaggaaatcgcctaggcttttgaaactcaaaacttttctttttaaacagttgtctctagcatgtgtttcagtattttagagttgactttttttttttccttgacaaatttctgctgcattatcactaccctgaggctctgggtgtcaaaaaatggaacaatgtttttcaaactgtaggttacaatccattaatggggcacaaaattgatttagtaggtcatgctagcgttaaattttgtttcgtgtatgtgcatttgtgtgtgtgtgtgttctggtttgcagtgtaaaacctatttcttcctatggattacagcccacagtgtttaaaagctgctgaactttagtttaacggagtaagagttaagggaagaaaaacaaacattatcagaaaccaacacattagctgagtatggacaacttttggagaagtttagccgttaatgggaaggagattgattggaagcttctcttctagccccagatagcaagagcgagcccatgtaaggaatgaactataagtatcagagaagaaaaccttatgaggcctagctcctaatgaagctggaggaggtggtaggtgtggagggctgtgttttagtccatacccctctgctgctataacacacaataacatagacagagtaatttacaaagaaaagagatttatttggctcacagttctggaggctggggagttgaagagcatggcactggcatctggtgagggccctcccatggcagaaggcaggcagaagctagcatgagacagagagaaaattggaccaaacttgtcttttctattaggaacccactccctgtaatactaacccattcccacagcaatggcattaatcagctgtgaaaggccccacctctagcaattaatttcaacgtgagttttggaggagacattcaagccacagcagggtagcagggaggagtaaagatgagaagtgattgggcctggattggtaaagtccatgaaaactctgaaagcagagtataagtttttggcattacatcatgggcagcccaggggaagaaaggccttgtacttggcacagaagaagggtcagcttgaggaatgaataagcataggtcgtgggggcaaggttcttttgctagcccatggttggtgcttcagggtcaccaaaagatctaattccagccgcaggcccagtgactagaatgagcactcgtctcctattcaccttatccctgctccgccaacaccaaacacacacttgtccatcaaggccacttggcatgggagaagagtataggctttgtggtcagaagagcctgattcttagtctaccagctgtgtaggattgggctcacagtctccttatatctaagacagggctcagatgacctacagcacagggtcagacccatcactatgtctggtgtcaggcacgctgtgagtgctcagaaactcacggcttcttttacccttagggaatacactgaagttgggaggttttttgtttgtttgtttgtttgtttgtttttgagacagagtttcacccttgttgcccaggctggagtgcaatggtgcgatctcggcccactgcaacctccaccttctgggttcaagtgattctcctgcctcagcctcccaagtagatggcattacaggcatgcgccaccatgtttggctaattttgtgtttttagtagaggtggggtttcaccatgttggtcaggctggtctcaaactcctgacctgaggtgatccacctgactcggcctcccaaagtgctgggattacagatgtgagccaccgcgtctggcctgaagctgggagttctagaggaaggctgggccacaatgacctggttgacttccagccccaaggtcccaagcccccacgtttgctgctgaactaggcaccagtttggattggctctgaggcatggcactcagcaagcctcagggcagagaggcaagtgtaggacatgttgcagtggatgaagtatgtttgttttgtcctgctctgggtcagttcagtggctctgactttagccagaaattggctcctggccctgtgtctgaccttggacctctgtggattaaatttgggcctgagccttgcctgggtttttggctaggtgtctggccttctgccatgcctcaaacacacctgatcagccaggcacatctgccagagactttggaaagacttctgctcaatcatccttcagcatataaggttttctccttcccttctcagcctagctaatttttgttttttgagatggagtttcactctgtcccccaggctggagtgcagtggcaggatctcagctcactgcaactttcgcctcccgggttcaagcaattctcctgcctcagcctctctagtagctgggactacaggcacccgccaccacacctggctaatttttgttttttttttagtagagacggggtttcaccatattggccaggttggtcttgaactcctgaccttgtgatctgcctgccttggcctctcaaagtgctgggattacaggcatgagccaccacacccggccctagctaattgttatttgtccttccagatgtggctcagtcatcagctctcacagaagtccttcccttggcacttgcctcctcgccatattggattaggtgcccttcctctggtcttccacagtccctgtgcttctctgttccacaccacttgctcctcagttggcactcagcttgcttgaaggcaggtctctgccccagtgcccggtactcagtagatgctctggcagtgtttactggatgaatgaagcttttctgctcagtggctctgttctctaagcccccatttgccagcaactgagccacaacttgtatttcaaggttcaaagagcagaggaggcagctcaaatggaacagcccatccgcaatcgcaatctgcaagatttactctcaccattaggcaatcttaggtaggtcaagcacagtgtctcacacttgtaatcccagcactttgggagacccagataggtggattgcttgagtcccaggagttcgagatcagcctcgggaacatctctacaaaaagtacaagaagtagccaggcatggtggtgcacacctatagtcccagctactcaggatgctgaggtaagaagatgtcttgagtccgggaggtcgaggctgcagtgagctatgatgctatgatcatgcgactgcattatagcctgggtgacagagcgagactctgtctcaaaaaaaaaaaaaaaaaaaaaaaaaaaaaaggagaatcccaggtacctgggtatgactattagctgtttaagttccatttctgagaagaggtattattacagatatgtgtataaaagcagtataaagacatctctttgactcttgcatagatgttggctcagctcaagctgagggcatggtcagggtcttgtgccagtcagggcccaagagaggacatctcttacatggggagcccacgaggggctgacaggccaccaggatgtacagatccctgcccgccttcccaagttctgtggtaaatagagggggttgagggagtcaggttccagggcaaacctagacagtcgaggtaaactactgtccctcaagccttctccccaaccaggtcttttactccctactgccaaggagagatactcttgatggcacccaacctgctgtccccttcctgggggacacttggggtctacagggtctttggagcagcaggtgggagtggaggcacagggggtgcacagcagctcccaccaaatggctgcatgggtggctgggatgccaaaggaagcctgcatgggattaagagcctcagcatggcaggcagagccagcagcactgtgaggctcccttaggcctggggcaaacctgagaagggagtgggttccctggacatgtaaagctggttctaagtcattgaggtccacccagaaaaagaatgtcctcagaaatgatgctgacaatcaaaaccacaatgaaatgccatttcgcccccaataggatgactagaataaaaaaagacacacaattacaagtgtttgcaaagatgtggagatattggaaccctcatatgttgttggtgggaatgtaaaatggtgcagctgctttggaaaacagtttggcagttcccccaaaagttaaacatggagttaacatatgatccaggaattccactcttaggtatatacccaagagaaagaaaagcatatgttcatacaaagacttgtacatgaatattcatagcagctttattcacagtagccccaaagcagaaaactaaatatccatcaagtgatgcagggataaacaaaacgtatagacatacagtgaaatattactcagtcatgaaaaggaatgaagtactgctacatgttacaacatgaatagatcattaaacattggttactgaaagaagctagtcatagtcacaaaaggccacatgttgtatgattccgtttatagaaaatgtcctgaatagggaaatccatagagattgaaagtagattagtggttcccagaggcggaggaaaggggtgaatgaggagtgactgctaacgggtagttctttttgtgaggggcaggggaggggagtgggaagtggtgaaaatgttctggaattagctcatggtgatggttgcaaaactttgtgaatatgctaaacaccactgaatcgtacacttttttttttttgagacagcgtctcactctgttgcccaggctagagtgcagtagcgcaatctcggctcactacaacctctgcctcccgggttcacgtgattctcctgcctcagcctcccgagtagatgagatcacaggcacgtgccgccatgccgggttgacttttgtatttttagtagagacggggtttcaccatgttgcctaggctggtcttgaactcctgacctcaggcgattcacccgcctcggcctcccaaagtgttaggattacaggcgtgagccaccgcgcccggcttgaattgtacacttcaaaaggtggaattttatggtgttgaattatatctttatttttttaacggggggaaaatgacgccgctggagaggagttagcggaactgaaacaatgaaatggtgcgcgagtgtcgcctgtccccgtcgcatccatcccaacgaagtttgggccctggaacggtgcacccagaaggcctgcggggagagacgctggggcatgatctggaagaaagacgtctcaggattcgaagggaatgcagctaaggtggcggcggaggttcgcctaggactggggaggcgtccctaggctcagaagttggcccggccggagcggagatttaaaggttggagcgcagaggctcttaaagaggccgagtcgaattcccactcggcgtccaccttaaagccagctccccggcaccacggatctgacccgggtaagtgctgggccgcgggagaggctgcggcgccgaccccagcccctggcgctctagcgcgccctgccgggcccaggggactcggcgcgggtgggctggacttcgtaggcgcgcgtcctgggggccggggtgcacgcgggggcgacagggtcgaggcacccggcccgggctccccactggcgcgcccgcagcggcgctctatttttagcaggcgctgtggcaatataaggaatgcgcggcgcgctaggcgctcggggcgcacgctggcggcgcggtcgctttaaggaggcgccggggcggggacggaccggagtggccggctggcggggagccgtcagtccggcggccgcggggcccggcgggcgcgacgctgcctcctcaccggcgcaggctaggagggggcggcctgagtgccgtagccgagccggggctggagcgcgcggtgagtggtcgggcggccttggaggggagggggcccggcc

SEQ ID NO: 3411 - DNA, 6000 bp, Homo sapiens
gtaaagtccatgaaaactctgaaagcagagtataagtttttggcattacatcatgggcagcccaggggaagaaaggccttgtacttggcacagaagaagggtcagcttgaggaatgaataagcataggtcgtgggggcaaggttcttttgctagcccatggttggtgcttcagggtcaccaaaagatctaattccagccgcaggcccagtgactagaatgagcactcgtctcctattcaccttatccctgctccgccaacaccaaacacacacttgtccatcaaggccacttggcatgggagaagagtataggctttgtggtcagaagagcctgattcttagtctaccagctgtgtaggattgggctcacagtctccttatatctaagacagggctcagatgacctacagcacagggtcagacccatcactatgtctggtgtcaggcacgctgtgagtgctcagaaactcacggcttcttttacccttagggaatacactgaagttgggaggttttttgtttgtttgtttgtttgtttgtttttgagacagagtttcacccttgttgcccaggctggagtgcaatggtgcgatctcggcccactgcaacctccaccttctgggttcaagtgattctcctgcctcagcctcccaagtagatggcattacaggcatgcgccaccatgtttggctaattttgtgtttttagtagaggtggggtttcaccatgttggtcaggctggtctcaaactcctgacctgaggtgatccacctgactcggcctcccaaagtgctgggattacagatgtgagccaccgcgtctggcctgaagctgggagttctagaggaaggctgggccacaatgacctggttgacttccagccccaaggtcccaagcccccacgtttgctgctgaactaggcaccagtttggattggctctgaggcatggcactcagcaagcctcagggcagagaggcaagtgtaggacatgttgcagtggatgaagtatgtttgttttgtcctgctctgggtcagttcagtggctctgactttagccagaaattggctcctggccctgtgtctgaccttggacctctgtggattaaatttgggcctgagccttgcctgggtttttggctaggtgtctggccttctgccatgcctcaaacacacctgatcagccaggcacatctgccagagactttggaaagacttctgctcaatcatccttcagcatataaggttttctccttcccttctcagcctagctaatttttgttttttgagatggagtttcactctgtcccccaggctggagtgcagtggcaggatctcagctcactgcaactttcgcctcccgggttcaagcaattctcctgcctcagcctctctagtagctgggactacaggcacccgccaccacacctggctaatttttgttttttttttagtagagacggggtttcaccatattggccaggttggtcttgaactcctgaccttgtgatctgcctgccttggcctctcaaagtgctgggattacaggcatgagccaccacacccggccctagctaattgttatttgtccttccagatgtggctcagtcatcagctctcacagaagtccttcccttggcacttgcctcctcgccatattggattaggtgcccttcctctggtcttccacagtccctgtgcttctctgttccacaccacttgctcctcagttggcactcagcttgcttgaaggcaggtctctgccccagtgcccggtactcagtagatgctctggcagtgtttactggatgaatgaagcttttctgctcagtggctctgttctctaagcccccatttgccagcaactgagccacaacttgtatttcaaggttcaaagagcagaggaggcagctcaaatggaacagcccatccgcaatcgcaatctgcaagatttactctcaccattaggcaatcttaggtaggtcaagcacagtgtctcacacttgtaatcccagcactttgggagacccagataggtggattgcttgagtcccaggagttcgagatcagcctcgggaacatctctacaaaaagtacaagaagtagccaggcatggtggtgcacacctatagtcccagctactcaggatgctgaggtaagaagatgtcttgagtccgggaggtcgaggctgcagtgagctatgatgctatgatcatgcgactgcattatagcctgggtgacagagcgagactctgtctcaaaaaaaaaaaaaaaaaaaaaaaaaaaaaaggagaatcccaggtacctgggtatgactattagctgtttaagttccatttctgagaagaggtattattacagatatgtgtataaaagcagtataaagacatctctttgactcttgcatagatgttggctcagctcaagctgagggcatggtcagggtcttgtgccagtcagggcccaagagaggacatctcttacatggggagcccacgaggggctgacaggccaccaggatgtacagatccctgcccgccttcccaagttctgtggtaaatagagggggttgagggagtcaggttccagggcaaacctagacagtcgaggtaaactactgtccctcaagccttctccccaaccaggtcttttactccctactgccaaggagagatactcttgatggcacccaacctgctgtccccttcctgggggacacttggggtctacagggtctttggagcagcaggtgggagtggaggcacagggggtgcacagcagctcccaccaaatggctgcatgggtggctgggatgccaaaggaagcctgcatgggattaagagcctcagcatggcaggcagagccagcagcactgtgaggctcccttaggcctggggcaaacctgagaagggagtgggttccctggacatgtaaagctggttctaagtcattgaggtccacccagaaaaagaatgtcctcagaaatgatgctgacaatcaaaaccacaatgaaatgccatttcgcccccaataggatgactagaataaaaaaagacacacaattacaagtgtttgcaaagatgtggagatattggaaccctcatatgttgttggtgggaatgtaaaatggtgcagctgctttggaaaacagtttggcagttcccccaaaagttaaacatggagttaacatatgatccaggaattccactcttaggtatatacccaagagaaagaaaagcatatgttcatacaaagacttgtacatgaatattcatagcagctttattcacagtagccccaaagcagaaaactaaatatccatcaagtgatgcagggataaacaaaacgtatagacatacagtgaaatattactcagtcatgaaaaggaatgaagtactgctacatgttacaacatgaatagatcattaaacattggttactgaaagaagctagtcatagtcacaaaaggccacatgttgtatgattccgtttatagaaaatgtcctgaatagggaaatccatagagattgaaagtagattagtggttcccagaggcggaggaaaggggtgaatgaggagtgactgctaacgggtagttctttttgtgaggggcaggggaggggagtgggaagtggtgaaaatgttctggaattagctcatggtgatggttgcaaaactttgtgaatatgctaaacaccactgaatcgtacacttttttttttttgagacagcgtctcactctgttgcccaggctagagtgcagtagcgcaatctcggctcactacaacctctgcctcccgggttcacgtgattctcctgcctcagcctcccgagtagatgagatcacaggcacgtgccgccatgccgggttgacttttgtatttttagtagagacggggtttcaccatgttgcctaggctggtcttgaactcctgacctcaggcgattcacccgcctcggcctcccaaagtgttaggattacaggcgtgagccaccgcgcccggcttgaattgtacacttcaaaaggtggaattttatggtgttgaattatatctttatttttttaacggggggaaaatgacgccgctggagaggagttagcggaactgaaacaatgaaatggtgcgcgagtgtcgcctgtccccgtcgcatccatcccaacgaagtttgggccctggaacggtgcacccagaaggcctgcggggagagacgctggggcatgatctggaagaaagacgtctcaggattcgaagggaatgcagctaaggtggcggcggaggttcgcctaggactggggaggcgtccctaggctcagaagttggcccggccggagcggagatttaaaggttggagcgcagaggctcttaaagaggccgagtcgaattcccactcggcgtccaccttaaagccagctccccggcaccacggatctgacccgggtaagtgctgggccgcgggagaggctgcggcgccgaccccagcccctggcgctctagcgcgccctgccgggcccaggggactcggcgcgggtgggctggacttcgtaggcgcgcgtcctgggggccggggtgcacgcgggggcgacagggtcgaggcacccggcccgggctccccactggcgcgcccgcagcggcgctctatttttagcaggcgctgtggcaatataaggaatgcgcggcgcgctaggcgctcggggcgcacgctggcggcgcggtcgctttaaggaggcgccggggcggggacggaccggagtggccggctggcggggagccgtcagtccggcggccgcggggcccggcgggcgcgacgctgcctcctcaccggcgcaggctaggagggggcggcctgagtgccgtagccgagccggggctggagcgcgcggtgagtggtcgggcggccttggaggggagggggcccggccgcgccgcctctcgccccggccgtcgctttgttccggggcgggaggtgtggccgccctccgggctcggccgcgctctccgcttgcggggtgcgccctgggaccggctgtgcgtggcgttttgcccccatcgcgggctcccgcgtaacggtgtgcgttcgtgaaatcggccacgaccaagaccccagtggggagggcctgcgcgccgctcagagagaccctttcatggtaattacagttccttggctgcctgggcgagaacccggtggatagatgggcggcaggacggggcggcgggggatgggtgggtgggtgggggactctttacccccccgccttaagatggcgttaacgaggggagggatccgccagggagttgacaaattcatctgaataataaaacgcagcctgcttcataaacaacccttcactgcccccggaggtttggggagctggagctgtggtcacaactagggcctgggctcatgcattgaactgatctggctgaggcatcagacacggtgccagtcctgccctgcggggaagacaagagcacaaagtgacaagccagtgtggtaagtgctgagattcggtaagcccaggggttgtgggagcccctaggggtccctactgcagagtgggaggtgagagaaggccgcctagaggagttaatgtctggctggccgcagcgtatacactggacacccagttagactctggctagagctgaggtctgttctggcctggggcaaagtggagtctggagaggtggacagagtccatcaaggccactggggccttgatcatagagctctgccattgcccctactccccaatggcccctgatggtgtggaacctccctggccttgctcctctaggactcactctgtcctggacctgaccagagagggtggctgacaaggctcggaatcgtggcctccagaggtttgtctggcagcagaagtaagatggagatatgactttaagagctctgaaactccactgtaataacagcaaccaacagggcttccaaagaccaggcacttgaagtggatttgctcatcatttgacaagacacctctt

SEQ ID NO: 3412 - DNA, 6000 bp, Homo sapiens
gagcttatttttccatttacagatgcctgaggtttttgtacacatgttattaaaattattgaggaagtgatattgccttttaggcagaagtttccagtatgaacaacgggtttgggttgccatgcagcctgtggcctgggcggggccctgggagcagtggttgccatgggaaccagttcagccgcccccacggccaagtggctgctgttcccaaagttggtttctgcgtggatggggctgcctggaacctcagagccatttcccatggaaacaatgctctaaatgatgggtgatgttcccacacaggcctattttgtctggctgttaacagagcagagatggtggtgaggcttctcatgctgagaggaggctgggaatgagagagagtgtgtgtgtgtgtgagtgtgtatgtgtgagtgtgtatatgtgtgtgtgtgctccctcttcttgggagtaaagtaaacaaggtgagaaagtgagcatttgggcatcttctcagagctcagcatatctcacacattttatttcatgcttagagcaatcctacaaagtatgagtctccaactaacccactttactaataagatactgaggccatagaaggtaatttgcccaaggtcactcaactggtcagtaggaggagtattcagcacagaaaatagtggggaaactttaaggagaaccccaagtctaccttataccaccttcccacctcaaagggtcacatccatcatcctcaaaagtgaagacctaacatcctagaatgatctccgaggtgctttttagttgagaaggctggaaaggagaggggtgttgtgaatgtcagcagtttgctccttacccaccaaccaaccaacttttcattctgcggtgacttttcgtcgtagcctgtgagtggttttaaaaaaatctttctctgtaccgcatgagaccagcttattttgtaggagtgtggttcatatctcttggcgtcttgacctccccatctgcaaagacatcatttgatcagggttttggggggggccggagaaacatgcctatcaagatgagatagcacctttaggaattggggggttctctggactcattctccagccttggaaaccccttctttgtttctagctcacacttgattccaagggtcctgtctgtgccattagtctcatctcttagtaggagagagacagtcccaagccctggctgagagagttgtcccttagctctctccatgaggaagccagctctgtggtgtgtaggttgtctgaccattgttcagaaatgcgtgttgaacctctagttcattcagtaagtgtctgccctgtgccaatgctgtgccaggctctgggagtacagagaagaacaagatgctgttcctgcccttttgtgcacagtaaacacttagaaaattctaggcatcattgtggcgtctgtggcaggaacttcagggctcaaagcgcaggtggaggcagtgcctggtgctgacccatgaggaggtttgtgctctcctgggggtcttaggtgtgcacagaggctgcagtgtgaccacaggacacattgggggaccacaaacctggttgggggtgacagtagagtataaggggctgcggcacgggtgtggctggagaggtcagcagtggcagccagcgacaggcattgaatgtcctgtgagggggcctggactttcctcctcagcattgtggggcactgaaagggttttcacaaggggcccagtctgatgtttgtgtgaaatgagtagtctagccctgttccattgtgtcctaattagaaggaaaccccaagtgggaagggaaccccggcttggctccctgtggtctctgagggttcaacctctgagagcagggtgctgtcaaaaggagggggcccccactggccatttcctgccagctgccttggcaagcagagggcattttttaaggagtccccaagtgatttggctgtgggtggtctgagtgccgactcaaaggttcattcatgtactccagcatatttactagtgtatttcttatcttgttttcttttgagaagaaaataaagacaaacggttttccttttcaataccttcccacccacttagtattttttagttatgtcgctgccagcagagaatgggagctttaagaacagccaaacaccgaccgggaacggtggctcatgcctgtaatcccagcactttgggaggccaaggcaggcaggtcacaaggtcaggagagcaaaatcatcctggccaacatggtgaaacctgtctctattgaaaatacaaaaaaattagccaggcatggtggtgggcgcctgtaatcccagctactcgggaggctaaggcaggagaatctcttgaacttgggaggcggaggctgcagtgagctgagaccacgctactgcactcccgtctgggtgacagtagcacccaaaaacaaaacaaaaagccaaacaccagcaaacacctttcacccatagcccagcgtcattgcccaggacagagcagcagttgcagaggggcagtgaggagtgaaccccacgctctgcagctctgagaggcaaaggagagaggccactgggccacccctccctccccatttctgtcaccctgcaactcccctccgccctctctccttggcctgccttcaccgtcatggatttggccatggaagagctcagttaagtgaagcctcagcccgtcccgtgttgtagggagatgctggaaccagattccggggccacagctggaacctggtcctatactgccccaaaggagctgaaatccccactcgaatgagaggaaatcaaacattttcaggtggcttgaacattttattttcctgggagcattttaatagtgttaaacttttccagtacacaaatataatgcatgcttgttgtagaaaattgaaacattaagaaaatgaaaatgccctgaaatctgccttagagacaaccatctgctaaagttcttaatgcctggatccacacctggcattaggatcaggtgtacttactagctgttttgcagcctgtctttttttcatacataacaacacactttttctaggttagtgaatatcttccttttaaatgactgcatagtactccattatatggataaactttaacttttccccccaacattaagttatttctattttcccccattcttaacatctttcttcacttctctgattatctccttagaataaattctcacatggggtagagctgcaggagagggtatgaatatatttacgcaagtgtattttcagtatagcctaggcagatttgcactttctctgcagtgtagcaaagcttgtacttctccgacactttggggaagtcctaaatgtcaacatcaggcttcagtaactacaaagggttctgcaatgactctcgactgtagccccatgcaaatcagtgtggccacataacccacatttgtgtccagccccctttctgtcaaaatctagaactgaagactattttagagctgaaactaattataaaagtaatctaatccagccctttaaactcatagataaggaaactatggctcagagagatcagtggccttcccaagtagcggcggagcacacagggcacccagttctttgtcctccctgccacactgccaccctcctctctgtgagaccatcggtttcccagtcacacgtacaccatgcttttcccatcccaatttgcacagggattctttcttttcttctacacagccgtaggattaagctttccctccctcgatttttgtgctacccaggaatgccctaccaggaggtggtattgcttcttcctggcagggtccacagttagttagcagtttaggttcctggctacaacctccaaattgttctttaggggatccccctagctgcacctgtgtttaacatttggtgctgtcagcctccttctggaaactcttggcttccatcatgaccacagatcctggtttccctccttttcttctgagtgcctccaggaggctccctcctgcctctcctccttgtcactttgtgacactgtttacaaaggtcactcttcacttctgttaaggcccaattattctttagaatcctggtcccacttccagctgcctcctggtcaccttagctcagggtttctcaacctcagcactattgacattttaggatggataattcttcactgggggggactgccctgcgcattgtacaatccctggtctgtgctgaacagatgccagtggtacccactccattttgacaacaaaaaaaaatatctctagacattgcaaatatccctggggagcaaaattcccctgactgagaaccactgccttagctggcctcagcagcatcaaaacaaaacttcgacctgctcctaccccctcctccccaaataaaatgattcccgcatgactttgtgtataatacagggcaagaagcagagagaaaggagccacaatcatagaattctgaaacttggaaggggcctcagagtcccagagctcaggtgtgctaagctatcatggccccctttctaagcttagacacagcttcaaatccttctcagcatagcagcccagttaataagaggggatgtgaaagatgaacctccatgccagccctgctcagaccactgccctcgtgttaacctgtacaagtagagtttagtggccaaaaagcttatttgacatggcttttggctatacttgctaaacaagaccagtggtactgtgtcctcaacaccaggcctggcacataattggtgttgaataaatgatggttgaataaatcactttaacagtggactgtctctggctagtgagaccaggggtaatgcttttattttcttttgcatttcttcattttcaaacctctttataattgagagtattactttataaaggaggaaaacatatgaatattttcccctaagttaaaaaagccctctgtctcattccacatgtcttgctgccgcaggtctgacctacgagaaacatggcaaccagcgccgtccccagtgacaacctccccacatacaagctggtggtggtgggggatgggggtgtgggcaaaagtgccctcaccatccagtttttccagaagatctttgtgcctgactatgaccccaccattgaagactcctacctgaaacatacggagattgacaatcaatgggccatcttggacggtgagacctgggtggcagccctgcattgggtgggatagtagatggggaggatcagggaaatttgacaggtttcagtggggcaagatggtttccttaatgttgctgttatgggatggttgatataaagccgtgtgtcgttttcagggtgaattctcaacagggaaggcctgcgtagagggcttgcaagatttcgtggaaaccaaaatgtgcattcagcaaagaggggaggctagaatcatgccaactcagtgatgtcatgtgtgttttttcttgctgatcagaatctctgattaacagttatggatgtctttagctaataaaaaagggaaaagcaagttgtttcttaatgagcatagtttacttggtacttgtcctttgaggggaatctcttgcatctgacattgtgtttctagctgagtgtgaattagtctggattactagttctaagtgtggcagccaggccagcagtagccgcagcatcaggaaactaattagaaatgcacatcctcaggcccatactgatttggaaattctgagggtgggcccaacaccctgtgttttaacacaccctcgaggagatgcttgaaatcagggagtattaaatcttcaacttcgttatttttcaaagttgttttgactggtctaggtcctaaggtatttctatgtgagttttagcatcagttaaattctaaaattctagattttgattgggattgtgttgaaactgtagatctgtttgaggagagttgatattttaacaatgttgaggcttccaacccatgaacacagtatctctttccatttatt

SEQ ID NO: 3413 - DNA, 6000 bp, Homo sapiens
gggagcaaggaaaagaaatggcgaccaaacacaatgtaggtgtgtgcgtgtgtgtagagggggtcaggagatgtgtaaaagctgtagcctggtcacccctgcagtcctggtctttggaaatgaaactactgtttattgaagggctccccttagtttaagtcttgttgctactgaaatcctgcaattccaggaatccaggtaatgcacatcagtgtttcgtcaatggtagagacaggtcccctagaaagaaagtagaaggtgtctgggacctggggggatcatacaactcagggacttctgagtgatggggtgggaccacaggtggcagtggtctgaggccctggaacctgggccattactgagccggtaggagtacaggatgtgaaggggctccaggtaggtcccagcttgagctgcggtgccttcctgcctcccctctgggtgtgtgcagggatgcacgttgtcctgacttacaggggccccataggactctactggccgcttatcaggggcatctgccatggccggatttggtgtccaacctggaagaggctccaaagcagacctcagcaccccttaccagggccaggagaaagtggaaagtgtgcccagttcaaaccctgattctctgccagccggtgttgaccttgagcaagtgcgtcattctgagctcagtctcctgagctgcagaatggagatacttgcttacctcagagggttaatgtgaggactaaaagaggtcagggatagtgagacctggaaagccaaacagcccataatgaagagcagtttccatttagtgttatcagaggctcaaatatttgtccaatgaatatttcaaaggcttaagctctgccttttgtgctctgcgctttgtgtgtctgttggctacaacagaagtgtgcacatccaacctcacgcgatgatgatggatgggaagatactgactggtttgtgttctgggcaatgatttacaatctactcctctaaaacaacaacttactctgtcgccctccatgcatttcaagtgttgattatttttctttccttcactgtgcttttctttttccagcatattataatgaaaggcattaattttgtaatcagaaaaacttatgaaaaataacaaagttattcagtctaatcacactcagcttacttccatctgtctcatcaagggaggcctgtgtgttccccaccctgctccccgcctttggggaatgaacacttcctgccttggtggggtccctgctgtaggagaaggtgagcgctcaggagtgagtgtgtcctgacctcatagagcctttgttctcctccctttgccagcccgaggcttggtgcagatctggccctggaaacctgctctgtggggccaccacagtcgtatctcccgctgtctgcaccctttcgaccgggtgatgatttctcaccattgaacgtgcagacaaaaaccttgtgtaaacatggctgagctcccaggctcatagatacagatcaaacaagagctgggatgaggtgggggccagctccgacggggccagggtcacctgggcccagaatcctggtcatggcccagcctctcctcagccttttctaccacgtccactctggaggggcccagaaagagggacagaagtcatcccaaggtggagcaacagacctcagaaagaaaaatggatagaatcagaatgtatttttgataaatgaaacagtctttcatcttcaagtatataaaaagatcactttattctatttttagggagctattaaatatctctgtgcctagagaacaagagggaattggaaaagccattagtaacactttccaacctgaaagagtgaaaagccctaaatgatgcttgaggctattgggggctggggcttctgtggggggttttgaaagcacctgggttcctcagaacctctgggcatttttaagggtgtaacagggctttgaggatctctgtgccactttgatcaagttgagctttgccttccagattccgtacatagaaaccagtgccaaggacccacctctcaatgtcgacaaagccttccatgacctcgttagagtaattaggtgagcactgccctctccctagaagcgggcctccacagcatgggttggctcctggaggcagctgggagcttgaggaagcagctcctgttctgaggccatgaggctgtggaattctgggcctatttttggatttcttgtccctccttccatttctttcttttgctttttccacctacctctgccctccccgcagctgctaacgggtttgtgggtgatgtctgctgcacatgttaagtggaaatgccttcctgtctgatgcagtggctcaggctccctggaaggcagctccctccagcctggcttcagtgttctcctcacaccaaagctttccacactgtacaaactaggtctctctcctcttccctgccctgatatcagagcaccctttgatatttcccctgaacaaccaatattctgattccaaggttcaaatttcagaggcattgcacatgtatctcctttcccaaccccaccagctgtcaatctccaagtattgtcagcaatcctaatgaaagtttcttgtatattcctttgcatggtcagggtcaagacgttaatcacctcatgcactcatgactaaaacagcctcctggctgcatccgctgtcaccaagctatcccatttcccaaatctttaacatgcacagcagcctaaccagcgggtctcagacattgtgcgttgagtttgtggcctatatgctggcacctccaagggctgctggtgagctgtgagatcagccccggggctctaacccccactatacacacatgcccccacatgctcaaaaagctcatcttctcattattccccagcgtaatgaggaaatattacattcttcactttatgtttttgctggcagttttgcactctcaaaatgattttctcatccaggcgtagtggctcattcctgtaatcccagcactcagaggcaaaggtggaggtggaggcaagaggattgcttgaggctaggagttcaagaccagcctgggcaacatagtgaaatgccatctttacaaaagaaagaaagaaactatttgctcttgggcattttgcctccaattaggatgtgctgccatcaggtagcctatggtgatgccttggttgtgaacctatagtgccaaggtcaggttttagacataggaaaagttaacagaaaacatgaaatggcttttacgctcagttgacccatcattttatttaaactatgaaacacaggaatagaggccagcactctataagacaaaacgtgatgtagcttatgatttatgtaaatgtagctacaacataatgtcagtcattcccatcagtagggcgatttaggttatcccctcccccatctcccccattgcattgcctcaagagaagctatcctgccaggccctcctccagcggccaggacagccactgggagagggatggcatccccatccccctcacccactaaccccgccagaacaggcctcctctgactcagatctggggctagggaggagaggggcagaggagaagcaaagcccattctgactttgtctttctgtccttcattgtttcaaaaggcaacagattccggaaaaaagccagaagaagaagaagaaaaccaaatggcggggagaccgggccacaggcacccacaaactgcaatgtgtgatcttgtgacaggcctgaggccctgggcacagtgacggtggcctggccagccctcgggacccctccccacctaactgcactgaaaccatttctaaccacaacccttggcccaaggacttggtacaggaagggagaagggcaggtgggcagggagcagacagggtctggctttgcccagagggcacgggctttcccacctctcaaagagacaaggaagccacctgtaagcagaagcagcatccaagtgcccctggcccccccatgtgttgattcaacccggttcctccccctctctcggtgggtgtgttgtttattgtaactacatagtgttggtttgatgtggaagtgtttatccacatacaaagtacaaaacaagccatgaacaagcttctttcccttaccccccatccacaatgtctgagcttggatgtcttttatagatttttaaattattttagtgattattattttattaaaggggtctgggctcactgcctggtgaagtttcaagtgttcagcagacctctctggtaacatatctggaatattgttgttgttttttaaccgagttttcccatcagtgccaaaactcaactcaatctgaaagtagagtgtctgagaggacagaaggtaatgggaactgtagctggaggcctcaggccatgggtcaaacctgggagggaaagagaccctacacatggcctagaaatgagagaagagagaggtatttacccagaggattttcctatggttggggatgcaaatattagaaaacagattgtattttgctgaggggagtggctgtcatgagcatgtcagttctaaaaggggttttcattatcctggaaatgtataaactaaagtaagctgattggctttgcaaacatgttcatttgtttttcagacagtatgggttaagttctctgccctccccaggggtctgaggaggctctgggtttctcagatctgtctcttgctgcgttttcacatcagctgtgctgcttggtgcctctctgatacgaatacactgacacgtcaaagtaacctaatgtggacaccatccagaaaactccagttcatgctggatcttaaccaaaaatgattcaatactgttatcactaaaacagcaccaagacctgaagccatcttcccttggagtcaactgactaccacctctataagcctagtcaatgagcagaccccttccagtatttgtaaaagtagtactaggttgcctttttggcaatttttattgacctgttgaatcttgactataaaatgatctgagaagtaaggaaggctgggctgatgtgtggctctcatataccttctgcaagggggcagtctccccagctccctgatgatgctcacccccgcccccccacctcaggtgctgctggtgtgagccaaagactggagtttttccagctggggtgggagtggagagacaacaggaacaacgctgcaccaaagaaaaggtcagaataaaaggcagcacagctggtgaccttattttctagatgttacaaatcaggtcactatgcaaactagaatatcctcagcaggtggcctggccactctggagaaagaaacccaaggaaagtgagcacccaactggatgccaagacacccgggttctgaaaatgtgctgtgttcctacctcggcaagatcaccagcactgaggggcccagctggagaatgattctgctacaaaaggagacagttgagacttttgcttgttggaaatcaaacttcttatttgtctaaattgcccctttttctgttcctaaaaggaaggataagagagaacattccaggtgaggcacttcaaagtttccttagaccctatagtgttaagaggtattttaaacactaaaaggacaaagctcttcccaatccttatgcttccctaagtggtatctgcagcagtttgttgtgtgcagtttgatggcagctgcaaactggaggtgaggcggaggaaaggcaggtaggaaggagtaaggatggagatgctcagaatcaagagcatggcggagtaggagaagaagccctgcacacagggcagtgtccacagccagaaaactcctgctgggcaccaaccactacgagcataccccatgcccaccgtggagctgcaactcctcgacagcactgagtttgatagtctcactggaagcagatcagctgatgtagaacagagacctcggccataaaggtgagaagacatagggatttcaaccacacagttgggacagaagggacagtgcatctg

SEQ ID NO: 3414 - DNA, 6000 bp, Homo sapiens
tttagtagagacagagtttcaccatgttggccaggctggtctggaacccctgacatcaagtgatcccccccgacctcggcctcccacagtgctggggttacagacgtgagccactgcgcccagccttgttttgtttttaactgtcagttctttagcacttatctaaccaatccttgactgtgtgtctcaaagacaattgacaacaaggagatatgcaggactcttaacaccagctgaagcaaatgacttctacagagtgaagggcccatctttatttatcttcccagtaggaaacattcagtggatcataagaattaaaaaattagtgctatcattcaattttttaaaataatttatatctgtggctgcgtgcagtggcttaggcctgtactcccagcactttgggaggcagaggcgggcggatcacttgagctcaggagttcgagtccagcctggccaacatggtgaaaccctgtctctactaaaaatacaaaaattagccaggcgtggtggtgcactcctgtaatcccagctatttgagaggctgaggcaagaggaatggcttgaacccaaaaggcagaggttgcagtgagcgcagattgtgccactgcactccagcctgggtgacagagactctgtctcaaaaaataacaataataataatagtaataatttagatctgtaaaatggttctatttttcccaagttgaaaataaaaaattattttctgttcgtcctttctttataaaaatgttttgtggcctggtacagtggctcgtgcctgtaatcccatcactttgggaggccaaggtgggaggattatttgagcccaggagtttgagaccagcctgggcaacatgtaaaaccctgtctctataaaaaaaaaattttttttaagttaatgttcttgtataaaagttagaaaaatgaacagtcttatcttaaaatcttctccctctccttctcctcactctgcctcccacttcccctctccctctgctgcttcttttttctttcttctttcttcttcaacttccgggctcaagcaatccttccacttaggcctcctgagtaactaggaatacagacacaagccactgtgccctgaactaaaatcttcttaatgaataggtgcttcttaagggtaaagtatagtttcacaaaactcacaaaatgatttcaagtagcatgtaatctcacatttttttataaactgcccttataatgatacctcgaaccagcatctctgaaaacttcaaagctattcctatatcattacatctttatccccaaaaaacctctgggagaatgcagacaagctgttattacacccattctacagacaggacaactaagatccagactgctttgtatcacatagtgaactagtagggtcatagaattttcacatcctacgttcattgtgaagccacatgtcatgtacctctagaattaaaagtgttctatttttgaatcaaggctttgtaaaatgtcaggttgtttaatcctaattgatctcagtcagctctttctttaggtcctcactatttgcatattctaattaactctgctctctattttagcaaatgtatatatacttttattttcacgatgatactataatgcttgtctcttttaaaatgagtgtgtagggccaggcgcagtggctcacacctgtaatcccagcactttgggaggccacggtgggtggatcacctgaggtcaggagttcaagaccagcatggccaacgtgatgaaaccctgtctctactaaaaatacaaaaaaaattagccgagcatagtggcaggtgcctataaccccagctgctcggggggctgaggcaggagaatggcttgaacccaggaggcagaggttgcagtgagccgagaacgtgccattgcactctagcctggatgacaagagtgaaactctgtatcaaaaataaatgaataaataaaaataaaataataaaacaaagtgaatatctatttattgtaacaattttagaaaaatattaaaaataaaaatcacctattatcccatcactcagagatgtctaccggtgacacttcgtaaacatccaacatctatccgtttatttttctacatagtatatatacatatatgtatacatatatgtgtatatatgtatatgtgtgtgtgtgtgtgtatatatatgtgtatatatatacacatatatatatatatatttagagagagagagagaaattttttgttttgttttagaaacagggtcttgctccatcccccagactggagtgtagtggcacaatcatagctccctgcagccttgacatcctgggctcagcagtcctcctgcctcagcctcctgagtagctggtactataggtgtgccccaccacacctggataattttttaaaattttttgtagagacagggtctcactatgctgcccagactagtcttgaactcccaggctcaagtgattctcccgcctcctcccaaagtgctgggattacaggcatgagccaccatgcccagcctcattttatatgttttacttcactaatatgtgctgaacatctttccatgttattaacatgccttacaacctttcttctggtaaatgttattgaagtatagcagacatgcagaaaagtaaacaatcattagtgtagagcttgacaaacactcacaaagtgaacatccccatgtatcagcctgagaccaagaaatggaatacccgcagaactccagaagccctctttgcctacctcccgtcaggaggccctcccaaagttaaccactacttatttttgcctggttttgagccctatacaaatgacatgtagtatatactcttttgtgcgtggcttattttgttcaacatttgagtttattaggttcattcatgcacaaattcttattaatggctgcatagtctactatatagttagtacaattaaatcaagctcaaaaggaaaaagttctcttttatggaacatttaagctattttgcattgttcattatcataaacaatgctataaatatccttattgttttgttcacattcttgtatattccgtaggataagttcacagaaattgaaatgttggttgtaacgacagttaaagctcctttttttcttttcttttctttttctttttttttttttttgacagggcctcactctgtcacgcaggctggagtacagtggcacaatcagtgctcactgcagcctcaacctcccaggctcaagtgatcctcctgcctcagccctcagagtagctaggaatacaggtctgtgccatcatgctgagctaatttttttgtatttttttttagtagagacggggtttcaccatgttgcccaggctgatcttgaatttctggactcaagcaatcctcccaccttggcctcccaagagtgctaggattacaggtgtgagccacctcaccctgccatgttaaagcttttgatgagtattaccagattactcctcagagtggtgaaaatatatttacaccagtagcatgtgagtgtgagtggctgttttcctagtatcttctccatcaacacatattacaattttccttactccttatggttgctggtggtttctagtcagaacatattatagctattaatagtaatttactcaattcaaatcttgaattatttcagagagagaaggaccagtttttatttttttaaagtaagtttatttttatatgagagttgtatgcactggattttgtttaatatattactcctcagttaataacttttcttaagtaatagcagacatcatgatacaggattccttcagtatgtacagactgatctacctaaatagtttacttctcaaacgtttactgttccagggtctgaaatgaaatataaatacgatgttcttggccgggtgtggtctactcaggaggctgaggcaagagaatcactcgaacccgggaggcggaggttgcagtgagccgagattgcgccactgcactccaacctgggtgacagagcgagactccatctcaaaataaatatatacctacatacatactatgttatttatgcctatatttaagtcactttctagtcccttaagtatagagatttactagtgtaattaataattactaccccatgttttcataacttgaattttttctttccataagtcttttttaaagaactttatcttattctaaagatgacatgattgtttgattgtttgaaaatacaaataagtaagaagaaaaaaatcatctatattccctgcttgtttgagaggtttttgctatctcagtgtagtctgtttgttcatttgttccttctctctctctctcgctctggcttcttttttttttttttttaatgagacagagtcactttttcacccaggctggagtgtagtggtacaatcatggctcactgcagcttccatcttctgggctcaagggatcctcccacctcagcctcccaagtagctgggactacaagcatgcaccaccacatctggctaatttttttattttttagagacaaggttttgctattctgcccagactggtctccaactcctggcctcaagtgatcctcctccctcggcctcccaaagtgctgggaccacagacacctggccttattgtagtctttctgatatacatttatatagctatttttcacacacgagcaaaaaaaaaaaagctttacatatgatgttttataacctgctttttttctcttaacatgttatagacagttttccatctaatcacctcttgatccaaacaactttactcaatcaattagtgtgtctatacctatacacagtctctccagagtggttatatgtatgtatatctatctatctgtctacacacacatacatccacatacacacaccaaactataaaaataggtgagagttccttttccttgtggaattatgaaattatgtcacaattatgtgtagtgttgaaagagtcgtggcaagcagtgtgaagaagaagaggcgagaaccacccccggaccgaccaaaggctgcacgccgctgcacctcgcgcccagtgcctatgtcccacggctgtcatccccgccaccatgcctaagagaaatgctgaaggggatgctaaaacaaataaagccaaaaggtgaaggacaaaccatagagaagatccgcgaggttgtctgctaaacctgctcctccaaagccagagcccaagcctgaaaaggcccctgcaaataagggagagaaggtactcaaagggaaaaagggaaaagctgatgctggcaaggaggggaataaacttgcagagaatggagatgccaaagagaataggcacagaaagctgaaggtgctgcagatgccaagtgaagtgtgtgtatttttgataactgtgtacttctggtgactgtacagtgtgaaatactatttatcaagttttataaaaatgcagaattttattttactttttttaaagctatgttgttagcacacagaacacttcattgttgtttttgggggaaggggcttatgtccctaatagaatgcctccgaagctggattgatgtggggaaaacacctttcccttctagttttgagagacttcctcttggctcccaggaggagagattccctgactttgacacacatggcctcttggcacaaaagccttgtggtatggaaaaacaaattcatatttatgtccccttctccctttccatctttcatcatagacttaatttccttaagcccagacatctgttgggacctgactcccagttattggttaccagtgtgtcaggcaatctggactttccagtgatgccacttagatggcacctgtcaaaagagcagtggttccatttctagattgtggatcttcagatacattctgccattttcatttcacttcctgaaagtcagggtcagcttgtgaaaagttgttaaacaacatgctaaatgtgaaatgtcaaccctcacgttaaactttccctgttca

SEQ ID NO: 3415 - DNA, 6000 bp, Homo sapiens
atcctaagcctactagtggatatgtggtcatgttataatatattcagttacttaacacatattgagaacacagtaaggcacagttattctcacacttatacctccactttatttatttttttgagatggagtctcactctgtcacccaggctggagtgcagtggcacaatctctgctcactgcaacctctgcctcccaggttcgagtgattctcctgcctcagcccccccaagtagctgggaccacaagcatgtgccaccacacccagccaatttttgtatttttagtagagatggggttttgccgttttggccaggctggactcaaactcctgacctcgtgatctgcccgcctcggcctcccaaagtgctgggattacaggtgtgagccattgcgcctggcctacttcagctttcaaataatgatatatggtcactatcaacttacctttgatgctttcaaaattagaatttgttcagaattttttgtttacctataggtgacactaactaaaactatgaacattatgaaacaaacctccacttacctagtacaaatgaaaagaacaagcgggtagttattttcttgaggacgtaaaacagtcacattctaagaaatctaattctttcaagacccaacctgtgtatcttggaaggaggtcactctgtgagcaaaggttaggaatgggacccctgtttatgcaaagtatcaaagttaagctgtctcttcctgatagcttttatgttagattgtttttcaaaaatgcctttccacataatctgaaaatgtcttcttcagacaaaagctttatccattggatgctttggtatctttcctcaagatagcactgatttagtgttttcaccccaataaatgaagactttgatcactccagcatctttgtgactcagggagacagactgacacattagtatacatttttctgtggatcgaaaacatgttatgtcttatcaaggattgatatgatcttctaacacaaatagagtttggaaaaggataaaataccattcacacattcattaataaatatttgagggctttctacggtactaagtgctgtgaaggacaaaggtggctctaaagataaactagacatggaccttgcccttgagtatttcacatggtgcttaaggtgaccagacttagttatggaaatgtaataattatagtacaggatagataatgtttcacgctgtgagtgggggtaaaaatattcctaacaaattttacatgaagaaatgatcaaccctaaaaatttgtacactgggccgggcacagtggctcatgcctctaatcccagtactttgggaggctgatgtgggcagatcacctgagatcaggagttcgagaccagcctggccaacatgatgaaaccctgtctctactaaaaatacaaaaattagttaggcgtggtggcacgcccctgtaatcccagttactcaggaggctgaggctggagaatcacttgaacctgggaggcagaggttgcagtgagctgagatcgtgccattgcactccagcctgggcgacagagcaagacactgtctcaaaaaaaaaaaaaaattgtacatttttcattgcttcatttgaaatcccaaaggtccaatataaatctttctgtggaagaccatctgaatgtaataaaaattgctattgaagaatccctaataaaaagtattcaaattgtggcatctttctggtactgaggaggccataaaggttcagtaatacccatccacatggctacctagagtcttaggaatggtcatttctcaagggactgtcaggctgtctgggtctgagcagtaatttgatgcacgtatggggtgctgcagctttagaaacatgtttccgtctattatctgttaattattatccctctggacagcctggcacatggtaagggcagctaagacagcagggtcctaattctgctcagctctctctgctgtaaaatgattgatttggtgaccggattttctccaagtttccttgtgtaggtaggtgcgtagggcaaattatattatcaccattttatagaaagggaaactaaggttaggagagcttaagtgactcgcctaaggcctctgataataactgatatccaatacttgagattagacttcaggcccagaaggacaaagcatctgcttctatatcacactcagaaccacacctaatatttgtggttaagagtaccaatagaggcccacatagcattaacctaagtatttaagtcataaatcaagataacaaactgttaaacaaaatatgatctgtcctcccaccttgacaaatacctcctacacggagctggatggccagttgtgaactatgaattcctggacttctctaagggccaggctggaaggtgtcatggaggataaagctgatcgcgaatgatccctcttcctgcattacgaggggcccaaagcacctgggagtgcacaccttagcccacaggtccaggtactgtccacaccccaaagaagagctatttcttggacacaggagtgagttcagagtcccgaccagatcctgaaagtgaacttggcaccatttgggcagagcagtccagagttctgactacatggagcgtatgtagtctagaagagggtcaggctccagctgggccatcagcctgaccggaagaggggcactgccagaggagagccagagggtggctgtgggcggaggtccctcttgggtttaagagccagtctgatcacacagcctctaaaatcaccctaagaaagaataacataccggaacattcatgtgacgggtaagtatggtccagtggttatgagactaggctctgcaggcaaatccctgggttggaatcttaggttggccactttctagttgtggcatcgcaggcaaattattgatcatctcacagcctcagtttcctcatctttaaaatgggtaaataatcattattatgaggagtggcagtatatgtaaaacgcttggtggacattacacattgggtggatgttgacagggttctctccagcttaggcgagtttgcctctgagaggtttttctggagaattatataagcttcataacatccaagcactctgacagtcaaggtgaaagtctcctctctctactaaattggggtgaggcgcgggtgtgggcaccacccaccccacccaaggcatcaggggcagcccacgtcccgcccggttctgtgcccaaggacttcacgctgcagacgtgcacggaagctgctttggccaggggtttggaggttaactagcaaacgcagcgtgagtcacggcggcactaggaactgaaaccgtgttagccatgcccaggtttaccctccgatgcggacggtgaaaccagggagcagtgacatcaggacggggagccagcgctgacgcagctccaccgcctccctccccatcccgcacccgccgccgccgagctcagcctgcagacaggtcttgacatccctcctcagcgaggagcgagggagtcggaacaagtcggggcatctcccttgcacctcccgggagcgccagcccagccaagtctagcgattgcccggcccgccagcgaagacgcttcctctgaagcaagcttggacactcccctacccctccgggtgaaacgaattccaagtggcccatttcggctcctcgccccctcccactccctgcaaaaaaacttggcaactctgcggtttcttgcggaccaaaacctgtaattagccctttgtgctccctttaaggggcagtcgtgactggaaaccgaggagtcagaccctctcgaaaacaccaacaaagaactatatttagttctgagctctcagcctaaatgcctcttattttttcacttttacttcaaaacgccagggttggggaagtgggaggcagagggtgggggagcaacggagaaagaacagctgtgcctccgcctctccgctcaatctctataaataaccaatcgcgagcggaggctactttttagccaatgaagcgccccaaactgataaagccttggcggcagccaatgaacaacacttaggggtgtcagactcgcgccccgagaccaatgagtgcagagtctgggagaggtaatttgagctagagtgtgggtgtgtggtgcaaaagcttcctacttccaagcccaaaaacctgctctgcgactgagcatgccctgaactaactgcgggcgccctgagacttctggattgggatgtaatccggtctccgggttttgaccgcactcgagcggggaggtgggtacgacccgcgggaccctgccccgagagagctgcaggtaccagaagctacccctttcctagtcggaacagtatctcagacttggagtacctcctgttttctttgtgcaaggctgcagtgcacagagtcggtcagagaagacagagtagcgtttctgtggcgaacggtttagaaaaatctatggggcaggtttgctccgccggctgctcgtgcattccacggcacccacaggacttcgggtttccggcccccagacccacgcccgcccggggctgagtgaatggcgtccttgggcctttgataacgggagttggcaagaccacagcctactccatccctgaggcggcccgccgcgcccacgtgcttctcgcagagccgccgcccttgtccaccactcccacagctgtaaaataaagcggcctgcatgcttcctacagcgctttcctcgctcccatatacgcacacacaccccatcttccagccagttcctaactcgcgccactccccaaatcggactcaaatccggagccccgcccactgccccgccccctcccggccccgcggaaaaccaggagcggccgcttgggcaaggcgcggccggaacgcactgggcatgctcgccggggaggggcgggccgggctgcgcgcggcgagtaggaagccctcgcccagtagaggctgtgggagagagcgcgatgggccgcggcggtgggcgcacgttccgcggggactcatgccacgcgcgtcccggcccgacgcgcaattagcagccacctccgcagcccgccgccaccgcctccctgccctcccgggctgccgcagctaggagctccagccgtcgcctcgcgcaggctgcgggcattgtcctctcggttcgccgcccgggctgctgctgccgccgcggactgctgcggggcccggacccgcaccccagggatacgctgccgccgccgccggccggcccggcgcccggcctccgttcggtggtttccgccctgcgttctctgggttgctctctcctgggtttttcctgcgtagctgaggaaggggaagagaagtccagccgccaagcccagccttccccggcgcgcagccccgacggggccgcggcaggcgcggcgagagcgctgacggagccatgagagagtacaaagtggtggtgctgggctcgggcggcgtgggcaagtccgcgctcaccgtgcagttcgtgacgggctccttcatcgagaagtacgacccgaccatcgaagacttttaccgcaaggagattgaggtggactcgtcgccgtcggtgctggagatcctggatacggcgggcaccgagcagttcgcgtccatgcgggacctgtacatcaagaacggccagggcttcatcctggtctacagcctcgtcaaccagcagagcttccaggacatcaagcccatgcgggaccagatcatccgcgtgaagcggtacgagcgcgtgcccatgatcctggtgggcaacaaggtggacctggagggtgagcgcgaggtctcgtacggggagggcaaggccctggctgaggagtggagctgccccttcatggagacgtcggccaaaaacaaagcctcggtagacgagctatttgccgagatcgtgcggcagatgaactacgcggcgcagcccaacggcgatgagggctgctgctcggcctgcgtgatcctctgaggcggccaccgcgcgccggccgcgctctgc

SEQ ID NO: 3416 - DNA, 6000 bp, Homo sapiens
catttttctgtggatcgaaaacatgttatgtcttatcaaggattgatatgatcttctaacacaaatagagtttggaaaaggataaaataccattcacacattcattaataaatatttgagggctttctacggtactaagtgctgtgaaggacaaaggtggctctaaagataaactagacatggaccttgcccttgagtatttcacatggtgcttaaggtgaccagacttagttatggaaatgtaataattatagtacaggatagataatgtttcacgctgtgagtgggggtaaaaatattcctaacaaattttacatgaagaaatgatcaaccctaaaaatttgtacactgggccgggcacagtggctcatgcctctaatcccagtactttgggaggctgatgtgggcagatcacctgagatcaggagttcgagaccagcctggccaacatgatgaaaccctgtctctactaaaaatacaaaaattagttaggcgtggtggcacgcccctgtaatcccagttactcaggaggctgaggctggagaatcacttgaacctgggaggcagaggttgcagtgagctgagatcgtgccattgcactccagcctgggcgacagagcaagacactgtctcaaaaaaaaaaaaaaattgtacatttttcattgcttcatttgaaatcccaaaggtccaatataaatctttctgtggaagaccatctgaatgtaataaaaattgctattgaagaatccctaataaaaagtattcaaattgtggcatctttctggtactgaggaggccataaaggttcagtaatacccatccacatggctacctagagtcttaggaatggtcatttctcaagggactgtcaggctgtctgggtctgagcagtaatttgatgcacgtatggggtgctgcagctttagaaacatgtttccgtctattatctgttaattattatccctctggacagcctggcacatggtaagggcagctaagacagcagggtcctaattctgctcagctctctctgctgtaaaatgattgatttggtgaccggattttctccaagtttccttgtgtaggtaggtgcgtagggcaaattatattatcaccattttatagaaagggaaactaaggttaggagagcttaagtgactcgcctaaggcctctgataataactgatatccaatacttgagattagacttcaggcccagaaggacaaagcatctgcttctatatcacactcagaaccacacctaatatttgtggttaagagtaccaatagaggcccacatagcattaacctaagtatttaagtcataaatcaagataacaaactgttaaacaaaatatgatctgtcctcccaccttgacaaatacctcctacacggagctggatggccagttgtgaactatgaattcctggacttctctaagggccaggctggaaggtgtcatggaggataaagctgatcgcgaatgatccctcttcctgcattacgaggggcccaaagcacctgggagtgcacaccttagcccacaggtccaggtactgtccacaccccaaagaagagctatttcttggacacaggagtgagttcagagtcccgaccagatcctgaaagtgaacttggcaccatttgggcagagcagtccagagttctgactacatggagcgtatgtagtctagaagagggtcaggctccagctgggccatcagcctgaccggaagaggggcactgccagaggagagccagagggtggctgtgggcggaggtccctcttgggtttaagagccagtctgatcacacagcctctaaaatcaccctaagaaagaataacataccggaacattcatgtgacgggtaagtatggtccagtggttatgagactaggctctgcaggcaaatccctgggttggaatcttaggttggccactttctagttgtggcatcgcaggcaaattattgatcatctcacagcctcagtttcctcatctttaaaatgggtaaataatcattattatgaggagtggcagtatatgtaaaacgcttggtggacattacacattgggtggatgttgacagggttctctccagcttaggcgagtttgcctctgagaggtttttctggagaattatataagcttcataacatccaagcactctgacagtcaaggtgaaagtctcctctctctactaaattggggtgaggcgcgggtgtgggcaccacccaccccacccaaggcatcaggggcagcccacgtcccgcccggttctgtgcccaaggacttcacgctgcagacgtgcacggaagctgctttggccaggggtttggaggttaactagcaaacgcagcgtgagtcacggcggcactaggaactgaaaccgtgttagccatgcccaggtttaccctccgatgcggacggtgaaaccagggagcagtgacatcaggacggggagccagcgctgacgcagctccaccgcctccctccccatcccgcacccgccgccgccgagctcagcctgcagacaggtcttgacatccctcctcagcgaggagcgagggagtcggaacaagtcggggcatctcccttgcacctcccgggagcgccagcccagccaagtctagcgattgcccggcccgccagcgaagacgcttcctctgaagcaagcttggacactcccctacccctccgggtgaaacgaattccaagtggcccatttcggctcctcgccccctcccactccctgcaaaaaaacttggcaactctgcggtttcttgcggaccaaaacctgtaattagccctttgtgctccctttaaggggcagtcgtgactggaaaccgaggagtcagaccctctcgaaaacaccaacaaagaactatatttagttctgagctctcagcctaaatgcctcttattttttcacttttacttcaaaacgccagggttggggaagtgggaggcagagggtgggggagcaacggagaaagaacagctgtgcctccgcctctccgctcaatctctataaataaccaatcgcgagcggaggctactttttagccaatgaagcgccccaaactgataaagccttggcggcagccaatgaacaacacttaggggtgtcagactcgcgccccgagaccaatgagtgcagagtctgggagaggtaatttgagctagagtgtgggtgtgtggtgcaaaagcttcctacttccaagcccaaaaacctgctctgcgactgagcatgccctgaactaactgcgggcgccctgagacttctggattgggatgtaatccggtctccgggttttgaccgcactcgagcggggaggtgggtacgacccgcgggaccctgccccgagagagctgcaggtaccagaagctacccctttcctagtcggaacagtatctcagacttggagtacctcctgttttctttgtgcaaggctgcagtgcacagagtcggtcagagaagacagagtagcgtttctgtggcgaacggtttagaaaaatctatggggcaggtttgctccgccggctgctcgtgcattccacggcacccacaggacttcgggtttccggcccccagacccacgcccgcccggggctgagtgaatggcgtccttgggcctttgataacgggagttggcaagaccacagcctactccatccctgaggcggcccgccgcgcccacgtgcttctcgcagagccgccgcccttgtccaccactcccacagctgtaaaataaagcggcctgcatgcttcctacagcgctttcctcgctcccatatacgcacacacaccccatcttccagccagttcctaactcgcgccactccccaaatcggactcaaatccggagccccgcccactgccccgccccctcccggccccgcggaaaaccaggagcggccgcttgggcaaggcgcggccggaacgcactgggcatgctcgccggggaggggcgggccgggctgcgcgcggcgagtaggaagccctcgcccagtagaggctgtgggagagagcgcgatgggccgcggcggtgggcgcacgttccgcggggactcatgccacgcgcgtcccggcccgacgcgcaattagcagccacctccgcagcccgccgccaccgcctccctgccctcccgggctgccgcagctaggagctccagccgtcgcctcgcgcaggctgcgggcattgtcctctcggttcgccgcccgggctgctgctgccgccgcggactgctgcggggcccggacccgcaccccagggatacgctgccgccgccgccggccggcccggcgcccggcctccgttcggtggtttccgccctgcgttctctgggttgctctctcctgggtttttcctgcgtagctgaggaaggggaagagaagtccagccgccaagcccagccttccccggcgcgcagccccgacggggccgcggcaggcgcggcgagagcgctgacggagccatgagagagtacaaagtggtggtgctgggctcgggcggcgtgggcaagtccgcgctcaccgtgcagttcgtgacgggctccttcatcgagaagtacgacccgaccatcgaagacttttaccgcaaggagattgaggtggactcgtcgccgtcggtgctggagatcctggatacggcgggcaccgagcagttcgcgtccatgcgggacctgtacatcaagaacggccagggcttcatcctggtctacagcctcgtcaaccagcagagcttccaggacatcaagcccatgcgggaccagatcatccgcgtgaagcggtacgagcgcgtgcccatgatcctggtgggcaacaaggtggacctggagggtgagcgcgaggtctcgtacggggagggcaaggccctggctgaggagtggagctgccccttcatggagacgtcggccaaaaacaaagcctcggtagacgagctatttgccgagatcgtgcggcagatgaactacgcggcgcagcccaacggcgatgagggctgctgctcggcctgcgtgatcctctgaggcggccaccgcgcgccggccgcgctctgcgcacaaaagccaaacgcatccgactctctaaatgtgatttatttcttgctttgagattggagaccactttgcattggccagggtgtcttgggagcccggctggcctccgcggccggcgtcccctgcctccaccctgtgcccgagggggtgtccggtcctgcccatccgatactctggtggaaatgtggctctttgcagcatgtacgtttctccctgattttggttgatgcatatttccccgtttaagtagccgttagggcgcagtatcggcagcttgacacccaccaagcaaaagtttcagcctggaaaaaaaatgggggggaagggtggatgaaaaggagggagagaaggtggaaatggtttttttttttttttttctattttctttctttttttttttttttttttttggtcaacagccgtttttctagttccaagttttaaatacatggaaggaagtccgggagaaccatatgaaggagcaggaggagaggaagaaactttttttccttcttttccaggagtagctggaaattaagatcgggttccttttctgccagcttggaagggcaaccccatgactgattgcgattctgaggatgtctatgcaaagttggattcttgttacagtgtatccaatctgaagtattgcacatctgaactgggactgttaacactgatgccaatacagtgtggggtgccagaaagtgtctgctgatatttgtggaaaaaaaatctattttgtttacctactgtatcaaaggggagtctgggggagaatggtagtattttttttttttatcagctgtgaaaaaaatgttacagatctgcacattttcgtgtgtactatggtgtgtgtgtgtatgtgtgtggtgtgtgtgtgttttaagtttagccttttgtttttgttttttggttggcagtaaccgattttaa

SEQ ID NO: 3417 - DNA, 6000 bp, Homo sapiens
atactggactttattctgtgagcagtgaagaaaccatgtcttttggtttagttttgtttttaaggagggggatacatagtcatatttagttttctaaatgaagataattctgtgactgatgactggaagtagagagagtgattagttcccaaaagaccaactagaaggctgtccttgtcatagtttggatgagagataatgaaggcctaaactcgggcagtggactgaagggggaagattcagattctagaaatatttttcaggtcaaattgggagaatggtgttggggttggtggtgcagggagaccaagaggaggaagggaacaggaagatgactttgagagatccaacttgggagtcagagtgaatggggattctactaatcaggagagaaatacaagaggcagaggagataaaggatggagagctggggaaaagaagaattcactttagcacatgaagagtttgataggattgtgggtcacaggagcagaaaaaattggtaaacaactggcattatagagtgggtttcaacaaggtctggcaagaaagagagacgtggaagcatatgcatataacttaaatccctgggaatgaatgagttcacctagggaaagggggttgcctgagaataatactttggggaacaataatatctaagcaaaggaaaccgagaaggaaacatcagagaggcaggaagagaagtaagacagtgaaagtggtggtctttcagcagctgaattaatgaccatgggttagaaaggggtgctatcattagggggaactgaaggctaaatatccttgattcatgtgtgaaagggattaagagatgggaagaaaatttcgtaatcagaatggaatgtttgaagttaacatttgagagctaaagcaattgagtgtaaaacatttaggatattgtccatcaaaataagtgttgaattgaggttttgggattcaaaaattcaaggaactgtgaatctaattggctggttcatcaaaggaagaaagacagagaactagtcttctgaatttggaaactgttctatttatttaatgatactgctatttatcagaaatttatatggatgtagtaatttttacatattttgattccactctcatcctctatatttaatcaaagtcccagtaatttttcctattccttatctctccaacccatcttttctatcttagttcagactatcatttcctatgagtttgaattcaaccatattctcactggtctttcttctatttcattcttctatttcaagtgaagttgtgttgtgttcccagattgctacttttttttttttttttttttgagacggagtctcgctctgttgcccaggctggagtgcagtcgcgtgatctcggctcactgcaagctccgcctcctgggttgaagtgattctcctgcctcagcctctggagtagctgggcctacaggtgcgcaccaccacgcccggctaacttttgtagttttcttagagacggggtttcaccatattggccagggtggtctcgaactcctgacctcaggtgatccgcccgtcttgggctcccaaagtgctgggattacagatgtcagccactgtgtctggtcctgatcgctacttttaaaaaataacacagaccatataatttccttgcttcaaggtttttaattgatcttcagtgctttcagcataaagtttaaactctgtcatgacagtggagctcttcccaagctccttctaacatggcatttattttactttttattttttattttttgagatgaagtctcgctctgtcgcccaagctggagtgcagtggcgcaatctctgctcactgcaagctccgcctcccgggttcacgccattctcctgcctcggcctcccgagtagctgggactacaggcgcgtgccaccacgcccggctaatttttttgtatttttagtagagacaggatttcaccatgttagccaggatggtctcgatctcctgacctcgtgatccgcccgcctgggccttccaaaggcatgtaatctcatgcctgggattacaggcatgagccactgcacctggccagcatttatttttttttgagatgggggctggatggtgggggggaggggcggtcttgctctatcgcccaggatggagtgcagtcactacctaggctggtcttgaactcccggcttcaagggatcctcctgccttagtctcccaaagtgctggaattataggcatgagcccccacacctagcctaacctagcgtatgtcagttgtcttccactgtcctcttcatgtatattatgatccagccacaccaaactgtttactgtctcctatatatattgagcttttatgagagcctaaagtgcacgtaaacaagctaatattaagaatttatgtttttaaaaaagttcaaggttaatatgccattcagttcaattgcctatgccgtatatagtatttaaaaatttttcataatgctgatcttgaaacactatagcacttgaaacagcttctgactcagtaagactaagttacttgtatcattgttttgtaggtatttgaattctgtgaaaacctatgcatgcaataaatttttcaccgcaaatacagctatctgctagaagtgccatgagaacaaggcccatatttgtcttgtcacacctatattctcagtgctagcatagtacctaatgggtgcttaatagttattaaatgaataaactatgattaggttaatcaggacatccagtctctcaaacattatgaatgaacttggatctagctcattcactctcgaaatatttatttggtacctacatgtgaagattcctgtgtttattagagagcaatgtgtaacatttgcctttgcagtactagctttttgaaaatacctgaagatgagggatcatgttttactttaccagacaccagccctctgctaggtgcaattaagtggcatatgatcacctatgcacacgattatctgaaatactcctctccacattgctttctttgagcctgcagacagatctatactagactttatttacactcatctattatttctgggttctaatgcgggctaaaatatttattaggagacactgggtaagttacttaaacctttcctacagtttcatggtatcatgggactatgatacctacttgtgggttgttttaaggattaaataaggtataaagtgcatagtaaagtatcagtatgttcattctctttcttctctcccttatactgtaattatctgtttatctgctaatttccctcaccagattgtgtggtccagacaggcagttttctatgccttattcatctttataaccccaacaagcacaatggctgtcttaaaattagtaaatatttgctgagtaaatgaagacctaagagagtgaaaaaggttgtattacccgtttatttgttaatctaactgccacacatcccttaaaagaaatcaagtacagcttttgttagggaagcttaaaattcatggcaatgataccatacacagttaatcattagctttggaaagtctgttgagcagaaagcggtgcacaaaggaagtagggctgcttcccacaatagcttaatatgttttcagtgatgaacgtttttggaatgctgggcacacccgacttccaaatacgcaagcacattccaaatggaaatttcaattactgtttttctttttttctgccgtaacagttatcacagcattttaatgaaggtcagacttaaatactgacaagcagggaaaccaataattaccagattgcttcattcattttgtggacagcattataaacttttcaggcattctaagattgcctgacaaaattagaaaaaattgttaagtccccacaacctgcttgagatgctcacaagtgttccatcccaaagtacacgtttgcctcttcttattggtatttaggttctggcatctgattcccctttcttcttctatttatattagccttcaggtgggaactatggaaaacccacctggtgggggtgtatttttcttaagagattgtgttatatggtatcatatttagaaaataaagaaattattttcataatagcaacgctaatcacaggaaaaacttgatacattcttgactagactttaggggaaagtacaagttcttagtgggcggaggggggcaaagacgaagcaatttggctccaaaaattctagaatctcgtggcatatttttatcaaattcaagcttatctttaaaaaaatccgagaatttttctaatttctaagaattgattctaacccgcgatactccctagatgggagcgcagtgctttaaataatagcatttaaataagcggctgctgatttgaagtccacctggggagtccgagttctaggaccggtccttggccctgccacacgccaatacaaccatcaaagtcaaaatcccttaactcaaatttaaatacattcctaaagcagaaagcatcccgataggaaaatcctacagctcacagcaagcagcagggaaacatttatctctggcggcactgatttaagcttaaaagatttggtatcgtttaaaaaaaaaaaaaagctgggtggggccgaggagaatccacccaaactttcctcaggaagtaggatgtttactgagtaaatatgcggtagtcacagaaacacctgctactcctttaagacctcaggagccaccaccgccacctcctggccacatccgggcacttctctgcaaactcctggcgtcccgacgcccgagtcgttgggcttatttgaaacacacgcacaaccaatcaagcggcgcctgccgggacttggagagcgtcgaccaatcaccgcccctctggagactcctgcctatgggaaagaggttgacatcacgcgccaatcggcatggctcttagagagagcagcttagtttttgaatcggttgtggcggccgccggcgaggaatggcggtatttgtgagaggagtcggcgtttgaagaggtggaactcctagggcttttttgagagtggtaaggactctgtgtgagtgagagaggtgcaagtgggcgagcggctccagagccaagggctcttttgcctgcggtcgacgtccccgcccctagtgaccgcgaattccggagcgccccagctcaggcttcccggatccgggaactccctcgccgcaccccacccccagcagccgggccctgacgcggagtgggagaccgaagcccccagtattgctgggcatcttcgccctcacctgttggctcttttggacagaagagtgtgggtgaagggagggagttgggaaagggattttggcaagccgcgcagccctgtggctttgggggccggcacttgcagcctttgggggcttatctcagagtgcgccgtggttttattctaggattcatcctggcttctttgcgggaagtttaatttttcgtttttgcaagataaatccaggccatccgcccctcgtcctccccagccacccggcacagatgtgtccggcttagtggttaaaggcgcagcctctggatttagccgggctttgaatacctcttttaccccttactaacagtttgacttaggggaagttgcttaacctctctgttcctacgtttcttcatccatacattgaaaataataatagtacctgcctcttaggattactgcagagattaaaaggtttaggacaatgtctgccacgtattaagcgttaagtaaatgtcagttgttaatagtaatgttattgttaataacaccaccattatatcttggattgcattttagtccttcaccttggaagatgattgcctaaaaagtatttaagtaaaaggaaacttgaatgtttgtttacatggcaaattttatctctgggataaaagggggcatgtgttatagtgtgtttagttagaagctccttgggtctgttcttgggtgagaagctgtgtaggtttatgaacactgatcctattgtgcttattt

SEQ ID NO: 3418 - DNA, 6000 bp, Homo sapiens
gacttaaatactgacaagcagggaaaccaataattaccagattgcttcattcattttgtggacagcattataaacttttcaggcattctaagattgcctgacaaaattagaaaaaattgttaagtccccacaacctgcttgagatgctcacaagtgttccatcccaaagtacacgtttgcctcttcttattggtatttaggttctggcatctgattcccctttcttcttctatttatattagccttcaggtgggaactatggaaaacccacctggtgggggtgtatttttcttaagagattgtgttatatggtatcatatttagaaaataaagaaattattttcataatagcaacgctaatcacaggaaaaacttgatacattcttgactagactttaggggaaagtacaagttcttagtgggcggaggggggcaaagacgaagcaatttggctccaaaaattctagaatctcgtggcatatttttatcaaattcaagcttatctttaaaaaaatccgagaatttttctaatttctaagaattgattctaacccgcgatactccctagatgggagcgcagtgctttaaataatagcatttaaataagcggctgctgatttgaagtccacctggggagtccgagttctaggaccggtccttggccctgccacacgccaatacaaccatcaaagtcaaaatcccttaactcaaatttaaatacattcctaaagcagaaagcatcccgataggaaaatcctacagctcacagcaagcagcagggaaacatttatctctggcggcactgatttaagcttaaaagatttggtatcgtttaaaaaaaaaaaaaagctgggtggggccgaggagaatccacccaaactttcctcaggaagtaggatgtttactgagtaaatatgcggtagtcacagaaacacctgctactcctttaagacctcaggagccaccaccgccacctcctggccacatccgggcacttctctgcaaactcctggcgtcccgacgcccgagtcgttgggcttatttgaaacacacgcacaaccaatcaagcggcgcctgccgggacttggagagcgtcgaccaatcaccgcccctctggagactcctgcctatgggaaagaggttgacatcacgcgccaatcggcatggctcttagagagagcagcttagtttttgaatcggttgtggcggccgccggcgaggaatggcggtatttgtgagaggagtcggcgtttgaagaggtggaactcctagggcttttttgagagtggtaaggactctgtgtgagtgagagaggtgcaagtgggcgagcggctccagagccaagggctcttttgcctgcggtcgacgtccccgcccctagtgaccgcgaattccggagcgccccagctcaggcttcccggatccgggaactccctcgccgcaccccacccccagcagccgggccctgacgcggagtgggagaccgaagcccccagtattgctgggcatcttcgccctcacctgttggctcttttggacagaagagtgtgggtgaagggagggagttgggaaagggattttggcaagccgcgcagccctgtggctttgggggccggcacttgcagcctttgggggcttatctcagagtgcgccgtggttttattctaggattcatcctggcttctttgcgggaagtttaatttttcgtttttgcaagataaatccaggccatccgcccctcgtcctccccagccacccggcacagatgtgtccggcttagtggttaaaggcgcagcctctggatttagccgggctttgaatacctcttttaccccttactaacagtttgacttaggggaagttgcttaacctctctgttcctacgtttcttcatccatacattgaaaataataatagtacctgcctcttaggattactgcagagattaaaaggtttaggacaatgtctgccacgtattaagcgttaagtaaatgtcagttgttaatagtaatgttattgttaataacaccaccattatatcttggattgcattttagtccttcaccttggaagatgattgcctaaaaagtatttaagtaaaaggaaacttgaatgtttgtttacatggcaaattttatctctgggataaaagggggcatgtgttatagtgtgtttagttagaagctccttgggtctgttcttgggtgagaagctgtgtaggtttatgaacactgatcctattgtgcttattttaaaggcttctggaatacagtaatttgaaaaaaagtgattaatatatttccatttctaatctgactgttggatgttagttatgtcatcaagttaccgtagtgcatctctttttctctatacattttgaagctgttttggcaataaattgatcatatacagtatcatcaggggcaattttaattattaatcatctgctttcgatcatctgctatgctccctcccttttattaatcatctgcttttgatcatttgctgtgctccctcttaaagagggaggcataggagaaaaatgtaaatattttcaagaagttttttttttttttttagacggagtctacctcttgttacctagactggagtgcagtggcacgatctcggctcactgcaacctctgcctcccgggttcaagcgattctcctgcctcagcctcctgagtagctgggattacaggtgcctgccaccaagcccagctaatttttgtatttttagtagagacggggtttcattgtgttggccaggctggtctcgaactcctgacctcgtgatccgcccgccttggcctcccaaagtgctaggattacaagtgtgagccaccgcgtccggcctttcaaatggtatttttgattttcctcttccagtccttaaagcaggttagctcatctcctgacttttttttttttttaaacattcttttaaggggactttgaatgaaagccactttaatgccttttcattggaaatggttgagtgtagaagacttaaaataatagggctggatagaatttatcattgattctaaattaaggctgttacaactattggaccgctcctttggagagccttagaataatgattgacatggatgtatggtaaagccataagaaatatccatattgtgaatattacatgagaatagttgtttgttgttcactttaagacatctattcagttttcatcttaactagatttgagttgtagtactatgtgtgttccaccaatgtggaaactgaggtttaactgactatgtgcagggctgagacaggaagctgagttgcctgattttgaagtgtcacataacagcatacagtttaaactgttactttgctaagactctggaggaaggtatttgtatattttattaatctgaagaagtaggaaaggggaaagtctgacatgtagctctcgttaaaggtgggtcctctgtatatttgcctaatatttagaaatttactctcagtaaagttgacttattgaaaattgataaaaaaatctctaaaaaaatttttttagagagacagggtcttgctctgtcacctagactgactggagtgcagtggtgggatcacagctcactacaacctcaaactcctggattcaagtgattcgcccacctcagcctcttgagtagctactataggcacctgccacccacacctggctaatttttaaattttttgtagagatggggtcttgctatgttgcccagtctggtgttgaagtcctgccctcaagtgatcctcctgccttggcctcccaaagtgctgggatttcagatgtgagcccccaacccaccctgatgaaaacttgttaaaccttttattccctgtctagcttttaaactcttcttaagtcctggaaaacttaaaaaaggattttctttcatagtccagagttatattggcactcacccatgcataattgttttgtcaaaccttttaggggagaggtgtttttaaagaattatgaaaatactgacaagggaccagcccaattataccggagaggtttagagacatccacagaggatgagtcaagagtgttggattgggggttggaagacaagataggtggagagtcgagcactaaatgcaaatagatgtgatgtaaattatgatttgtgcctgaaaaatagctgagaaattcattgttgctgttgcatagattgtatagggactggggtagttacagatggtgagggtgaatagttaggcggggaccaaattgtgaacttggtggtgaatttggacttggacatataaggagtactcatggaagttgttaagcagggaagtgatatggtcacatttgtatttaggtgcatattcctgaaaaccatgtggagagtgatttctaaggaaactgatggtaaagttgtgtggagctggtttattagaccaagtgaccattgtgtcattgaacgtatagagaaggggggccagattccagagatacttgaggtgggattgataggaattttggggagggaaatgtgggagaggaaaaaattaggatagatctcagatttttggctaggatttttgtgggaggtgtgttatggtggtgttataattgaatataggaagagaaattggttgagggcaaaggtgtggagaagggaggtagaataatatttatgactacagttgagtgtttgttgtatgtctagtaatgttctatgtgcttttgatacattgttatttttattatattcctgtgagtcaggtattagtatgtttattttacagaaaaagaaactgaggctcagagaaggtcagtgactttctttggttcattaaaaaaatgggtaataatactttttataaattctaggtaaaaagagcctctaatacttacttttgcccaatgaccatgtttatgtatttttattcaaattttattttttcagctgatttagaagaatacaaatcatggctgaaaatagtgtattaacatccactactgggaggactagcttggcagactcttccatttttgattctaaagttactgagatttccaaggaaaacttacttattggatctacttcatatgtagaaggtaaacctgttacctgctttaaaacaatcaatttctattttaattctaaacttattagtgactttcttaagatttaattttaataccaactgtaatgctagagcacaggtattaagtaaatatttgtttacagaatccttttacactatgtcatttttctgattattatttgggttatttgtatgctttgcagctttgaaaagggaggcatcttaatttggatattcctttttctgtatgtgagggcggtctagctacagcattattagctagaagttatacagtcatgactggttaggtgaaagctactttttcctttaccactttataaatgggtttttcctaaaattatatgcactgttgaggaggatgactatgtaagatagcgcattctctggctaggaggaatgctgatgtttgtataccctgctacaatatggtttctctttctctaaagtgatatatagccagatatttttgtaataagttgggagttgagtcctattaaatttagagaaagttatgattccctcaaagatgtaatacatactagatatagccaaaagagcgataaggacctactgattgtgatgttaatacatgataaacattgaaacattttacattttaacagaagagatgcctcagattgaaacaagagtgatattggttcaagaagctggaaaacaagaagaacttataaaagccttaaaggtacggagttttaggttttagttttttttgtaatgcaatttttcttccatcagtgtgtaaatagtttcatagctttcttaacctcatacttaagtctcttttccacagactattaaaataatggaagtccctgttataaagataaaagaaagttgtcctggaaaatcggatgaaaaattaataaaaagtgttatt

SEQ ID NO: 3419 - DNA, 6000 bp, Homo sapiens
agccctggcctgcctgcccactccagggccatctgcagctcccccagcaccagccagtccatctcctggactgtcaggttgggcagcacctcagcaaagcctggttcctggggacagagcagggtgtgatgggcaatagcaagaggccaagacaggtggcagcgagagccagatccccactcacctgggctgagacattggcctgaagttctcgcagtagctgcccctggtgtagaatctggagcctcaagggaacctgggttagtcctgcaaggccgcacatgtgggcctttctgagacaggtgctctccctaaccttctcacgtgttttgcccccatcccacttacccccactcctgggttccagcagccctcggaagagcagcaaaaaatgcaaggagtcctctgtgtcactgagagtgagcagggtgatgccccctacgccctgctgtggggggccttctagagtcaggatggcactgaaggtctctggggaagggacgatgatgagagcccgtcagaaaccctccccccctttcctgggtgatagagaagactcagaacttcacgcccggggctctttgctccctacctgcagccagggcccggtgccggatgagaggcccccagacctcccctgaagggtgagtgagtgtcacaagtgccacatgcagctgttctgccctaaggagccgcagagacaaccgaggcactgcccgccacaccccacagacctggagcagagagacaagaaggccctacgctcagacactgtgcaggctaggccaattaggatgcccaggcagggcttatgaaaaaggaacatggaaaggaacctccagggtgccctaggaagcttaagaaagaacgctggagccagatgcttgggttccaatcctggctgcaccacttactagctgtgtgaccttgaacaaatcacattatcctactgagcctcagttcccccttctgtaaaatgggcatcataatgtcagtgccttcctcccactgggctgtggtgaggaccacgggaggcaatgcagagcatgctctcggcacagtgcccagactgggcaagtgctcataaatggcatcatctcaccaggccatcttgggtgggggctgcagggtgctcaaacaggacactgccattggagtctgagaagcggatcctggtagggcggtccagcctgggaatgagaggtcgggtgaggccggactgagccaaaagcagcccctcccagctctcccagtttccctcccgggccccggcagctgacccctccttgctccttcccctttctcaccgcctgtaggagatagagaagcggaggctagagcgcagcagcgagactcgggctcgtgccaccgcctgcgacctcggccctgtcagcagcgccacgaagtctgggacgggaggaagatggcctgagcactgtcaaacgccgctttggtggcccagcctcaaccacaaccccgctgttcgccagccccctacccgtgtggccgtcaccacgggcccgctcctcagcgcctggctccccgcggtcgctataactgcgatgctccgggtcccgcggatactcgaaggacaggccgctcggctgccgctccgaactgctgcgctctgcgggcgggggggtaagaacacgggcttcagctggccatgggaaaggccagtccgacgccccatccaagtggcccgggacctagtatcgtggccctgcctccctccccgcagggcggagcaagacttaccctgggggcaggtctggcagcagtgtcccggcagctggcgcggctgcccacaggccggggttgggcactctggtttgatgttcttgcagctgaccctgccagggcccctggtacggcgaccccactgaggctgctcccggaaaaggcgggaaacccaagtgagtgcaagatgccaactgatgagacccccccaggcaaggatgtcccgcagagtcagccagctctgccacttacaagctgcgtgaccctagacaagctacttcatctctctgggcctcaaggtccctgtctggaaaatggggataataatactctctatctagcaaggctgccatgagagttagatgagcagggaacgaaacggagttggcacagagcctcacacagagtgggcgatcagtaacagcacctaagaattggaggggctgattccccttcctccaccagaaaaatatccccaacatctgccgactgggctccttctcagcagctccgagtccactccgacgcccgcgcgacccggcgctccccacccgccagggcccgggccggccgcggggtgcactcaccgcctcgcaggcgcacagcacgcagcgcatcaccccgaatggctcccctaggtccgggtgccacgtctcgtccaaggcatagaccttcccgccgaaggtgcagcctgcggggacgggcttggctggaggccgctgcccagctcgcgccgtgtgccgccccgggggctgcccgcgggtcccgggtcccaggcaccgcgcccttctgcccccgcccaccctccgggccgcccgccgcgccgagccacctgcgccccgcgccccctccgggctggcgctgactcgccccgagcccgactccccgcccgcgcctcccccgggcgcccacctacctgccgctccccgaacgggcagcggctccttctcagaacggatgggcagcacggggggctctgggccggcgccgcgggccggccgggagccgagcagcagcagcccgaggagcagcagcggggccggcggggccgggaggctcggcatgacgcgaacgggacagctggggaggagggagggaggagggcgcgggagcgggcggagggagggaggcgggagtgcggagggcggagggccgggccgggggcggtgcggcgggagggggccggggccggggccggggccggggcagtgccgcgaggggctcgtcgggcggccgcagagtcggcgccgggccgggcggggcgggaggagcggccgggaggagcgcgggcgggcgggcgctgacccgggccgtacgcggctctactgccccgggcgccggctccggcccgttttatgccccgcgcccgacgccccggccgggggcctcctcctcagcaaacggggcggcggcggcagctcggcgaggggccgggctgagcccggggggtccgacccagcagcagcggcccggatcgcgggtgggggaggggagggaggggctgggaccgggcaggggaggagggaggggcgggaggggaagggggagcgggggagggggaggggagggaccagggggcgcgaagagggggaggagaggcgggcccggagccccccgctgctggcggccacagggcggctggaccaggaggtcggtgtccagcccaggaagggagcctcaggctagggaggggcagaggctaggcctgaggcctggaccgctctgtgagcgaggacccggttccgcccgaaggatgaagacttgtctttaaagatgacaacgtacaggaaaggtccatcagccgatctccccctgcctgggcccacagcgccccccaaaccctcaccaccctctctcactgcctagcctgcctccctaccttctctctgaggtcgctcctcattcttgtgttacccaggacagggacctagccagaaaccggcagcattcccccttctgtggagtgacagtatctccctctcattgtaacttatcctcaggcgcattcgacagtcccctcttgctttctcacccccttccttcacccaagggaccctctgcctctccagcccactcccagcctcctttctcttggttccctggtcatgcctgcctccctgtctcctgtctctccctcccacacacacccactatcctcccagctatcccagcaccctccttcctaatcttgggagacatctcgtctggctggacgggaaaattccaggatctaggccacacttctcagcagacatgcccatccttggggaggaggaacaggagagagcctgaggaagttctgggggacagggggatgatgggatcaaggtcaggccaggaagcccctgaggacagagactgtggggagactgggactgggaagaaagcaaaggagctagagccagggccaaaggaaaaggggggccagcagggaggtatttgcgggggaggtccagcagctgtctttcctaagacagggacacatgggcctggttattcctcttgtcacatgtggaacggtaggagatggaagacggagacagaacaagcaaaggagggccctgggcacagaggtctgtgtgtgtagccatctaagccactggaccccagcagacgagcacctaagctcaggcttaacccagtgcacgtgtgcgcacatacatgtgccccgcacctgacagtccactcaacccgtccaaaccctttccccataacaccaacccataacaggagatttctctcatgtgggcaatatccgtgttcccacttcgaaagggggaatgacaagataggactccctaggggattacagaaagaaaagcaggaaagcaagcatcctgttggatttcagcagcaggtatgatgtccagggaaaagaaatttggatagccagggagtgaaaaccccaccaatcttaaacaagacctctgtgcttcttccccagcaacacaaatgtcctgccagattcctcctggaaaaaaacttctgctcctgtccccctccaggtcccaggttgcccatgtccaggaaaagatggatccccctatccaaatcttctccgtggtgtgtgtgggtggaggagtggaccctggtccaggcaggggctccagggaagagaaggcgtcacttccgggggccttcaccagtgtctggtggctcccttctctgattgggcagaagtggcccaggcaggcgtatgacctgctgctgtggaggggctgtgccccaccgccacatgtcttcctacccatctgctccccagagggctgcctgctgtgcacttgggtcctggagcccttctccacccggtgagtggccagcagggtgtggggttatgtgagggtagaaaggacagcaaagagaaatgggctcccagctgggggaggggcaggcaaactggaacctacaggcactgacctttgtcgagaagagtgtagccttcccagaatgggaggagcagggcagagcaggggtagggggtggggtgctggtttctgagggactgatcacttacttggtggaatacagcacagccctggctggccctaaggaaaggggacatgagcccagggagaaaataagagagggagctgcacttagggcttagcaaacacagtagtaagatggacacagccccaatccccattcttagctggtcattcctcgttagcttaaggttctgaatctggtgctggggaagctgggccaggcaagccagggcgcaaggagagggtaatgggaggagggcccactcatgttgacagacctacaggaaatcccaatattgaatcaggtgcaagcctctttgcacaacttgtgaaaggaggaggaagccatgtggggggtcctgtgaaggaaccggaaggggttctgccaagggggcagggaggcaggtgtgagctatgagacagatatgttagtgggcgcctaagacaaggtaagcccctaaggtgggcatcacccagcaggtgcccgttcctgggcagctggtctcaggaaggaagtcccagaactgttagcccatctcttggcctcagataatggagtatttcaggacttggagtccagagaaaagctccagtggctttatgtgtgggggtagatagggaaagaatagaggttaatttctcccataccgccttttaatcctgacctctagtggtcccagttacagctttgtgcagttcccctccccagccccactccccaccgcagaagttacccctcaacatattgcgcccgtttgccagttcctcaccc

SEQ ID NO: 3420 - DNA, 6000 bp, Homo sapiens
tccatgactgttgttgcatgcctcacccatctcaagagtataaaatgtagatggaggatttgttttttttttgtttgttttttttgagagaagagtgctaattgtggacagagattttctttggaagagcggtaggctgtactgaggagcactcatcatagtattcccaaattgggaacaacctgtgtgtccatcaacagtacagtggataaattgtagtggattcatacaatggaatagtacatggcaatagaaaatatacacttctgatgcacataacaacatggatgactttatagaatactattgagtgaaaatagctagatgccaaagagaacatactacctgtaatctatttgtatgacgtttacaagctggtaaaactaatgtacaggactagagatcataatagtaatcattgaggaggtaataaccgagaggtggcatgagggagtctgctgggattctgaattgttctatgtcttgattcagatggtggttaaacatacaacatgcacatgtatatctatgtagatgtgcatacaacccatgggagaacagaattttaggaagaaagccttattttttaaaattttgtcctcaaggagtttaacaaaccaattaattctagggattagttctgtatttttcttagtttttcagcagaactatacaaatacagaaataccaagtgtacaacctggaagcatggccagtatttagccttactcagacattagtcctaggatctacatcttcaaaattgtgaaatagtgcaaaaagatgaaaactgatggatgacattggatttgttgagaagatgtcagagactggtagtttctgaaattagttccttccttgattcgtttaccattttcccaccttcattattgatgaataataatgttaagatatttttactctatttcatctgtcacctgttttactatctttttaatgtaccagaatatgaaactgtcttgatgatttactaaatatctgtgttcatccttatattagttatctatggctattgtaaaaaattaccataaacttggtaacttaaaagaacataaatgtattctctcacagatcttgaggtcataagtcctaaatcagtgtcactgcactgaaatcaaagtgtcagcagggctgggctacctccagaagcctgaggataatttgttttttgcctcttccagctgctagtggctgccagcactcgttggctagtggctgcatcattccagtctctgtctctgtggttatattgccttctctcttataaggatacatgtgattgcattgagggcccaccaaataatcctggataatcttcccatctcaaaatccttaacttaatcacacctgaaagatgcttttccaaataaggtaacatttacagtttccaaggattaggacctgatatcttcatgtggctattattcagcctacatatccctctaccagaatgtaaattccatgggaacagagcttttgtatgttttttttcacttatgtgttttcagtgtttcgaggagttgtgaacaagaatgcctggtacacagtaggcagtcactaaatatttgtaaatttaatgaagttttgtttgtttgtttatttttggagacagggtctcattgtgtcatccatgctggagtgcagcggcatgatcactgctcactgtagccttgacctcccaggctcaagtgatcttcctatctcagccttccaagtagctgggaccacaggcgcctaccacaatgcttggctgggtaatttttgttttttaaagttcttttagagacaggatctccctatgttgcccaggctggtcatgaactcctgggctcacgtaaccctcctgcctcggcctcccaaagtgctgggatcacaggtataagccaccatgtctagcagtcactaagtattaatgaatcactttgatcatcttcctgtggaatggggagttttcgttttattgagaaagacatacctattatcattagctgtaatttatagtgataagctttggctcatcatcagagataatattttaataaccaggcctatccatctacaggccaggttgcttcataaaggaagaaactccttgaatgtggacgtattcaaataaggtttgaataattatctgttagagatgctataaaagatattttatacaatgtctagaattcttataaaccttttgtctattagttttaaaatgactgaagaccattcctctaatttttgaccctgttaagagcattgtacatgagaatccacaaagatatattctttttggtggatcagctctatgtttctttagtatgtcagagtatcatactggaagctctcaatgctaaaatggtcctcctcacatagaaagtttttttttctttttctttataaaaatggctctaagtctttaaattctaacttttaacccagaaacttgccatatgtgtaaaatatgatccctaaaatagtgcaactttttgttttatataacactatcctattgatgtacccatatccaaatgaatgttgtctctcaatcaaagcagtcatctcagaaattgatgagtggaaaatgagaagctttcttctagatttcccttcatataaaaccacatatgaaaatcaggcctatgagttcagctaaatctagtttttggccgaagtagttatgtcagttggaatttttttgtttgtaggtaacacaattcatcgccaaagtaccatattattatttcccataacaagaaaccgagaagatagagtgaacaaagtgtagtagttccaaaaatcctgttcttacctaataatgacagcaaaggaagggaggaggaggactcccctgtaactctccttttttcttttccttttttttaaatggtggggggagggttcttttacaaatgtcttccaaaggacactgtcttctgtctcattagtccggtggatcacatagctatctaaggaagactggaaaagaaattttcttgcattttaactgccctcatggacaagaagtggttaagtctgtcctcactggaagtagattcttctcactaacaagtacatatcctctttcttctaattcttatgaataaatctggtgaatagaaaattggtggtggcaatggtggtgcgggattggggaaagaattgggtactaatacttaactgggtacctataattgtgggccagccctctctgcagatgaagagactgaggctctacataagaaacttgtataaggtaaattggctagaaagtagtgacacttccaacacggaccatcatctaattatgatgatgatgagggtgatagttacactggttaatattgagtgcttactacacaccaggcattgtgctatctactttatgccgattatttcatttaattttcaaacctacacaaaggcagtagtctgttctacaggtgaactaactgaggctcgaggacacatatctagtaaacatgagattaaactccagtgatgcctctaggtctgggcatttctttacactgttctgctttcctgttctaatgcccatatggtctccaagactactgcctctgggctaagcattttgttaacttaagatacttcatctgcaaaatggggataattatacttcataattcctaatagtagtaaaggtaacaataaattttaagtgattaacaatgaaacaaccatagcaggacagcattattatttttgaatttacctcactaaattgtaaatttcatttatgccgtttacctaacgctcctggactgagattatccagggcagcagttcttaaattttttggactcagggcctctctataatgttaaagaattactgtgacctccaaagagcttatgtttatgtgggttacacctatcactactgcattgaaatgaaaactgagaaatgtttaaaaacaacaaacgcaagctcccttagctgccagtgatgacgtcgtacacaaagcgtatcctccaggaaacggtatactagtgagagaaggaacgtgagaaagacagacaaggtgtccgtattattatgaaaattgttctgaggtcatcgggatttccagaggtccctagaccacactttatgagaactgctgccttagggtaaagatggggtgccaggaggttggcgatcagtagcgtctgatgaacgaaccatgggagcctggggttgttcagatgaggaaaccaagagttaggccgaaataagcagcgccggagctccactgtattcacggccgctactgaggcttcccagcagcctcggcccttagcagctgtcccctcatccgccccgaggtaccctcttccctggtccggtttttcaggggccctctctggcgctctccgccaggctacgggcgtcccgggtgcccggagacaggccccgccccgccgccggtcctcgaactcctggctgccaggcaaccctggcgcgtagcccgggcgtcactgctccaccccgtcaggctgaaccattcccttcagagactttctcaagagggaaggagaaaagggaatttgatggaacgcctgaaagctgctctgctcccgttttctctccttaatttgaacgaacacttcttttcttcttctagccaactgtctcctgaagggaaacgcagcgcctcgcctctcccgccggaatgtcccccacaccagtccagggccgcgagtggttcggctcgtcaggcggggccgccggtcggcgcgggttggctctgaggcgggggcgcgcgcccgacgtgcgcgtagggggcggggccgcgcgcagagggcggggaggtgggcaagatggcgcttgccgagtgattctcctcgaatacctcctgccggcgcggagacaccggggcgggggtcctgccgcaactacctcccttcctcctctcccccgcccccggagccttcatccttcccttccccccccacctcgaggggcgggcctggttcccgggacaccatgtcggactctgaggaggagagccaggaccggcaactgaaaatcgtcgtgctgggggacggcgcctccgggaaggtcagtcctcgagcaggcccgccgtcccaggcctgcaggaaccccggcggtccccggcctcctccccgccgcccggcgtcgcctcgttaccccgagccctcgggcttctaggcccgggcccttctggttgtgtggcctgaggccggacacgaagtgggcgcttggtgaaggccgacgagagctgtccagctcccccttaaaaaagagtcacttcctaactccccgcctggattgcgaactcctgcaagactcgggccagcctttcagcttcccgcctctcaggactggcagggatttgccaaggcatcttagctcctcttacttgtagtctgggtcacacttactcctcccctcccaccccctttaccgtttctgatgcttctactgcatcgtgagctcccaggagcgtagctctggaatcagtattccccgggtgagaattggggctctgccacttagtcgtcgggtcattggagggcaaattgctaatcagtttaagcttcatctgtaagatgggtattgaaaagggccgccgcaaagggagaaatgtgaaaatacatattaaatgtgaaaatacacataaaacctttagagcacagtgtccactcagtacactctagttgctattttaatatcatacctgttcatcacctctgtttccagctcagcactcgatacaagcagtcagtcaacaagtgtttatggagctcctgttacgggtaggatgctgagggtagagctgcttgcgtgacaaaagggatcccctgttcgaatgaatgaatgcgggcgtgagaatatcaggcagcgtcagtcttattatctcctaggcaggggctcctaccccaaggctgtggaactcctgaaatggagtaaatactgcccggtacgtgctctggggagagggtccataagatctcagagggg

SEQ ID NO: 3421 - DNA, 6000 bp, Homo sapiens
gtcggccggacacagtggctcatgcctgtaatcccagcacttcgggaggctgaagtcaggagactgagaccatcctggctaacatggtgaaaccccatctctactaaaaatacaaaaacaaaattagccaggcatggtggcgggcgcctgtagtcccagctactcgggaagctgaggcagaggaatggcgtgaacccgggaggcggagcttgcagtgagctgagattgcaccactgcactccagccttggcgacagagtgagactccgtctcaaaaaaaaaaaaaaaaaaaagtccacgagcatctcgaaacaaacaggctcaactccaaatccttcactgtccactaacaagtacctccatgtcttgctggatgggagcacatgtagctccacaatacttttggtcacacaggcctattgaatcttaacttccttattcatcccctctcactattctcacctctgtggacttaattcagttccctgtttctcctgtggatcactgcattaggctccttaccattttcttcctgccttaacttttgccccctttcaagtcacccttcactgagtttcttcactatctttccaaaaatgtaaatcttagcacaacaggctgcagcttaaagtcctttagtgactccccgtagctcagaggatgaggttctcatttcggagtatttacagttcttgtctatctctgtggcctcgactctccccactctcctccaagccccatttccttgactgggcagcactccttgttcttcctattccttatgctgtttcctgcctctagccccgtgcgtttgtacttcccactgctggaacattcttctctcctttccctttccccgctcctgatccttcagagtctaatacccacctctctgggaggccacatgagctcactggacaggtgctcctctgtgtgcaaacatcactgtgcatggctctgttagagtacttcatgccatgtaatttttgcccctttattcatctctcccctcatttgctggaaatcctgtgagggcagcatctgtgtcttgtctaacttggtatccctgacacctaatacactacatctgacacagagatgttcaattaatactgaatgaaagctggaacgaagaccatacattatctcctttcagactcacaaactgtgaagtggttattgttagtatagaatctaaccgggggattgtattaatctattcatttcttcaactttatggacaaaagactttcagatgattgctgaaaaccaagaaaagctattaaaaagcaaacttgaaaaggattatactcttgttgtagtaattccacccctggttaggaatgcatacttaataactaatcagaagcaggcaagttttattcaccaagacattaatcatcaagtaatttatgatagtaaaaaaattggaaaaaaaagagagaaatgattaaacacccagaattatggtacatccataaaattgaacattatactgccattaaacagtgtgtttccaaaggatttttagtgatctgtaataatgctcatgttatttgtgaaaaagctggatagaaaactgaaaatataccaagatcttaaattatgtaaagggaaaaaaacctcacacataaatagagaaaaaagaaaggaacatattaaaacaaactcttcagtgattgtatcttgagtgccttttttgttttttataatttttggtattttccaaattttctacaataagcatcttttacagtcagaaatataataaaatattttcaagttcgagattttagctgtgttagttgtatttgtgtggcattattactctttcttctgttgatggtgcatcagtttttctttggggatgcacccttccccatctcaggcctctggtgtgaagtggatccctgaccccggcttcaggggtgggcacatgactcagacatggccaatcagcatactccatccctctggctccttcccaatgggcacatgacttaagccaggtcagtgagactcggtttctcccataaacttttacaggagatgtttatgggggcaggaaaactctacttccgttggtactagtgagctgtaagcctagagctgccctgagtgtatacaaggttggcaaaacaacacaggaaagtattgaggataaaggtggaggaaagtgtacgtgcacttgtgcacacatgcatccacacacactcgcccttcaagtcctgataactttgagtccttggatctaggaaagtctgaaacactattgtccctggactttctggttataagagccaatacatttaggcttctttgtttgcttgcttaatttaagctgcttctataagttgcaatcgagagtccttgctaaaagaattatgaaaacaatgaaatacataaagcacaatccctgaacatgcccaggactatcacaaaatacagtatagaattaatccatacatcctacctgagatataaaacatttccatcattgccaatgttccattggacactgctgatctataatatagttccttatatattacagcatatatgtccactcatagtgccttatatatatgcttcctttctttatgtaacaggcagtgggtattattaaaaacagctaacaaccctaaaggtacaagtactggaggctctctgttgtggccagcattaaaattttaattcctggatctaaggagatttagcgtgtctcaaggttgggctgggagatattttagggtatggttttttttgtaatcagtacagaaggatttcaatattgtgtcaaccaataaggccaaattggtgtgtactggctgaacataagctctgttagcagatattatagtttcttacttgagtacctattttccctgctggactgtgaattcccctagacagagactttgtcttactcatttatgtgggtcttatgcctacctaggtgctcaaaagatatttgctgaatgaaaaacaggaatgacggtccaacatggtataactccctattcagtttttttttttcctgatagaagttccgtgcctagaattaaattgcaatatggtctcttttcacccactcttttgaagatgttatcctctccaatatcagctgattgaagaagaaaattgtaaattttctctctcaggcataatgttgatattttaactcatagtgattttttctcaatacaaaatgaattttagaaataaatcaagatcccagaaacttatgattgctttgagtggtatcttttatctgtcatcctaagaaaaacatgagatctgatggcccagagcacagagacctttggtatttcagttctcctacagccgcatgactcgaaccttttgctgggagattgggatgtaggtccccatacttgattataaggactgtgagggcaggggccacatctgcatatctgtctattaataatagtactcctggtacctagctcctccttgcttcacagcagacactaaacaaatgcttgctgagtgagtaaatacttacatttaaagagaggcaattatacacattgatcatttgatcaccctctagcactgataatttttaagtgattagctttaaaaatcatttttcttacatcaacctgggtcctcacactattaaacaacaggagagctttcaatattaaatgaagtggggcagctgggcaactgtaaattttggatgatacttcagagaagagtctaggtgtatctgttctatccctttttctgatgggcatctgccatttatttttccattcttaagctctcaggagggatgtcttattagtttatcagaatgcatagggaaagctcatctttcttggagtaggtcttccaataagtgttcaagccctgggtcttccctcactacaataataaacatacctgctctaccctcctcacaaagctgttatcgtgagcatgaaaagacgagtcgctgtggggaagaactattaacccctatacagatactgttgttgctttccgttcaaggatccaccatgagactgtgggtaaggcactttctgggcagtgaaatcgggcttaagagaatcattgtacttttattttgctcctgggaccggcaagggcagttaagagccctagccctaaaactgtcgtctgttacagaggcagagaaatcattactggggttggcagcgttggggggaggggggaaaacgtgtatgaaaacctgggctcccagagcaaacttcgccacgcgccctccatcgcccctgtctccacacaagtcccggcaggggcttcttgggcggaggccacgccgaccaataggaacccactgtgttcctacaggttacgaagcaggtggagaaattgagcagaaacaattagcgaaaccgggctcagcctttaccgcggtgccaggagctcctaacaggcctggaggggaatgtcggggctcaatttcctaacgctcccctccccatccccatgccacctccacgagcagcggcgtccagcctcctcccgcccgaacgtgctcgaggggcgggcagtcgacctttattgtctggggagcacctggcaggtggcgggcccgtgccctaacgtgtgcgtggtgcccagcttcacaaagcgagcgggcagcacctccttggtccgggaacggcctcagcctggccgtccacatcccaggggtggaaaggtggagagagaaaggggctccggagtcaagagcggggagagagggcgcgcgcgccctcctcctcccggcgggcacggccccccggcattaacacgtcgaaagagcaggggccagacgccgccgggaagaagcgagacccgggcgggcgcgagggaggggaggcgaggaggggcgtggccggcgcgcagagggagggcgctgggaggaggggctgctgctcgccgctcgcggctctgggggctcggctttgccgcgctcgctgcacttgggcgagagctggaacgtggaccagagctcggatcccatcgcagctaccgcgatgagaggcgctcgcggcgcctgggattttctctgcgttctgctcctactgcttcgcgtccagacaggtgggacaccgcggctggcaccccgaccgtgcgactactcggcgaagcctgtgcctgggagggtggtacccgccagggtgcatccggagagaggactgcgggccctcagtgcccgtgcgttccagcctccggggagactccaggtggccctcggactctccggcgccctgcctcgctcacctgcgcgaggagaccccagctgctggtggtgggggacgcgaatccggggttcttcgggaatggggacagcaagagggggttaggcgtgagcgaggctgcaggctccgtgcgagtttggggtggcttttgtgccgacgttgcgcggggggcggaggcggggggctcaggggtttgcaccgagcgccttctcttgccgtgcgaggcgcggccgcagcttccttttgttaaaagttgcgtgtgtgtgaccggcgcccgggaggacctgcctgcaggttctccgccgcgctgagggcaaagttagagagccctttctctgctctgcggctactgccttccaaccgcaggcgctctttgtgcccagagctggggaccgacccgctgccgcctctgctcgcggcgccacccgtggagaccaatcgaaggctgcggcgtttccccgcctccgggttaggcttttgcgctgggagtgcgcggcgtggggctgttgtggggccggactcccgcgagcctggaggtggtggcgacagggacaacttgggcagggcgtgtggaaagcagccgctaggttgcagactttttgctttcgtacatcccgtgctcgcccctttctgccgcggcgccgtttcattcctgccgcgcgccccggggcggctggaggctgtgtttgccgcctgctccgggaaggcaagggacagcgtgctgggactctgcgttccctgactccaaccgcctagca

SEQ ID NO: 3422 - DNA, 6000 bp, Homo sapiens
catggaatcagcctaaatgcccatcaatggtagacaggataaagacaatgtggtatatacataccatgtaacactatgcagccacaaaaagaacaagatcatgtcctttgcagcaacatggagccggaggctattatcctaagcaaactaatgcaggaacagaaaaccaaataccgcacggacacaaagacaggaacaacacacactggagcctcctgaagggtggaaggtgggaggtggaagatcagaaaaaatacctattgggtactatgcttaatatgtgggtgacaaaatatgtgggtgacaaaataatctgtacaccaaacccctgtgacatgtttaactatacaataaacctgcacatgtacccctgaacctaaaataaacgtgttaaaaaaaaaagagagagagacagagacagggtctggctctgctggagtggctcgatcatagtgctctgtacccttgaacctccagcaatgctcccacctcagcctcaggagtagctgggactacaggcacaagccacaacacccagctggaactttataacataatggagaatataatataaagggcacttgagttaggggagataaatcttgaagtacaacattaatcgggcattttggcaacaatgtacaaaatagattaattgaggactgggagatcagttaagctgctgtaactgttaagctgctgcaacagttcaaagagaggttaaaaaaaggacttgaactagaattttgaagacaagacagttaatagaaagtgtgcaggtggaaaaccaattggactcagagcaaagagaggggtgagagtacaaggataagaaggattaaagtagtacaacctaggtgaattttgaatttcatatgattttcatgtcatgaaatcttgatattttccctaaacattaaaaaatgtaaaaaatcattcttagattgtggccatgtaaaaacaggcaaaagaccatttttggccctcaagcatagtttgctgacccttgtgccgtatcataattctctgtgcttatcaaaatgtcttctttccagcaattactcattaaatatttgttttaccagtgtggggagaggtcctgattattttcctttagttaatattaacattttgcacttaacatgggaacatttcatttctaccgctacaaaaaagtaagctactaaaatgttcaagtaggacctgctgacctctaatgggaggccggattaaatacaacaccaggctttaatgggttggtgtgtctgccactggaaaatgattgtgctaaaggaatacaattagtcatgaaggggatatacacacgaggaaggagcataaggattagagttaggagtctcaatttaaaagccgaatgtatttgtatttaaggaatttaattttataattttattcgacttccaaaattttgcaaacaagattttcctctttcaactacctgcacatactgcttaggaatggattagcagatataggctttcttaaatttcataaaacattttaacggattctgaaagggcactgttgttaagtcatgctttctgaaaattttctagtccatgattatcaaaacatttaacgcaatatctcatttttatcaaagaaataatgtctagaatggcattttactagtaaagtaatagagctttccagctttgagatgaaaaattaggaaaaatgtcattttagatcaggctacaattttccaaagacgtaatatgaacatttcagcagcactcaagatgtattacaggttaaccaaaaagcagcagaagcagcacatagaataaagctctttatatcacttttcagttttcgaaaaaaagggcactaaaaaaaattaagctctgtggttttaaaaaatgcccaacatagctatatcttttcctactatagaaacctcagaacatgtctgtagtcatttcaaccacaataaaaatctctctcaagtctcaccattggtggcacaaatcaacggctagggccttagaagaaaaatgatctcagtattcaagtccatatcaatgtaacaagttaggctaaagttcagtagaaataatctccccaaaaaatatcatctccttgctcttcccaaccagaattatcaactctgtgctcccagattcgtcatacctgtggttctgtcttatttatcactgccagcactcacctcagtagttaggtaattgactttatacactgcacatgctttatattttttcaatactattatctcttaaatttgcacctgattcatctgttatctttaagtataaatggcaacccaggaacagataaagggccctcaaatcccaactcctcccccaccctcattctctccacttttgaaagaatttcctacttccgtttttgtttttgttttgttttttaaatttctctccccttagctgtctacctatgccctccactatctctgctttcaactttgggtgtacaactgcagaactaatggtggcaaacaggaaaaataatgttaagccaccaggaaagacaaagaatctttttaaaggcaccaactatgaaccaggtgcttcatatatgtcctcatctgatcctcacagcagcctgataaggtatcatgatcccagtttttcggaagaaaaatacagactctgagaggttaaagaatctgcctaaggtccagggtgaccaactattttggtgtgcccaatacagggggtccccgggatgtgagacccagttttaaaacctggacagtcttgggcaaagttggtcaccctagtaaggacacgcagcccatccctaccctttcgtaggttcagatatgaatccaggttagttgggctccaaagcccacgtacttcccagattcctgcttctcccaatcttaactcccttggaacttcagaagctccattatttttcaccccaaaggcttctgggccaaacctaattctggtgaaaaatgtttagccttttattctatcttttcttctgcaagtatacaaatctttctaaattccctaatacaaagcaactccaaaaccaccactgagagctcatatgggacatgaaatactaatgtgaaaaattaaaagacagaagcaccaaagaaaggttaatttcttttaacccagcttacttcacctctaccatcattagcagtataacccgttggggtggggggcgatgattagggaactgaaaaataaattgttcttgcctctaagatacgagggtaggaacgtctaaagcaagcctgttctcccaccactccccatccccaccaagagactgagataaagacgatcgctgatttaaagcagtagtataaggcaaggtggttccacctatgttttaaggagtggcatcaacaggtggcatttagtggtggcttgctatgaaggtgtgtctaaggtttataccatcaagaggcctaagccttgtcattgatcctcattccactgttagattccaacccctcagaacttcaaacctgccctggggcctatactaccttctccactattactgtcactcagtgtccccagtcccagggaccaaaaataacgacttaaagggaataaagaattgggcgtgtgtctgaggtggcatcatgagaaatgcttttggcaacctgagtaggaactatcacatatagaatgtttctgcaggaaaatagatttttctaaaatcagtatcataaagaaactactacagcaaaactgtatgcaagagaatacctaagtacttcctcaaaggcaataggctttacttccacaacatctaaggcactgctcgaatgaatgtttaataactattactgattaaatgaattttccattctcgcgcaatttcactgtttttcctccgttcatatttgactgactcccagcacacgacacacacagtaaatgggtcggtagataagccctacactcctgaactcaaagtgtggtccacggactagctgcacctgcatcatcagcgagattattaaatcatagcctgcattttcaaaaacaagatccccaggtaaatcgcatgcacaatgaagtctgagaaacgctgccttagaagtttgcagtattgcaatccttccaatccccaactccaatctcatcagcgtgagaaaaaaatggagcgcacacacaccgtgcacacggccagcgaccagcccacggtggggttgggacacctgtcaccctgtcctccccaacagttccccatccgctcaccttgatgcgctccccatcaatctccaccgctcgttctcggaaatccacccctatcgtggcctcggtgcggtcggggaagcggccagcgcagaagcggtaggtcaggcatgtcttgcccacattggagtcgccgatcacgattatcttgaagatgcgggagcgggcaggaggcaaaaaccctgaggcccctgacactgccccgctggacgaaaagcttgcctcgagcgacgactccatctcctcagccattcccccgacccgccccaaactgaggcggaggaaaggagacacagaaaggctgagagattacgccaccgcaagagcgcgcgcccagccggccagttcggctgcgcaacttcccaggagccaccgcccaccagccccgagcgcgcctgcgcaccttcccgccccgcccttgcccgcacaggtgtggcacccgcccgccccgccgcacggagccgcctgcccgcggccacacgccaggcgtcactcgggctggcgccggtctacctaggcaggcgtgggacctgtcgggggcttcacggcagcgcggaaggccagcctgcagagaggctgggcccagcgccctgactgacccagccccgccacgtccaaggttcccgccctctggaggaagccgcgcaatcactccgggggcggggagagacagacaactgagaggaaggaggtaccacgggcactctctcgcgagagggccgcagagccgcctttgacgggggcgtgtacctggagagcaacggtaaggacggagccgacggctccggcgtcgggtcggttccggcatcgacgtatcgtttggtcgccccagagaggagacaggtttcttcagcttgccgctgaggatgtggcatcggctgcgctcaccgccgccgcctctgtgaactgcgggagttgggacagcggccagggctagatgggtgggacgcgagtcctcgccgaaagcttgccctgtgcggggcgcacttggaggcgagctctgggccgtggcgagttttgcagcctaaggtcttggcaggcgcattgctgtgggctgccggagagcaggctggagttcgagaccgcccaccggagagcaggcgagagttcgaggcctaggtacagcgcatttcgctaggcatccccaagaatatccgcgtgatccttgtggccagagtttgttgagctaatatccccagcccaaacagtagagcacatcacatgtcggccacctgggagcgttgaacctggtagttactaggcgcccctggtggaaataaaactcattatgccctagttatgtcttagtgcctgggtgacgatgatgtagcggttaaagattaactgagcgcacttagaggttgtctttgtctacctaaggaaaatatcaatagattaaacccccaaccttaaagaatctccgtgaatttttctgaggaaacgtgcaatattgtcatacaaaaggccccaaatatgcaaacattgctttttgttaaaagtttgttttgttttgcagtgacatctgtttgagcagatgaatatgccattgggaaagtcaaggactgtcggagaggaggacatggcagaccttaactaaagtgagggggacagtagagcactaaaagttctaggaaaggagatgaactgcttattccatcagatgaaaatatagtcagaacagatgagtagtagaacttaaacatgcccggagttgccaggaatttgcaaaagccttgatataattcctgttgctgtagaaaga

SEQ ID NO: 3423 - DNA, 6000 bp, Homo sapiens
gtgtgtgttttgaatgtgtgcatgtgagtatatgaatgtgaatgtgtaagtgcacgagtttaagtgcacaagtgtgtgttagtgtgtgcatgggtaggaatgtgaatctggttgtgagtgtgtgtgagtgtgactgtgtgtgtggggagggctgcatgtgctgagagctgtcaagaatgaggacttccgtttctcctcaccaatctctagatcctgccttattttatcctctcctaagccttatgcaaacttaagaaaaatcaggttgagaccctctattactgtcaaaagccattactcatctcggcctcccaaagtgctgggattacaggcgtgagccactgcgcccagcctccttttatcatgggacattaagatttacttcatatcagcatttaagtattgttaactttatgtaatagcatttgggttggggactggtgtgtttccagctgtacaaaggatagttgtattaggtgtaattatgacattattattgtctttatttgaagattatgaatgatctcaggagatatgtatgtgtttaagttgacaagtggtggacttgtgatggttaatacagtcaacttgattggattaaaggatgcaaagtatcgatcctgaatgtgtctgtgagagtgttaccaaaggagattaacatttgagttagtgggctgggaaaggcagacccacccttaatctgggcgggcaccatctaatcagctgccagcacgaccagaatataaagcaggcagaaaaacatgaaaagactagactggcttagcctcccagcctacagctttctcccatgttggatgcttcccgtcctcaaacattggactccatgttcttcagctttgaaactcgactgccttcctttctcctcagcttgcatatggcctattctgggaccttgtgatcatgtgagttaatactacttaataaactccatatatatatatatatatatctcctattagttctattcctctagagaacctggactaataaagagaacgagataaaagaggaaacaacagaggccatgattgcactttttacatatatcaaatattggcaagtctgccatcctagcttcccatctgcctacaagtgggcagagccatttttaacctttcttactgtgaacatacttcaattcacttagaattcttgaagtccaggccaagcacctctagggtaaaatttagcattctgttttatccaggtgttcactaacggttccatattaatttgcttctgcagataaagtataaattcctcatgggctaaaatcacaccttattttgtatcttccccttgcaccaaccactagcatagtactgagtacatagttcaaatgccattaactccacagtgatcctacctatgaagatatgacttgaagaattctgaaactcattaagctaacctatacaaggatactaatttactatttatatactgaaattaaagccctagtatgatgtctggggttaccaaacacagtgatatagtaatttggtggaggccagcaaggccaatgccatacttctcagggtaactggaattgtgtcttcaaaggagaagtaattcccactatcaactgggaggtacagggtatcaaacttgtgagaagagcccttctgtaggctcaaggagtgccagtggcattcaaggaggagggagggagaggatttttgtccccaaggggcatctagcaacattttgagacagttttggttggtggtggggtgctactgggatttactgggtagaagccagggatgctgataaaataaacatcctacaatgcacaggataaccttccacaacaaagaattatctgacttaaaatgtcaatagtgccaaggttgagaatcctttctttcataggcaatcaagggaattctttgtcctctgtgctcagacctgaacttaaagagtaaaattatctaagagctgtttctgagtaagacaagttacgaaatgggcactgtcatcaggaggtggcatatctagttaaaaaaaaaattcagaaattgagtagtcttattttgtatataagattatccttatgctattctgttttctacttttttttttttttttgagacacagtcttgttcttgtccccgaggctgaagtgcaatggcatgatcttggctcactgcaacctctgtctcccaggttcaagcgattctcctgtctcagcctcctgaatagctgggattaaaggcacctggcaccacgactggctaatttttgtatttttagtacagatggggtttcgccacgttggccaggctggtctcaactcttgacctcatgatccaccctcctcggcctcccaaagtgctgggattacaggtgtaagccactgcacccagcctgtttacttttatgttttagagatgggggtctcgctgtgctacccaggctggagtgcagcagtgcaactatagctcactgcagacttgaactcctgggctcaagagatcctccagcctcagcctcctgagtagcaggaagtagaggtgtacacaaccacacccacttttttttttttttttttttttttttggagacaggaggtctcactctgttgcccaggttggagtgcagttttgcgatttcagctcactgcaacctccacctccctggttcaagcgattctcccacctcagcctcccgagtatccgggattacaggcatgtgccaccacacctggctgatttttgtattttttggtagagacgaggtttcaccatgttggccaggctggtctcaaattcctggcctccagcagtgctcctgtcttggcctcccaaagcgttgggattataggcatgagccaccacacccaggtactactgtgtgattttaatatccaatgttttttcttctattacaaaagtatctttacatacttatcttaccctaagccattgaaattgttccattttaagttgtactgacaaaggatccaaatttacagtttctgctcagctgtgtagcaaagtattaaggaaagggttacatgttcacactttgaggccaagtggtagtgactccaaggacaaaatgaacagtcaaaaaacagggctgtataatccatccattctttccaacagtagaatttcctccaattatcaattctggagattctggggttattcaattaagaagagtagcacatacttcagtcacatgaggacactctcaaaatacaagttgaaaatacaaaactcctcataacaatgtcaagtgccaacaatgatttttaaaatttaagtagggctgaactgtgtgtaactggtgaaatgttcaagttaacaatccttacacacgaaatctctcacttcactgacttaattcattatttgctgaataaacaataaacttccagtcagtagtcaagagttggcaatctagctggtaggacataacatataatcatgaaacagcaaaaacagtattcaaagattaaattagcaataccccaaaatgtgtgttagagttagcataaagaatttctgatgtagtttaccaagagctaaactaaaaagtccagaatacaaaaaacagggatgcaatgatgttagtttttttcaccatccttgaaattctcccattaaccacagctctgagttttcaactgctctttgtccttaaatcttcagattccctcctttgaatgggataggtagagcagattagaagaaatatattccgaggctctctaatagtttctggatgattaaccttcatgaaaataacctcacagataagtaattaggatttttcagcccatttctataaactaagtaaactttttttctagtgaacataacttgatatattagtgactgtagaaagtctttctacagcaacaggaattatatcaaggcttttgcaaattcctggcaactccgggcatgtttaagttctactactcatctgttctgactatattttcatctgatggaataagcagttcatctcctttcctagaacttttagtgctctactgtccccctcactttagttaaggtctgccatgtcctcctctccgacagtccttgactttcccaatggcatattcatctgctcaaacagatgtcactgcaaaacaaaacaaacttttaacaaaaagcaatgtttgcatatttggggccttttgtatgacaatattgcacgtttcctcagaaaaattcacggagattctttaaggttgggggtttaatctattgatattttccttaggtagacaaagacaacctctaagtgcgctcagttaatctttaaccgctacatcatcgtcacccaggcactaagacataactagggcataatgagttttatttccaccaggggcgcctagtaactaccaggttcaacgctcccaggtggccgacatgtgatgtgctctactgtttgggctggggatattagctcaacaaactctggccacaaggatcacgcggatattcttggggatgcctagcgaaatgcgctgtacctaggcctcgaactctcgcctgctctccggtgggcggtctcgaactccagcctgctctccggcagcccacagcaatgcgcctgccaagaccttaggctgcaaaactcgccacggcccagagctcgcctccaagtgcgccccgcacagggcaagctttcggcgaggactcgcgtcccacccatctagccctggccgctgtcccaactcccgcagttcacagaggcggcggcggtgagcgcagccgatgccacatcctcagcggcaagctgaagaaacctgtctcctctctggggcgaccaaacgatacgtcgatgccggaaccgacccgacgccggagccgtcggctccgtccttaccgttgctctccaggtacacgcccccgtcaaaggcggctctgcggccctctcgcgagagagtgcccgtggtacctccttcctctcagttgtctgtctctccccgcccccggagtgattgcgcggcttcctccagagggcgggaaccttggacgtggcggggctgggtcagtcagggcgctgggcccagcctctctgcaggctggccttccgcgctgccgtgaagcccccgacaggtcccacgcctgcctaggtagaccggcgccagcccgagtgacgcctggcgtgtggccgcgggcaggcggctccgtgcggcggggcgggcgggtgccacacctgtgcgggcaagggcggggcgggaaggtgcgcaggcgcgctcggggctggtgggcggtggctcctgggaagttgcgcagccgaactggccggctgggcgcgcgctcttgcggtggcgtaatctctcagcctttctgtgtctcctttcctccgcctcagtttggggcgggtcgggggaatggctgaggagatggagtcgtcgctcgaggcaagcttttcgtccagcggggcagtgtcaggggcctcagggtttttgcctcctgcccgctcccgcatcttcaagataatcgtgatcggcgactccaatgtgggcaagacatgcctgacctaccgcttctgcgctggccgcttccccgaccgcaccgaggccacgataggggtggatttccgagaacgagcggtggagattgatggggagcgcatcaaggtgagcggatggggaactgttggggaggacagggtgacaggtgtcccaaccccaccgtgggctggtcgctggccgtgtgcacggtgtgtgtgcgctccatttttttctcacgctgatgagattggagttggggattggaaggattgcaatactgcaaacttctaaggcagcgtttctcagacttcattgtgcatgcgatttacctggggatcttgtttttgaaaatgcaggctatgatttaataatctcgctgatgatgcaggtgcagctagtccgtggaccacactttgagttcaggagtgtagggcttatctaccgacccatttactgtgtgtgtcgtgtgctgggagtcagtcaaatat

SEQ ID NO: 3424 - DNA, 6000 bp, Homo sapiens
cattaagatttacttcatatcagcatttaagtattgttaactttatgtaatagcatttgggttggggactggtgtgtttccagctgtacaaaggatagttgtattaggtgtaattatgacattattattgtctttatttgaagattatgaatgatctcaggagatatgtatgtgtttaagttgacaagtggtggacttgtgatggttaatacagtcaacttgattggattaaaggatgcaaagtatcgatcctgaatgtgtctgtgagagtgttaccaaaggagattaacatttgagttagtgggctgggaaaggcagacccacccttaatctgggcgggcaccatctaatcagctgccagcacgaccagaatataaagcaggcagaaaaacatgaaaagactagactggcttagcctcccagcctacagctttctcccatgttggatgcttcccgtcctcaaacattggactccatgttcttcagctttgaaactcgactgccttcctttctcctcagcttgcatatggcctattctgggaccttgtgatcatgtgagttaatactacttaataaactccatatatatatatatatatatctcctattagttctattcctctagagaacctggactaataaagagaacgagataaaagaggaaacaacagaggccatgattgcactttttacatatatcaaatattggcaagtctgccatcctagcttcccatctgcctacaagtgggcagagccatttttaacctttcttactgtgaacatacttcaattcacttagaattcttgaagtccaggccaagcacctctagggtaaaatttagcattctgttttatccaggtgttcactaacggttccatattaatttgcttctgcagataaagtataaattcctcatgggctaaaatcacaccttattttgtatcttccccttgcaccaaccactagcatagtactgagtacatagttcaaatgccattaactccacagtgatcctacctatgaagatatgacttgaagaattctgaaactcattaagctaacctatacaaggatactaatttactatttatatactgaaattaaagccctagtatgatgtctggggttaccaaacacagtgatatagtaatttggtggaggccagcaaggccaatgccatacttctcagggtaactggaattgtgtcttcaaaggagaagtaattcccactatcaactgggaggtacagggtatcaaacttgtgagaagagcccttctgtaggctcaaggagtgccagtggcattcaaggaggagggagggagaggatttttgtccccaaggggcatctagcaacattttgagacagttttggttggtggtggggtgctactgggatttactgggtagaagccagggatgctgataaaataaacatcctacaatgcacaggataaccttccacaacaaagaattatctgacttaaaatgtcaatagtgccaaggttgagaatcctttctttcataggcaatcaagggaattctttgtcctctgtgctcagacctgaacttaaagagtaaaattatctaagagctgtttctgagtaagacaagttacgaaatgggcactgtcatcaggaggtggcatatctagttaaaaaaaaaattcagaaattgagtagtcttattttgtatataagattatccttatgctattctgttttctacttttttttttttttttgagacacagtcttgttcttgtccccgaggctgaagtgcaatggcatgatcttggctcactgcaacctctgtctcccaggttcaagcgattctcctgtctcagcctcctgaatagctgggattaaaggcacctggcaccacgactggctaatttttgtatttttagtacagatggggtttcgccacgttggccaggctggtctcaactcttgacctcatgatccaccctcctcggcctcccaaagtgctgggattacaggtgtaagccactgcacccagcctgtttacttttatgttttagagatgggggtctcgctgtgctacccaggctggagtgcagcagtgcaactatagctcactgcagacttgaactcctgggctcaagagatcctccagcctcagcctcctgagtagcaggaagtagaggtgtacacaaccacacccacttttttttttttttttttttttttttggagacaggaggtctcactctgttgcccaggttggagtgcagttttgcgatttcagctcactgcaacctccacctccctggttcaagcgattctcccacctcagcctcccgagtatccgggattacaggcatgtgccaccacacctggctgatttttgtattttttggtagagacgaggtttcaccatgttggccaggctggtctcaaattcctggcctccagcagtgctcctgtcttggcctcccaaagcgttgggattataggcatgagccaccacacccaggtactactgtgtgattttaatatccaatgttttttcttctattacaaaagtatctttacatacttatcttaccctaagccattgaaattgttccattttaagttgtactgacaaaggatccaaatttacagtttctgctcagctgtgtagcaaagtattaaggaaagggttacatgttcacactttgaggccaagtggtagtgactccaaggacaaaatgaacagtcaaaaaacagggctgtataatccatccattctttccaacagtagaatttcctccaattatcaattctggagattctggggttattcaattaagaagagtagcacatacttcagtcacatgaggacactctcaaaatacaagttgaaaatacaaaactcctcataacaatgtcaagtgccaacaatgatttttaaaatttaagtagggctgaactgtgtgtaactggtgaaatgttcaagttaacaatccttacacacgaaatctctcacttcactgacttaattcattatttgctgaataaacaataaacttccagtcagtagtcaagagttggcaatctagctggtaggacataacatataatcatgaaacagcaaaaacagtattcaaagattaaattagcaataccccaaaatgtgtgttagagttagcataaagaatttctgatgtagtttaccaagagctaaactaaaaagtccagaatacaaaaaacagggatgcaatgatgttagtttttttcaccatccttgaaattctcccattaaccacagctctgagttttcaactgctctttgtccttaaatcttcagattccctcctttgaatgggataggtagagcagattagaagaaatatattccgaggctctctaatagtttctggatgattaaccttcatgaaaataacctcacagataagtaattaggatttttcagcccatttctataaactaagtaaactttttttctagtgaacataacttgatatattagtgactgtagaaagtctttctacagcaacaggaattatatcaaggcttttgcaaattcctggcaactccgggcatgtttaagttctactactcatctgttctgactatattttcatctgatggaataagcagttcatctcctttcctagaacttttagtgctctactgtccccctcactttagttaaggtctgccatgtcctcctctccgacagtccttgactttcccaatggcatattcatctgctcaaacagatgtcactgcaaaacaaaacaaacttttaacaaaaagcaatgtttgcatatttggggccttttgtatgacaatattgcacgtttcctcagaaaaattcacggagattctttaaggttgggggtttaatctattgatattttccttaggtagacaaagacaacctctaagtgcgctcagttaatctttaaccgctacatcatcgtcacccaggcactaagacataactagggcataatgagttttatttccaccaggggcgcctagtaactaccaggttcaacgctcccaggtggccgacatgtgatgtgctctactgtttgggctggggatattagctcaacaaactctggccacaaggatcacgcggatattcttggggatgcctagcgaaatgcgctgtacctaggcctcgaactctcgcctgctctccggtgggcggtctcgaactccagcctgctctccggcagcccacagcaatgcgcctgccaagaccttaggctgcaaaactcgccacggcccagagctcgcctccaagtgcgccccgcacagggcaagctttcggcgaggactcgcgtcccacccatctagccctggccgctgtcccaactcccgcagttcacagaggcggcggcggtgagcgcagccgatgccacatcctcagcggcaagctgaagaaacctgtctcctctctggggcgaccaaacgatacgtcgatgccggaaccgacccgacgccggagccgtcggctccgtccttaccgttgctctccaggtacacgcccccgtcaaaggcggctctgcggccctctcgcgagagagtgcccgtggtacctccttcctctcagttgtctgtctctccccgcccccggagtgattgcgcggcttcctccagagggcgggaaccttggacgtggcggggctgggtcagtcagggcgctgggcccagcctctctgcaggctggccttccgcgctgccgtgaagcccccgacaggtcccacgcctgcctaggtagaccggcgccagcccgagtgacgcctggcgtgtggccgcgggcaggcggctccgtgcggcggggcgggcgggtgccacacctgtgcgggcaagggcggggcgggaaggtgcgcaggcgcgctcggggctggtgggcggtggctcctgggaagttgcgcagccgaactggccggctgggcgcgcgctcttgcggtggcgtaatctctcagcctttctgtgtctcctttcctccgcctcagtttggggcgggtcgggggaatggctgaggagatggagtcgtcgctcgaggcaagcttttcgtccagcggggcagtgtcaggggcctcagggtttttgcctcctgcccgctcccgcatcttcaagataatcgtgatcggcgactccaatgtgggcaagacatgcctgacctaccgcttctgcgctggccgcttccccgaccgcaccgaggccacgataggggtggatttccgagaacgagcggtggagattgatggggagcgcatcaaggtgagcggatggggaactgttggggaggacagggtgacaggtgtcccaaccccaccgtgggctggtcgctggccgtgtgcacggtgtgtgtgcgctccatttttttctcacgctgatgagattggagttggggattggaaggattgcaatactgcaaacttctaaggcagcgtttctcagacttcattgtgcatgcgatttacctggggatcttgtttttgaaaatgcaggctatgatttaataatctcgctgatgatgcaggtgcagctagtccgtggaccacactttgagttcaggagtgtagggcttatctaccgacccatttactgtgtgtgtcgtgtgctgggagtcagtcaaatatgaacggaggaaaaacagtgaaattgcgcgagaatggaaaattcatttaatcagtaatagttattaaacattcattcgagcagtgccttagatgttgtggaagtaaagcctattgcctttgaggaagtacttaggtattctcttgcatacagttttgctgtagtagtttctttatgatactgattttagaaaaatctattttcctgcagaaacattctatatgtgatagttcctactcaggttgccaaaagcatttctcatgatgccacctcagacacacgcccaattctttattccctttaagtcgttatttttggtccctgggactggggacactgagtgacagtaatagtggagaaggtagtatagg

SEQ ID NO: 3425 - DNA, 6000 bp, Homo sapiens
cattacacatgaacaatgaaacctcaatcactcttttctgagaattattttgtcttacatttttccaagtgttctttatgtcttacatttttctatttgcagaagccacttacaattgtgcttttctttagttgacattaaatgtcatattcaggctgcatatattttatatgactgtcttcatcttaagtcaacagtttaaaataatccagatagttaattgcctcaatgactctagatctaagaacagagctaggtattctatttagcgatctcaccaaccctctttcttttaacaaaaataaaggaagagagggagagaagaaggaagaaaggaaaacaactataatttagttctttagcatgtaattttaaaagaaatcaatttaaaaatgctttcaatcatattcattacaaataggaagtactatcactagcagcataaatttaaatagttgtacaagactgtacacccaaatgtggacaaaggaccagcagtattgacatcacctggtagcttgtcagaaatgcaaaatctcaggccagaccttagacctcttgaatctgcatttaaataatatcctcaggtgattcatatgcacattcaagtttgagaaacactactatatttaaaatatatgatatatttttgtctcttaggatactaccaataaataaaggaaatatttactggttcctattaccaatagggcactctgcaaaaccatgagtaggatataaatatgaaaaagatcccagctagcatgtataagatactaactctctacaaggtgctttgctaagtgacgtacatgcatttattaattgaatcctcacaacagcgctaagaaaaggattatattattattcccattcacagaggaggaaattaaggataagaaagttgacaagtaatttatccaaactgacccagttaatctgatgtgtagccaatatttgaaatcagataagtcattaaccaaagttcacatgacacagtttccttaaagcttggagctcataccaaagtggacattaaagcattaaaaattgctaacaattataaactcaataaaatcttaattaaaaataggattttattaaacttgacaggctatttgtaaagagaaaatgtatgtgatttataaaaaaagttgttttaaaaagcacaaatatataccacaagattttcaaaaacactataaagctacagtagttaactcagagtaatattggtttagggaaaaacaaacaaaaaaaaagatcaatgaaacagaatagaatcctgacacagacccttttacaaacaggaatttatttaatgataaaaacagaatttcaaatgagttggaaaaaagatgaattattaaataaatgctattggatcagctgtctaaaactttacaaaaatattaagttacatcgttaccttccacttcgtatctatcaagtggaaaaaggggcaaaccctttgacacaggaatacctctcctcagattctcttccacagaaatactcacacttgagcaggaagatgaatgtgtgatctgctctgaagcaacgttgctaatgctgaatgtccatcaatataggaaaggatggataaattacattctatttctactttaggataacatgtagctggccgggcgcagtggctcacgcctgtaatcctagcactgtgggaggccaaggcaggtggactgcttgaacccaggagttcaagaccagtctgggcatcatggagagacccaatctttacaaaaaatacaaaaaaaaaaaagtcaggtgtggtgtcatgtgcctgtagttccagcttctcaggaggctgaggtgggaggatcacttgagcccagaaggtcgaggctgcagtgagccatgatcatgacactgcacttctgcctgtgtgacagagtgagaccatctcacacacacacaaaaagaataacacgtagccattaacaaaagaggtatctagagacaatggaaagatctctaagacttggaaagtgaaaaagcaagctgtacaataagtatagtaagataatttgcatatttaaaacatatgtatatgtatgtattatgtaaaactatagaaaagaaaaacaagccttagaatggtattatcaaacttaaccttccctcttctgagtgggaggagggaggatggtgatggcacgtctacatttcacttcacttctatattgagtgagaatgagttgttattatttgtattatttttaaaacacaaaaatagaatacaacgtggagtgcacaaatgcagagcgaccagtacaactaaaatgaggagggaaggaaggctatgaagccaccaacacagctgttggaaaagaaattctctcttcatgtagctacaaagaagcctgcttggaggaggggatttctccagcaaggccatgatattctatttgttttggtttgggtttttttccccccattttacacattttttaagcaatcaagaaggattttctcccccagcgaaaggagggccaaggctcacagttcctgtaagtgagcaagaccacactcactaagattctcttctactgcagccaatgaatgccccagtcctttcccacaaggaaaatacacaccttcttcttgttaaatacagtaccactgattcccctttgaaaaccgtaacagttctcctgattcggttttgtcctcaggacaaaagggttacaaaaacatgagagatccaggaacacctctgcatgtgttcctggtctgttcaggttaaagaaaagggtagagggggaaagaaccagtgtttatgtgttctccccaatgcggctcgggtccctgcggaagaaacacccaagaccagcctttttctctcaaagccacctttgatacaaaaggcttagccacacctgctgggacaaacgggaactgggaccaagatgtaagtcacaaggaggcaatttacagcagagaactagctcttcctacaataaaatgtgaggtggtgagcttcctgccactggaggcactgaacaaatgctacggggaaaacaaactgagtatttcctgaagattctgaatagaaggctgtgtttggagtttgatgctttgaaagctcaagaaatgattctcagacacagcggagtttggggacatcaagggctctgagtgcattttaaagcagcccaggagagagacaaagcaagaccataatgaaacaccccacccagtcttagagtttgagctacagcacggtgatcatgagcagactccaaacccaaatcctgatactgtcacctgctagctgtgtaaccctagaaaagttacaaaacctctttgggcctcagtttcctcaataaaatataataaaaaactagtacccgcctcacccgtgaagcttaaatgagctagcatatgtcaagtgcttagaataggggctggttcacagtaagtatgaaccattattatttgcagacaaggaaactaagaggtgataagtagtttgacccatgttccaaagtcagttttaatcttgggaataaaacctaaaaatttctttctcctccatcagaattccttctagctcaaactaagtatcctacattcaattctatcttctctgccttcatagacccttccatttacttctcttgaatatcttgttcccaaagtgttttcaaggcaggtctgttaccaagccactccatcagcagcacctagcactgtgcctcccgcagcaaggcaggcaggatggatggacggatgcaggcatgcatgggtaggtggatgaagggcagatgaagaactatcgagaaaggaatcgcggtgtcaggggtaaagccctggcctgcgagagccgggctcggatttcagtgccctcacagctagccatatggccttggacaagttactgaacccctccgtgcctaggtttccagaatgtagagggccacttccactcaagtggctggagaagaaggtaagcgccccggacggacgctattgcagagtcgcccggggattcctctctccacctgtgcttgagctcctcccgcttctacgctagggaccaggtgggagagatacacggattcccagaaaaatggctctctcaggtgggagtcaagggttacgagaggagaggtaggggaagcaatgaactcctccacacgatgtgttgggagagaggaaagagggattcaagtgggaattttccactcaacaaacattccaccatcatttgagaaaaaggcgctgggatggtgaatttcaaacagtctgagaaatgggcgactcggcactgtgcggcctgtaaggaatgaatcatttagttttcacccaccaggtaggcaggccgggggcgaggaccctccgagcgccgtccgagcgcaggtggtagcccagccaagcaaacgctgggcagaggcggcaccgaggaggggaacgggctgctgcactcccggtcgcgtccagccgggatgggctgcgaagttgtcggattctttcccgcacagcacggggctcgcccgtcggaaaagccaccgagggcggcgcagcggcagggcgcgagcagagcggggacgggcgggtcgggggtactcacgccgcgggcgaagggctccacgagccgggccgagtcctcggcggcgcgtggggcgcgggtgcgggctccggggcggacgtgcagaggcggcccgggccggggctatgaatcagctgcggggcaagcgcggaggggcgggagttactggaaaaccgcgggggagggcagaggggtgaggtcttttgcaatttcccgtcttgctgcgcactcttggcactcctgggacccacaggaattccctcccttcagtcccggggggaggcggccgcgatcctgggggaggcgcagcctcacaacccggactttgcgggcgggcgggcactggtgagaagaggaagtgggagaggcctgggaaggaaacttggaaaccgaaaactcggcggccgaggctccgtgccccgcgcgcagcgctgctcctgccccggccaaggacgcacgggccagccggcggaaccagaggtaagccgagtgaccgatgaggcctggggctgtgtatcccacaggggcacttgtcatcccaacccagaggccaaacccgtgagatccccgtccgaaaatcttcaggcaagagaagtcctttaactaaattttggccgtgtttccatttggcgtccagagcaacgaaaacgtgtttgaaccgaatcaaacggtccccatttttcccctactcgcgttctatccagaaacgccctgtccgacaaagtttcttcggctacaacagtcccgaaacctttatttcccaatgctacgacatgctacacatggtttacttttccccttaaaaatgccatccaatcttcaacctttttttttttttttttttgagacggcatctcactgtgtcacccaggctggagtgcagtggcgcgatctcggctcactgtaagctccgcctcccgggttcacaccattctcctgcctcagcctccctagtagctgggactacagacgaccgccaccacgcctggctaatttttctatgtttagtagagacggggtttcaccgtgttagccaggatggtctcgatctcctgacctcgtgatccgcccgcctcagcctcccaaagtgctgggattacaggcgtcagccactgcgcccggccaaaaatgccatccaatctttaccgtgtctgggcctttgaaaggtgcatttcacctctcttagaggataacaggagccttccgaggcagcctcggaccgggagctcccatagcctcgcctgtctggatgcctgacaaatcagcaggcaaggggccttgctccagatcagctgagcctagtttggtttgagtttggggaccctggaaagtatcacaaaagcaaggttgtaggaggggggtgggggagggaaccaagagtgatcaacaagtatcgaccataaacatatcttagaatcctatattga

SEQ ID NO: 3426 - DNA, 6000 bp, Homo sapiens
ttcagggggtagatgtgcaggtttgttatgtgggtaagttgtgtgtcaaggaggggattggtgtacagattatttcattacctaggtaataagcatagcacctgataggtagtttttcaatcctcaccctcctccctccagtaggctttggtgtctattgttccatctttgtgtccatgtgtattcaatgtttagctcccactaataagaatatgcagtgtttggttttctgttcctgtgttaattagctggttcaactttatggttcaccatttatatagcgaagctgtgagttgttttttagttgccatggacccccaggttgaaggtcatgtaacttgaggaggctcagatgaactaagaatgcaaccatgggcagaacctaaatgcttggatcactaaattaagaagtggacaccacatggcaggatccaggatccaatgagattgcgccctggtgtcacctcatggcaggatctagtcagatggtgcctcccagcctcaccttattgcaagatgcaatcaggtcatgccttgttaccctctggctataaaacctgacccaagtgccaggtggggacacagatttgagccagacccgtgtccttgcttggtagccttgcaataaatttttcatgctatgaaaaccgagtgttttggtgtttggctttccattgcacagtgggcaaatggacccagttcagttcagtaacagatgtcctttaattaatcaagctttatgataaatttcagattaaatttttttttggaagacctgtttagctttccacaaaataattatttccacaaaataattttaatttccaataacttttttttagaaataaggccaatatcaccaccaataataatcacagaggcacgcgttaaggcctaaaagtgaatctttaagatgtcaatgtcagctgggcactgtggctcacatctataatcccagaaatctgggagtctgaggtgggtaaatcacttgagcctaggagttcgagaccagcctggagaacatggcaaaaccctgtctctataaaacatacaaaaattagccaagcatggtggcgcgtgcctgtagtcccagctgcttggaggactgaggtgggaggattgcttgagcccaggaggcggaggttgcagcgagccgagactgcaccactgcattccagcctgggtgacacagaccctgtctcatttaaaaagagtcaaatgtgataatatgccaacaaaacagaattctacagaacttgtcgatgagggtaattgtaaaccattatccactgcttaggtgatgaagtcactttcttcacaaaatccccgataccttcaaattccatcagttggtaacaaaatgctgccatcttgtaattatagctatttacagtagtggaataaatagaatcataattatatttcacaatttacatagctgatttcatagatgtatgtaaacatagatatagagatatagacaaatataatgttcctgacagttatagaactatttttcctctgagaagttagataggttggcaatacattccactaatccctcctccataatagttatacatatgagactttctgatggaagatggaagatgaaagaggatggatcgagaatcattcccagggttttaacttcagtgtccagaggacactaaatgaaggctggcccattaacttagtaaaggttaaaggctggaccattcacttagtataataaaatcaagtgagcataactgaagtttgaattcgggcatactaatttcaaagtactgtctggagtgcagatgaaatcattgcaatggaaaggaagagctgagagccatcaaggcacaagtgatcattgaaatcctggatgtgaatatgattattcagggggccctggggccctgggaaacaccaacatgtagggggcaagtggagaacaagaagtccaaaaatatgagggaggaggaagtcagggaaatgaaagaagaatggagagagtattgctactgaaatcaaaaggaagagagaacgtcaagaaagagtgtttaatgggccgggcgcggtggctcacgcctgtaatcccagcactttgggaggccaaggcaggaggatcacgaggtcaggagattgaggccaccctggctaacacggtgaaacccagtctctactaaaaatacaaaaaaattagctgggcgtggtagccggcgcctgtagttccagctcctcgggaggctgaggcagaatggtgtgaacccaggaggcggagcatgcagtgagctgagatcgtgccactgcactccagcctgtgtgacagagcaagactccgtctctaaataaataaataaataaataaattaaaaataaaaacacacacacaaataaaaaaataaaaagagtgtttaacgaagcagaataatatgtgccttggccacacaatcttatcaaaactaagcaaggatggatattttagctcttagcttaataagccattggtatttttcatctttttcctattagttattttcaggataattgtttaaaactaacttatggaacataacctatgtatcagtttcctaaggctgccataacacattaccacaaacttggtggcttaaaacaacagaaatgtattctcaatctggaggccagaagtctgaaatgaagatgttggcagggctagcttcttcttaggggttcaaagggagcctgttccgttcctctctcctagcttctggtggtggtcagcaaccttgccattccttggcttgagtcagcataagcaggatctgtctcagtggtcacacagtgttctttctgggtgtctgtgtccaaattccccccttttcagaagtacagcagacactggattaatcttatatgacctcaggttaacttgattaaagctgcaaaaacattatttccaaataaactgatatttggaggttttgggtggatctgactttatggacccagtgcacccactgttaagggtataatcgcgaatttatatggtgctactgcatctagattctagaataacgtataaatttaagaaattagaatggtgcaaaaacagataaattatatgtgggcaccaaatttttacacttcagtctccttcaattgcaataggagcccaaaataagcctcactttttagaaattcatactgggctgaatatttttatttgacatctcatttgctagaagagagatcccttttaactgtttctataaagaataattttttttctcagtaaaatataaaatcataaagactttccaactcttgggcttggcagtttccataaccatgcagatggctaaactaatggactctttaaaactcttcaagtaatgagaggtgtggcaaaggaccatacatttattgagacaaaaatacattttattatcatcaaatatttactatgcatcatggtctttgtggccccattaggtattaagtgtattagggcctttaggcctttgttttaggaaaaataaaaaaacaaaaggactctcagctttccttgggatgacattggggaggagccagatatgtgaacaaacacaaaagtaacattttaaaataattctgacattattttgagtcatccagtcaattcaatataggattctaagatatgtttatggtcgatacttgttgatcactcttggttccctcccccacccccctcctacaaccttgcttttgtgatactttccagggtccccaaactcaaaccaaactaggctcagctgatctggagcaaggccccttgcctgctgatttgtcaggcatccagacaggcgaggctatgggagctcccggtccgaggctgcctcggaaggctcctgttatcctctaagagaggtgaaatgcacctttcaaaggcccagacacggtaaagattggatggcatttttggccgggcgcagtggctgacgcctgtaatcccagcactttgggaggctgaggcgggcggatcacgaggtcaggagatcgagaccatcctggctaacacggtgaaaccccgtctctactaaacatagaaaaattagccaggcgtggtggcggtcgtctgtagtcccagctactagggaggctgaggcaggagaatggtgtgaacccgggaggcggagcttacagtgagccgagatcgcgccactgcactccagcctgggtgacacagtgagatgccgtctcaaaaaaaaaaaaaaaaaaaggttgaagattggatggcatttttaaggggaaaagtaaaccatgtgtagcatgtcgtagcattgggaaataaaggtttcgggactgttgtagccgaagaaactttgtcggacagggcgtttctggatagaacgcgagtaggggaaaaatggggaccgtttgattcggttcaaacacgttttcgttgctctggacgccaaatggaaacacggccaaaatttagttaaaggacttctcttgcctgaagattttcggacggggatctcacgggtttggcctctgggttgggatgacaagtgcccctgtgggatacacagccccaggcctcatcggtcactcggcttacctctggttccgccggctggcccgtgcgtccttggccggggcaggagcagcgctgcgcgcggggcacggagcctcggccgccgagttttcggtttccaagtttccttcccaggcctctcccacttcctcttctcaccagtgcccgcccgcccgcaaagtccgggttgtgaggctgcgcctcccccaggatcgcggccgcctccccccgggactgaagggagggaattcctgtgggtcccaggagtgccaagagtgcgcagcaagacgggaaattgcaaaagacctcacccctctgccctcccccgcggttttccagtaactcccgcccctccgcgcttgccccgcagctgattcatagccccggcccgggccgcctctgcacgtccgccccggagcccgcacccgcgccccacgcgccgccgaggactcggcccggctcgtggagcccttcgcccgcggcgtgagtacccccgacccgcccgtccccgctctgctcgcgccctgccgctgcgccgccctcggtggcttttccgacgggcgagccccgtgctgtgcgggaaagaatccgacaacttcgcagcccatcccggctggacgcgaccgggagtgcagcagcccgttcccctcctcggtgccgcctctgcccagcgtttgcttggctgggctaccacctgcgctcggacggcgctcggagggtcctcgcccccggcctgcctacctggtgggtgaaaactaaatgattcattccttacaggccgcacagtgccgagtcgcccatttctcagactgtttgaaattcaccatcccagcgcctttttctcaaatgatggtggaatgtttgttgagtggaaaattcccacttgaatccctctttcctctctcccaacacatcgtgtggaggagttcattgcttcccctacctctcctctcgtaacccttgactcccacctgagagagccatttttctgggaatccgtgtatctctcccacctggtccctagcgtagaagcgggaggagctcaagcacaggtggagagaggaatccccgggcgactctgcaatagcgtccgtccggggcgcttaccttcttctccagccacttgagtggaagtggccctctacattctggaaacctaggcacggaggggttcagtaacttgtccaaggccatatggctagctgtgagggcactgaaatccgagcccggctctcgcaggccagggctttacccctgacaccgcgattcctttctcgatagttcttcatctgcccttcatccacctacccatgcatgcctgcatccgtccatccatcctgcctgccttgctgcgggaggcacagtgctaggtgctgctgatggagtggcttggtaacagacctgccttgaaaacactttgggaacaagatattcaagagaagtaaatg

SEQ ID NO: 3427 - DNA, 6000 bp, Homo sapiens
aagcaaacacatgcttcttcacatggcggcaggagagagaagtgccgagcaaagggggaaaagccccttataaaaccatcagatcttgtgggaactcactatcacaagaacagcagcatgggggtagccacccccatgattcaattgcctcccaccaggtccctcccatgacacgtagggattatgggagctacaatttgagatgaaatttgggtggggacacagccaaaccatatcagacaggttgtggtgctgactgcatgttgactactacactgaaacatgtccctaggtttccaaaccaaaatccagaaccccttatctgattaagatgtgtcagtgatttacattatttgagcactcttggcatgttggagttaattttaaatttattttcaggttagttttattcgacctttggaatttacttggtatacacacacacacatgtgcacacacacacttatctttaaatatgtattttctaagtctcattcatctcccttatgttaaacttcattagccctggcttggcttgtgactattgattatattattatttgaaagaaaatatttgaaatatttgcaactttcctgagattttactttttttaaaaaaaataggtatactattatgtgactagcatccaattaactgtacctcagatattgttagatgggagtaaaaaatacctgtatgtgctacaatgaggctaggatgattaaacagtaaaaacaaacaagcaaaaaacagaaatgcaaaaaattgatgtaatgttgacattgcaaaatagtgaataaatgtttattctgttggtatttttcaaaataatcctttctctttgtaaattggtttgttaactttttctcggattaggagacagagagggtaaacagtttgtttaaacatatggggtatccagaccaactgtaatttgtgtttttatatttggacatttggcactacatttccttctgaatttaataggcattactgaatcacttttcaatcctgagtatggaagtagattatgttccaaaagtttgtgtttaaaattagcctgaaaatagctgaaatgaaaaagatgaaaaataccaagtgttgatgaggatgtagaaaaactggaactcccataccttgctggtgggagtaaattggtacaagcaattttggaaaactccttggtagtatcttctaaaatgagcatatatataccttagatgtgagagccttcattcctaggtatatatgcccccaaaatgcctacataaaccctaaagaaatacctaaagatgtgtactaatacagtgattgtgaaaggaaaataaaattcactatgcaaaggaaaaaaataagctgaaagctggttcatgcaagaagctgcaattcattttgcttctaagcagataggtacagtaaaagttaaatatctccacaggtagctactctatatttaccttatcttagcctctcctgggagatgaatacatgattaactattctcctgtctcctcgttttctcttgtgacatgtggataatcatactctcccttacagcccacttttcctccagccctttctcctccagcccacttttcccctttaacattatctttggagaaaggcacagaccacataatgtttctatgattctgtttatttcttccagtcatatccttcacgttggcaaaagaaaattctaaattggtggagacctgtctcagatactttttggtttacatcatcaaaagtactgttcttgagagcaaggttttccatagtaagattcataaagagagtttctttccccttttccagggtcagggttaattttaggccagttttggccctctcttaccttcgtgggtccttttccctagaaccctgtgttgcctcatagcacgggcttgtgcatctacccagggccacttttctttacaaaactccaacattatctgccacaccactgtccccaaatcaagccccatttcttccaggacagccagatgtgaggtggagcatggggagggcaggggaggcaaatggattgaacagaatcatatgtagatgtgaataacttaaccccctaaaccctccctgagcaatttacatttgtgaaaagggatgtttaccaacccagctgaattattatttggtggaaattgcaagcaatgggaacaggaagatagtgtcagtctaataacagagagatactctctgaaagaaaagatgtttatttgggactgagcattgtaatggaaatacttatgccaaaataaactatagtaaactatgtgcatattcagggaggtaaaggaagacaaaggtttttaaaggaaaaaaaatgaggaggattatataattgttttgaaataattattcttgactacaaagattaataataagggtgatgccagttcaaggtttaatgggaagatgcccttgcagaagcattttgtgtgtgtgtgtgtgtgtgtgtgtgtgtgtgtgtgtgtgtgtgtaaggttgtgatggcctttgtgcaaggttgtggttttcgtagtgttttttgttatctgcgtggccttcccagctctatttgtcagggtttcctaccattagtgattacattttggttctaacagatttcacaatggtcatttgaaataaatgaagcaccagttgacatattggagaaataaacgtaatcattttcccagattaagacatatttatgtaatctgaggctaactagaaggagtgcactagtcaatttttgatgtgtaacaaacaccctcaaaagctccgtggcatacaagaacaaatctatctttttatgctcatgggtttacaggtcagccgagacttggctgatctagactggggtaagctggactccaagcttcagtcaggttcagatttgtttcacgcatcttcattctagggctaaggctgaagtcgcagcagctacctggggcacacacttctcatgctgaggaacacaagagggcaagccgatgtatgcatgcacatttaaagcacttacgttacaattaccaacagcccattggccaagccaatgcacatggctgagccccaagtcaaggggcaggatagtattctcacctaccatgaagttttggcaggggtggaaaagcataattttaatacagcaagtcatgatccaatctatcagaagagatagatagtaacaaatttgagacacacggtgttgatggcaaatggcttcctgtgttggttggctagttggttggttggcttttcccctgaagtcaggcagaattcatattacaacttgcatacataatttgagaaataataaacatgtaaaattactttcaatcataaacttgtatttattcctttgaggaagggaaaagtacttattaaaaatgtccctttctttttcctcgttcagcctcgatgctgattcatatcctactgcccatggttttctgcgtcttgctcatcatggtcatgtgctacttgaaaagtcagtggtaagtgtgtgaggaaggttttatccaagaagagagtaagagaaaagtctggaaagagatttagtaagatagaaatgacattgaataatatgaaacaacgtataaaaaaggaaaagaacaaaggaggctggggtgagagtatgtaatttatttcacaattttgttttccaagtggctatatgaggaaactaatcaccatttaaaatagaccacaaaattttttcaacagcaatagctaatatttatatctctcttactgtatgtttggcaatgttctaagtgctttatcaattaattcatttaatcctcatggggacactataagtaccataattatctccatttagccataagaaattaaagcatggaagaattaagtaacttgcttaataagttacaacgcaaggattagaagccaggaatctgactccagagttcttgctcttaactcgtccactgtactgtgaaattcagtctcattttcgcttttttttctaggatcaaggagacctgttatcctgacatccctgacccttacaagagcagcatcctgtcattaataaaattcaaggtaaatgttggcaaattgtatgtataccatatacctattaaggactaacccagagtgggggctgtcagaatcctactttcctagagctcctcaggaaaatatagcacagtaaaagccatctttgcacccacagccatgaaataggtgattggagctttgatttcttctgtcaggggaaatcttttggttttcaacatcacctccaggttacttgtgaccaggaagaaacatgaagaacattgaagctctaagtgtatttcacatgcttaatatactttgatgcatgcatgcacacacacaaatgtctatatttacatatttttgtttcctttctaggagaaccctcacctaataataatgaatgtcagtgactgtatcccagatgctattgaagttgtaagcaagccagaagggacaaagatacagttcctaggcactaggaagtcactcacagaaaccgagttgactaagcctaactacctttatctccttccaacagaaaagaatcactctggccctggcccctgcatctgttttgagaacttgacctataaccaggcagcttctgactctggctcttgtggccatgttccagtatccccaaaagccccaagtatgctgggactaatgacctcacctgaaaatgtactaaaggcactagaaaaaaactacatgaactccctgggagaaatcccagctggagaaacaagtttgaattatgtgtcccagttggcttcacccatgtttggagacaaggacagtctcccaacaaacccagtagaggcaccacactgttcagagtataaaatgcaaatggcagtctccctgcgtcttgccttgcctcccccgaccgagaatagcagcctctcctcaattacccttttagatccaggtgaacactactgctaaccagcatgccgatttcataccttatgctacacagacattaagaagagcagagctggcaccctgtcatcaccagtggccttggtccttaatcccagtacgatttgcaggtctggtttatataagaccactacagtctggctaggttaaaggccagaggctatggaacttaacactccccattggagcaagcttgccctagagacggcaggatcatgggagcatgcttaccttctgctgtttgttccaggctcacctttagaacaggagacttgagcttgacctaaggatatgcattaaccactctacagactcccactcagtactgtacagggtggctgtggtcctagaagttcagtttttactgaggaaatatttccattaacagcaattattatattgaaggctttaataaaggccacaggagacattactatagcatagattgtcaaatgtaaatttactgagcgtgttttataaaaaactcacaggtgtttgaggccaaaacagattttagacttaccttgaacggataagaatctatagttcactgacacagtaaaattaactctgtgggtgggggcggggggcatagctctaatctaatatataaaatgtgtgatgaatcaacaagatttccacaattcttctgtcaagcttactacagtgaaagaatgggattggcaagtaacttctgacttactgtcagttgtacttctgctccatagacatcagtattctgccatcatttttgatgactacctcagaacataaaaaggaacgtatatcacataattccagtcacagtttttggttcctcttttctttcaagaactatatataaatgacctgttttcacttagcatcctttggactctgcagtaggttgtctgggtcaagataactctcagtcacatttatattcatattatgctaaaatagtaaaatgaaacctcattgttggacataatttagatataactaaaaagttctatgaagtgggaaattccgtgttggctctg

SEQ ID NO: 3428 - DNA, 6000 bp, Homo sapiens
tggtaggctctcactctttgaagcaccattctcagtcacttttttaaatttgatttttatatttgaacttttttggtatcagtgggaacattaatttgttatctggattcttttaattggaataccacaacatgtggcctgggtaaagattttaagtggttttaattgcagaattttgagagtttaaaaaaaaatttgaacactgattagatttagctttgttaattcattatgaatacattataatccttatgcattttcaacagtatttttctattggttataagaaaaataatttttgtttggggtagagtaggtattttttgttcatttaggtaattggtttggtttgtaagagtctttgatgaacatgtttagaaatagggactatttattgtttattatgtgtggttttacataggccatttttcttttctcttcagaattaaaaaacacatctggcctaatgttccagatccttcaaagagtcatattgcccagtggtcacctcacactcctccaagggtaagagaaaatgcttctgagttgtttataatatacagacatgttagtaggtatattgagtatctacagttagtaggtatattgagtatctacaaatgtaccaaaagataagatattcaagctgaatcaaaaagtaaatgaagataaaacagtacataactgaaaattttaatcaaaatttaatatgtatgacatattttaggggttttatcaccatcatagtatatttgttctgatattttaaattgtttagtacacattacagatgtttggttgaacttgcaaactgaaaacttgaggtgctgaaactgctatgtgatggtaactacctcaagcattttgggttgagtattaaaaccaagttcaacagtttatcattttagcactgatgaaatgatctctgggaacctactctaaactctgaattttaaatatgccccaaaggggaactcatttatatttattatcctccggtagtccttaaattttatattaacagattaaaatgtattatgtatttttatattctacaaaatctctgtcattcaggtttgattttccttaatgttttctagttttctgtccagttaatcctaggctgcctagtctaggcatgaaatattaaatactacttgtagaccattagcttatcaaaatgtaacaccaacaatattgatttagactacttagactcattttatagtatctgcattttgggtagttgacagtgacttagtgacataatacaggttatttctgtaccactgagagttactgggaagtttcagagatgcattagctctgtggctttaactaatacttgccatatacaattttttctcttccttagcacaattttaattcaaaagatcaaatgtattcagatggcaatttcactgatgtaagtgttgtggaaatagaagcaaatgacaaaaagccttttccagaagatctgaaatcattggacctgttcaaaaaggaaaaaattaatactgaaggacacagcagtggtattggggggtcttcatgcatgtcatcttctaggccaagcatttctagcagtgatgaaaatgaatcttcacaaaacacttcgagcactgtccagtattctaccgtggtacacagtggctacagacaccaagttccgtcagtccaagtcttctcaagatccgagtctacccagcccttgttagattcagaggagcggccagaagatctacaattagtagatcatgtagatggcggtgatggtattttgcccaggcaacagtacttcaaacagaactgcagtcagcatgaatccagtccagatatttcacattttgaaaggtcaaagcaagtttcatcagtcaatgaggaagattttgttagacttaaacagcagatttcagatcatatttcacaatcctgtggatctgggcaaatgaaaatgtttcaggaagtttctgcagcagatgcttttggtccaggtactgagggacaagtagaaagatttgaaacagttggcatggaggctgcgactgatgaaggcatgcctaaaagttacttaccacagactgtacggcaaggcggctacatgcctcagtgaaggactagtagttcctgctacaacttcagcagtacctataaagtaaagctaaaatgattttatctgtgaattcagattttaaaaagtcttcactctctgaagatgatcatttgcccttaaggacaaaaatgaactgaagtttcacatgagctatttccattccagaatatctgggattctactttaagcactacataaactgactttatcctcagactagctgaatgattttgtgctgtttcaggatgtttgcactgaagaaaaacagaaagcttatctgaaatttataaaactttttgttttgctacatagaaaacagaaggtatttgaataataagcagtgatatgcttagtgagcacagctatactgattttgattagaatagtcatcagagtggcttagggacagttaatataaaagaggagcaaggtgtagaccatcatctacttctgctaaaataacttaaaaagaggtccataggccataactacatgagcccagcttttgtaatctgacaaaaaaatgaggagcagcttcgtgtatatcagtgtacacggtattccttaggtcccttccattggtagtgatgctgcgagttattactggagaaaaggaattctagagctttaacttggcagattaaaagtactcattttttattcatcaataattagtaatctcactagttttcaaaaatttgcatattattgacaacctctttgaagatgcatttcacaaactcaacagagtgccatgataagagctagggatcccccaaactatctcaagcatctaaaaaattgccatttttaaaggcttaaattgtagtagtaaaggggaaaacaggaagtagtagtaaaggggaaaaaaaaccaataaagcatctaaaaaattggcatgttaaaaggcttaaattgctaatgtgtgtatatatatatatatatatacacacacatatcattgacttttcttaagacttcagagtactgggtagatgaacactttatacagtatatatcttcagcttaaatttgttttgagtattttttttatttttaaataagtaggcaaagatttaaatttttttatttttagtaaatgtttgaggcacactaagacaacttgggcaatatttgccaaaacaaaacagaaccccaaaaaatgtacatcttgttcttagcaaatatcattattgtagagacacttaataaagagatggtattttaatgtctgcagttctgaggtagggtggaacttagttctacattgtgatttaggaatttttaaaaccttttttcttcaagggagaagtgacccaggcctcgagtttagtgctaaagccgctagtgtacttatgctgtcccctaaccaccacgtgcgatatggaagcagatgctaaatataggggttttcttagaaagtaagaggaaattagcaagcgttattagtgattgactactgctatcaagtgaattcaaaggaaacaggtttttatgccatatttaagttacagaaaccaggcatgcttagaatagtttctagaggttattggagaatagaaagctaagaaaacttggtatacatttacaatggaaatataattacactttttactctcagaatattgttcacattagacttcctgtttatcttttatattcttgcatttatataatgcctcatcctttcaaagttctttcacatattatatgatcttctttatgaaaaaaatagatgtttcattctgatatattcagtttcccactttaggcaaaagtagattaatagaatgacgaattcaaagtagatgaggaaaatcaggcacagagaagtaaaggtagggatagacccaaatttacacaacaagataatgacatctccagcttttaagttgatcatcaaaggctgggctggatttgtcttgctgtatgtgtcaggaaatttatacctattacattttccattttctcaaaatttaagtcacatgactaatatttagctgcaactttcctcataacaaatagtgtcatgaagaatgttgtagtgtgaagtttgtacatttcagggtcagatatacaatatgaactcttaatctacaggaatgagaatggaggatcattgaaggccatgatataaacaaatttgcatgttgaagcctgtataaaacatggtacagtgagtgaatatacccccatccccaagaacactttatacatattaaatggatatatgattactgtgcaaaaattcattctggaaatgaacatatatttgagcactaatatgtaatgtacacctgccctaaggagaaaataaattataaaactttttacattcaaaattactttcccaagcatgtcttagaataatctatgtgttgatgcatgtaaattgtactttaggtaggcaaagaaatctggttatttatgtaaaaactagtctaataaagttagttagtggctttatcactttaaatctttagtgtccaaaagtggtgtttaaagtaatagcacatcagaaaaccttgtctggacaaaactagttcactcactgcttctgcacctgcagttgctccctttagggttataaaataatgacccaaatgttacatgtgttgatattataacttgtcagttactgatgtctgtggtatcctaccctcatctctgaaagggataatactgaataattattagaaaactataaaacttcacactttgtaccattaaaacctaaaattttaatcttgtccttttttactatggatcagtcggcactcgggaacagcagcaaggaaaaaaagcaaatttcattcacatgttctgtgttcatacctcttctctacctaattgttcatttaaatttcagccttattccttgataagggattttaccacatgaagtcatccagtgaccctagctcttattgtgaagttagtggagtatacttagaaatgttacaactttaaaatgttacaaaacattcattaaagctcatatttaaagtagagcatctagtttgagaaatagaaatcaattattaaagatgtcttttttctacccatttaactagttaaaaccatgacatgtaaatgtagaagtagaataatcatagaattccctaaaatatttctgtttactaacatatattgaccaagtacatcaagcaggagagatcttccttcattctgttatagtccacatcattctaattttgctcagttgttattaagagcatattcctaaaccatacacttttgtttcaataaagttttattttgttgagatgaataaaataacaaagttataagctgcataagacaaaagttcaattgttcaaaaaaaatttactgggatagctttctattacaggtattgttagattatattgtgctgataagattactttctaaaaaatttgtacttttctgtaaattaaaagaatatggagtcataaaatggcaagtgttttaggattagcctaaaattggacattgtcattgatttcaaagaaggtatgaactagcagtcttacagcctaattcttctttggactggtccttggcagcagttccttttcagactcgataaacagaattcagatgatgtaagtcaaaacaaaactttacaaagccaagcgtattatcttttgcattaacctatttttttccatcatacatgctactagtatgtgcattagcatgatattctcatatacattgcattaaaaattaaaaggtggcagctcagggtgagctcttctgttgctcatttgttcctaaatttttaagggctttttctcagtcaatagtttgtacaaactggttagtttaacttcattacccatttcattaaagttgatgggtcgtgtgatgagatgcattta

SEQ ID NO: 3429 - DNA, 6000 bp, Homo sapiens
atttattagtagctttttggatccttaggattttctagatacacaatcatgcttcttgggagtaattatagttgttctaatctttatgcttttagttctttttattgtcttaatgcactggctaagacctctagtacatatagtacatctagaccatataagagcattgctttgttcctaattttagaggtgaaagtatttagtctttcaccatcacatgtgatgttagctgtaggttgaagtttttgctttgtggggtttttttgttttgagactgagttctactcttgttgcccaggctggagtgcagtggcacaatcttggctcactgcaacccccaccttctgggttcaagcaattctcctgcctcagccacccgagtagctgggattacaggcatgcaccaccatgcctggctaatttttttgtatttttagtttagtagagatgggggtttcaccatgttggccaggctggtcttgaactcctgacctcaggtaatccacccacctcagcctcccaaagtgttgggattacaggtgtgagccaccgcgcccagccgctttgtgtttttttttcccctttactactacttgcaggggggaagttcttatttctgttttgccttgctagcaatttttatcatgaatgggtgtcacaatttggtcaaatgctttttctgaatctattgagatgatcatatggtttttctccttccttccatgaatatggtgcattttattgatttttcatataacatctttgcattccttggattttgctgcattcagtttaatactgtttgcatctgtgttcatgagtgaagttagtctgtctttatgtgccttatctgtctggttttaaaatcaggataatactggcctcataaaatgaatgggaacatgttacctcctctgttttctgaaagagtttgtatagtattaatacaattgtttccttttgcccagagttttgtgggaaggtttttaattaaaaattcaatttctttataaatatagctttctttttcttcaatctgttttggtaatttgtgtctttcaaggattcattcattggtttgtctaggttgtcagctttactactttttatattacttccaaatgttataggtatttcctacaggagagtcagtctggtaggctctcactctttgaagcaccattctcagtcacttttttaaatttgatttttatatttgaacttttttggtatcagtgggaacattaatttgttatctggattcttttaattggaataccacaacatgtggcctgggtaaagattttaagtggttttaattgcagaattttgagagtttaaaaaaaaatttgaacactgattagatttagctttgttaattcattatgaatacattataatccttatgcattttcaacagtatttttctattggttataagaaaaataatttttgtttggggtagagtaggtattttttgttcatttaggtaattggtttggtttgtaagagtctttgatgaacatgtttagaaatagggactatttattgtttattatgtgtggttttacataggccatttttcttttctcttcagaattaaaaaacacatctggcctaatgttccagatccttcaaagagtcatattgcccagtggtcacctcacactcctccaagggtaagagaaaatgcttctgagttgtttataatatacagacatgttagtaggtatattgagtatctacagttagtaggtatattgagtatctacaaatgtaccaaaagataagatattcaagctgaatcaaaaagtaaatgaagataaaacagtacataactgaaaattttaatcaaaatttaatatgtatgacatattttaggggttttatcaccatcatagtatatttgttctgatattttaaattgtttagtacacattacagatgtttggttgaacttgcaaactgaaaacttgaggtgctgaaactgctatgtgatggtaactacctcaagcattttgggttgagtattaaaaccaagttcaacagtttatcattttagcactgatgaaatgatctctgggaacctactctaaactctgaattttaaatatgccccaaaggggaactcatttatatttattatcctccggtagtccttaaattttatattaacagattaaaatgtattatgtatttttatattctacaaaatctctgtcattcaggtttgattttccttaatgttttctagttttctgtccagttaatcctaggctgcctagtctaggcatgaaatattaaatactacttgtagaccattagcttatcaaaatgtaacaccaacaatattgatttagactacttagactcattttatagtatctgcattttgggtagttgacagtgacttagtgacataatacaggttatttctgtaccactgagagttactgggaagtttcagagatgcattagctctgtggctttaactaatacttgccatatacaattttttctcttccttagcacaattttaattcaaaagatcaaatgtattcagatggcaatttcactgatgtaagtgttgtggaaatagaagcaaatgacaaaaagccttttccagaagatctgaaatcattggacctgttcaaaaaggaaaaaattaatactgaaggacacagcagtggtattggggggtcttcatgcatgtcatcttctaggccaagcatttctagcagtgatgaaaatgaatcttcacaaaacacttcgagcactgtccagtattctaccgtggtacacagtggctacagacaccaagttccgtcagtccaagtcttctcaagatccgagtctacccagcccttgttagattcagaggagcggccagaagatctacaattagtagatcatgtagatggcggtgatggtattttgcccaggcaacagtacttcaaacagaactgcagtcagcatgaatccagtccagatatttcacattttgaaaggtcaaagcaagtttcatcagtcaatgaggaagattttgttagacttaaacagcagatttcagatcatatttcacaatcctgtggatctgggcaaatgaaaatgtttcaggaagtttctgcagcagatgcttttggtccaggtactgagggacaagtagaaagatttgaaacagttggcatggaggctgcgactgatgaaggcatgcctaaaagttacttaccacagactgtacggcaaggcggctacatgcctcagtgaaggactagtagttcctgctacaacttcagcagtacctataaagtaaagctaaaatgattttatctgtgaattcagattttaaaaagtcttcactctctgaagatgatcatttgcccttaaggacaaaaatgaactgaagtttcacatgagctatttccattccagaatatctgggattctactttaagcactacataaactgactttatcctcagactagctgaatgattttgtgctgtttcaggatgtttgcactgaagaaaaacagaaagcttatctgaaatttataaaactttttgttttgctacatagaaaacagaaggtatttgaataataagcagtgatatgcttagtgagcacagctatactgattttgattagaatagtcatcagagtggcttagggacagttaatataaaagaggagcaaggtgtagaccatcatctacttctgctaaaataacttaaaaagaggtccataggccataactacatgagcccagcttttgtaatctgacaaaaaaatgaggagcagcttcgtgtatatcagtgtacacggtattccttaggtcccttccattggtagtgatgctgcgagttattactggagaaaaggaattctagagctttaacttggcagattaaaagtactcattttttattcatcaataattagtaatctcactagttttcaaaaatttgcatattattgacaacctctttgaagatgcatttcacaaactcaacagagtgccatgataagagctagggatcccccaaactatctcaagcatctaaaaaattgccatttttaaaggcttaaattgtagtagtaaaggggaaaacaggaagtagtagtaaaggggaaaaaaaaccaataaagcatctaaaaaattggcatgttaaaaggcttaaattgctaatgtgtgtatatatatatatatatatacacacacatatcattgacttttcttaagacttcagagtactgggtagatgaacactttatacagtatatatcttcagcttaaatttgttttgagtattttttttatttttaaataagtaggcaaagatttaaatttttttatttttagtaaatgtttgaggcacactaagacaacttgggcaatatttgccaaaacaaaacagaaccccaaaaaatgtacatcttgttcttagcaaatatcattattgtagagacacttaataaagagatggtattttaatgtctgcagttctgaggtagggtggaacttagttctacattgtgatttaggaatttttaaaaccttttttcttcaagggagaagtgacccaggcctcgagtttagtgctaaagccgctagtgtacttatgctgtcccctaaccaccacgtgcgatatggaagcagatgctaaatataggggttttcttagaaagtaagaggaaattagcaagcgttattagtgattgactactgctatcaagtgaattcaaaggaaacaggtttttatgccatatttaagttacagaaaccaggcatgcttagaatagtttctagaggttattggagaatagaaagctaagaaaacttggtatacatttacaatggaaatataattacactttttactctcagaatattgttcacattagacttcctgtttatcttttatattcttgcatttatataatgcctcatcctttcaaagttctttcacatattatatgatcttctttatgaaaaaaatagatgtttcattctgatatattcagtttcccactttaggcaaaagtagattaatagaatgacgaattcaaagtagatgaggaaaatcaggcacagagaagtaaaggtagggatagacccaaatttacacaacaagataatgacatctccagcttttaagttgatcatcaaaggctgggctggatttgtcttgctgtatgtgtcaggaaatttatacctattacattttccattttctcaaaatttaagtcacatgactaatatttagctgcaactttcctcataacaaatagtgtcatgaagaatgttgtagtgtgaagtttgtacatttcagggtcagatatacaatatgaactcttaatctacaggaatgagaatggaggatcattgaaggccatgatataaacaaatttgcatgttgaagcctgtataaaacatggtacagtgagtgaatatacccccatccccaagaacactttatacatattaaatggatatatgattactgtgcaaaaattcattctggaaatgaacatatatttgagcactaatatgtaatgtacacctgccctaaggagaaaataaattataaaactttttacattcaaaattactttcccaagcatgtcttagaataatctatgtgttgatgcatgtaaattgtactttaggtaggcaaagaaatctggttatttatgtaaaaactagtctaataaagttagttagtggctttatcactttaaatctttagtgtccaaaagtggtgtttaaagtaatagcacatcagaaaaccttgtctggacaaaactagttcactcactgcttctgcacctgcagttgctccctttagggttataaaataatgacccaaatgttacatgtgttgatattataacttgtcagttactgatgtctgtggtatcctaccctcatctctgaaagggataatactgaataattattagaaaactataaaacttcacactttgtaccattaaaac

SEQ ID NO: 3430 - DNA, 6000 bp, Homo sapiens
ttttggggtactggtcattttctgtttctttttttttttaagacagagtctcactttgtcaccaggctggagtgcagtggcgtgatctcagctcactgcaacctctgcctcccgggttcaagcgattctcatatctcaacctcccgagtggctgagactacaggcgtgtgccaccacgcctggctaatttttgtatttttagtagagactgggtttcaccacgttggccaggatagtctcaaacttttgaccttgtgacctacccgctttagcctctggcctcccaaagtgctgggattacaggtatgagccaccgcacccagactattttctatttctttcttttttttttctttttgagaccaagtcttgctctgtcacccaggctggagtgtagtggctcactatacaaccttggctcactacaatcttggctcactacaacctccgcctcctaggttcaagccattctcctgcctcagcctccccagtagctgggattacaggaatgcaccaccaagcccagctaatttttgtatttttagtagagatgaggtttcaccacgttggccaggctggtctcgaactcctgacctcgtgatctgcccgccttggcctccggaagtgctgggattactggtgtgagccaccgtgccaggccttctgtttcttgatatagatgataaacatgaatgtgttcattttgtcaaaaattttcaggctgtactcttatggtatgttgatttttctgaatatacattcttcaaaacattttttgaaatagcagtcataatggttttgagttttgttgctatgaaatgaatttctcttgtcttctagtttggaaatttaagttcatttttcattctcacctcattttgttaagtgaatttcaatgtagcttaacattcttcatttttagacatttaattatttttaattttggtgaattaggtgctatcaggttacaaaggttttaacacaggcagagaggctgtcctcaactcaccactgagttaatatctaatttttaaacatttcaaagtcatttagtgttaataatgaaaaatataaaactaggggactagacttaaagtagtaccaagaacagaggaggagaaattaaccttttaaaagtaaaggggcctttcttcctctgagtggggaaaagagaaagaggataaatatctatttgcttcctaagttggagaaaagtcaaggatgctcacaaatgatggtcttgattttaagggagtaaaacaaggttctgtactaagaataaatgttacggtggggctgatagctcaaggaaaaaggaaatagttaggaaatagcctgataaggtaaacatagctgaaggtcaagggaactgaagagaatagtgcagttaaaatggttgataaaagggttcttggggggcggtggctcacccctgtaatcccatcacttttaggagttgagatcagcctggccaacttggtgaaaccccgtctgtactaaaagtacaaaaaattagccaggcatggtggtgagcacctgtaatctcagctacttgggaggctgaggcaggagaatcacttgaaccagggaggcggaggttgcggtgagccaagatcgtgccattgcaccccagcctggacaacaacagcaaaactccgtctcaaaaaaaaaaagggggttcttactggtaagtaagataaaaaatgataggaaacagctgataaactatgagaagaaagactggctgtcaggctgtcacattgaggacaaattacagattcaatgggaatgaccacagaatagagatagatgggggtaggtggctgtaggtacagagagggaaactcacaatccagcattttggaggggaagtaatttcattgatgactaggttgaaggtgtggctccatctgtgggttgctgatacagagtgaagttgaagatgattggaaaagaaaacgatgagaaattgtgaggtcagagtgctaatgagtcatgaacatggatgctgaaatcattaaggtgatacagaacatgaggataattccagggctgacacagaatttcagaaacataactgggcacagacaaggaagtaaagggatatcctagtcagcaccagatttagggaattagaaatgcaggcaaagtttgtctttgacatttatcacctttgttccatggcacaatttcctaagctttgctcacttactcccaagtaattgtaattttggtgccttcatgttactttctcactgtacagtttcctcaatctctttttttttttttttttttttttgagaaggagttttgctctgtcacccaggctggagtgcagtggcaggatctcagctcactgcaacctctgcctcctgggttcaagtgattctcgtgcctcagcctcccaagtaactgggattacaggcacccaccaccatgcctggctaatctttgtatttttaatagagttggggtttcaccaggctggtcttgaattcctggcctcaagtgatccgcctgcctcagcctcccaaaatgctgggattacaggtgtgagccactgcacccggcctgctcttgacatatctaaaatctcaaatggtcacaggacacaaatggagagttctccattaatatactactttcccctacttacctttgcattttgacaaggctttctagtaacaaatccttaatctgaaattcgtaatttcaaggccaatactctacagaggtatctgcaaagtcatgtaattccagcacagcagaggtcttccgtcctgttgctctgaaaaatacttctccaatattgattcatccttttggcctcagactttaactactcccataaaatgtgagtttcttgggagcaggacctgagctgagccaataaaaagacacccataaaagcactaactcagtcatttgttttcctaatggtgccaaggcaggctggtgtgttgtgacatatcaatccacttctgtgtacctgcccttccccgtccagcaaaatatcatcatttttaatatatgttgtgatactaaaatatttcagaagtgttgaccgagtagacattcaataatgattatagctgatacttacagagcacctactatgtgccaaacactgtatgtattttaactcatttaatccttgcaacaatcctgttaggttggtattgttattctcattttgcagatgaagaaatttgaaaagacttgcccaaggtcacagagatgagaaatagaggcatcagcatttaaacctaggcaatctagaaccagagggtacatttaaccactatacatctcccctaaatacatctttgcatcacacctgttatctcagcactttgggaggccactaaggccggaggatcgtttgttgccagcagttcaagaccagccgggtcagcataccaaaatcttgtctctccaaaaattttaaaaattggccaggtattgtaggggcacctgtagtctgagatacttgggaggttgaggtgggaggatcgctagagcccaggaatttgaacgtgcggtgagcatgatccagccactgcactccagcctgggtgacagagtgagactgtgaacaacaacaaaaaaatcaagtttcctggatctatacaaaattttcaatttaacaaatttttataaaaatttgttttaaaataaacacccctctaaatggcaaagctagaacagaatctggtcacaatctataggttagatataggatgacagggaggagcaagagctgaacacatcagctgcagcaccatctactttgcctgcgactccgttagcaggcccactttgcccttttataaattatctgatcaacaactaagagattaaaattcgatctatgttttactctatctgaatcctcaatataatgaagaactttataattgttaatttatggatataatttaagttcattaaaccattatttccttcctatatcctctcattcttccacaaaaacctctacctttgggtgtttacttttacagacacccacgcacacaccccacacgcacgcacgcacatgccttatcttttaactcaagattctcatcttcctttggggagaaacaaacatcatgagccttgaggtccattttctgagggaaaggggggggcggaggcgggatgaataggtttttacccggtattttttatcataaacggggaggtacaaaccgcaaagaaacactagtcgcttggtgggccaccacctctggggctcactgatcaatcgcacccaaactcatttactaatttaaaaaagtactgtggcaaggctcgtttacgtaagtcttggagagaagccgccgccacaatctgccgcagtctcgtgcggagtcacggccaccgagctcttcactttccccaagaggctcccacgccttccccatccccaagggagctaggcggtccctcgcggctctgagtccctcggggaaggccgcgaagagaggccgcaggcgccctggcgagaagggagggcgggggcagcgggcggcgggcagcacccgggctccagttcatgaccccgttattccacagaaaaatggaacattccgctctttccgcccacagaggggaggtggggggaacccttcgatctagtctgggagaggcgacgcggacgcagccaccggaatccgggacgcgaagagccgcgttacgggaatcgctacccctcggagtcccgccccctcgtcgacaggcggccactggaccaatgcctgggcgcaaagggtctctcaggggccaatcagcgcctaggtcccggtagggggcggggcgcagcgttggccggccgggggcgcagctgggcgggattggggagcgccccgccccgccgcgggactggggtggcgcgctacctctgcggagaaggatctgacagtgttccggagccggggcgagcagccaaaaggcccgcggagtcgcgctgggccgccccggcgcagctgaaccgggggccgcgcctgccaggccgacgggtctggcccagcctggcgccaaggggttcgtgcgctgtggagacgcggagggtcgaggcggcgcggcctgaggtgaggaggggccgggtgctgggtcgcgtagctggagttagagtgtcggtggtttcggacgggctatctggcactcgaggagacctcccttccccctgagagcagcgcccggaacttgtcagcccagcctggaaatccccacattccttccccttcctgctcccggacctccgaattctacttccacaactttgtcacctcgattatcgcagccctgagtacaaacttcacccaggcgcacgcacgcacccctcttaacgcccgccccgcagaacgcccttcaagaacaaacccccctttttgttaccagatcccacgtttttcccaatccccttttcatctcccctgaaattctattcgctccgcacttgtcttcattctcgaggtggatttcccttccccaaagccgttttttcatcttgaaatcgtaacgtttcagctttgttgaaagttcacaatgcttataaacactattaacgtttctttccttcttttgatcttttctattaataattatcattcctaacgaattccacatctcactgtatcccaaggagaacaaatcagtttttaaaattttacctcctccgacctaaacttttgaagatagtgcaggaagcaagggtctgttcttcagtggatgaacagcattttatttcataatccgaaactgaaaaaaaaaaaaaatcacaggttaaaaataagacgtcaccttttttttttttttttttttttgccttcagaaggaaacgcattttggcttagtttgtgaagtatttcaacaattatactgccttaaaataactagttattagaatgccagggtgaattttctgaaagattgtggtatttgcttttgacagtgctgtaaacaaaccctttaaactgtgtatgactgccagcttca

SEQ ID NO: 3431 - DNA, 6000 bp, Homo sapiens
ctatatatatcacaagtgtttctgaagcctttcacattgttgaccatccctggttcttgaatttctcctatatcctggtttctatgtaaccagataatgtagttgaattctttcctttatcctctttcttgtctcctttactgaattctctgctagcttttatctccaggctatgaaggtacccaaagataaagtactgggcatcgacttttctttttaaataccaacttctttgaagacatgacttcaactactaccttcaaacaaaataatttcaagaattttggcttggatctttcttttaattccagttacatttcatcttcttagatattctgtctctgagtcttatcaatttaagaggtctaaaaacaatacaccataggtacatgctcatgaacacatatacacataaatgcccacccactttttttgtttattatactttaagttctagggtacatgtgcacaacatgcaggttacatatgatacatgtgccatgttggtgtgctgcacccgttaactagtcatttacattaggtatatctcctaatgctatccctcccccctccccctaccccatgacaggccctggtgtgtgatgttctccaccctgtgtccaagcgttctcattgttcaattctcacctatgagtgagaacatgcggtgtttggttttctgtccttgcaacagtttgctcagaatgatggtttctagcttcatccatgtccctacaaaggacatgaactcatccttttttacggctgcatagtattccatggtgtatatgtgccacattttcttaatccagtctatcattgatggacatttgaattggttccaagtctttgctattgtgaatagtgctgcaataaacatacgtgtgcatgtatgtctttatagcagcatgatttataatcctttgggtatatgcccagtaatgggatgaatgcccacacactttttaaaaagtcacaaggacttaccatttttccctatctacaaacaactcatcctcttcaactgcctaagtcaatggagtccatcgtttctctcatctatgcagtacattttagcttttctcagttacaaatcttatcctgtcttctctcccataatatctttcccacccatctcttctttttactctctaccacaaactaacctaatttggacattgatcacctcaataatttcaactgtgttcctgcttccagtctctttcctccccaccaagcattctgaacattgttggtggatcactctctctacaacacaactttaaacctgtcattcttctcctcaacagctttttaaagggtgaataataatgccaaatattctaactatttaagaacctaaaattttggctttgatgtgcctatccaatctatcttttccaatactcaagtttctctattctaaaaaaaaaaaaaaatcctttcctcagactcctccctcaagctaccttactactatacttctagagagaactgcttgcaattgcaagcaatctggcttttttactccaataatgctgaaattattcttgtagtttccaaactgcaaagcaaatacttaagctcctcattttgcttgaccacaccatgccatttataattcggtcttatctttcatcactccctactaaccatccctgtagactcagcaaaccactagacttcctctaacataccttgttctttcagtctgtgcttctacatatattattccaatgtctttcctgactctgctgtgcactacaaactgcttttgaagtatcatctcttatatggaatttccccccacttcaaacatctttgctgtcagtgtactcttacatcattccctaacaggactcagaacactgcacagtaattgtttcacatatcttgatatcctcagaatctaccatagtttgaggcacctggtggacaattaagggtgggtttttatagactttctggtatgatcttattttctatctactcgctgtcgctcaagcgtactgtatggagacgcaggatgtatcatggttaagaggtcagattctgaagccaggctgtctatgtatgacctttagatctaccacttagctgggcaaattaattaaccttcttgtgcctgggtttccctatgtgtaaaaagaggattttatcctattattattagacctacttcataatattatgaagattaaatgccttaatatgggcaaagtgctcaaaacagcaactggcacaacataagcactaaatatattgcctgttttaattaatagaccttagttactgctgatcctttccacaagctagtcctatattatgttctatattctccattctacattttgtcctccattcgctattattaatgggctgtcttcatttttccctttatccaaatcctacccaggtttcaaggccaacttctggtaaatcctttgctcattccaatccttaaatgctcactccaatccttaaacgatcattccctaattttaatatctacaggattttctgcatcactctgcatttaattaaaactgctttgcatccttgtagtttttttcgtataagtttgtcaatccaattattataaactctttgaaggtcctgattacatctcctgcacctttgtgagttcgtacagcaggtagtaattgcttagtatttgctgtgtaaaataataaagcacaataggaacctcaactctgatcattctgcctttgcaatcaaagaaacggagaagctgtgagaacattccatgcttctctaggagccaagctgcaaatgtattagggccagagaattctgactcccattaaaatgagcagctctgaaaggagggagcggggaatccctccctgccactgtagaggatttatgggttgcccttaagttcccaaaccaaattgtggcactggggtttttatgagaaacgtgtcaacatgacaaaatgattcagagcacaggatttggagtcacacagatctagttttcagcgagactcctgtttccttctctataaaggggacattttaacacctacttcacatgtatttaactttcgccctaacactgaactgaagtgcaaagccttggaaacaaatttaaataaattgaaaatactgcaattcacaaataagagtgagaacaacatttttagttacgtaagactatattatattaaattaggtggcagcagtatttataataatctaaattgcctgtgagaaaattaaactggtattgtcaatacatacttaaaataagaaaaaaatcccactacagtctgtcctttttgacactttctccttcctgtaatttttttctttcactcaagattaaaaacaaacgttcaagattatccctaaagagaaatagttggaaagcacaatttaatagcaagttggttctataaatgtaatatttcagttcatagttcaaaaatacttccaaataggaattaacatgaatttaagaaattaacataatggcacacagctaaactgatgatctgagtccgtaatttcaaattaagagttgttccaacttgaagctggcagtcatacacagtttaaagggtttgtttacagcactgtcaaaagcaaataccacaatctttcagaaaattcaccctggcattctaataactagttattttaaggcagtataattgttgaaatacttcacaaactaagccaaaatgcgtttccttctgaaggcaaaaaaaaaaaaaaaaaaaaaaggtgacgtcttatttttaacctgtgattttttttttttttcagtttcggattatgaaataaaatgctgttcatccactgaagaacagacccttgcttcctgcactatcttcaaaagtttaggtcggaggaggtaaaattttaaaaactgatttgttctccttgggatacagtgagatgtggaattcgttaggaatgataattattaatagaaaagatcaaaagaaggaaagaaacgttaatagtgtttataagcattgtgaactttcaacaaagctgaaacgttacgatttcaagatgaaaaaacggctttggggaagggaaatccacctcgagaatgaagacaagtgcggagcgaatagaatttcaggggagatgaaaaggggattgggaaaaacgtgggatctggtaacaaaaaggggggtttgttcttgaagggcgttctgcggggcgggcgttaagaggggtgcgtgcgtgcgcctgggtgaagtttgtactcagggctgcgataatcgaggtgacaaagttgtggaagtagaattcggaggtccgggagcaggaaggggaaggaatgtggggatttccaggctgggctgacaagttccgggcgctgctctcagggggaagggaggtctcctcgagtgccagatagcccgtccgaaaccaccgacactctaactccagctacgcgacccagcacccggcccctcctcacctcaggccgcgccgcctcgaccctccgcgtctccacagcgcacgaaccccttggcgccaggctgggccagacccgtcggcctggcaggcgcggcccccggttcagctgcgccggggcggcccagcgcgactccgcgggccttttggctgctcgccccggctccggaacactgtcagatccttctccgcagaggtagcgcgccaccccagtcccgcggcggggcggggcgctccccaatcccgcccagctgcgcccccggccggccaacgctgcgccccgccccctaccgggacctaggcgctgattggcccctgagagaccctttgcgcccaggcattggtccagtggccgcctgtcgacgagggggcgggactccgaggggtagcgattcccgtaacgcggctcttcgcgtcccggattccggtggctgcgtccgcgtcgcctctcccagactagatcgaagggttccccccacctcccctctgtgggcggaaagagcggaatgttccatttttctgtggaataacggggtcatgaactggagcccgggtgctgcccgccgcccgctgcccccgccctcccttctcgccagggcgcctgcggcctctcttcgcggccttccccgagggactcagagccgcgagggaccgcctagctcccttggggatggggaaggcgtgggagcctcttggggaaagtgaagagctcggtggccgtgactccgcacgagactgcggcagattgtggcggcggcttctctccaagacttacgtaaacgagccttgccacagtacttttttaaattagtaaatgagtttgggtgcgattgatcagtgagccccagaggtggtggcccaccaagcgactagtgtttctttgcggtttgtacctccccgtttatgataaaaaataccgggtaaaaacctattcatcccgcctccgcccccccctttccctcagaaaatggacctcaaggctcatgatgtttgtttctccccaaaggaagatgagaatcttgagttaaaagataaggcatgtgcgtgcgtgcgtgtggggtgtgtgcgtgggtgtctgtaaaagtaaacacccaaaggtagaggtttttgtggaagaatgagaggatataggaaggaaataatggtttaatgaacttaaattatatccataaattaacaattataaagttcttcattatattgaggattcagatagagtaaaacatagatcgaattttaatctcttagttgttgatcagataatttataaaagggcaaagtgggcctgctaacggagtcgcaggcaaagtagatggtgctgcagctgatgtgttcagctcttgctcctccctgtcatcctatatctaacctatagattgtgaccagattctgttctagctttgccatttagaggggtgtttattttaaaacaaatttttataaaaatttgttaaattgaaaattttgtatagatccaggaaacttgatttttttgttgttgttcacagtctcactctgtcacccaggctggagtgcagtg

SEQ ID NO: 3432 - DNA, 6000 bp, Homo sapiens
gcaaaggatatgaacagacacttctcaaaagaagacatttatgcagccaacagacacatgaaaaaatgctcatcatcactggccatcagagaaatgcaaatcaaaaccacaatgagataccatctcacaccagttagaatggcgatcattaaaaaatcaggaaacaacaggtgctggagaggatgtggagaaataggaacacttttacactgttggtgggactgtaaactagttcaaccattgtggaagtcagtgtggcgattcttcagggatctagaactagaaataccatttgacccagccatcccattactgggtatatacccaaaggagtataaatatgctgctgtaaagacacatgcacacgtatgtttattgcagcactattcacaatagcaaagacttggaaccaacccaaatgtccaacaatgatagactggattaagaaaatgtggcacatatacgccatggaatactatgccgccataaaaaatgatgagttcatgtcctttgtttggacatggatgaagctggaaaccatctttctcagcaaactatcgcaaggacaaagcagcaaacaccgcatgttcccactcataggtgagaattgaacaatgagaacacatggacacgtgaaggggaacatcacacactggggactgttgtggggtgggggagaggggagggattgcattaggagatatacctaatgctaaatgacgagttaatgggtggagcacaccaacatggcacaggtatacatatgtaagaaacctgcacgttgtgcacatgtaccctaaaacttaaagtataataataataaaaaaagtaaaatattttccaacaccttacttgaagaagaaagtataatcaattatccttagatcttatatcctgtttctcaaccagcaaaggagagataactatcagattgcatatctttctgaatgaggtatttgacttataatttaatgtttggtaattttaatgatttcttagtaaaagtatggtcaaattatgagacagcaaataagtgttcatgtccaaagtagtgattattgaaatgtcatgtatttacaaagaagtctggactggaagtcacatgaactgtatgttagttctgtctctgtttgtaattagtgtgatgctatgtgagtcattactcatctttgggtctttatttctttatctgcaaattaagaaagaagaacaaaatgatatttaggttcctttgaagatcttctagtcaatgtctctcattctacatttataattagatgatctttttaaacatatttaggggtacaatatactttcccagagaatatcattgatctgattactctttcctataactccttaaagcatttactggtaagagtggacaagcagttaatcaggcactgttctgccactcatgttttttattattgttatgttacctatttatctatctggtctccagaattagtttgtagtccccttaaggatgaagatggtgtcttgtctttttgaccctcctcatttgaaattataatagataaccctaactataatgaaaatagttgatacacttaaaatttgattatattaataaattgcaatatactctcaaaatagttgtctttttccaatatttgtaacagcactggatgactcttgggctttaggcaggttatttcacttttctgggatctaattttgtactcagaaaatggaagaattgagctacattatctgtaagatcccttcttagtgtactagtctttttaaaatgctatggaagggccacgtgaggtggctcatgcctgtaatcctggcactttgggaggctgaggagggaggatcacttgtggccaggagtttgagaccagcgtggccaaagtagtgaaaacccgtttgtaacagaatttgtgactttcaactgggcacatgtccaatcagaataaagatgacatttttcagcctcctttgtaaaaggtatggtcataagattaagttctaggaactggaatataagagctgtggtgtacataaagtgatgaagaaatgcccttcacctttcgtccttcctgctagctggaatgtggatgtaagagttggagctcaagcagccatttaatgaccttaggaatgaaattcatggatggtggcctgatttcaagcaaagctacagtgctcctgctctgattttagctagtcatcttcagtccacttttcttggtttatctgactcctgactagattttttttcctctttgcacaccttaaattctcaactaagacactatgaacaggacaaaattaagttccccccaatgttttttaaaaactccagctttaggacaaaattaagttccccccaatgttttttaaaaactccagctttaaactaaactttcatgggttcttccacaaataaaagacatactaaaaaatccgaagatatatataattttagtgaaatgttgagaagggataaacttctcaaagaacagtaattttgcaagataaatatttataaggtttaaatatgttctatatcagactgaattctgagaatttcagaaagtgatgatagtacaatatacataagaagttgttctgaagaaaggcaggctctaagtagctaagcaaatattattaaatgccaaacaattctatacatttaaatgtcaggattattttgttggcatttctcttgaaaacaatttttaaagagatgcatctttagatacatcttaattttaaaaattgcagaagtcatacttctaataagttgctactgtgatacgtattggtattggattttcttttaactttccattttgttattagctaatttacacgaaacttctctaagcatcacactactctcaactatgaggtttatgtttttaaatatatgccttttctattttttttttttttcagatgggggtgtctcactatgttgcctaggctggcctcgaatttctaggttcaaatgatcctcccaactcagcctttagggtaactataactgcaggcacgctccaccacacctggcttaaatgtattttctgaatagttataaaaactacttacctaggtgatatcgcattacattctcactaattgcaagattagaagacagattatagagttgttaaataatacaatcaactaaaattaatggaaatattgaatatggtaggttcccaatattagactgttgcattattgagtccataccgtgacatttttgaggtttgcacctttgaaaaagtgttacacatagattcttttaagacaatgtttctcaaattatggcaagggaaccacttgcatcagaattgctggagtgtttatttaaaatgctaatttccagacctctcaaaagatctagtgaatcaatctctacctgtggcttaaaaattttaactttaacctccgtctcaacagattttcaagtacgtttaagtttcagaacctctgttctactgctgcaatgaagtttaaagctgattcaagttattccttccatacctccatgccaatatcacaatcattcctttttcactctgcctccgttataattttgacttcatgacaaggcagggctgatttgctggatgatcaacgtttacttttaagtagagagggctgtctctagatagttacagaggacatggatagtcatacctatcagtcaactgacaggaaaaggataagtctaacaaaagtacagttcctagatttcaaaaccatttttttgaactaatctgggaggagtatagttgtaatataaggaatgactttgtgttaaagaaaggacaggataacttaatagaggtctcccatctcattctgtcacggtgcttttgggttccggtgatgaatgtgttcattttatgtggcttgctctgggtaaataacccagtgccctatcagctctgcagcccgcggccagcggcagtgtgtgcgcgctaatgacggcggaaggtgcctgggggagggcctggggaggggctggccagcgctatcgcgcccctggcacttcctaagagactgagccctttctctgcagctgcagcttggattccacgctttccctccagaggaaagaagccctccatctaaatcagctgtcttctccacatccctcctttttctctccgccagacgccacccctaccccttctattgtgttgtgccttttcattttagccccgcttcctacgtagagccctaacctcctttgtagcgagggcacttgagaatttctgaacctcgagttgtaatggagctgtatggaaaggtaagcaggcgaaaggagttccttggggtgcttagccagaaatctcgctttcacgcacttcggtgtgcgggttgtgtgtgtgactatgtacgcgcgcgcgacttctcagtgcaattatgcggataaaccactttccttatgtgtgtaccgttaatcgtctttctcccctacgtttggtgaatgagattgtaaaactgccccactctgcctaaggaaacgtagaaactttcccgattcggatggggaggggtagggcggagagtcccagagaccagctctggcttcgtttgcattggaaattagcacaaggtagtgttgtttcctaatcagaaaatcaccatctacttccgaaggcgatagttagcaaagaaaaatctccagctgagataagctggggtcacattcgcctgcccctggcgaggaaaagagcaggggagactgggagaggtaacccaggagcgtttggaaaggagtagggaggctccgcggccgagcccgactggcggatcgagcctgtttaatggtttgcttgcttgccgggagttgtagttcaccgctcgcccgtttgccgggaacacccggagggcgagactacagctcccaggagtgcacggggctcctcggcagtacgcgtgtgcggcgccaggagaggacagctccagtgctgatgttggagccggttagcgaaccccaagagtgcagagtgtggagcgtggagcgccgggactgtgcacgcttgaccggaagcccagaccagtgcggtcctagccagagagaaaggacatttgccaacaatgagacacgaagcgcccatgcaggtgggtccataaagaaagagtggcctcgggaggaattgaaagagatgcttttccccttgctccgcgcacaagcagttcaacgtaaggaaaggtctaggcggtcacccgcggagatgcggctctgtgacatgaccctgggaacagagttgggtttctttacgctctgtgtggctgtgattggggctgtcttgatgagggatcgggctattcgcaatctttctaggctctgtaaagaggataagagtgtctgtctaaaatgaaaacccaagcaaacaaaagtcagaggagcatgcaatctcgtgttggcattgatctcctctcttggcatccggggtttgagatcgcggtgaaaactcacggatttaaggcagatagatcagattcggggttgaaggctccccactggagtcggcatagagcgaattccgcttggttaaaggcgcattaaataaagagaagccaatgttaggctcctcaaagtcccctttcttcagttaggctcccagtatcagcaaaaaatagcaaacacatcggggcttggcatatccctgagctatgccagcatcactgtccacacaactggtttactctgttttggagacagccccctctgagctttcctgtgttatgtgcccatttgttctccgattccccatttcaatcacattcttaggtttgtttcctttgagaaatgcaaaggactctggtgcagaagtaccactgcctaagcatcttgcttaagttttgtttttaagtaaagatgagtgataattctcgtctctatgtactaccagttaacgttaaacatcagcttgtgtttattaatcaagcagtgatcctactgtgtaacagaaaggcattttatgagtggggttgagagaa

SEQ ID NO: 3433 - DNA, 6000 bp, Homo sapiens
acttaacacagtgttttcaaggttcatccacagtgtagcaggtaccagtatttcattccctttatagctgaataatattcaattgtatggacacaccacattttgtttagctgtcaactgtttccaccttttggctactgtaaattgtgctgcgttgaatatttgcgtgcatgtatttatttgggtccctgttttccattcttttggttttacctagaagtgatatttctggatcatatgacaattctatgtttaactttttgaggaattgtcaaactgattaccatagcagctgcaccatttttcattttcaccaacattgtacaaaggttccaatttctccacatcctcaccaacacttgttatccgattttttttattatgatgatcctagtagatatgaagtggtatctcaaggtggttctgatttgcacttccctaatgactaatgatattgagtattttttcatgtgctctggagaaatatctattcaatgttttgcctgttttttaaaaaaattattttagactcgggagtagatgtgcatgtttattacatgggtacattgcataatggtgaatttggcttccagtgtacccagtacccaaatactgaacactgtacccaataggtaatttttcacttcctttttgccctttcccctttccttctatccttccacttttggagtctattctttccatctttatatccgtgtggaccctttgtttggcttccacttataagtgaggacatgcaatatttgaatttgcctatttttaaatttaattgtttttttgttgttgtaggcaacactacaactttcattcttttttaaaatttattttcccataaatatttattaattgtgagggacaatagagtggctttagctacatattgcgtgattctacatacattctttagctacacactgtatgattccatttatatgacattatcctgtaaagcacaaagacattgtggaaaaggcaaaactgcagggatggagaacagatccgtggttgtttggtgtaaggggtttggggagggctttactataaaggagcagcatgagaaacattttctagagtgatggagctgttctatatcttgactacagtggtggttacattgttatatatatttgtcaaaactcatagaactatgcaccaagagtgatttttgctgaggaaacactacaactttcattctgtatatattctggatatatttatttattgtggatataaatattcattctgtgtgtttttattctcttgacagtgtcctttgatgcacaaaaatgtttaatttttattatgtccaatttttctttggttgcttgtgcttttagaaacatatctgagaaatcatttccaattccaaggtcatgaatattacctttatggtttcttttaaggttttaataattttagcttttatatttaggtctttaattcattttgagttaatttttatatgtgatgtaaaataaggattcaacttcattcttctgcatgtgactatctagttcttttagcacctatgttgaaaaaactggtcattctccattggatggtcctgccacccttgttgaatatcagttgtccatgaatgtgagagtttacttcctgactctcaattttattctattgatccatatagttattcttatgctgataccacactattttgatttctgtagttttatagtaggttttgaaattgaaaagtgtgactcctccaagattgttttgcatattcaatgtccctcgagattccatatgaatttgagaatcagcttttccatttctgcagaaaaaggctgttgggattttgatagggattatattgaccctataaatcagtctcactttgagagtaccgctgtcttattaaatcctccaacttatgaaaacaaggtggtttttcatttattaaggtcttctaaatttctttcaacagtgttttgtagttttcattgtaaagtcatgcatctccttagtttattccaaaatattttatttttgatactattgcaaattaaattgttttcttaatttccttattggagtattatcagtactatagagttacgtatgttgatcttgtatcctgcaggtttgctgaatttgtatattaactctaatagttgctttttgtagatcttttaggatttatctatatataggatcatgtcatctgtgaacagagatagttttacttcttcttttttaatttggatgccttctgtttctttttcttcctgattgctctggctaggacttccagtactatgttgaacagaagtggcgagaacaggcatctttgtcttgttcctgatgtaaagggaccagctctcagtcttttaccattgaattagttgtgctttttcacatgtgcccttaatcacgttgaggctgttcccttttattgctagtttgttgggtgggttttgttttgttttgtttttaatgaaagcatgttgggttttacagttacatcaagtgacatgatcatatgaggatttttttcattctattaatgtgatgtattaccctgattttcatgtgttaaaccactgttgtatttcttggacaaatcccacttcatcatggtatataatcattttaatatgctgttagatttggtttgctggtggctgggtgcagtggctcacgcctgtaatcccaacactttgggaggccaagatgggcagactgcttgaggtcaggagttcaagactagcctggccaacatggtgaaaccctgtctctactaaaaatacaaaaattagctgggcatggtggcgcatgcctgtaatcccagctactcgggagtttgaggcacgagaatagcttgaacgcgggaggcagaggttgcagtgagccgagattgctccactgcactccagcctgagtgacagagtgagaccctgtctcaaaaaagaaagaaagaaagaaaaaaaaaaaaagatttggtttgctagtacatttttgaaaatttttgctttctatattcatgcatttgtattggtctgtagttatcttttctggcaatgtcttggtctagctttggtaccagaaaaatgctggcttcatagaatgagttgaaaaggattggtattaattcttctttaaatgtttgggagaattcaccagtgaagccatctggtcctgggctttgctttgtcgggaggtttttgattactgattaaatttcttttcttgttataggtttatttggattttctttttcttcttgagtcagctttgattgacattcatgattgctaaaggttcaaaacacttttctgaaaaagaaagtacatatatacactcataaatatacatacaaacacacacatacacaccacacacacacctgagtacacgggaatgatcattttcctggatcaatgttatatcaggatttttcaatttcaagaaggaactttaggctgggtatagtggctcatacctataatcccagtactttgggaagccaaggtatgcgaatcacttgagctcaggggtttgagaccagcctggacaacatggtgaaaccccatgtctaccaaaaatacagaaatttgctaggaatggtggcacatgcccctgtagtcccaactactcaggaggatgaggtaggaggatggcttgagtccgggaggtggaggttgcagtgagccgagatcacactactgcactccagcctgggtgacagaaccaaaccctgtctcagaaaaaaaaaaagaaaaaaagaagaagaaatgaccatgttctttagagataagaagtaaaatactaagcgaatcaactaaaagaggtaaaagcaattgcctccaggaaaagagggagcaaaggaatgctatatattttaagaattatgcagaacaattagattctttgtaaaaataaataaacaatgtaagtaacgcacaaaagatagttttataaccagactgctgggatccaaatcctatctccaccatttggtagctgtttgactatggacaagcttaaggcatttgatctctctgagctttagttttcccatctgtgaaatgagaatgacaatagtacttacctacataaagttttgcagtactaaaggagacagtgaatgtaaaaggtttggctagtaaatgtcctgtaaaaggaagcttattgccaatattatcaggctctcccagaccaacctgtatacaggaagaaaacaaactccgtttctcctatagtctcacaacacaaaatacttctgaccccagatgtagaggatggggcatatttccccatacaccaagcaatcaaccaattgttcagattctgcagcagacacgaatctggtgccctccgattcaatttgaacactatatttacctagagataacgtcagatctcacagcttgaaggcttgagccaggagtttgaggctgcagtgagctatgatcgagccacagagctccagcctgggcaacagagtgaaactgcgtctctaaaataataataataaatttttaaaagatatgcattactttggagattccaaggattttaggagttgtaagccaggacatcagggtaaagaaaaaatatatatgtcacaatatcatgcaacctaacttctctttgggatctgccagagccacctgatcactctgaagaccctcatttgtgctactgactaacggtctggctgctcttggacatgtctcttctcccaagaccccttgaagatggctttagaagggccccaaacttagctagctccccccaagctcaggctggccctgccccagactgcgacccctccctcttgggttcaaggctttgttttcttcttaaagacccaagatttccaaactctgtggttgccttgcctagctaaaaggggaagaagaggatcagcccaaggaggaggaagaggaaaacaagacaaacagccagtgcagaggagaggaacgtgtgtccagtgtcccgatccctgcggagctagtagctgagagctctgtgccctgggcaccttgcagccctgcacctgcctgccacttccccaccgaggccatgggcccaggagttctgctgctcctgctggtggccacagcttggcatggtaagagcagaacggggggtgggggactttgttggggtgtgatggagaagacccctgtgaaaggattcagtccttgcccctcactgggtgtcctcaggctgttttagtctccccaacactggactgcaggcttgtgggtatctgctttggagaggtagtggggtgaaaagagatgggtgtggtggaactggtccacctggtgctgtggatctgtcccagctctgccagcgactcactgtgtgtcctgagcaagcctctgatactcttgaggcttcagtgtccacttctattcaattgcaggtgttgggggcagggggacagtgatagactagaccagagcagtgcttttcatactttcctgtgcatacaagttacctgaggattttgttacaatgcagattcagactcagtcggtctcaggtgcgacctgagattctgtatatccaacacactcctgggagatgtgagatgccggcactgctggtccagacctacactgagttgggaggacctggagagctcctgatggctctggcagctctgccagcctgtgattcgatgattctatgcaagatctgatttggaagggcctgataggggtggtggttcttccttgggtggcttgtgtaaggggtcagaggggagagacaagaggttggcctctctggcccagggctcaggagaggggaattcggggtgaaataggtatagggctagaggagggattgggaagaggccagtgagggtctcctggaccagagccctcccagacacaggctgccaagtctcaggaggtccccaggctgtagcagttctgcagaatttccatctgggagggaacatgactagaggtgaggggctgctgtgcttggcttgttggc

SEQ ID NO: 3434 - DNA, 6000 bp, Homo sapiens
gattgtccaaggcccaaagagccagtagggccctgaaaccctgccccgtccaacaacacgggtccaagtgaggaggaaatacacatggcctttgacacagaggcagctccttctttgggttcatttctcacccccactgccccccggggatggtcccagggacctgggagatggagtaaggtcatcaccacttcacagcaaaggaaactgaggccctgaagaaggacgctgaggcagcatgagagcctgtgcctgtctgctctgaagtgggggaagagttagagtcctgggtgctggtctgataactgcccctccctgggtggtcctgagctcaccatgccttgtaagattctatgtgaggtaggagggcagctcaaccatgtggcttgggcaaatccctttcccctctgagcagcgggggtcttatttatacaaagggggatgggctcggttagaagatccctgaaggcatttctggcctgaccatccctgtttctttggttctccctgccccgggagcagaagtaccagcaggtggatgaggagtttctgaggagtgaccacccagccatccttcggtcccaggcccgcttgcctgggttccatggcctccgatctcccctggacaccagctccgtcctctatactgccgtgcagcccaatgagggtgacaacgactatatcatccccctgcctgaccccaaacccgaggttgctgacgagggcccactggagggttcccccagcctagccaggtaaccaccctggcctggggccaaggaaattgtgcacagtgtgtgtgtgtgtgtgtgtgtgtgtgtgtgtgtgcgcgcgcgcgcgcgcgctgccaggtttgcctcagaggtaagttacgtagggtaagtacttatccctaccaatgaatagaagacagaatggaactcatttgaactttgatgccctgaggtggaaagggcaggctagtaaaaacaaaagtatgggctgggacttacttgcaaggtagctatttcctttaagggagcccccagaggttatctatactctcttatctctaggtcctgtcctagccccaaaaagaagaagcaaacctacttagcatccccagcaccccagctgttactcatggccagcctgaggcctatgttctgttcttcagcaccacgccctggggccagagggagcctgcttggttgtaggagtcagaggtgcctaaaggaattcaggacagaattcagactgggaaggagattcgtggttttcttttgccttgggaagtggtgaagttacagcccagagggggctttataggaggaccctgctgttgtgtggacttgatgtccacgcaggatctccccttaactggagagaagggctccccatgaggccacgcccacctccaaagcgagatccagcccaaggtgaagtggctggagccccaggctggggtactgtcccaactctgccactagccgctgagacctgggaaggcttctcctctgcgagcctcagtttctccatatgtgccaggagtgcacaccggccttagaaggctccgaaggccctcattgctctaactgttgaagaggccaaccatccaagagtcccagtggatggtgcagaggagtgaagtgcagcgctcacacagcttgaggtgtgaatgctcaccctgttttgtgccctcagacaagctgcttcactgtctaaacattggtgtcctcttctttttttttttattatttttattcatttatttatttatttttgagatggagtttcgctcttgttgcccaggctggagtgcaatggcgcgatctcggctcactgcaacctccacctcccaggttcaagcaattctcctgcctcagcctcccgagtagctggaattacaggcatgcagcaccacgcctggctaattttgtatttttagtagagttggggtttctccatgttgagactggtctcaacctcctgacctcaggtgatccgcctgcctcggcctcccaaagtgctgggattacagatgtgagccaccacgcccggccagtgtcttcttctgtaaaatacaaacagtaaaagtacttctattaggcggtcattgcaaggattaaatgagatagcatacacctttaggagtgcagaggagggagatgctggtgggtgagaaacgagctttggagccagctgaccctgctccgaagttccagctcctgcacttccctgctgtgtgaagtggggcagtgatataacctctctgagccacactttcctcacggtgcaggccttgcatagttttcacaagagttaaatgagccggagtgtgtgaagcctacggtgcaggggtggacacaccgaaggctcttcatgactgctgctggaatcctcctgggctccttcctagcccctcactcactgcctctttcctctagctccaccctgaatgaagtcaacacctcctcaaccatctcctgtgacagccccctggagccccaggacgaaccagagccagagccccagcttgagctccaggtggagccggagccagagctggaacagttgccggattcggggtgccctgcgcctcgggcggaagcagaggatagcttcctgtagggggctggcccctaccctgccctgcctgaagctccccccctgccagcacccagcatctcctggcctggcctgaccgggcttcctgtcagccaggctgcccttatcagctgtccccttctggaagctttctgctcctgacgtgttgtgccccaaaccctggggctggcttaggaggcaagaaaactgcaggggccgtgaccagccctctgcctccagggaggccaactgactctgagccagggttcccccagggaactcagttttcccatatgtaaaatgggaaagttaggcttgatgacccagaatctaggattctctccctggctgacaggtggggagaccgaatccctccctgggaagattcttggagttactgaggtggtaaattaacttttttctgttcagccagctacccctcaaggaatcatagctctctcctcgcacttttatccacccaggagctagggaagagaccctagcctccctggctgctggctgagctagggcctagccttgagcagtgttgcctcatccagaagaaagccagtctcctccctatgatgccagtccctgcgttccctggcccgagctggtctggggccattaggcagcctaattaatgctggaggctgagccaagtacaggacacccccagcctgcagcccttgcccagggcacttggagcacacgcagccatagcaagtgcctgtgtccctgtccttcaggcccatcagtcctggggctttttctttatcaccctcagtcttaatccatccaccagagtctagaaggccagacgggccccgcatctgtgatgagaatgtaaatgtgccagtgtggagtggccacgtgtgtgtgccagtatatggccctggctctgcattggacctgctatgaggctttggaggaatccctcaccctctctgggcctcagtttccccttcaaaaaatgaataagtcggacttattaactctgagtgccttgccagcactaacattctagagtattccaggtggttgcacatttgtccagatgaagcaaggccatataccctaaacttccatcctgggggtcagctgggctcctgggagattccagatcacacatcacactctggggactcaggaaccatgccccttccccaggcccccagcaagtctcaagaacacagctgcacaggccttgacttagagtgacagccggtgtcctggaaagcccccagcagctgccccagggacatgggaagaccacgggacctctttcactacccacgatgacctccgggggtatcctgggcaaaagggacaaagagggcaaatgagatcacctcctgcagcccaccactccagcacctgtgccgaggtctgcgtcgaagacagaatggacagtgaggacagttatgtcttgtaaaagacaagaagcttcagatgggtaccccaagaaggatgtgagaggtgggcgctttggaggtttgcccctcacccaccagctgccccatccctgaggcagcgctccatgggggtatggttttgtcactgcccagacctagcagtgacatctcattgtccccagcccagtgggcattggaggtgccaggggagtcagggttgtagccaagacgcccccgcacggggagggttgggaagggggtgcaggaagctcaacccctctgggcaccaaccctgcattgcaggttggcaccttacttccctgggatccccagagttggtccaaggagggagagtgggttctcaatacggtaccaaagatataatcacctaggtttacaaatatttttaggactcacgttaactcacatttatacagcagaaatgctattttgtatgctgttgagtttttctatctgtgtacttttttttaagggaaagattttaatattaaacctggtgcttctcactcacagactttgtggtctctctcgggtttgggttcctgcccatagggagtgtggagtggggcacatgaggctcacccagacgcagacccccagacaggtcccttcagctctgagtctcatttcattcatctgtaaagtggggattttcgctctcccacccctcgctggaagctggggggcctagaccttgggcttggtttcccaaggtgggaagcgagcaggcttttctggctccacagagcctggccttgagtcgggcaggagggtgtggggctgcagggctgctccaaggctctggtgctgaggcgtctcactgcctccaccatgtgctttggctttggctatcagctgggacaccctcccctccactccgcccacaggcccggattgaggccggcgtgctctgtgacaggcagctgctagagcccagattccaggtccaggtgagtcatgatcaggccccaggtaggagaagggcagacagagtgtccaaaagcgtgagagcacgaagtgaggagaaggtggagaagagagaagaggaagaggaagaggaagagaggaagcggagggaactgcggccagggtaaggacaggggagggaatagggtggcgaccaggctgtggctttgagggcagagaggtgtagacctggcaggacccagacccctcacggctgcagcatctcaggggttgtggggccggcatgagtcataggctctcctgccgagcccaggcctgtgggaccccggcagcaacacagggccaggggcaatagggttgctgggggcaggggacagagtgctagggccctcccacctgggcccagagtcctgtacttggctcacttgaggtggaccagatgtcagcctcagatccatcactgtgtgtccttagcccctcccttgctctctctgagctggggaaacggcatcttcatttgagtgggtgcgggaaggacctcattttggaaccacaggcctccctggactgcctccaggagtctggggctgtggcttcaagtggggaaaagaatggagccatgggacagctctgactcacaggcccagccgccaactcaggggcagctgagccacaccagggaaaatacccgacggctataaggcctggccatacaaagcccaccatcccagggatcctggcttcagaaaacacccagagcctgtgacttctcttctagctgtggcaggagttgaatgaggtgatacccggatctgccttgtaaagaaaataactagcccacattccagacagggattatctttgctggtgcaaaagcctctgtctggaggtcagaagatctcagctccctgtgtctcaggcctgctccttatgggaacttgagtggattacaccacatcaggcctcagtttccccagggataaatggagctagatgccacactaagacaaaggttgataaaaatctgactaccactatccaacagttacta

SEQ ID NO: 3435 - DNA, 6000 bp, Homo sapiens
aggagtttgagaccagcctgaccaatatggtgaaaccccgtctccactaaaaatacaaaaattagctgggcatggtggcgggcccctgtagtcccagctacttgtgaggccgagactagggaattgcttgaacttaagaggtggaggttgtggtgagccgagattgtgccactgcactccagcctgggcgacagagcgagactctgtttcaaaaaaaaaaaacaaaaaacaaaagaaacggggagacctggtaacaccgggcctgtttcccatgacagcacatgcctggctcctgagccagagtgtacacgcagcagtgcaccctgctcccagttcccacccctggacgccacagcactccagtcctttatccttgactaggccccaaatgcctttgagattgtggtgcccccccacccccaatctaggcagcaccctgacaggacgtgtgcatggccggaaaggggctggctttctggaggatgtgggtgcaaccctctggggcctggatttagtcgccacctgcccggagtgggcattggccctgtggccgtggcccggtactgagtggtgctggggtgcagcccaagcccccacgccgctgaccccagccccttgctcctttgggatccgcagaagctggaggatcaggagcagcgggcccgacagctcaaggagaggctgcgcagcaagcagcagagcctgcagcggcagctggagcagctccgggggctggcaggggcggccgagcgggagcggctgcgggcggacagtctggactcctcaggcctctcctctgagcgctcagactcagaccaaggtgagtgccccgaggctgaggggttgtgtggccctcggggcgagccaggtcttctgaccggacccctccccgcgcagaggagctggaggtggatgtggagagcctggtgtttgggggtgaggccgagctgctgcggggcttcgtcgccggccaggagcacagctactcgcacggcggcggcgcctggctatgatgttcctcacccagggcgggcctctgccctctactcgtgccaggcccacttgccaggcaggagccctccccaagccttcagggctgctcggagtcacctgttggaatggactaaaaggacccttgtgtgggaacaggtgctccccaaacaccctgctgctggctgccaggcaggccctctggaagggaaggggcaggactcatcaggacctccctggacccctgcagggcaggcagcttgggcccgagcccaagcatttggctctgctgcccccaaggggacaggaagcctcttgggcctcttcccttcctggacaaggccccctgcctttgcctcacataaactgtacagtattttcattaaaagcctctttcataacttcccgtccatagtcttgcctaatgaaaacgggggaactcccaaccacagacccactggaagaggaaataatatcagttcccatcactgacactgttggccgtgccaggcagtgcacttaattctcacaacttgaggctgttctgtctccacttcacggatggtagaaatgaggctgagtgacgtgactcgcctgaggtccaaaaacagtgaagccaagattcaaaccagagccttccgactccagagctggggccaactgaattcaacaagtatttattgagtgtctattatgtgctagatactgagacacatcagagaacaaaaccaaaagccctgcccttgtcgggcttacagtctagcacttaccgccagttaacctgcaggctacctggagccccgggcaagtcaccgcacctctgtgcctcggtcctcagctgcccaatgggagaataagcagacctggctcagacatgaatcatgtgcttggtgtactgcagatgccaaactgcatccccacaacccaccacgtagacagcagacagggctggaagttgatttttaatgataaagtacaatgaagggagggcagagaggctaagcctagctgtctggggtgctgtggtggtggtagactggctacacaaactgttgctgctgctgctgcttcttggtggccgccttgctggcgaggtccttggccttctctgtagctgccagtgccgtctcctttgccttctccttggcttccttggctgtctcaacaagtgttttggaaggggcctcgcctgtcgcgaacggcaggtggctgcctttagaagatgcctgaaagaccaacctaatttccctcccccatgacaccaatctcctctgggccaggctccactaaaaaggtggtattcaccctcctcccacccccagtacagacaaggagtcccagctcagagcagggcaatgactaacccagactccacgcccgctaggctgaatgagcctctccctatgaggaatatccacatacccagaaactcaccttgcagcttagccaagatatattcaaaacccttcatagtcttggtcacgttgcttttgaatcgggcaagaccaaattcctggcatgagatgagaatgggaaggatactgagttgcccactgaccccagcccagccccaacaccgaaagcactgggtcccagagccccagcagccccaacaacactgctcacctggacagctctggagacaccaaataagctagaggagacccaggcttcccggcggatttcagtccagccactgttgtcagagttcacacagtaaacacatcgttcctccaccacctatgcagaggccaaccacaatcgtggaacagtctttcattttgccaacttgcacataaatctgactccctgtcacttttcatgaggcgaagcaatacaatgaaaatccattccttcccctgactgcacctccaagtggcactgacagaacaagaagccataaataaggtcgttttgctctcgaaaacctctcttctgactcttaaactagaaggcaaaaggtctctctcttgagatcaacaaagggccttccagcccatcctgctcctggattttgttttgtgcatctagacgcatgcagtgttttagccgccttccaccagctgcagctctggagcttcctgacagtccaaataaaaacatttgcccggcgcggtggctcacgcctgtaatcttagcactttgggaggccgaggcgggcggatcacttgaggttaggagttcgagaccagcctggccaacatggtaaaaccttgtctgtactaaaaatacaaaaattagccaggcgtggtggtgtgtgcttagaaatccacctcttcagaaggctgaggcacgagaattgcttaaacccaggaggtggcagtggcagtgaggtgagatcatgtcactacactccaacctgggtgagactcttgtcaccagaaaaaaacaaaaaacagaaaaaaaaaaaagaaaagcactgcctccgccactcagcatcactcctgtgagtccaacatatatctgtgccatagatgccagatgggagcgctttgcatttagaacttaggacaactccgtaagataggtacccctcccccactgtatgaatgagtcaaaggacaggtccagagaggatggccagctgaaaagaagaaaacctgaggtcatactctacagctgtcaaccctcagtaacccagacctgcctccggccacaaaagctgccttatggctctctagccacatgtatctgaggagctctctatctcggggggaggggagagggggaggtgcagaatcacaacaggaggtgtctcaccatcagccgggcgtggttgatgttccaggtgaaggtagtcatggtctgattctgtgggtccacaatagagtcctccaggacgtacaccgagtgagcaacattggcaggaaatagtcgctcggcccagcgtggcatcctgttggtcttggtcaggagtcgccgggacagcagtttctggtcaggggtcacctcccggtgtactatgtcttccgtcaagacatgtttgctgcaggtgtcagggtgaaggtgaccctcagaagcttgcccctaagagactgcccgaggggattcccatttggaggctccgggcctagagaggccacgccttcccgtaaccttgcagggtggtatgtgctatggttcaaaccagagttaagggcccatcccagggcaaattcccactcccgccatctgactgacctggattcctgccttctagcaggaatggacctcatgatttattgcaccccaggaaagcgccacgggcagagaaataggatttccaactccaagatccctcccaactcccatactgccgcctcttcttgtctcaccacactgagaaaagaatcttacactaaggtctcaagtaaaccaccacccaggcccaacctcccttcaggaccttgcaggcctggcctggccgcttccccgataaggtctacctaggattcgatatcgagtccttcctggtcccagtacttgggggttacccataattcgatctccagatagcgagatggcgcggttttgctcttccaaataccacgtacctatagggattcgggtaccgctgccagaaggcggcgaacacttggtcccaggaactccggagcacgctctggcccaggaaatacttcaccatcgtcccggccgaagcgggctcagcacccgcgcagcatcaggggtgcggagcctgggaggcacgcgagggccgggccgggccggggctcggcgcacacccgccgccaggctcgtagctcagtcaccaccgcaccgcgcccaagcagctgccgccgccgccgccgccgccatgagttgtccggccgcgcgccacttccggcgcagccacacagtagccaccgcttccggcgcccgcgccacgtgaccttgcggccccgccccctcgccctctagccccctcccgcgggagtcgcggcgctgcgggtaggagccgggttgcgggagaccccaggttcggttgggattcccagccagaacggagcttaagccgggcaggcgagcgaatgacggagtagcgagctgcacggcggcgtgctgcgctgttgaggacgctgtcccgcgcgctcccaggccgccccgaggcttggggtcttcgaaggataatcggcgcccggggccgaacagcgggggcacacggggcgctgccgaagtgcaaggccacggccagagctcgagcccgacgcgctgtctggagtcgtaggttggcgccgtttggggtcggggtctgaggcttgggcgctgcctgggccgagcggagatcggggtttgcctcccgtccccgctcaggaccctgacgtggctgaagcggccccgggagcatgagcgggcagcgcgtggacgtcaaggtggtgatgctgggcaaggagtacgtgggcaagactagcctggtggagcgctacgtgcacgaccgctttctggtggggccttatcagaacgtgagtgcatccggaggggccaggcacggtgggcgggggagtggggggccggtaatctgcacctatggccccgatctcttccctctcgttgcagaccatcggggccgccttcgtggccaaggtgatgtcggtcggagaccggactgtgacattaggtatttgggtaagtcccccggccatctattcttgggagactcattcctgaggaggtgtaggtcctgcctattactggttgatttgtggcctcacagacccatttctcatagacccgtttccttatctggaaaatagcggggtctggagaacgtggccttaagtttgactcaggccttactctttaggacacagcaggctctgagcgctatgaggccatgagtagaatctactatcggggtgccaaggctgccatcgtctgctatggtaaggggggggggggtttgggctgtctcacaagaaaagatgggtgccaggctagccagagaacagcccttgaccacttggttgtctcctgcatgccgcacaccaagacctcacagacagcagcagctttgagcgagcaaagttctgggtg

SEQ ID NO: 3436 - DNA, 6000 bp, Homo sapiens
cttggataggttttacccttagtccctataaggtggattttactaaggttttttaaatgatactgtcatcctcttggggtttatcagccaggttagaggagcccagtgtcctaacctctctcagatcatggcagagaaggagctgcctccagcccctttcttgctgagtttcatttgagcagttccatgtgtagacattccaagtcactgcttggtagttgctgtgggagcctgtcattggctatggccagttagttctcagctgagcttcctagggccagtgcaacagggccagaggctgctatagtgtaaattgaaataagaatagatcattgttttgtacacacacacaataaaatgtaatgatggtgctaatttcacggtataaataagcactgccaagggttgagggactggcagctcaagaaacccgggttcctgtttgggaggagattttatgtagaaaagtttgaggctttgttaaaagtggggagaaggaagatcctcagtgaagcctgcacccaaccctggagtggcccagtgcaatccagaggtggaagagatcctatatccaggtgaaggtggccattgagtttctcagggctggggccaccttgtccatagcctccgtccacgctgcctggagcaggttgttagagagctctggttgttgggtcttcctcagctcccttctgcccctctctacctcttccactcatggaagcccctctactgcttatgaagattaagggtagtattttctaaggaagtggaaagaattaaactagaaatccacaacctcggaagaagtgtttcgagtttaacatgcgctgtttctgcttatgtggttccttctctagagctgctttcccatggctttcaaaacatcaggttattgtggggcttcaggtgtaaggtcctggaagttcagcaaagtttcgtggacaagacatgggcacagagagtagaagcagaaataaatggttctatgttttcaacttccagggttggggcaggccagagcaaggcggtctcatcgaggtgggtgctacctgtgtgtgtgtagatgagtgtgctgaaggtggggagggcagcacacagcagctcatggcagagccgcctcctaggtcttggcaaagaggcaagctgacgatagacatctacctatattgttaagaaaggggtcggggggatcagccaaggtccatcattgcttttttgccgcgcccccccccccccgcccccatagattgtcagctgtaagtgaaactcctagtgaaaaagaggggagccctgtgttaggagtccccataaacatgtactgtaattctttgtatatagaaaaaaaatttactgtaaagtaaagtttaactttactcatatatggcccttgccctgtgttttgttttattggctgtggggagttgtagtctaacaggagggaggattgtttggggtgagagcagaagccagccccagagatagtacgaggtggggggcggggggcgcagggatactgtgaagctaagcccttcctccaagcacgtcatgggaatagtgtgtttcctctcagcagccacagggctgcccaagcctctttctccctctgttgggagtggctggtttcagtttcagtctccctccacaggaagcccccatcactcatgaaggaagggcagtttgaggaattggtttttaaaaaggaagtggaaccaaagcactctctgagtgtgagtctgaccatgttggctaagttgtacatttttccaaggcaggtgttggccactgcagaggactcagcccaggcctaaataaaggcaggaaagcagaggcaaaggataaaactaagggaaagcccctggcctggggccacaccctccataccagaaagggctgcaataaatttccttctggttgagcagcaagtgtcagccctgtttacagttaacacctgattcctcagaaatatctggatcttctttggggaaaacttgggagtttgcttccctttgtgacctagtcctgaacttcctgccctttcagcaaaaagtgcttgggaagattgggaaaaacatttagtactagagttactcttcactttcttcacaatccttgggctgcatagtagtcaccttattttacagatgagaaactcaagatgaggatttaagtcccttttctaaattagcagctgaattggaaccaaatctggatccattagacctttctggcttacagaacttaggactttcctaccattaaaccacattgtaggatgtcactgggaagctcaggacctgagtcacaggtctgacataggggcccaaacatgacagatgcagtagagctagtcagaccaacctgtctcaggtaggaatgcttgacccttttatttcgaagcaactcatgcactcttttcagcactcagaaggaactgtgagcttttatactactacagccccagtatctcagcggtaaccatggggaaaaaagtcttgttttccaaaggaaaatgagagttgggaggagccttaatataagcagtgaggccagccgggtggccccaggaagaactaggtgtcttgacacctaatccacacagcagggaaaggggctgggtgtgatgcacagtgcactgattttatttacagatcaaaagccacttaaataatctgcagacacaagtgctgtccagggcagaagcctggggtccaaatcagccttatccctcctcatgcccacagtcagcccaatgctgtctccgttccatgggccagcacaggcaggcgccactctgctgacatgaggacctggggtagctcagacatttgactacccaagcccagaaaggagctgggtccagcccttacggggaattcctttaattcccccaggccaggtgagtgctgactcagtgatgacaacagctgtagaagtaggggtttggcttctggcccagatccacgcccttgtcctctgtcaaaaagagaggtggcagctcagcaccattctgttgggatcaggtaactcaggaaaggggctagatgctgtgggcctagagtaagtctccataaaggctggggaagcacacacctgtcatcacctggaaggcagccacactgacgtaatcctctgccactttctggaagagctcgtctggcaggaaaaatgatgatcagcgagggcccaatgccagtagccctgggatctcccagtgacccagccctctgtgccctattcagcttcctctggtgcccctgcatgttcctgctgtgaggctccagcacagcactcacccacactctggcctgtcttgctggatgtttcaaagagctgagctttgatatctgtaaagagaagtgactaaagcctcatacctgagaattagataaacagacaaaagggagggctagcagttcagggagtctcctggaccccacagttcaaggaggccaggaagacctcctagagcaccttgccctggcagccaaggcagtccctattttctttgatccacccagacagccacacacccccaccccccaaagggctgaggagcagctactgtctgcatagtcctggacgtcgtggaagtccacacgtcgacgcctccggtcttcttccagcaggtcactcttggtgccacataagtagatttggcagccctgaggcagaagacaagggtcacctccacaggccaacaaaaccccagcccctagtgttctagtgaggtctgttcacctacctcctctaggctgcgcagttccttcacccagaactttgctcgctcaaagctgctgctgtctgtgaggtcttggtgtgcggcatgcaggagacaaccaagtggtcaagggctgttctctggctagcctggcacccatcttttcttgtgagacagcccaaaccccccccccccttaccatagcagacgatggcagccttggcaccccgatagtagattctactcatggcctcatagcgctcagagcctgctgtgtcctaaagagtaaggcctgagtcaaacttaaggccacgttctccagaccccgctattttccagataaggaaacgggtctatgagaaatgggtctgtgaggccacaaatcaaccagtaataggcaggacctacacctcctcaggaatgagtctcccaagaatagatggccgggggacttacccaaatacctaatgtcacagtccggtctccgaccgacatcaccttggccacgaaggcggccccgatggtctgcaacgagagggaagagatcggggccataggtgcagattaccggccccccactcccccgcccaccgtgcctggcccctccggatgcactcacgttctgataaggccccaccagaaagcggtcgtgcacgtagcgctccaccaggctagtcttgcccacgtactccttgcccagcatcaccaccttgacgtccacgcgctgcccgctcatgctcccggggccgcttcagccacgtcagggtcctgagcggggacgggaggcaaaccccgatctccgctcggcccaggcagcgcccaagcctcagaccccgaccccaaacggcgccaacctacgactccagacagcgcgtcgggctcgagctctggccgtggccttgcacttcggcagcgccccgtgtgcccccgctgttcggccccgggcgccgattatccttcgaagaccccaagcctcggggcggcctgggagcgcgcgggacagcgtcctcaacagcgcagcacgccgccgtgcagctcgctactccgtcattcgctcgcctgcccggcttaagctccgttctggctgggaatcccaaccgaacctggggtctcccgcaacccggctcctacccgcagcgccgcgactcccgcgggagggggctagagggcgagggggcggggccgcaaggtcacgtggcgcgggcgccggaagcggtggctactgtgtggctgcgccggaagtggcgcgcggccggacaactcatggcggcggcggcggcggcggcagctgcttgggcgcggtgcggtggtgactgagctacgagcctggcggcgggtgtgcgccgagccccggcccggcccggccctcgcgtgcctcccaggctccgcacccctgatgctgcgcgggtgctgagcccgcttcggccgggacgatggtgaagtatttcctgggccagagcgtgctccggagttcctgggaccaagtgttcgccgccttctggcagcggtacccgaatccctataggtacgtggtatttggaagagcaaaaccgcgccatctcgctatctggagatcgaattatgggtaacccccaagtactgggaccaggaaggactcgatatcgaatcctaggtagaccttatcggggaagcggccaggccaggcctgcaaggtcctgaagggaggttgggcctgggtggtggtttacttgagaccttagtgtaagattcttttctcagtgtggtgagacaagaagaggcggcagtatgggagttgggagggatcttggagttggaaatcctatttctctgcccgtggcgctttcctggggtgcaataaatcatgaggtccattcctgctagaaggcaggaatccaggtcagtcagatggcgggagtgggaatttgccctgggatgggcccttaactctggtttgaaccatagcacataccaccctgcaaggttacgggaaggcgtggcctctctaggcccggagcctccaaatgggaatcccctcgggcagtctcttaggggcaagcttctgagggtcaccttcaccctgacacctgcagcaaacatgtcttgacggaagacatagtacaccgggaggtgacccctgaccagaaactgctgtcccggcgactcctgaccaagaccaacaggatgccacgctgggccgagcgactatttcctgccaatgttgctcactcggtgtacgtcctggaggactctattgtggacccacagaatcagaccatgactaccttcacctggaacat

SEQ ID NO: 3437 - DNA, 6000 bp, Homo sapiens
cctgaactgacagggagatttatagagcaagaaacaaactttgccattaggccattgaaatagcccgttttatcctaatatactttctcatcacattaaccaaaaaaattctggatcttcataatacgggtttattttggttggcattcattcactcagcaaaatacttactatgtgttaggcactgttttgggtgctgagaatacagtgatgaacaagacaaagtccctgcagcctcagggagtttacatttttgtaggaaagatagacaataaataaacaaaattttctggtagtgataaatgtaataaacagaaataaagttattactgatcggtcctgtacccttctcactaagcctcgcccttctcatgtctttacttccctccttactcagctcagactctatggtccatcactatcttccttgtcctgtgtgtatcctcaactcactcaccgttttctccttctttcttacctgcctagcaaaataccaacctggttaaatgcactttttggatgctgttgttgccatcttcgtacttactcccaggtagctgaatatggccggagaaaaacaataatgctgactggtctcactctcactttacagccattgatcccagtgagtccttgcagctacatggcaagcctacgacattccctaatccatccatctcccatttttctacatgatcacttcacatttcctgtccaaaaaccttcaacagtctctctcacactcactcactgtcaataatgttgccccggattttactgagaaacttaaagaaataaaaacttcaaaaactcccacttacatctgccaacccctgccctgcatgggtactgatgtcctctgtgtttcctcttgttacaatggaacagctttccattgtccttttcaaggacaactcttctacttgtgcactagatcccatgtcccctcatctcctgtggcagacatggagatgtgtcacccagatgcctcttcaaggaaggatctgctgcccagctgcagaccctagagttagcaggcagcctccatctgtcagctccttcaggatctgccaaagccactaaagtggaatcacttcagtcgaggtaacacccttcctggggctgcctgcatgcggtgactgagcagtatggcgatataaaagctcagccactcagaataccctgaagagcagcactcactccagaactcccctcgtagctgtctgaagctctgtcaagccagctttgcagtttgacctcttcctctgcccaatcttacttcttcccccttcccttcacagttcttcacctctaataatcacctggtgtcccaaattctgtttcagcttctgcttacagagaacccaacctgacctacctactgtagattggcttcagctactgtctccttctcttgtatcatcaatgttcccctctccactgattcattctcatcatcatacaaacatgggtctcttttcttcaaaaccaaactccctttgaactactgctccttctttgttttcctgtacagcaacattcctggaaagagtgtctgaatccattccttgcctacctgtctctctgtattcccactcctggaacatttagactcaccaccccacagaatagtccatgtcactgataacacaacattggtatttccagtggtcaattatcagttctcatcttacctgaccttttatcagcatgtgactcagtggatcaccctccttcaaaaacactcctttgtcacttggcttctcggacacaattttcatgtaagtctcttcccacttcactggctacagttgctcttctcttctcctttgctggttcccctctcactcttgaacctctcaacactggagagctccaaggtacaattttgaatatccccttatccctacctatgttccctgttagtgatttcattcagtttcagggctttaaataccatctacatgttgacaactgctatatttatttcttgagctagagtttcttctgctgaatgccagactctcaaatccaactgccactcctgaatctccattttgaattgtcaaaactaacatgtctaaaacaaaacaactcattcccacctcctgcactttcccctctaaaaccatcctgcccacccccacccccgaagtctttctcatctcaacgaatagctactcctgttctcacagttgttgaaccaaaaaccccaaggtcatcactgatttctacctgactctcgtgccccacatccaaaactttagagcattctttggaataacctagtgggtcttcagatctcccattttcttaggatctcttcaaatgtcatcttattaataagtcattgcttcattgttgaatatataaaacaaaatcccatccaccctactggtacttcctatcttctttaacttgctttactgctatcactaattgtcatagaatatatattcacctgctcgttgtcttgatggcagtgacagcctgtctggagcagctgctgaggggatgccagctgcagtatggaaggcgtggccagagctgcccactcctcagagacagcgggcgccaggaacatgcaagagccccgtcccctaccacgtcagcgaggcgggagacccatgttcctgggcacagctgcagccgtccagccgcagctctgcacccagccatccctgcactcttgggggcccaggaaaccccctgcccctgcaggctgaaagtgcctgctcctgaggttgcagtgagccaagagcacgccactgcactccagcttgggtgacagagtgagaccctgtctcaaaaaaaaaaaaaaaaaaaaaaagaatgtgcctgttcccaggcctctaccctctctctacccactcccagggcccactccaaggcggagcaaagttgtggccaggcacgggcgctgctgcaacccagctgggtgtgcacgtgttcagggcagcactgacacaccagccacctgccgccttggccctctctggactttgggcaccaacaagtgcgagaaagaggctggtggggctgagggtggctccgcgtgggcctgcaggcacccctcagcacaaacagcctgggcgccatggatgacatgttgatggtgggaggcagacacgttcctggggggaaaggggtaggtccctgcccaccttcaagccagggatggcctgaagcctggggggcctggtggccagttccaggtagagtctgcagcccagagtgaaaactagtggtgctttttctgggcccacccatgggccaatcagcacacacttcctcccttctgagcccataaaaaccccagactcagccagcgctcaggcctaccagctgcaggaaggagctacccactttggtctcctcaactcgtcaggaccacctgcctgcagaaaggagctgcccactatgggtctcctctccactgagggcaggacgctagtcgggacaacccccctgcagaaaggagcaacccacttcaggtctcaggagagctgttctgtccctcagtgaagctcctgtccaccttgctcaccctccagttgtttgcgtgcctcactcttcctggacacaggaccagaactcaggacctgccaaatggtaggattgaaagagctgtaacacaaataggggtgaaacacaaccccccactcccaaccacgttgcaggcagcaagaaggagagatgagctgtggagtgtggataggatttgagtgggataaatagtgtggaaaatggcataccgtttgagggtagaaatgacactattcgcgtatgttttggaaggggaacaaaaggaaaagggaagattcaaaggaaatgtctaatttttgtcctgcaacccagagtccaggcaaatttcactgatcacatttctattaagtccactgagtacaaggatccttcaggtgagctagtggttgaagagttgggagaaaataaaggaaatcacatacaaaagaaggcagcattgagcagggaagatactgctttgagtgtctgcagtgttgaatgtgtaaaaagcatctgcatagatgacctagaactctgggagaagggtctggacccggccaaataacatatttcctctattataaaacagagagtgtgtgtgagagaggagaggagaaggaatggggtgggagggagcctctccccttatatttacaggggtgtaaatctatgtggctggctatgtgaacctttaacgtggcaggtaggatctttttcctttcggtgcaccttacaagcgatgcggtcctcagaaatacagatttgggagttatctatcacccagcatgatttctggagcattgatgagaccgctgattaattctcctccgcctcagagtaacactgtcgatagcgacttcggagatctctaaacttctttaccgcgcccgccgcgcccctccgcggcccgggactgctcatcatcttttccaggaagcgaccgtggaaacaataaacacgcaggccccctagcgtccttccgttccgcgctgccaggccgcctcgcctcccgctcccgcccgccccgcgggacacagcccgcccgcactccggggcccgagcgccgaccacactccaggcgcagccggggagagccccgcgcgcgcatccctccgcccgcggccgaggcgacccctcgcggtcccgcccgcccgagcttcccgcggaggcacccggccgccccgcctcccccgccccgcgcccgccaactcccagctcgcggccctgattggtcgccgcattcccgctctccttcccgaaccgccattttgaaaatcttgttgattctggggagccgagcgcgcggcgcgagcgtcacgccagacagcggcccgcgcgccttctcctcggcgtcggccgccgccgcctcccagaacctcctcgtgccctcgcgtgccaggcccgcggcggccgaaatccgcggtaagggctgcttcgggacgccggaggcccggtcgcccctgccgcggccgacgggggagggacgcggccatttggacggcggcctggggcgggggaggggacgtggagggccggcagctcgggccgggccgggaacagcgcaggccgggcgggcgcgcgcgcacgcggggcagcgggcgcggtttcccgcctcgggaatccctggacggcggcggcggagcgggagggaagccgcccctggggactgagcgctgcggtcccggctatgggaggaggcaactttcagggcaggtgtcccgcgggaagggtagcatcattcagggtggccgcccggtcctgcctgcgggagtaggaggaccgagacgtccggctttcttcccgcatgcaggttcacagcatgtccgcctcggcccctgctgcggagggggagggaacccccacccagcccgcgtccgagaaagaacccgaaatgcccggtcccagagaggagagcgaggaggaagaggacgaggacgacgaggaggaggaggaggaggaaaaaggtggggggagtcgcatcccaactgatgaatttttcagaccgaagtttttttgtatttttcacccaggaaacagttttcttgctcttttggtgtttagaggcgtgaagtcggagtgattttcagcgagaatgtgtgcacaatttatctgcttttgttttgagcgatggcgtagaattgactttgtgtattccggtttttaaagtatttgttagcgtggtagagatgtattggagtgcagccgacttctcgtccgctctaaacgttcgttaacatttcatcatttgacgggaagtttgtaggtcttggatttgatttttttttttacctgtgtgtgtgcacctttgaagttgctaagtggatgttctaattttgtccttttcattacacatcttttgccttttgaagttattgtaaggtcttggtgcagcccgttaagactgaagttataaggctagacccggaagtatttgaatactttcgaatatttttacatttaccaaaaagtttccct

SEQ ID NO: 3438 - DNA, 6000 bp, Homo sapiens
gctcatcactgttccatgcacttacatgctatccacccatttaattttcaaacccacaagtaggtattatcagtattctaattttgcagaggaaataccagaggctcaaaaagatgaagcagcttcagttgcaaaaacattccagtacactgttgttaactataggcaactactacttttgtgcagtagagctctagtgcttatctattttgttaaactgaaactttatgcccactgactactagctccctacttcctgtcctacagcccagggaacaaccatcccactctttgtttctatgaatttgactattttagataccctatttaagtgcatgcaggatttattcttctatgactggctaatctcacttaccataatgatctgcaggttcaactatgttgtcatatatgacagaatttcttccattttttttttgagatggagtctccctcccctgcccaggctggagtgcagtggtgtaatctcggctcactacaacctccgcttcccaggttcatgcaattctctgcttcagcctcccaagtagctgggattacaggcacctgccaccatgcccagctaatttttgtatttttagtagagacggggtttcaccatgttggtcaagttgctcttgaactcctgacctcgtgatccattcaccttggcctcccaaagtgctgggattataggcgtgagccaccacacctggccaaatttcttcctttttaaaggctgaatactattctatcttatgtttatatcacattttctttatccattcattttttgatggatttttaggttgtttccacattttggctattgtgaatagtattgcagcaaacataagagtgctaatatttctttgaaaacctgatttcaattcttttggacaaatactcagaagtgggatttctggaccatacggtgcagttctactgttaattttttgaggaatttccatactgcttttcacagcagctgcgccattttgcattttcaccaacagtgtgtgagggatccctttctccacatcctcattagcacttgttatcttttgtttttccagaatggccatcctaacaggcgtaaggtgctatctagttgtggttttgatttgcatttctttgatgagtcatcttggcctgtccttgactggagacacattttggaagctgttggcactctctgttaatggacatttgggttattccctcccgttctcccctgaactggctcttcccaggttagtaggaggaagagtgtgtacttggtgctgcaggactaagattaagccctagtgaaatctgtaacatctttttgggcattcccatggatcagctatagcaactcatttaaggatttttttcttgttacagatacatcctgctttagtgagctcagcttctctgccaacttcatctgtgaagctgtcttaaagtatgagaagtcattatcagtgttcaggatctcaggaaaggatggtctgatctctttgggcccagagcgtttcacctctcaagcatcctaagttcttcagtgttctggactccatagtggggcatcaagggtcatcagggctgattctcagaggcctagccagctcagccgaaatgtccaaggctcaggcagtgggccctggacaggggatgttggcatcctccaatgaaatgattccatccatcttcctgagacaggaaggtggacaggaatctctctaaggaagacacatgagatctcctctagtctgtggtcagccttgaggtaccacacctgcccaaggtgagcaggtttttggctaagggtgaatggttcatatcagttctcccctaccctggatgcattgtctgaggtgttttgcatgctaggctcttggcctctgtctcagagtcttgaaaagagacagagcagagctctcctgctcacagtctgtatctgcactcatccaggatcttccacttaaacgagctctcaacatcatggacaaacttccagcatgtgagtagattcacatctgaggctacatctttggtgtttgcaaaatagtgataaggattccatggttgaaagaggaagctgtggtcaggccccaccactccagggacagtagctcagtgctgctctgaaggggcctggctgcccctttctgtccactgatggctgagataagaatattctccaatcttgaaaatggcttataagtctttaactctctagagttgcagggaccttcttggggtttattaacgcaataatagaaaaatagttattgcactcaagttgcttaagaggccctctctggacaggagcatcaaagattaacaaagcagatgaagccacttgccccagggtggtgaacttgctgagcctgcctgtggctctttccttctggctgtcacctggttgctccagtaggtcattcagatctccatgtcctactaagaaactcccctcatttatcccactaggaaacatccattacccttatcattttctatccactcagcccaatttatttttctccttgcagttatcacaatgtaaacccaaagaaggtacagacagttctaccttagcactgtcttatcctcatgccaaagataagtttgtggcaagtgacatttgcctactgaagaggcaatttcctgaggagactgttgagtagagatgatgaaacggtctttggaggagcttcaaaaagggaggtctagaagaagagcccagtgtgtttcacagatcccagagcgggaggcagaggtcagagaagccttgcgaagtctgctccacaattccagattctataaaaataacaattattattagttttttgaatattaataataattattcattagaaacaagatataatagtactacttgttaatcataatataatcataaataattaataatcacatacaactattaatcacattatattattaatatattgttattaatatgccactaatagcatattcatatcatataaataatattaatatagtataccaaatatattaatatatactgttaatatgctaatatattcacatgtaatcaataatacattaatatcttaatattgaaagcatatcaacattaaaatgtactgataaactattttactaatattgtataaatattattaatgatacattattaataaactgaataatgttaatatcaattaatattaatgaccaaagacccaccaacatgggtcgtgttggcatcaagactgtgacgaaggtggcctaggtcatcgtagaaaagtactacatgtgcctgggcaatgacttccacacaaacaagtgtgtgtgaggagatccccattatcctcagcaagaagctccacaacaggagagcaggctgcgtcacgcatctgacgaaccagattcagagaggtccagtgagaggtatctccatcaagctacaggaggaggagaaagaaaggagggacaattatgtccccaaggtctcagccctggatcaggagatcatcgaagtagatcctgacactaaggaaatgctgaagcttttggactttggcagcctgtccaacctgcaggtcactcggcctacagttgggatgaatttcaaaatgcctcgtggagctgtttgactctttctccaatgctgtaatatacagcagtcactggattttattttcaataaacctgggacaacagcaataaataaatacataaatattaataaactaatgtcaatattaattatcaatatccttgatagcataattgagaatatgttatattaatataattaatatattaacataaatatataatgtgaatatattaacatcaatattaataacatgttaatatagcaatgttatattaatataatttattaatatataaatatttacatagtattaatatgctagtctctctatattaatatatttacatagcattaaaatactattctctatattaatatttatattaatattcttaggcctcttttgtatttgttgcaccctaagtctgttcatttccttctcctcagctgacatttggagcatagcagtcgatgatgcccacacagacactgcctgagactcacgcccctggagaaacgcagatttccttattttccaggtcaagtcctgccagccatagaaaggacttctttggtgccaactgctgtgaaatgcctgccttggaaatctcagtgctcccttgtacctgtctgagcccagggaaatgccatactgtggcactgctgcatcctgtatggctacccaaggatgcccaggactgggtttgaaagagatgagacatggccaggtgccgtggctcacgcttgtaatcccagcactttgggaggtcaaggcaggtggatcacaaggtcaggagtttgagaccagcctggccaatatggtgaaaccccatctctactaaaaatacaaaaaaattagccgggcatggtggtgggtgcctgtagttccagctagtcaggaggccgaggcaggagaatcgcttgaacctggaaggtggaggttccagtgagctgagatcgcgccactgcactccagcctgggtgacagagtgagactccaactcaaaaaaaaaaaaaaaaaagagatgagacactagtgtctcatgagtagaacctggaccagacacaaatctccattcccaatgtttagtgcctcattagtgcccaacaacaagatattgggtctatgtgggtaggcctggggcatcctgtacaacaggagatgtgttaggggagggagaacagatcacaaattcatggagagctatttgcagagcagatactcccatccactctgatatgtagttaatgttcagctgttcctaaaaagcacacccaacaatgggtgttctattccagcctaggaaaatgtagaggcaaggggtctgaggccagaggacaccactagatggaccactgctcctgactgtgatgttgtggcccactcaggtcccagcaccccatggtctgggggaaaatttgctggttcagccagagggctggatggacagtgtttgctgagtcacagatatctctctcatgtagcctttgtctccacagtggtgaccaggaggcacagaacccaaacctggtatctcagctctgtggcgtctttcttcaaaatgagacgaatgaaaccatacatatgcagatgagcatggcagtgggacagcaggccctgcccttgaatatcattgcccccaaggctgtgctggtctccctctgtggggtcttattgaatggcactgtcttctggctgctttgctgtggggccacgaatccctacatggtatacatcctccacctggtcgctgctgacgtgatctatctttgctgctcggcagtggggttcttacaggtgactctgctaacttatcatggagtcgtgttttttatccctgatttcctggccatattgtctcccttctcctttgaggtgtgtctctgtctcctggtggccatcagcacagagcggtgtgtgtgtgtcctcttccccatctggtacagatgccaccgcccaaaatacacatctaatgttgtctgcaccctcatctggggcctgcctttttgcatcaacatagtaaaatcacttttcctaacttactggaaacatgtaaaggcatgtgtcatatttctaaagctttctgggctcttccatgctatcctttcacttgtgatgtgtgtgtcgagtctgactctactcattagattcctgtgctgctcccagcagcaaaaggccaccagggtctatgcggtggtgcagatctcggcccccatgttcctactctgggccctacccctgagcgtggcacccctcataacagatttcaaaatgtttgtcaccacctcctatttaatttccttgttcctcattataaacagcagcgccaaccctatcatttatttctttgtggggagcctcagaaagaaaaggctgaaggaatctctcagagtgattctcc

SEQ ID NO: 3439 - DNA, 6000 bp, Homo sapiens
aggctcaggtgatcctcccacctcagcctcctgagtagctgggactacaggtgtgtgccaccatgcctggctcagtttttctagagatgaggtttcaccatgttgcctaggctggtctcaaattcctgaactcaagccattcacctgccttggcctcccaaagtgctgggactacaggcaggagccaccatgcccagtcttctctccattcttctagcctcaaggcaaacttgctcacctctttgaaagaactaagaaagtgttttgggaatccaggggaataggttatcagccctgaaaagagtgccccaatttactgatgagccccagtttgttgagaccagccaaggcaacatagtgagaccctgtctgcacaaaatatttttaaaaattagccagacatggtggcatgcatctgtggtcctagctactggggaggccgaggtgggagaatcacttgagcccaggagtttgaggccaggtgggaaagacggtcagataggaaaatatgtccagaggcgttgtgaggatatgaccatatggaaggtactgtccttcagctcatacaattcataaagcaacccaagaagcttgtttgcagcatggattgaattaatattttccattgtgttgaatttttaactttggattattctatcacttttaaaaaaaaaaaaaaacctttctctgtgtctcccttttttcaaataggatcttcaacaggatggcagagatgcactagatcattttgtcttctttttctttagaagagttcaggtgttgctgcattttttctggaacaaccatttgctgtaaaaggaaagtaaaggtcaagtggtcaagttctgttttctttttaccctctgagaaacatgaatcccactgggacagatgggaagaacacccttctccgtctccctctttttgtacccatcactgttggtctacacccagtttgttgaagaactgcgggttcacgagccatttgtctcttcggaggagctagctatgagatgtctgcgatcacatcacggtaaagcccaaggagtaattaggaccccaggaagccttgctgcccagaaaacaccagcgctgtggatggtcccagggctccttgtgaggaaaccttgaacatttccttccaggaatgaaagagaacctcgtcctcaaactaaaggccacagaaatgggcactacctcctggcccactccctgggcaccatgccctctggtgacctgttggctccactcttgtcactcatgtccagatctgcagtgccagcttctccttctcggtgacatgtcacctccctgccccaatcctggctccaaccctctctggaaaatcgaagtgaaacatttgtctctaatactcaaattcaacatatggctcatctcatctaccttcccatttccatgcctagaggccccactactaccactagcaccgttgggtgtttccttctcaggctctgattctacaacatttacgttcttttctcacctttgatcccctcactcctctgtgacccccttcaagtcttccttcaccactccagtgttttcccataccactcgaccctgctcgaaggtatctttccctgctctgtcatcctcttttaggcatgcctgcttaaaatcgggagtgcttagtccttggccaacagtcctgccttctagaagaatgtaagacctgaaagagttatgaatctatcactaggcaaaaacttctcttttcctattgctggatggttttgctattattggttggtgggccctttgcctgtggaatgtatttcactcattctctcctgcacgctgttaggcagttctttcacctgcatgcttcttcttttacctttttgtctacctcatagtccctctctcccctcctttaaaagaattataaatattaggaaagcttgttgttataaattaaaagtttacatatgtatcttgagttcttcataggggaagtgttattttaaaaaattctaaaaatgaaataaatattgttattttattgagcatgaaacccctgtgcatatttcttttttgaaggaggaaccccacagcagggtctagccacttattcctgctcatattggtttgtagactttgattatacatagcattgactttgtccttccaaagggaaatgtctccattttttagtctgtcgcaggcagtgcatatttatttctattattacttaggttctggctgactagccctaaaactgtctttttaaaatttattttgaataggtttttatttatatgattcaaaaatcaaaacaaggccaggcacagtggctcacgcctgtaatcccagcactttgggaggccgaggtgggcagatcacgaggtcaagagattgagaccattgtggccagcatggtgaaaccctgtctctactaaaaatacaaaaattaggtgggtgtggtagcacgcacctgtagtcccagctactcgggaggctgaggcaggagaatcgcttgaacccaggaggcggaggttgcagtgagccgagatcatgccactgcactccagcctggcgacagagcaagaccccatctcagaaaaaaaaaaaaaaatcacaaccatgtgaaaaggtttacaacaaaaaccctttctattattttctactctaaattccagttatgcttattagtttttatgtatccttccagaggttctttgtataaatactaattaatacatacatacatacatacacacacacacacacacacacgtatatttacatacaagaggtagcatgtaatacacactgttttgtaccttgatttttttacttagcgtgggtgttcaggcactgttctgggtgttttataaaagttaacttacttattcataacaaccttatgggataggtattattatttgctcttttttactgttaaaaaattgaggcagtagttagtagagggaggcagtagagtggttaacacaaacttgctcaagggcacacagccagtaaatgacatggctgggattccaaaccaggcaggtgttcctaagtctagattattatccactatgccatactgcctcttggagagcttgccatgatccacagagaactccataaagtgttgtattgtattcagttaaatgaatgtacataatttggctgggtgtggtggctcacatctgtaatcccagtgatttgggagctgaggtgggagatcactggagcccaggagttggaggttaaggtgggctttgatggcaccactgcactccagcctgggcgacagagtgagaccctgtctctaaaaaaaaaaaaaaaatagaaaattaaaattaaaagaaatgaatgtgcattagtttatcaagcctccttttgtggacacctgagttatttctcatactttgctattataaaccatgattaaataagtaactatgtatactttggatatttgttgaataaatttctggtaggcagattgctgggtgaaaggaaaatgcatttgtaaatttgccagaccccgctgtggggttgcaccactttacctcagcttttccagcagattatgttagtaaacttttaaatttttgccaaatttatgggtaaaaatttctatctcagaataactttaatttgcacatttaaaatagtgagtttgtctgagcatctttttctttctctgctgcccaggctggagtgcagtggcacagtcacggctcactgcagcctccaactctcaggctcaagcgatcttccatcctcagcctcctgaatagctggggctacaggtgtagccccaccatgcccggctaattttttaaattttcagtaaagacaggatctcaccatgttgttcagactggtgtccaactcctgggctcaagcgatcctcccaccttggcatcccaaagtgctgggattacaggcatgagccactgcaccctgggcatctttttgtatattcaggagccatttggcatttccttttatgtggactgtttattcatatcctttgctcatttttttttcctactgggtttctggccttgttcttactggtttcttattgctggcctagagcttgtgatgatataccagtgctaagcctactttgtaacagcgtctacaccctcagattttcagcagaaggttgttaatgcttttctttccttttcttcggtgtcttctggtttgtttttatgcgcacaacctctcttgagacagggggagctgagacagatggaaagggtgatgggtgggcaggcaccaaccccggagcacccagaggcccaggaaaaggtgtcagtcgggatctccgagtagtctggccctgctcaggagagcacagccgctctgatggtggtgcgacggttccggacctgtggggcctcagcggggccaaacggcaggccgagacagtatcggggccgggaaggtcactcacccctaaagggagaggcaccatgcgaggccccttcctatcctatgtgcggagactcacagggtccttcctggtcctgggctcgggaccgtgagagacgcagttggttccgagttcaggactaggggtccccttagatcctcagatcctgcagaatcccggctctgccccagtgggagccaaggccaggtcgccagagggactgtccgccggctggaggctgtgtgcaggacccacgcctcccaggctagcgagcgggcagcgccccggtgctgcgctcccacggggccggcccctgccctgccctgccctgctcctagcccgcagcggcgcaagtggaaccgcatcccgctctttcgttttcgtttcccggaaggatagcgattaccggagcgcctcgcgcgcctgcccgcctgcggaggacccgggcgcacacgccttggcgcttctcgaaagagatttcctcccacgcgaccttccagttctcggagccaggttaggggtttggcggaggaggactgcggggcgcgggcctagggccccagcagccacagccaggggagcgctcaagacagaaagccggtggcttcctcacctccacctgtaatgcaggtaagagcctggcggctgaacacgcagcgcgcacgcagagccacctgctcccgcatcctttcctcaccacctagatttccaaacctattttatcagaccttttacctggcgggaatctctctttccaacacattcctaaacctcacatccatccctcactcacttccccttccacctccagacgcgggtcaccgcccctgactctctcggtgtcatacacagctctgaaggcatcacgcacagcccctgcgggccctttccgcagcccccttaccactggtcgcccctacaccaaccagatgtgaggtctttggaagttcgtgcgccagccaggtcctcacagctggtgaacgcattctcgcagggagcccctctttagcagcctctccccactcgccggttttctaggtgcctcgagactgcccccagagctggcgccccgtcccactccaaggcctttctccactcccctctcgccaggacccatacccattatcagacccttccctggcctccatgctgaaacccaggagtctgatcctcagcagctccgtggctggcgtttcccaggcagttacagcctcggaattccccgctcctcttacttggatgaggacagaggagtagacaaagagcctcctgcaagcctccttggcaagtccgaggcaagtcctgtgccttgagccccttctccagcaaggcaagcttccctttccccaccaggaggcaacccctgaggtctgattacttgggaaacagcaccaaagggggaccggctggaaatgaagtgagaacgacccggaaaggtgttgaatcccctttcgcagcagccaaggcttctggagtttgctttgctggctccgatccaaattctctctcggcagatatctctcctcggatcccaagagatgaatgtaaagcttttgacaatcctagagtgaaaaatgact

SEQ ID NO: 3440 - DNA, 6000 bp, Homo sapiens
gcagaggattggaggcaggaggacagcaaagcgcttggggcaggagtgcatctcgtgtgtttgaagaatggcaaggaggccagtgtggctgaagctgagtgagggagaaggtcataaaagatatggtcagggccaggcgtagtggctcacgcctgtaatcccggcactttgggaggccggatcacttgaggtcgggagttcgagactaggctgaccaacatggagaaaccctgtctctactaaaaatacaaaaaaaattagccgggcttggtggtgcatgcctgtaatcccggctactcgggaggctgaggcaggagaatcacttgaacctgggaggtggaggttgtggtgagccgagatcgtgtcattgcactccagcctggtcaacaagagcgaaattctgtctcaaaaaaaaaaaagatatggtcagaagggtgggtggtgggcagattaggtagggccttgaggtcactgcaaggactttttttctaagtgaggtggtgccatcggagggcactgagcagagaagccgcatttcaacagtccacagagggggctgtgctgagaacagactgcagggggcaggcgggggagcatttgtgtctgacccatggtcttctttttctgatgttccgacataaacagttgttactttctgctccaaaatacttaatattcacctcacctctttgcccatctaagtcctagacattattaattattattattattattgagacaggatctccctctgttgcccaggctggagtgctgtggcacaatcacagctcactgcagcctcaacttcccaggctcaggtgatcctcccacctcagcctcctgagtagctgggactacaggtgtgtgccaccatgcctggctcagtttttctagagatgaggtttcaccatgttgcctaggctggtctcaaattcctgaactcaagccattcacctgccttggcctcccaaagtgctgggactacaggcaggagccaccatgcccagtcttctctccattcttctagcctcaaggcaaacttgctcacctctttgaaagaactaagaaagtgttttgggaatccaggggaataggttatcagccctgaaaagagtgccccaatttactgatgagccccagtttgttgagaccagccaaggcaacatagtgagaccctgtctgcacaaaatatttttaaaaattagccagacatggtggcatgcatctgtggtcctagctactggggaggccgaggtgggagaatcacttgagcccaggagtttgaggccaggtgggaaagacggtcagataggaaaatatgtccagaggcgttgtgaggatatgaccatatggaaggtactgtccttcagctcatacaattcataaagcaacccaagaagcttgtttgcagcatggattgaattaatattttccattgtgttgaatttttaactttggattattctatcacttttaaaaaaaaaaaaaaacctttctctgtgtctcccttttttcaaataggatcttcaacaggatggcagagatgcactagatcattttgtcttctttttctttagaagagttcaggtgttgctgcattttttctggaacaaccatttgctgtaaaaggaaagtaaaggtcaagtggtcaagttctgttttctttttaccctctgagaaacatgaatcccactgggacagatgggaagaacacccttctccgtctccctctttttgtacccatcactgttggtctacacccagtttgttgaagaactgcgggttcacgagccatttgtctcttcggaggagctagctatgagatgtctgcgatcacatcacggtaaagcccaaggagtaattaggaccccaggaagccttgctgcccagaaaacaccagcgctgtggatggtcccagggctccttgtgaggaaaccttgaacatttccttccaggaatgaaagagaacctcgtcctcaaactaaaggccacagaaatgggcactacctcctggcccactccctgggcaccatgccctctggtgacctgttggctccactcttgtcactcatgtccagatctgcagtgccagcttctccttctcggtgacatgtcacctccctgccccaatcctggctccaaccctctctggaaaatcgaagtgaaacatttgtctctaatactcaaattcaacatatggctcatctcatctaccttcccatttccatgcctagaggccccactactaccactagcaccgttgggtgtttccttctcaggctctgattctacaacatttacgttcttttctcacctttgatcccctcactcctctgtgacccccttcaagtcttccttcaccactccagtgttttcccataccactcgaccctgctcgaaggtatctttccctgctctgtcatcctcttttaggcatgcctgcttaaaatcgggagtgcttagtccttggccaacagtcctgccttctagaagaatgtaagacctgaaagagttatgaatctatcactaggcaaaaacttctcttttcctattgctggatggttttgctattattggttggtgggccctttgcctgtggaatgtatttcactcattctctcctgcacgctgttaggcagttctttcacctgcatgcttcttcttttacctttttgtctacctcatagtccctctctcccctcctttaaaagaattataaatattaggaaagcttgttgttataaattaaaagtttacatatgtatcttgagttcttcataggggaagtgttattttaaaaaattctaaaaatgaaataaatattgttattttattgagcatgaaacccctgtgcatatttcttttttgaaggaggaaccccacagcagggtctagccacttattcctgctcatattggtttgtagactttgattatacatagcattgactttgtccttccaaagggaaatgtctccattttttagtctgtcgcaggcagtgcatatttatttctattattacttaggttctggctgactagccctaaaactgtctttttaaaatttattttgaataggtttttatttatatgattcaaaaatcaaaacaaggccaggcacagtggctcacgcctgtaatcccagcactttgggaggccgaggtgggcagatcacgaggtcaagagattgagaccattgtggccagcatggtgaaaccctgtctctactaaaaatacaaaaattaggtgggtgtggtagcacgcacctgtagtcccagctactcgggaggctgaggcaggagaatcgcttgaacccaggaggcggaggttgcagtgagccgagatcatgccactgcactccagcctggcgacagagcaagaccccatctcagaaaaaaaaaaaaaaatcacaaccatgtgaaaaggtttacaacaaaaaccctttctattattttctactctaaattccagttatgcttattagtttttatgtatccttccagaggttctttgtataaatactaattaatacatacatacatacatacacacacacacacacacacacgtatatttacatacaagaggtagcatgtaatacacactgttttgtaccttgatttttttacttagcgtgggtgttcaggcactgttctgggtgttttataaaagttaacttacttattcataacaaccttatgggataggtattattatttgctcttttttactgttaaaaaattgaggcagtagttagtagagggaggcagtagagtggttaacacaaacttgctcaagggcacacagccagtaaatgacatggctgggattccaaaccaggcaggtgttcctaagtctagattattatccactatgccatactgcctcttggagagcttgccatgatccacagagaactccataaagtgttgtattgtattcagttaaatgaatgtacataatttggctgggtgtggtggctcacatctgtaatcccagtgatttgggagctgaggtgggagatcactggagcccaggagttggaggttaaggtgggctttgatggcaccactgcactccagcctgggcgacagagtgagaccctgtctctaaaaaaaaaaaaaaaatagaaaattaaaattaaaagaaatgaatgtgcattagtttatcaagcctccttttgtggacacctgagttatttctcatactttgctattataaaccatgattaaataagtaactatgtatactttggatatttgttgaataaatttctggtaggcagattgctgggtgaaaggaaaatgcatttgtaaatttgccagaccccgctgtggggttgcaccactttacctcagcttttccagcagattatgttagtaaacttttaaatttttgccaaatttatgggtaaaaatttctatctcagaataactttaatttgcacatttaaaatagtgagtttgtctgagcatctttttctttctctgctgcccaggctggagtgcagtggcacagtcacggctcactgcagcctccaactctcaggctcaagcgatcttccatcctcagcctcctgaatagctggggctacaggtgtagccccaccatgcccggctaattttttaaattttcagtaaagacaggatctcaccatgttgttcagactggtgtccaactcctgggctcaagcgatcctcccaccttggcatcccaaagtgctgggattacaggcatgagccactgcaccctgggcatctttttgtatattcaggagccatttggcatttccttttatgtggactgtttattcatatcctttgctcatttttttttcctactgggtttctggccttgttcttactggtttcttattgctggcctagagcttgtgatgatataccagtgctaagcctactttgtaacagcgtctacaccctcagattttcagcagaaggttgttaatgcttttctttccttttcttcggtgtcttctggtttgtttttatgcgcacaacctctcttgagacagggggagctgagacagatggaaagggtgatgggtgggcaggcaccaaccccggagcacccagaggcccaggaaaaggtgtcagtcgggatctccgagtagtctggccctgctcaggagagcacagccgctctgatggtggtgcgacggttccggacctgtggggcctcagcggggccaaacggcaggccgagacagtatcggggccgggaaggtcactcacccctaaagggagaggcaccatgcgaggccccttcctatcctatgtgcggagactcacagggtccttcctggtcctgggctcgggaccgtgagagacgcagttggttccgagttcaggactaggggtccccttagatcctcagatcctgcagaatcccggctctgccccagtgggagccaaggccaggtcgccagagggactgtccgccggctggaggctgtgtgcaggacccacgcctcccaggctagcgagcgggcagcgccccggtgctgcgctcccacggggccggcccctgccctgccctgccctgctcctagcccgcagcggcgcaagtggaaccgcatcccgctctttcgttttcgtttcccggaaggatagcgattaccggagcgcctcgcgcgcctgcccgcctgcggaggacccgggcgcacacgccttggcgcttctcgaaagagatttcctcccacgcgaccttccagttctcggagccaggttaggggtttggcggaggaggactgcggggcgcgggcctagggccccagcagccacagccaggggagcgctcaagacagaaagccggtggcttcctcacctccacctgtaatgcaggtaagagcctggcggctgaacacgcagcgcgcacgcagagccacctgctcccgcatcctttcctcaccacctagatttccaaacctattttatcagaccttttacctggcgggaatctctctttccaacacattcctaaa

SEQ ID NO: 3441 - DNA, 6000 bp, Homo sapiens
atgatgaaggaaacagttccatggcagggttctgacccacccccaccccccacccccgggatatttcagagtccagcaatgctggacacctatgagaagaagagagtatctatgggaggagttgaggcctaggacccctggagagtcactcttccccactgttgggaggcagcctccaggggcctgggatctggaatgagttgtaaatgttgttcctgtatcaagcactgtcctgcttggcgagacgtgtcactggtactcgggaagctggagacagaagcttcccctccctcgggcatctgacaagagaggggaggacctgccagaaaggctgctatttgctgggccccggcgacaggctgtggaggtggatctcagcagtttcctggggcaggagaacatcttgcatccatggatggttctggatttcttcgaaggttggcctatctgatggtctcagggccaagcaccatctaatgagatgctgacattctgcagaaaggaggatagacgaggttatgaatgactcaacttgtttttacactgcaaaggtcttccccatttgcttctcagaggcccacaagtctggggtcccagggaggccaagcattttctagaacactgtgctgggtacccttcaataggaaggtattgactaatatctgggtcctccagtctgctttcagctaaaaactgactcccctcttaaacctgtggttttcaaacttcaatagtgggggcctttcccacaacacccactcaccagaaataggaaggatgatgacaagagattttgatgagacaccactgagcatgatgaaatgattcaattcacctaccaacttacaaacacgaacaccacccacagtgaggtcactggtaccaaaatatttggagctgctgccttaaagaagatgctaaaagagcttttaactttttactccctggcaaaacagccaggaattatcaggtttctgttggtacctttaaaaaagtttttggagaagccagattgtcttttcttcttaatatgctcacacatgccttcctctgacctcccaaggaaagctcaagtgcaaaccatgtgatttatgaggccagctcaagtgtaaatcactcacctacaattctaagccaagggtgacagaatctactggagagtgaagctctccagaatttcaaagactgtcccatgaagactaatagccccattaagaccaataaccccatggccaggggtttccatcagttacctgaagagaccctctgcctgaagaaaacctggcccctgatgatctcttcgtcatgctcgaaaggaatatctccacacaccatatcatacagcaggatccccagggaccagactgccgccgacctgccatggtagcgatggtagcggatccactctggagggctatacactcgggtccctgtgagccaagggaatagaagagaaaacacacttttagcaaaaacaagcacaaagaagctgggtggtatatataactctttcttttaaaaaaaaaaaaaatcccttctctcaggagctaggtgaactccatttttccctctgggctaaggagagtggaggcgcaccttacggcatctctccaacccaaagcattacccacctctctgctagcccaaaccataaactgaaattctttatgaactgctccaagaaacaaacacagctggccgcagacccaaaacttgaggccctgtgaggcaggaccgcctgcgaaggatgaagggatgcatgtctgcacaaccaagaaaggtatctcatagactatccttaaattgcattcaccactgcccaggagcccgggtgagattctcatggccgacaggatccaagcaaggatgcttgcacaacatcctaagtcagggtgccctttgggaggccttcctccccacccgatgcaagcaggagcagacacccacaccctttcctccctagactggaaaggtagacagagctgcagggttggtttcagaccacgtgattcctgtttacaaactttgggtagtaaaagaaaaaggaggggccatgccgctggtgctcaccagggggcagcaaagacttgaaagaaaaaacatgggaggacccggccagccattaactgttaaatacaaaaaatgcagcccaacccagcgtcctccaagggcaaataaacataaaccacaagcccgagtcacaagttttgaaaggctgtcgtttgttaggttaagccgctcagatgatgacccaccctccgcagctttgatctcaggctctccattccttcttttctgaaagaacccgctccaagcccctccctaggataggttttcatcctctctgcggagacacccaactaattttcaaaccagcgacagatcttatttcacaacattcattcctgactctctctccccttaacactaaagaaaaaaaaaagccaccagtaataatatagttcctattccttaaccttccctagatcagaaaggagttaagaactgcagctctaaaactaccatacagaaaactaactcccttataaaataaaacaaaaattacaaaaccggcatcaatttccacctcttcccccgcccccatccttttactggcggggaaactgggtcagactttagaaaaatctgggctaccgccggttgcccacaacctcttattcatcgggaaagcctggaactaactgaattccacttgaagaataaaatcatgccagaaacattacaggttcagctggctgaaaatccccggctttactacgctgggaggctctcctgcgtcccaccccggctagcatcgagccaggcggcccaatgacctttacaaaaggctggcgcgggagactggccgaggcctccggactgggccgggccgggccgagtcacctgggcagctccctcccgggcctggctcaccatcgaagtccgtgtagacggtgtccttgagcagcgcccccgacccgaagtcgatgagcttgagctcgccgcgattgaggtcgataaggatgttttcgtccttgatgtcgcggtggagcaccccgcagttgtggcagtgccgcacggcctccagcacctgccagaagaagctgcgggccagctcctcttgcagggctcccctttccgtgatgaagtcgaagagatcttgcaccggctcgggcctctccaggatcaggacgaaactgtcgggcctctcgaaccagtccaggagcctaatgacgccggagaaacccgagctcaccttcttcagcaggaccacttccatgggcactcgagtgccattaggctgcaggggcgagggggccgcgttagggcgggagtcgggggcgcccctcaccccacccactcatcctgggggtcgctcctgcagggcactcaccagctctccccagtcggaaatccggtccttctccacgtgtttgatggccacctggaagcccagggtctccgtcaggttccctcgtccgggctaaagcacgcccgtgcgccccccgcccggcgcgccctccccaccgcggggcgcccactcaccggcaagttgtcggagacgcggatgcctgagtagaccgagccgaagccgccgctgcccagtagcgggcccacctggtactgcgactccaggggctccttctccttgcctaggaaagggggaagcacggggactcagtgccggcccgcgagccgccagctccccacccaggagatcccgccgccgccccgcatccccgggccggaggcggggggtgctctcaccgggcgccagcttggtggcgtgcaggtcgttgcagggcgcggcgcgcaggtgggcaagcgagttgattttggacaagagcatcccaacctccaggatgtcggcgcagggacggtgcccagaggagctgccgcaggagccggagccggggctgtgccgaaggctatgcctggggctgtggctgtggctgtggctgcgggtggcgttgcggctgtggctgcggctggcgcggaaggccgagggcgagtcggaggacaactgagggcgctgccgggactggcggcgggagggcgcgccagcggggtcgggcagcgctgagaacggcggggtgagcggctcgtggggctcgtgcggcagcgccgcggggcaggaggctagtggttgctgctgctgctgctgctgctgctgctgccggtcccgccgccgccgctgccaccgactcctctcgggcctcctcagccaccgcggccgctgcagcagacgcccggctcgccccgcagccaggagtaaaggggaggagcgcgccggcggggagggcgcgcggggagggcgcggcgggcggggacggggcggggcctctccgggaggccaaggcggggagcagggctgccgggccggccgagggaggagagggggtggggaagcggcgggactgggcgactcccctcggcccccgccccgcgcgctctgtggccgcgccccggccccgcccctgccagcgctactccagccaaccagaggccgattgatctgcataactcggcgcgccccgcccccgccccgcccagctctcgcggtcagaatggtctctacgccgccacgacgtggcgggaaggaaaaggcgccaaaatggagggggaggggcgcggggcgtgaggggaggcgggagctgggtgtagggccgcgagggaggaaggatggggaggggcgtatcgattcaaacccaaacaataacaaagccatcaaaggccgcccgaggccggctctgcggctctccgtttcgctgagggttttgggtcaagggctcgagccggagcataacaagttgcgcggagacgacgggcgttagtgtgtcaggcggggaggccggcgcgccgggtgtcggactgtgtgtggggatgccgacgagggtggtctttctgtgtgactcagacccgagacctccaagtcggctggggcgggctgacgtcgcgctgtaggctgggggcggattctgggggtttgtgtgttggggggcgcgtcgggggcgaaggatccgcaggacatgagtcacggagggagtggaggagtcaggcctggaacagaactggaggcgggagccccgctcctgcgggaaagggatgcagccctcagtcgttccggccggctaaaagctcagccacgggattcccattttagaaatgcaaaagcaccagcgaatcctgatttctgggaagggatgtgtgtcaaagggccgggtaaagaggaaatcacgaagcaaatgttagtgttgtgatgccagatgctgcctcagccccttctgtgagggcggaaaattcctcatctaaaacgagggtgggagggtgcgcttgatttaaccagttttcacgttgtagtcaccttttcatcagcctgttattaccaggcaggcaataccagcaattattggccaaccccaagtcttgtctcaaaggaaaccccccaccctctgcctcccttggaaataacccggaacactgaccaattccacttgcatcctttgtccttttaaacttcatgtagagttgataacgacgtgtgaaatgagtaaattaaaatactatataatccataaattgaattgtcagtggcctaagtaattgaaagctaactacattctattttaattttttgaagtgcctgccatttaaaggaaaaatcaggatccctatagctgtcattagtgaatttaaatgtttcctttgaaagttttctacagtgcttgctttataaaagtgcccagatcctccacaacttttatgaatttatcctacaaaatattacatattttccttttgtttgtgtactgtggccgaactcattcattttttatgactaggagaaaacccaagggaacaagaattactccctttttgcagataggaaaatgaaacataaataggatggcacagggtcatacagcagctaagagaggagatgaaatgacccaaattcacctcctgagtattcaaagctttccgcttatcagggtctaa

SEQ ID NO: 3442 - DNA, 6000 bp, Homo sapiens
ggaggctcaggcagcaggatcgcttgggcgcaggtctaggctgcagtgcgccgtgatccattgtgccactgcactccggaccctcggtgaccagagtgagactttgtctcaaaaataaataaataaaaattaaaacaaaaaaagaaatattcagtttttgttttgtaaagacagggtttccctatgttgcccaggctgctctcctgagctcaagcaatccgcctgcctcggcctcccaaagtgctgggattacaggcgtgagccaccatgcctggtctttttaaatttagaatgtttcctgtctggccaggcgcggtggctcatgcctgtaatcccagcactttgggaggctgaggccgccggatcacttgaggtcaggagtttgagaccagcctggccaacctgatgaaacccgtctctactaaaaatacaaaaattagtcgggtgttgtggcggacgcctgtaatcccagctacttgggaggctgaggcaggagaatcgcttgaacccgggaaggggaggctgcagtgacccgagatcatgccactgcactccagcctgggcgagagtgggactctgtctcaaaaacaaataaactaaataaaataaataaaaaactgagtaaattttttttaggagataaatgagtgatgcagattcaatacgtctctacctgattaattataaatagcgtatagagtcttagttatacaatcctagttatataaatgcattgactagacttacagacactttaaaaaattgtgtaccgatatcactttcaaactttcttctaaacttgttttttaaaaaaatttcgtgactacagaacttgctgaagtcattgtttttttgttttttttttttgcataagcatatagtccctggatgaagtcattcctttgacaatgacttgattaaacccatatcaggcagaatatgaaaaccacctaaggattaatttggatattgttcaaattaatattaataaatgctcctcttcccagagaactgttagcataattgtggccttttatccttccaaaagcacttgtcatttaattattagggtgatttttctgattctttgttagattctttgagatagcacaaatagtgctaattttattaagactatatttcgataaatcaaaacatcaagttccctactctcgaggagtaacttttgacccacaacacatctgaatgtttactaattatcttttaaagcagttttaagtaaatcaaagctgtttgccaagcaaggtccatgttttgtaacttccagctgtgaagcccccactatacaaagtagatatattaaatgttaatcactttagctctaattaaatatttagtccttcaaagacctagaaaaagtgaaaaaggttgaagttgatacatatttttttttctaaaaggcctaaaagatctactagaaacaactattttaaatcacatctctccccaaatggttaaaaatcgaactattaatccagtagtttacctttggtaccttctaggtgtaagaccgtttgggctgggcgcggtggctcacgcctgtaatcccagcactctgggaggccaaggcaggtggatcacaaggtcaggagatcgggaccaccatggctaacacggtgaaaccccgtctctactaaaaatataaaaaattagccaggcgtggtggcaggcgcctgtagtcccagctactcgggaggctgaggcaggagaatggcgtgaacctgggaggcagagcttgcagtgagccaagattgcgccactgtactccagcctgggagacagagcgagactccgtctcaaaaaaaaaaaaaaaaaaaaaaaggccgttttaaaaaacatcatcatcataaccacgatcaacattattgccatcatcattgctaatatttattagaagtttactctgtactgggttatatgctttacaaacaagagttttatttgctccttacaacaaccctatgaggtagatgctgttattatctccattctgtctaaagcttaataaggttaagtaacttgaccaatgcctaactagtagctgccagatcccggaattgaaaccaggctaacttagtttaaagcccttgctcccaacttttatgttcccgaagcccacttaattcatttaaatttggtataaattgactttaattatggcctttttgttagaatccattatagtcttctcttttatcaacaaatgttggataaagtatgcattcagggaggctgggcatggtggctcacacctgtaatccaaggaggctgggcatggtggttcacacctgtaatcccagcactttgggaggccgaggcaggcggatcataaggtcaggagttcgagaccagcctggccaacatggtgaaactccgtctctactaaaaatacaaaaattagctgggcatggtggcgggcgcttgtaatcccagctacttgggaggctgaggcaggagaaccaattgtttgaacccgggagatggaggttgcagtgagccgagatagtgccattgcactctagcctgggtaacagggcgagattccgtctcaaaaaaaaaaaaaaaaagggcattcaaggaataggaagacaaagtataatggaaaagtaaatgaacaaaaaggatttaaaaaaacaaatcccaactgtcagattagtggacagtgaaccaatgctctgagtttgttcatcaatctgtggtagaactacaattgtttcctaaagagtggaaaggctttgaataaaagtggagaggtagagagggctctcccaggacaggttgattgcttccgcaaaggcaaagggtctgtaaagtgctaggcgagtgggaacaagtgggaatagttctgtttgactacatttgagggtttgagaaaggaaagggagggtagaagggatggaagtgggaatcacatatgtttaatgatgtcttgttcggtgccaaggacagttttagaccctgataagcggaaagctttgaatactcaggaggtgaatttgggtcatttcatctcctctcttagctgctgtatgaccctgtgccatcctatttatgtttcattttcctatctgcaaaaagggagtaattcttgttcccttgggttttctcctagtcataaaaaatgaatgagttcggccacagtacacaaacaaaaggaaaatatgtaatattttgtaggataaattcataaaagttgtggaggatctgggcacttttataaagcaagcactgtagaaaactttcaaaggaaacatttaaattcactaatgacagctatagggatcctgatttttcctttaaatggcaggcacttcaaaaaattaaaatagaatgtagttagctttcaattacttaggccactgacaattcaatttatggattatatagtattttaatttactcatttcacacgtcgttatcaactctacatgaagtttaaaaggacaaaggatgcaagtggaattggtcagtgttccgggttatttccaagggaggcagagggtggggggtttcctttgagacaagacttggggttggccaataattgctggtattgcctgcctggtaataacaggctgatgaaaaggtgactacaacgtgaaaactggttaaatcaagcgcaccctcccaccctcgttttagatgaggaattttccgccctcacagaaggggctgaggcagcatctggcatcacaacactaacatttgcttcgtgatttcctctttacccggccctttgacacacatcccttcccagaaatcaggattcgctggtgcttttgcatttctaaaatgggaatcccgtggctgagcttttagccggccggaacgactgagggctgcatccctttcccgcaggagcggggctcccgcctccagttctgttccaggcctgactcctccactccctccgtgactcatgtcctgcggatccttcgcccccgacgcgccccccaacacacaaacccccagaatccgcccccagcctacagcgcgacgtcagcccgccccagccgacttggaggtctcgggtctgagtcacacagaaagaccaccctcgtcggcatccccacacacagtccgacacccggcgcgccggcctccccgcctgacacactaacgcccgtcgtctccgcgcaacttgttatgctccggctcgagcccttgacccaaaaccctcagcgaaacggagagccgcagagccggcctcgggcggcctttgatggctttgttattgtttgggtttgaatcgatacgcccctccccatccttcctccctcgcggccctacacccagctcccgcctcccctcacgccccgcgcccctccccctccattttggcgccttttccttcccgccacgtcgtggcggcgtagagaccattctgaccgcgagagctgggcggggcgggggcggggcgcgccgagttatgcagatcaatcggcctctggttggctggagtagcgctggcaggggcggggccggggcgcggccacagagcgcgcggggcgggggccgaggggagtcgcccagtcccgccgcttccccaccccctctcctccctcggccggcccggcagccctgctccccgccttggcctcccggagaggccccgccccgtccccgcccgccgcgccctccccgcgcgccctccccgccggcgcgctcctcccctttactcctggctgcggggcgagccgggcgtctgctgcagcggccgcggtggctgaggaggcccgagaggagtcggtggcagcggcggcggcgggaccggcagcagcagcagcagcagcagcagcagcaaccactagcctcctgccccgcggcgctgccgcacgagccccacgagccgctcaccccgccgttctcagcgctgcccgaccccgctggcgcgccctcccgccgccagtcccggcagcgccctcagttgtcctccgactcgccctcggccttccgcgccagccgcagccacagccgcaacgccacccgcagccacagccacagccacagccccaggcatagccttcggcacagccccggctccggctcctgcggcagctcctctgggcaccgtccctgcgccgacatcctggaggttgggatgctcttgtccaaaatcaactcgcttgcccacctgcgcgccgcgccctgcaacgacctgcacgccaccaagctggcgcccggtgagagcaccccccgcctccggcccggggatgcggggcggcggcgggatctcctgggtggggagctggcggctcgcgggccggcactgagtccccgtgcttccccctttcctaggcaaggagaaggagcccctggagtcgcagtaccaggtgggcccgctactgggcagcggcggcttcggctcggtctactcaggcatccgcgtctccgacaacttgccggtgagtgggcgccccgcggtggggagggcgcgccgggcggggggcgcacgggcgtgctttagcccggacgagggaacctgacggagaccctgggcttccaggtggccatcaaacacgtggagaaggaccggatttccgactggggagagctggtgagtgccctgcaggagcgacccccaggatgagtgggtggggtgaggggcgcccccgactcccgccctaacgcggccccctcgcccctgcagcctaatggcactcgagtgcccatggaagtggtcctgctgaagaaggtgagctcgggtttctccggcgtcattaggctcctggactggttcgagaggcccgacagtttcgtcctgatcctggagaggcccgagccggtgcaagatctcttcgacttcatcacggaaaggggagccctgcaagaggagctggcccgcagcttcttctggcaggtgctggaggccgtgcggcactgccacaactgcggggtgctccaccgcgacatcaaggacgaaaacatccttatcgacctcaatcgcggcgagctcaagctcatcgacttcgggtcggg

SEQ ID NO: 3443 - DNA, 6000 bp, Homo sapiens
cctgctgtctctgcttaaaggctttttctgtctattcttcaccaaactcatttatctttcagataacagcttaaaaatcactgtatcagaaaggccttcccttggttctccaacataaattagggctccctcttacatgcttccatcataccagttatttactttcacataatgtctaagggtatgtaatcacttatttgtgtatatgtgtgcatatgtgtgtatttgtatactttcttttttggtctcccttaacacattataagctcccagaggacacaaaccatctgccttttgtctattactgaatacccaatgttcagcacagtccttggcacaatatgtattttttttaatggataaatgaccttgtaaggtgggtaactccttactatagatgaggatactaagatccaaggttattaagcaacagaaaaactgaatcagtactctaatgtctgcctagaaagtactagaaaaaattttttttccagcatgatctgtttgaatctgaagaacagtagattattattgtctagccaaatactgtgatttctactagttttttccagatggccacatatgcattcatatgtatatgcagacttatattctaagtggtaaaattttcaaagctttctttcttggaagaaaatattttctgatttttctgtttttctttctactcagctacaattcatgatccttggacactgttcagttcattagagtcagacacaatgaaagaacgagcaagggaacaaatggacattttttgctggatcagtggaggtactagattcaaacaatcatttaatgacttaataactaacttttcagaatgttttccttaaaataattttgtgaaactcatttctagtcactgcaggtaaaatttctttcaaaaccttttaggttaattctgttgctatttctactatagcacaactacatgatttaaaaggccaggtttccatgcaggctttcattatttcactgccttcagtgagagcatgagaatctctgctgtgtccttgagagcagcctcaagtcaaataaaaagtagactttaattgcactgagcatgtctgcagggaggataaacactttttctctactcttgtaagttcagtagcagaagcctgcaaattaaattgacaaatgacagataaacaggagaaaaggtttatttcatatgcacatggggggcctcacagaaaggaagtgaaaaccccaaaaagcagttaggcctaagagcttatataccatttttttaaaaggtgataaattgtggagaagtgataagacaaaggaaaaaggggtgggacttgtgaaggtggtaaattgtggccgagtaaactatatgagggaaactattggaagacaagggttattttgcaaggtttgccatatgactcaagttggtgctctggtgataggaatctcctcctcctagtgtgggatggggaggaggaacaacttcacaaagggaaatttatgtcctgcttttaggcagaaataggaaaagcagagtgtttcttctgttctgctgtttcttaattgccttcaactccaaataatgcttgtgtcaaagtggcatgttttggggtggcatattctggatctccttcaatgtccaacaatcccaaggaaatggaaaagtggggaggaaagaaatgattttgggggaaccccctttcaggaagtttttctcaaatttggatcccagaagtactccctgagaccctctaagattttcttttttttttttcccattaaaaagaaatttggcaagatatacataaaacataaaatttaccatttttagccatttttaagtataaagttcaagagcatcaagtttattcacatcgttgtgcaaccatcaccaccatctatctccagactttcttcatcttgcaaagctagaactgtagacataaaacagtaactccccattcccacctgcccttcctttcccacaaccacttcccaccccccaactgtctctatgaatttgactactctatgtaccttatataagttgaatcatacagcatttgtccttttgcgactaggcataatgtcttcaagcttcatccatgctataacatgtgtcagaatttccctctctctcttttatttttgagacaggatttgcccaggctggtcttgaactcctggattcaagtgatcctcccatctcagcctcctaagtagctgggattacagggatacctcgccacacctgggtccctccttttttaaggctgaataatattttattgcatgtatatactacattttgttcatccattcatccattgatggacatttgggttgcttccaccctttggctattgtgaataatgctgctataaacatggttgtacaaatttttttttgagtccctgttttcaattcttttgaatatatactcagaagtggaattatttaatcatacgataattctatttttaatgttctgatgaaccatacaattttccatagtggccgtaccattttacattcccaccagcagcacacaaaggttataatttttccacatccttgccaacactcatatttattttctgttctgctttgtttataatcatcattttaatgagtgtgaagttgtatctcatggttttgagttgcatttccctcatgattagtgaccttgagtctcttttcatgtgctcatcggccatttgtataccttctttggagaaatgtctattcaagtcatttgccaactttttaattgttttttttcttttctcagaaagggcatcagtacgttactcaagtttaagagatactgccaaccaaatcctagagataaatctgttagctacttgatattaaatttcttacaaatactattgctattataggtaaaataatctccactaatttttaaaattattaagtgtgaattataattcacatacagaaaaatgtgcataagagtacagcttgaattttcacaaatggacacgcatttataactagcgccaaaatcaacggagagaacctcactagaaggaagcccctcttccagttgctaactggaagcccctcttctagtcgctaactccttccagtcactatcccctgcccaccaaggtaaccattatgctaactttgagcctcttagttcttctgtttttgtagtttatagaaatggacttatgccatgtgtacttttgttgtctttttatgctgggcattaggtttccccagttgattcacgttattgcctgtaattgcagatgcttttttgcgttgctgtatagtgtttcattatatgaactctgtgtaatttcattaatttattctattgttgatggtcttttgggttattctcattaaggaattattacaataaatgcagctacgaacattctgatacctgcctgtccgtgcaccctaagtattcgtttctctttgctctatatgcaggcgtggaactgcggggccatagggtatgcaccttttgcagacagtcccaaactgtttttcaaaggagttgttccagtttacattccagcagcaaagtagaagaatgcagttactctacatcctggccaacacttggtattttccatcttttttttctattctattttattttgaaatataaaaacaactgaagcaaagttgagattgcttttgcggaaccttttcgtttttggttcgcttctctgaataattaaccatctcaggcttctattttgtcctgcaggctgtgtgagtgcgttttcgactttgctcgacatttttttgctcacttggccacttaagatgtcatctggtcaagaaaataaggtaggtgtccgaagcggggcaagccctttgaggacactggaagtgtgataactctgtaggcgaaactcatgcggaccgtcattggccgatttctcttttctagagttcacgatctaggagatcctgctcgtctctgatctccccactgccctcccgggctcccttggaggcgcctggaaagctgagccgccgccagccacccgccagaacaggggcggggcagggccgcgggtccgcacagagcatgcgcagacgaagcacggcgcatgctccgcagcgcggcgggtccacagatgaggggagtcgagactcccgcgccccaccacccccggcggagctgctgctgagccactcaatctgagccctggctactaataaagttcgtttaaaaatcataatcattcttaagagagcgaaagagggtgcgaactagccgctcggccccgcagggagagctggcgcgtcgggaggagacagcggcggcagcggttgcgccgcgaccaggaggagccggtggcgccgggcggcgggtccgcggccggtgggggacggtgagtagcggctcgcgctgcggtgcagcggcgctgcactcactcgccctctccaggggctgggggttcgtccggctccactggggaagactcagcttctccccggggtcccgggttgtgccttactctccggagtgggcaggggtatcgagggcaggggcctcccggcccggctcccccatcccccggttcggaccgccgagcgccggctctcccctccctgagcaccgatcccaagttccagctagagaaggtgggcggcagcgccagcccggcgccccctcccagctcccagcggtgggtacctggaattgcctggtgggcgggaaagaggggtggagcgagggcggcgctgcgtccccagtctggccgaacgttcggctttttgcctgccccaagtcccgactggggaaggggcgacccgggctgggccagacaccagtaagggcgtgaagtgctcaggttaggtttgatggcgaagagagtcctcagctccaccctggcatttagactcctccctgcagtgcgaccactctttacccgcgaccccacccttccctagtttcttgttcatagagtgctggaatatgaatgagccaaattgtgctgttccattgacactggttgctacagaattaactttactcggagatccgaggagccatcggcagttcccaggagtaagaacctgagagcgtgtgagagtaagaacttcattatcaggagctagtgaagtggcagtagggtctgaaaagggctgttaacttctctaggtttttatgtatctcctaacatctaggtaatttcattgaccctaagaagtttttcagtatttttacaaatataacctgtacttctacttaaataaaggctgttatgagaaaacaaccttttgattagtgagttaactcaccctttgcttctctaatttattagaccgcattagcaaaatgttaaaagttttggggaaagggtatttatataaagtattattgtcgaggtttttaattgtactcagaagtatgcttatttctaggaacgtaattgttttgatctagtgctttaagtctatagtttctgaaaagcaagagtccgactgcctgttaaaatttaatttggcttttttctttaaatttattttaaggaaattaatttattattttaaaaagtgtatggtaaaattgattttttttcgatgtacagttctgcgaattttagactcatgtaaccaccactacagtaaggatgtagaacaaatctatcgctcccccgccacagaaaaaaaacctaatgtgatcccattatatcatactccttacccctggcaattactaatcttttctagaaatgaaatcataacagttagtaatctttcgatgttagctttttttcactcagcataatgcctttaagatttctccaagttgtttcatgtatggataatttctttttttattgctgagtactattttattatgtggatatgccacagtctgtttcaacatctgcccatggaaggacattgaggttgttttcagttttctgtgattatgaatcaatctgctataaataccatgtacaggtttttgcatggacatgttttcatttctctagg

SEQ ID NO: 3444 - DNA, 6000 bp, Homo sapiens
tgtctagtccagccctttccattagagaggaggtctctcagtatactaagagtatttcaacaaaagtaaatatatatatgagaaagacttgggcagtaaagaaaaaaaaaagatttttattttctaattattctttgttagtaagggccctaaatctagaagtgtatatgctggaacacactagaccataatacaagaacaatcaaggacaaaacaaaaaggaatttagaatgaacagattattccccgactcacactgtgaggggttataactagtcccttagtgaccaatctcagcaaggcagtcattcaagaaacctgcaagtcactctttacattccgtctttttcctacaccatagccaaatcctataggttctacttccaagattaaaaacaaatgcacttttctgtatcacccctgtaaccatctcagtctaaccctccatcatctcttgcctgaaccggccttccattgctctcccattttccactactctatgttttccctagatagcagtcagaggaattttttaaaactgtccagtggatctcctagtctgtgcactaaaaaatcctccaatggcttcccaatatacttgagatataatccaaattacctaatatgacctgcaaggtcttcatgatctggcccctgcttccctcaccactgttctttattttttacataccgctttccacctcactcctgcacactggctccctttcaattattcaaacccagtgaattgtttgctgcctcaggccatcgtacttcctgctgtctctgcttaaaggctttttctgtctattcttcaccaaactcatttatctttcagataacagcttaaaaatcactgtatcagaaaggccttcccttggttctccaacataaattagggctccctcttacatgcttccatcataccagttatttactttcacataatgtctaagggtatgtaatcacttatttgtgtatatgtgtgcatatgtgtgtatttgtatactttcttttttggtctcccttaacacattataagctcccagaggacacaaaccatctgccttttgtctattactgaatacccaatgttcagcacagtccttggcacaatatgtattttttttaatggataaatgaccttgtaaggtgggtaactccttactatagatgaggatactaagatccaaggttattaagcaacagaaaaactgaatcagtactctaatgtctgcctagaaagtactagaaaaaattttttttccagcatgatctgtttgaatctgaagaacagtagattattattgtctagccaaatactgtgatttctactagttttttccagatggccacatatgcattcatatgtatatgcagacttatattctaagtggtaaaattttcaaagctttctttcttggaagaaaatattttctgatttttctgtttttctttctactcagctacaattcatgatccttggacactgttcagttcattagagtcagacacaatgaaagaacgagcaagggaacaaatggacattttttgctggatcagtggaggtactagattcaaacaatcatttaatgacttaataactaacttttcagaatgttttccttaaaataattttgtgaaactcatttctagtcactgcaggtaaaatttctttcaaaaccttttaggttaattctgttgctatttctactatagcacaactacatgatttaaaaggccaggtttccatgcaggctttcattatttcactgccttcagtgagagcatgagaatctctgctgtgtccttgagagcagcctcaagtcaaataaaaagtagactttaattgcactgagcatgtctgcagggaggataaacactttttctctactcttgtaagttcagtagcagaagcctgcaaattaaattgacaaatgacagataaacaggagaaaaggtttatttcatatgcacatggggggcctcacagaaaggaagtgaaaaccccaaaaagcagttaggcctaagagcttatataccatttttttaaaaggtgataaattgtggagaagtgataagacaaaggaaaaaggggtgggacttgtgaaggtggtaaattgtggccgagtaaactatatgagggaaactattggaagacaagggttattttgcaaggtttgccatatgactcaagttggtgctctggtgataggaatctcctcctcctagtgtgggatggggaggaggaacaacttcacaaagggaaatttatgtcctgcttttaggcagaaataggaaaagcagagtgtttcttctgttctgctgtttcttaattgccttcaactccaaataatgcttgtgtcaaagtggcatgttttggggtggcatattctggatctccttcaatgtccaacaatcccaaggaaatggaaaagtggggaggaaagaaatgattttgggggaaccccctttcaggaagtttttctcaaatttggatcccagaagtactccctgagaccctctaagattttcttttttttttttcccattaaaaagaaatttggcaagatatacataaaacataaaatttaccatttttagccatttttaagtataaagttcaagagcatcaagtttattcacatcgttgtgcaaccatcaccaccatctatctccagactttcttcatcttgcaaagctagaactgtagacataaaacagtaactccccattcccacctgcccttcctttcccacaaccacttcccaccccccaactgtctctatgaatttgactactctatgtaccttatataagttgaatcatacagcatttgtccttttgcgactaggcataatgtcttcaagcttcatccatgctataacatgtgtcagaatttccctctctctcttttatttttgagacaggatttgcccaggctggtcttgaactcctggattcaagtgatcctcccatctcagcctcctaagtagctgggattacagggatacctcgccacacctgggtccctccttttttaaggctgaataatattttattgcatgtatatactacattttgttcatccattcatccattgatggacatttgggttgcttccaccctttggctattgtgaataatgctgctataaacatggttgtacaaatttttttttgagtccctgttttcaattcttttgaatatatactcagaagtggaattatttaatcatacgataattctatttttaatgttctgatgaaccatacaattttccatagtggccgtaccattttacattcccaccagcagcacacaaaggttataatttttccacatccttgccaacactcatatttattttctgttctgctttgtttataatcatcattttaatgagtgtgaagttgtatctcatggttttgagttgcatttccctcatgattagtgaccttgagtctcttttcatgtgctcatcggccatttgtataccttctttggagaaatgtctattcaagtcatttgccaactttttaattgttttttttcttttctcagaaagggcatcagtacgttactcaagtttaagagatactgccaaccaaatcctagagataaatctgttagctacttgatattaaatttcttacaaatactattgctattataggtaaaataatctccactaatttttaaaattattaagtgtgaattataattcacatacagaaaaatgtgcataagagtacagcttgaattttcacaaatggacacgcatttataactagcgccaaaatcaacggagagaacctcactagaaggaagcccctcttccagttgctaactggaagcccctcttctagtcgctaactccttccagtcactatcccctgcccaccaaggtaaccattatgctaactttgagcctcttagttcttctgtttttgtagtttatagaaatggacttatgccatgtgtacttttgttgtctttttatgctgggcattaggtttccccagttgattcacgttattgcctgtaattgcagatgcttttttgcgttgctgtatagtgtttcattatatgaactctgtgtaatttcattaatttattctattgttgatggtcttttgggttattctcattaaggaattattacaataaatgcagctacgaacattctgatacctgcctgtccgtgcaccctaagtattcgtttctctttgctctatatgcaggcgtggaactgcggggccatagggtatgcaccttttgcagacagtcccaaactgtttttcaaaggagttgttccagtttacattccagcagcaaagtagaagaatgcagttactctacatcctggccaacacttggtattttccatcttttttttctattctattttattttgaaatataaaaacaactgaagcaaagttgagattgcttttgcggaaccttttcgtttttggttcgcttctctgaataattaaccatctcaggcttctattttgtcctgcaggctgtgtgagtgcgttttcgactttgctcgacatttttttgctcacttggccacttaagatgtcatctggtcaagaaaataaggtaggtgtccgaagcggggcaagccctttgaggacactggaagtgtgataactctgtaggcgaaactcatgcggaccgtcattggccgatttctcttttctagagttcacgatctaggagatcctgctcgtctctgatctccccactgccctcccgggctcccttggaggcgcctggaaagctgagccgccgccagccacccgccagaacaggggcggggcagggccgcgggtccgcacagagcatgcgcagacgaagcacggcgcatgctccgcagcgcggcgggtccacagatgaggggagtcgagactcccgcgccccaccacccccggcggagctgctgctgagccactcaatctgagccctggctactaataaagttcgtttaaaaatcataatcattcttaagagagcgaaagagggtgcgaactagccgctcggccccgcagggagagctggcgcgtcgggaggagacagcggcggcagcggttgcgccgcgaccaggaggagccggtggcgccgggcggcgggtccgcggccggtgggggacggtgagtagcggctcgcgctgcggtgcagcggcgctgcactcactcgccctctccaggggctgggggttcgtccggctccactggggaagactcagcttctccccggggtcccgggttgtgccttactctccggagtgggcaggggtatcgagggcaggggcctcccggcccggctcccccatcccccggttcggaccgccgagcgccggctctcccctccctgagcaccgatcccaagttccagctagagaaggtgggcggcagcgccagcccggcgccccctcccagctcccagcggtgggtacctggaattgcctggtgggcgggaaagaggggtggagcgagggcggcgctgcgtccccagtctggccgaacgttcggctttttgcctgccccaagtcccgactggggaaggggcgacccgggctgggccagacaccagtaagggcgtgaagtgctcaggttaggtttgatggcgaagagagtcctcagctccaccctggcatttagactcctccctgcagtgcgaccactctttacccgcgaccccacccttccctagtttcttgttcatagagtgctggaatatgaatgagccaaattgtgctgttccattgacactggttgctacagaattaactttactcggagatccgaggagccatcggcagttcccaggagtaagaacctgagagcgtgtgagagtaagaacttcattatcaggagctagtgaagtggcagtagggtctgaaaagggctgttaacttctctaggtttttatgtatctcctaacatctaggtaatttcattgaccctaagaagtttttcagtatttttac

SEQ ID NO: 3445 - DNA, 6000 bp, Homo sapiens
catgcacacacgggcagacactccgggaatcgccaaccagcacagaagaaagggccgccctgggggatggagcacagcgtgggtgtttctgaattgcttctcaaggggggaaatgtgcgggtctcaggagggcgaggatgtgaaggcatctcttctttatttattgtctgaattttgaactgatttcttcctgatccctcccaggtttatagtcaccctgtgtgttaaatgcaactggggagaaaaggttaatgttgttttgcgtttctgtgaagccttcccttccagtaatacaaagcagctttttgtttctcagggtctcacacagaaaccaagacaaaggggtggaggtgggggccttggagaaggaaggcaggtgcgtgtttctgagggagtcttttgtcaggtttggttttagcataaagaaaatgccctcattttaccacttagaccaggattcattcattcagcgtagcttcagtcactgtgaactgtgccaggcattttcctctatcggggagatagtgcaaataagaccctcatactctaaacaagccttgattagtacctgcctcaggctaggcattgttagcacagtgggcaagtaaataaatttagtccctatgttcatggatattacagtcagatagataaaatgtgcatcaaatccaggaagaaaccagccttctttattccttgtttattatcagagggagtcatcctgaaaggatggactacttggctttacctactatggggcctagatcttcattctgataatggggtcagggacacctgatccaggtatccacacacagcaggtcctgagagggactcttcaagctgagtcctgtgaggatggcagaggagtttgaagtgagaactaactccagcggctcctgcagagagagctgtgagcaagtgctggtctgcagtgggctgtgataactgcctctagctgtggaggagtgctggagagggggctgtgtagggaaggcaagtaagccagaccttggaagccaagtaggtttcctcaagcccagaaggcgggaagagcatcccaaggtctggcacgtgggaaggcacataggcctgggaggacagttccagggaccacaggatgaatctgagaagatgccatgtgcaggggcacacctggagatgtgactggaagggtggccgagagcctgcgttggggccttgctggttggcagtggcaaccagggaaccgtgtcctcattgggggtgtcgtgagctggtcctcattcaaagaaagccacaaaaaattgttcccaggcctgttcctagccatgggttcttcctgggttttgctttttaacatagctataatcctatttaattgggtttgtgaatccaacagaaaactcttcttgagggagaagcttttacagagggattccaattataggattattaccctaacgaaggataataattcctaaggaacaagaggtttcacgaagcttccttcagatgtcactgtgaaggcaaagaaggaccttcctctctgcattcttgctatttgttggtgtggcaagtcagtcagtgtgcgctgaggggtccttctcagcttcccacgttgcgtctttgtgcctgttgctggtacctcaggacagactcccagtcccggtccgtcatgatttccattctgcattttgatgtagtcatgtctcatgtctcagttggctagagtatattttgaagtaattcttttttggagaacagtagatggtggtacatttttctgagtcttccatacctgagaatagcctgctgtttccttgacacataagaaagctcctttgcctggtaggtgaagatggaggtgcgggaggagggggtgacatataaattggttttataaaagctttccaggcatctttgcccagcgtgaaagaaggtccagaagtgacaatcccagaaggaacttagagtggagtatgtgaggtgtgaccaaataaagggcaaagggaggcggagatgttagaacattggcaagttgtgtgagaggagtggacaaaagaagggaagacgacaatctcaaactgaatgataacctggaagccgaaggaaaaaatactgaaatatgatgctgagattaacgggggtggtagagaaaagttacatcaccttaccagatgaggaaggttgctttcgagatgtgtaacaagtatggatgcagttccaaagaagagctccatcagttccccgctagcagcctgagctgaacgcattctctgcattgcagtctagcttgcttttctgcaagcaagagttcagaagctttctttacttcaagattagaactgatttcatactgatggattgttgtatgtgagaaataaaaagacttaagtaaaagcagttttctggggttgatgcataaaatcagttatgcatttttacctgtcatttcaccttaatacctttctcaaatccttcttttcccctctgcttccagtttctccccgcctccccaccacccacccacccaccattctatcattgttgccaacagagttagtattctagaaaacacagacctggttatctcaccctgctagttaaaaacgtccacggcttccctttgcctttcagataaatcctagaaaacgtaattctacatagttcttcataactctttttctgtagtcattccacaaatatttattgtgcacctactatatgccaggtactgttgcaagcaccaagaatacagcagtgaagcaatagacaaatgctgctgccctcatagacttccattcttctttgaggagacaaacaataaacaaagataaataagcaaaatatattgaatgtttgctgctggtaacagctagggagaaaaataaaacagggaaggggagagaggggagagtggcaaaggagcacctcactggtgagtagaagacctaaaggaagcaagaatccagccaggtgggtatctgggagcacagccttccatcaggggaagggagagtgcagagaccctccagaatcaaaggaggccagcatggctggagcagagggagcaggaggtcccagaggccccaggggcaaatcagataaggcctttctagctcatggttgaaacttttgcttttagtcttagtgaggtgggaagtgaggggatttgagcaggagagtgacatgatttctctcttgctgtcttccatccttcacacgttaccaagacacatcaagagatgtctcttgaacatgcaggtctctctttgtggctcccctgtctgcctcagaacccttcaaagcccaactgaacatcatctgctttggaaagccttccccatgtccagaccaaatggggtgctccttctgcttgcctccatgacacctagcatatttctgttgggccccccgtttgtgtgtatttctcagcagcttcagagaagggagtccctttgatggattcccgaggtccagcacagggtccaccccatagtagactgtcagtaagtataagcaaataaatgagtgaatgaaacagaaaaaaaagaactcacctatgaggtttttgaaacaaggtttttaaatttagcccatagcctgcaaagccttttaactgcattccatcatcttcacacatggatatatattttcctagccacaaggtagcctctgtcctcaaagttcttctggaaaattgaccctgtgatcatttcaaacatcatgttccaacactattctaggcagagtgtcctggctattctgtgccctggctcttaaccgaacacctgttttgtggatttggcaggacctggtagaacaggaacactttcttttttttttttttttttttttgagatggatggaatcttgctctgtcagccagacgggaatgcagtggcatgatctcggttcactgcaacctctgcctcctgggttcaagcgattctcctgcctcagcctcccaagaagctgggattacaggcacccgccaccacgcccggctaatttttgcatttttagtagagccagggtttcgccatgttggccaggctggtctcaaactcctgacctcaggtgatccactctccttggcctcccaaagtgctgggattacaggtgtgagccactgcaccaggccaggaacactttcttaagcaaaccacacttattcattcattggaagcactttcaaatcattcaacaggtgactttcttgaatacatctagtcgcttgataatgacctgaagaaataagggaaattaatgaaactggtggctttttccttaaaggattccaaatgccactctggtcctccctctgccttagagccctgaaccgtagatacattttcctttgtgttcaacataacaacaggagcaggtttttcatgggagaagaaagggttaggactctccaaccaggaggagactgggaagccgaatgaaagctctcatcttagccgagggtgcgtgtctctccctggctcgtccacagtccctggggtttttcctgcagctcatgatgtcccctcagagagggaaccctgcctggaatgcccagaggtcatgctgtcacctccttctacaagatttctcttggccagcatgtctagtgagaggaggagggagaccaggggagaatgcgtgtgaagagggtggccaaagagggactttcggcccccagtcctgtgttccagcctcacgtgctccttgttctcaggggtgcagttccggggccttcctcatgggcaccctgcctctctttttcactcctttttttttttttttctgggacaaaggagttctctatgatactgtattatcaacttcaaatacagaaatacctgtgtattcagttacatgagtagctgtctttctgtgtttattaatacaatgggctgaataaaaacagctgtcctgaggttatctggcaagatgaggaaagagaaacaaagcaagtcattattgtaccttctcaagataagttctttattctcatccacactcttccatcagcatctccctgcccagaattttcacaatgatcctatactaaaacctaactcagtgtcacggttattaaccagtacgatagcaaggacacatgagaatctgttaatacaagcacatgcgatggcgcaggctcatgctgagcaagcaccattaacacccctcctccttcccagcgccagcacagcactgctcaacagacatgtaaacaccgggccttttatgcacagaagcaaggggagcctcagacccaaggccttatgcacaacgttgtgtgattccctttgaacggaaagctcagttagcaaaaggaatttgggtatctgataatctaaacatcattcccattgttaaagtgcttaattattcacatggcacaaaaacccaggttttgcaacccatagtcaaatccagatgcaaacatggacgggtaacacttaaaatccctgattgtacagatatggcccatctgagatccatattgggaagctgcacaaatggaaagctataaaacacaaacactcttctttcataaaagacattttttcagatagctgaaagcacaatgaatgttgaggtattttgttaacaaatggagaagccaagttcaagggaagtcaagtcacttgctaaaagatgcaaagttagaagtcaagaagtgacatctatttcggtgctctgccaatgaaagtgatttttattccttccctatagaatctaaaagaagaccaggtatagtggctcacagctgtaattccagtgctttgggaggctgaagcagggaggatcgcttgaggccagaagttcaagatcagcctgggcaacatagcaagatgctatctctacaaaaaaaaaataaataaaaataaaaatcagccaggcatggtggtgcatacctatagtcctagctgcttgggagactgaagtgtgaggaggatcgcttgagcccaggagttcaaggctgcagtgagccatgatcatgccactgcactccaggctggg

SEQ ID NO: 3446 - DNA, 6000 bp, Homo sapiens
aaaaagtgtgtttgcttgataagcttccagtttttgcttttttccgagaaaagtgtgaaaccatgcagttgatctgcagttcagctttaaattcttttttcaactgcccccatctcagttgcttgcatttggtttctaggttcttagttcagttcccttccttgttcttatacttccattatgataccaggaaacatgccacctctaagtacgggccaaatgtggctttacctgtcactctccaaagtctgctggaggctgtcagaagcagggattatgcctaagggctgtcacttcttcacacccacctaggttggcttctgagacaaaagagcatacacccctgaaattaaagttatttgttgtcggtttcacttcctcttcctgccattcctcctctgcctgcaagtgtatgtgtctcaagagaaagtaatttgcttgtgcagaagactgccagtggcctttttcccattttggtacctagctcctgcacacacctgaaatcttatcacacgtcctgcaagcttataacttgggcttactggcattgctttattgattggcacatgacgaaatatgaatgtgtctgtgtttaatgtgcatcttgtagactggactgtggtctgtctacatcaggaggagggagtgtatgttcaaccagactcatcttggatcgaagcaccctgtgcctgtggtagtaaaggattgaatctatcctttaggtcagtttccgtcaatcactacagggctatgtggagaagcatatctcccatagcatggcagcagaaagggctgtgatctgttgataatgtctgccctgcttatgggagcagggtgcggcgttccttgaatcctgtgtccggcaattcttcccaggttgcttaacactattggcacatctgtaaagaaccacaggactagggaaattttaaatagatcaagttttatttgcttagtagaaaaagggcccctccctttgcaaaaggattggagaatagaggcttcacagctgtaatccagacaccttgatcacaggcacaggatccaattggtgaaaatgcccttcaccagtttttctaggcatgataacttgcagaagactatagccatgagttcatggcatgtggtattttcctgatcagagtaactccagggctccacattcacgatggcatcattcagtgtttcccggtgccccagagatctatagcaagtgaattagtacattctatgtcacgatgcacttacagcattggacattaaagccacagcacataactctgcataataaaggatacttttattttagcatgaatgatcaaaagtttgccttgtagcaaggagcctgggcacactgaatacagctcatgtagcgtcttctgactcttctgtcacgaagcagttagtctgactgccccacgggggagaaagaagaccacaagttcctacataaatattttcattgtgattaacttttaatgacttgaaactgcatttactgatttattttcacttcttcctatgtgtcattgaagagaaaagagtaagcaagatctgtatagaaacattacttaactcagaatgtcaaatgcgtgaagtggtgatggtgctgtctcttctataaaagaggattgttttctccaaaatgattttgattatttttaatttatttatttaactaatatttattgagtgactactgtgtgccaggcactgttctggccacgcaagatgcagcagttaaaaaaaaacaaaaattcctgccttcaaggagctgatgatttttcttctctattacttcataaaattatagataagctgctagttgcttattatagtatatttcttttttaaagtggattttgaaagattattttttcttagtttggttaaatgtaggatcctgttttcttcagggttcttatatggggcttattttgttttgctggagttggaagagtggtttgcaatgagtgttctcattacttccaggttctgtttctctatcacagtgcacaagcttctagagaaaatcagagcacttcatgtcactctttaaaactgcctgcttctacctaacatgcctgttcgcctgaagaaagcatgatgggttgcatgttaatcacatccatgtaagggaaacagctgttaaactgcttcaaagatgtagatataaattctttccttcgtgtaaatcaggatttcttgaccttgacactattaacatttggggccaggtaactcttgtttgtaggaggctgtcctgtgcattgcaggaagttttagcagcattcttggcctctacccagtaggtatcaggagtatccctcccctctgagtgtgacaacccaaaatgtctccagacattgcccaatatgtctcttgcaggggagtggtaaagttacccccagctgagaaccactgctgtaagtgatatgagtctgtgattcaggtctcacattctctaattacagtagatcagtgaaattcatggaaaaaaagaaaaaacatctgggacaagaagtgttttctgtctggtctttgcagaaatgtggagcaactttccaccacgaaagagttaatattatatgagcaagttatcagtctgatgaagcaacatcaacaacaaatgatgaaattcctttagtacatcatgccttggaaatagcttgcatttcctattggaaacttgttaaaatcatatccatttaccataagttacaaagcatgttgggcacggtatactgtaagttaatctcaaatgatttaggagtaaatgtgttccagatttggtgagctcagctcaagcagtaggcgtctcttttccaaacattttcattctcaagaactgacattcaattcaataagtatttattgaaatgtgtaatatgagagagctttagaacagtctgatactgctcccatcacccagtccagcagaaaagcagtgctcagaagagtgcccagggagcactcttctgatatggcacctcctgcattggtttgcaagatagtatagaaaagcatgccttctcctttgctgcctcaagcccttcccatcctgtgccagctgtgccctccccagtgaataaatgttattacacatgatggcatgtgtttcttatgtgattctttggtcccaaatgggctagtttgcggttttggcagggacctccactggcctgttctacctgacccctgttggcttgttggggtattgcaagtccaaagggggaccatttaaccaacttgtatttctgaatcttcttcacttctcacacacataccagtagattttaaaatgcaaggtacactgctgataaaagtcacaggaggggcctgtcacggtggttcacgcctgtaatgccagtactttgggaggccgaggcgggcggatcacctgaggtcaggagttcaagaccagcctgaccaacatggtgaaaccccatctctactaaaaatacaaaaaattagctgggtgtggtggcaggcacctgtaatcccagctacttgtgaggctgaggcagaggttgtagtgagccaagatcgctccactgcactccagcctgggcaacagagtgagactccatctcaaagtcacaggagggatcggctttaatacagagagggtaaaagagaaacataataggctacagaatcttcactcatctggttgctatttattgttccaggcactggcaatgtagctgtgatgaaaacagacagggtcccgctttcctggaacttgcagtccattgggcaatgagacaaataaacaggccctgttttaatatggcgccaagggtgccagaaggagggagatgaggatgccatgggagcacttcagaaagcacaacccagcctggaagggcagggcagtcggagaacgccttgcagaggaagcggtgccttattaactaggacatggatacgtcacatatcaaagaggaaggggaaaaagtgttcaaggttatgttccaaggcccgaagcgggtgggggaatggagtctttgaggatctgagaagttgggcgtgtttgaataggagagccgagacaggaagagtgggaagtaaacaaggaggaggaaatgaggatgcttctcaggatgctgactggagcaactgggacactggtggtcccatttacttagatgaggagcctgggagaagagggtttgaggagggtggggtggcaacaactcgagtttttaatccgccactaactctgtaacatgggaatgatttttttttaatgtttttgaaggatgtcaaaagctaatggaaatttgaaaagttaattagcagctttaagtgatttcattactgtagactatcatgacatcctgcaaatatactctgacctcttaggttctgccgattttatttttcatccagtaactagttcttagttttgatacttagcatcatcttagtgcttaaaattgaccagttttgtgcctgaagatgtggtacccatgagtgaagcagtctagtgacttgattgaaggttgtattctggcttatccaacactcctgtgccctcttccttaaatttcctgtgccctgatggaagtttttattctaatgttgcatagactcattctacagagcatgtattattttttttagatggctaaaggcagaattggtaaatatgattggaccgtctgtaggcaggtgtatgctgttacagaattttacgagatacaggccttattcgaggaaagttgctgcatggtgaacattgtgctccgtgatgatgctgtcatccagaacatatggggaacaaatgcgattgtggggtcaaggaactgaacttcctcctaaccatctccccagccactgcctttcctcatgccccctaataggcctgaaatagccaacagtgagccttgtcaattactcctcgtttactgtagagcaacccagcaactagggagcatcccagcttacgtgcccccttttttgtctttggcaggaatttagataatgggctgtgtgcaatgtaaggataaagaagcaacaaaactgacggaggagagggacggcagcctgaaccagagctctgggtaccgctatggcacagaccccacccctcagcactaccccagcttcggtgtgacctccatccccaactacaacaacttccacgcagccgggggccaaggactcaccgtctttggaggtgtgaactcttcgtctcatacggggaccttgcgtacgagaggaggaacaggtaagcccccaaagtcacagagtgcagagagggggcagccacccttaaatcttttggcaattgaacatctgggttcccatcacttccctttgactaggggtttcacatgtaagtttctaatctgtctcctctactagatgaggggttgtaagaaaagccagagtttgatgtacaaacaaaatgcttggctacagggttgcaaggtgccccaagttgctgctttctgaggattctatatgggttagtgagctacaacattctactgaggcactgtaggtcaatgactctcagcctcacctggctggttggcacagaagaactagggcagccttttcaaaacacggatgcctgagccatgtcccagtcttttgaattagaggctccaggactgggtctgggtgtgtgtattttgagttctctagatattaatgtactccctcttcccactcacttcttcctaatcctcagcctgcctttcttttttttttttttttggaagtttccttgtctttcataccacaaggctatattctgctgccatgtgtatttgctgacttagctaatactttgtaaaatatctggcgtacgttctcagacatatgttttccgaaatatttgtaagttatgtcatgcatccctagtcatccaaattttctctgagtatgtgaaccatggtaactagatatttcacattatttgttccagaattattttgtttattgcaaaagtttgaaagaatgcagcatctctcagttcatctggca

SEQ ID NO: 3447 - DNA, 6000 bp, Homo sapiens
cttgcttcacctatagctggataattgttgtcattatttttgaccaattcaattttgtttcatagatagcatagcctgagcgctgaaaattggttatgtgttcctactgcatattgaattgactgtgtgcaaggcacttcccacaccttattgcatttaatctgcacagcacccataggcattgttacccacattttataacaatggaaactgaagctctaagaaattacacacctgcccaaagtctcccagctagtaagtgctcaagcaagcattcacactcatgtttgaaaagcatgcttttccccctaagctacacttcagaaaaataaaatgcatgaaaaaatgtatagttaaaagttttgtagcatgaatagatgcatagctatttgataaagcacgtatgttataatattaatgtttaaagctgggtggtaagtatatggatattcagtgtaaaattatgaaaactatgtttgaaattgttcacaataaaatgttggaaggtttccaacaaaagcaaactttgtcttaactctcaagcagtggacaagacaaacaagctattttcagatacctatcctgttgatatccgctccaaagagagagctttgagacttggttgaattttgaccttaaaaatagtaaaccttaaaaatagtaaagtgtaagccaaaaagtatctgagacaggtttcaatcaatttagaagtttattttgccaaggttaaggaacatgacccatgacatagcttcagggggtcctgaggaacaggtacccagggtggctgggttacagcttgattttatacattttatagaaacagaagttacaaagacagaaacccacacatgtaaggtatacattggtttggctagcaaggctggacatctcgaaggcagtgtgtgtccaggaggtgaaggagggggtgacttctaggtcataggtagatttaaatatttccagattgacaatcggttcaaagaattaagctttgcctgaagagttgaaatcagttgaggtaagtggggtcagggggcctgaaagataaagattcttgtcatgtggatgaaacctccaagaagaaggctttggagagcataaatgtaaatgtctcttatcaaaggagtcagagtcacagaagagacctagtaagggaaggagattctcacccgtgtccagccatttgaatgcgaggacttttttagttacctgtggtggcaggtggcagatatcacaaaaattatgcaaggactttttttttttttaagctcatcacctatcattagtatattttatgtgtggcccaaggcagttcttccagtgtggcccagggaagacaaaaggttggacacccctgcatgcagacttcccccacaagagacacagctttgcagggccatttcaaaatacatcagggaaatatatgttagggtaaaatactttgatttccttttagggcctgttatctgtcatgtgatgttatgctagtgtcaggttggagttagtatcatattgctataagagtctgttctgtcagccttagggtctctgttttaatgttcatgccagccagttgtgcctgaactccaaagggaggagggtataacaaggcatatctgacccccaccttcccttcatggcctgaactagttttccaggtttctttggatccccatggtcaagaggagggtccacttagtcacttggggggcttagaattttattatcgtttacaataaaatagacattacttagaggtataagtaatgagcattaactggtgaggtcttagggaactgagaaaaccagatgcagaagcaaagcctctcccagggtggcccccagctgtggccaacagctcaggaagcttcctcaccgctgctgctcgtggaaagccagagccagataaaatgaacaagttattttttccagttcaagccacttagataggattccatgatgatttctttttaccatttacccaaaggaacattttgcatacacacagcctacgtgttgaagctgttccttctcacggaagggcataaccaatttcttcacataaaaaacatcgagccacccacactcctccatgatgtaatgcaggtcctgctttgacggtgagctgaccagggattgctgagcagtctcagcattgggaatgatgattggatgcagatagcctgtccaggggattctcgagagcattttttttgctaaaagtacaaggagaccctgggcaagcagctagcagccccctttcacaaccctgcagagcgtcctggaggtcccagcagccactgttcttcctcctaagcttgcctgccatggcagcatccactccacccttcagtgcttgaagccaagtggttgtcgccccggaaggctctgcccttctggttttagactgctgtggaggagggagccacttggagatacaaagcccacctctctagaatcttccagggtccccacaaattataaaactatggtcacaccaggaaaccaaggcattttcaataacaacctttcctactgatttccagcttcatcttccagaattccagtgcactgccattcataccattcattaactgttctcctttcactagaccacgagcaggtatacagccacaaagaggaacccatctcatgagttaactactccatcagcttccttcaccctgaaatcttttggcagtacaggctagaaggaagaacaggctttgcaatcagacctgggaatgaatctcatcggcatcattactggctgcaagattttgggaaagtggcttaacttcttagtccagctcacaggattaatgtcaggtttggactcagataaagaatgtgaaggctccctgcctagtctctggcttgtaacaagtgccaccaagtgctagtgtcctttttctgtattatgtatgttgagttgtagatatctgctgtcaggccctgtccctgccactggctggtgatgtgaacacatcttgtgtctttgcatctctgcaccacagtttcatcatctcacaatgaactgcctgctctccaagatgtggagttttttaaattatacaatttggttgcaccttaggggatccctctgattatggaggcacagtaaggtcctgagcataggtggtcagcagtccagaaagggagaaggccgagggcagactggagaatgggactggtgagattcagataggaagagcaggggagaaatggtcaaagtgagactggaatcaaaaggttggcatttctaaaaactataattgcacttaagaagttttgccaaaggcgatttagttaccccacagtgaggaacatgggtgcctatgtctccagtcacttccccacaagaaacctaattgcagcctgggctccgtgcaactcccagcttgaggggaggcccatgggcttctttgtgtgaggagcgcgctgcagcattcctgcccacacacgccactgctgcctttctcctgagaaggagttccgttattatttcatgtgacctcacagccaggggagctggtttgccattttgcataacacacattaaatttgtttttagatgtgctgttgagccttgcctgtggatcttctgtcctcttgtcggtccctgcctgctgcagccatccaggcacttaggatgcctatctttttctctacagctgcgaggagcccagtagttgggtttccttaaatgcaagcagatggaagcgagcaggagtgtggaggcaattagaggatttcctcctccaagcagtgcgggtttgctctctctttgggtgtgtggctgttcttgctcattttaattttccatttgggttttgtcaggctgtcagcttttttttctggctgtattatgctgctggttgcaggagcttgcaaaatggggtgatttggttgcttattgtttggaatcaaacttttcacagtacggtatgggtgacgcatatcgtgatgatgatgacacttcatatttgtaaaatattctgcaacgtaaagaatgttttcacatacgtcactgtctcatttggtctggacagaggcccagaaaaaaaaaaaaatgaaggctgtactcagtctgctagagtcaaagttttgccttatctttttacgccatctctagtcaaaccacagcggagagaataatcgaatgaaaactgaagctttctgctttattccttttctccttctcctttcagtcaggtaaatatttttcactttctgaacacagtgttagattctctggtgacaattaaataatcgtagcagataatcgttgccgtcggggagctttcaatgtaggtggggagacaagacatacaacagtgagtttacataacagtgcctggcacacagaaggcactaaggaactaggtgctgaatgagtgggtgagtaaatgaatgtggaacatagcccaccaaagtcctgaagggcaagaacccctagggggggaaccaaaagatccacagtccttgatgagaatgggcaccgagtgcctgggtgcctgggagtgagcaggcgagaggacccagcaccgttgtggacagcctccgttcggttagcaccactgcacgagggctggagtagagaggaagccatttgtttatgagctgagaagagtgagcaggaaaaatgccattctttgctcttaaggatgagacaagcataaaaagagaggcagacaggcagaccagaaggaagagattgctgacaaaatcattgtcaggaaaagtgccagtgaaatcactccaccttaaaagatctatgttctggttttgagaacctactatattgtagacctgtgccagaagccagaagaaggcaatgggaagaatcaaagagattcttggccccaacccttaccagaccctgccatgcacaggaaacagttaaacaatgtgactgtctcacctgcaaatgatcaagtgttgggtataagccaaggagctgagagagggggagaccagcgcaggtctgaggagctgagaagggaggcttacgtgaagggtaagactcgcatgggcctggccggtggacaagatgtgggaactgcatggacagttatgtggaggtgcattccatcctggctggagagtgtgtgaggggcagtgggagattggtggaaaagatataggccactggtgtggaaggctgggaagccacgcttcagatcggagaaagttgctaatcagagaagcggcgttctggaggtggtaagtggagctttgttcatgcccagaattttcattcctgtcctgccgtcctaaatgctgggctgcagtctgcactgtcccccgctgatggtatgagagtaagccaaaggaaggaaacatcttgttgggatggcactgagccatttcagtgtctcctgggggcactgagccatgccccagggcaaatgcccagtggagaacaggagttcaggagaaaaggtcgtcctccagtctaacaatcagcaggacacttggcttttgttgggtattttcactgccatgaaactatacttggtttgtgaatgttttggtgaccaccaaaaatgtatatgatgtgaattctaggcattttcattatggtggatttttttaaataacgtccacattaatatacacccctagtgtaaagtacttaaagatacagaacaaaacaaaagtcacctattaacccatcacacagagatagtcacgcacatcattagtattttgttgaatgtcctttcccggtgcaaatttaggaatgtttaaaacatggtttcaaattggacttaatgttttatatcctactttgttttaacttagcagtgcaccgtgaatattttttagtcactaaatttatgttgcaatatgattttagtgctatatactattccattataggtatgtactatatttaatcaaacagaaaatcagtctactatctttgcttattttgatgtttccagtgagttaggcttttaacatatttttaaaaacaacatcagaatctag

SEQ ID NO: 3448 - DNA, 6000 bp, Homo sapiens
aagagtaaatatacaattttcaaaggaaggaaacaacagtagctattaacatgtagaatccatctggcactgtatagataaaaacaagcccagaacgctttttgtttattcttcaccacagtgccacgaactgggtcaggattatccttgttttacaaatgaggcagccagagccagagaggtgaagccagcctttctcagagccacacatccaggaagggtcagagcccagatgaggtgggagaattgagaacaggtctgcccagttactacccagcccagacttccaccgcatcttgcaaggatcagggtatgtaggacaaatgtcagcccaatgggtcatttgttcccggggacccagtttgaccccctggtacctaacggagtgccaggagcatgacaggcactcagtaaatatttgttaaatgaatgtattgtcaaagtcaaagaattcactaaaatgtgtcatctcatcctggggactgcccttggccactgctgaatctgttttgaaacctctttgcaggcgagtttaggaatatatgaatatatttatttaaaataacattaccagaatttgcgacatgtgccagtgtggttgaggcctctggtggctaaggtcttcagcaaattagagatgcacagtagaggtgctatgtgtatactttctctttgatttaaacttatttaaataacttttttttcctgactttaaaattttacttgtagaaaatttggtaagctataaagaagaaaatgaaaatatctcttaatcacaccatattgagatagcaatgttaagatgtatttaaactagggtcgggcacggtgactcaacacctgtaatcccagcactttgggaggccgaggcgggcggatcacctgaggtcaggagtttgagaccagcctggccaacatgatgaaacgccgtctctactaaaaatacaaaaattagctggacatggtggcacatgcctgtagtcccagctactcaggagactgaggcaggagaatcacttgcacctgggaggcggaggttgcagtgagccaagatcgtgccactgcactccagcctcgccaacagagtgagactccatctcaaaaaaagaaaaaagatgtatttattttgtcgtttttgggaggggtgtgtcatgtgtgtgtgtgtgtgtatatatatatatatatatatatatatatatatatatatatatatatgaaactttgattttgagcttgttgcttctttcatttaatattaagttgtgattgttttctaatgtaattgaataataactgaagttttccattgtgtgagcagactaatttatttaaccattcactatcctattactatgcagttaaatattctcatatttgagattataaataatgctgtactaaacattctggagtgaaaatatttgctcacttctctggttatttcttcatgaaaggattactaggtttggtgaaaatataaaaattctatacataaaaattctaaattaaaagcaaaaaaaccttaggaaaaatttatttgccacaaatacattaaaaatcttaatattccgtatcctgttttcctttcactcagcctaattttttgtcctcacatttttgttaccaggcactcattctgattgcttagccatcgtactagtttcccatttgatttaactaaaactgtttcagttaaacatttatttctttgctcatgaccctgataacatgcagcatgatctatcctccactactgagactttccaaggattgtctgactcttgtcattacatctgaaaatccctgagtaacttctgtacatctttcttggaaacaacattattaaaaaaatagtaaattcaaactactatgcactatgccaagcactgaggtgggtgttttaaagtatgatatagcccctgccattgaaaaacctccagataagacatgaccacatgacaggtgaacctggatacaataaatattaaataaaattactaaaaatttctgtttagtaatcctgactcatcatctcattttctacaatttctgcaatttcattggcctgtgccttcaacccacctgaatcttacctgccactccccttacccacgaggggatttcaatcagcatggtgtggttacatcattaaggtttcttacccatagcatcaccatgatggcaggatccccagctctcagaacagggcctggcacataatatgtgctcagttagtgtttattggatgtatgataaaaagtatgcattttttttcttcaattggagaccaccagcagatagttatgtacagtcacgcgttgcttcaggacagggatacattctgagaaaagcatcattaggtgattttgtcattgtgtaaacatcatagagtacacttacacaaacctagatggtataacctactacacacctagtctctatggtatagcccactgcttctggttacaaacctgaacagcatgttattgtactaaatactgtaggtaattataacacaatggtaaatatttgtgtatctaaacatagaaaaagcacagtaaaaaatatcagcattgtaatcttaggggaccattgtcatatatgtggtctgtcactgactgaaatttcattatgtggcacatggctgtacttagattggcaataaatacaattaaaagagaacatttgtggtgggcaagagctctagctcaaacgtcagactaatgaaggttcaaatcctgggtcttcaacttaccagctttgtcatcttggccaagttaaatgatttcttctacattcagattcttcaactgaaaaaaatagtgatagagtctaagccattgggttattaataaggataaagtgaggtttatgttaagcctagcccagaacctggcacacagtaagtatttagtaaatgttagctattattatttataaatcgtttcccttatttattgcctaactacaatctcaacctactctcaggaatatagaaatagaaattgattcatcatgagaaataatacataagctttggagtcagatctggctctgccacctcagtaggttacttctcaatgctttagtttctttatcaggtgaagacctattgcgtagggttactgtgaggactaaaatgagataatatatgcaaagtgcctaatatgttcagtactcttttctctttctgtgtcttggttcaattagaacacccttctgtttctgattttgctaccaaacatgtatttttctccctctggtagagtgttcttccatttattttggtgtgacacaaataatttaatacatgtttatatcacaagtccacatgtgtgagtgaaacaaaaactccacaaaataatgctctgtgtgattcctgtactaatttgctatggctgccataacaaagtatcatagactggatggctcaaacaacagaaattcattccctcacagctctggaagttaaaagtccgagatcaaagtgtcagcaggtttggtttctcctgaggcctctctctttggcttgtagatggctgtcttttctctttgtccttacatggcctttcctttgtgtgtatctgtgtcctaatctcctcctcttatagggatactagtcatattgagttgtggtctgcccatatgacctcattttaactctgttacctctttaaaggcctgtctgcaaatatagtcacattctgatgtgtgctagggtttagggtttcaatcatgaattttggagggatacaattcagtcaataacagttcccttgatatttttatctgtatttcattaaagaaaatgctgggcagaatcaaccaagttaaattttgtgacccattgaattgactcgggaccacaggttaaaagagtgtgctttagcgggttgtgttggcttacccggttagtgtgaaattgaaaccagcattaggacttgcctgtgacttagtgtggagacaggcccagaggcacaaaacagtaagaatcagagtggacatccttctgcaaacacagacatcaccttagcccagggttggcaaacattttctgtaaagggccagatagtaaatattttcatctttgcgggccatacagtctctatcaagacaattctgctgttgtgtgtgaaagcagccatagacaatatggaaacgagtgggtatggctgtgttccaataaagctttacttacgggcactgagattttaattttgtataatctccatgtgtgatgaaataatcttttgattttttgtgaccatttaaaaatgtaaaaaccattctcagttcatggactgtacaaaagcaggcagcaggccagatctgatccgcaggctgggggttgctgaccgctgcccaccactgcccttgctggtagagcctcagtcttctggctgcagactctcgaggaattgacctaggtgattttcctctgtccatgtacattttgaactgattatcttatttgacccttgtgattcctctgtgttttcagtaggaaaatctctgtggcattcatgatcaaaagttatttaaaaagcatatgttatcttcttaccagagaactctaattagggatgggggaccttcttaaaggacccacacaattttttgtcagatggtgaagttaggaatagagttgacaccgaaaagtctatgcaaaaacaacagagcttgaatttaaggagggctctcctttgggaagctaatatccagggaaacagagtgaccaaagaaaggcccgggtgtcctcatggcggatggaggagagcagctcagtggcaggggccctgccccgggatcttctcccaggtaggggcaggctggagggtgagtgaggtctccacagtccccacatggtttctttcgcaacccagaatgcaagccgaggtgtgtgtggctgcctctcacttcctgtgggggctgcctgcagtctcaggatgtccatctcggtgcctgcgtagatctcctcccctcccagagggtccaagagaacaaaagtgtctgagaaagccagagtgtgaccacgcggtttctatgctccaagggatttatttcagtggtaggtggagcagctctgtggagcacatggctaatgataatggattgactgaccagaagcaggagaggacctagcagaagccggaggtcaagctgccccaagactgggggacagcctgggtgaagactctggacctcatgaccatgtatattccagagggggatctaaagagccccagaaattcacaaaggtgggaatggttattttcactatttcagactgacagaaattatgcatttatccagagtgacagtgcaaaggcaggctgagctgttgttgcttccattggcaggaatgagccgatcttatggactgactctggaagagcaatgttgagtgcctactttgtgccacagagggaaaacccgtttatcccaagggctttctcatctggggatgcgcagactgtaaaccaaggccccaggaaacggtttttaactaatgtggaaaaaaaaaaatgggcttgaatatccgaaacttcactttaaaaaatcagtaagataaaatttaaatgatgtgtattattttattttgagactatttgcttcatgccatcctaacatatagtaataaaatagctttggcctgacattcatcttaaagtgaattaaaaaacgtaatttaatgaaatggcacttctaagcttttagtgcagcaaattttcaaattatcttgcttaaattaaattgctgtgcttttttgctttcgatacttataagagctctgttttgtttctggtttcatcgtgttcgccctgagatgatttttttttaattgaaatgtagcattcatgcagaaaagtgcacaaattcttaagtgcactgataatgaatgttcacaaagtgaactctcctttgtaaccagcggccaggtggaaaaagaatgtcacttaaacactaggagtcccctcaggtccccatccagtcccaata

SEQ ID NO: 3449 - DNA, 6000 bp, Homo sapiens
gtcagtccaccctccatctttttaagagaaaagggaactggaaagccaaatgccaagagggctctgctgtggcctgtcaggaggaccagctgtccagtatggacacaatttaacaagagagacaatggtagaaaagtagggccagaatctcaacttcagaagagccacaggtatcttccttccagaggcaggtttaacatcacctacgctcctttctgagttcaggctggggtgttgtatggaatgtccttcccacatgagatttttccaggaccatctcctgctggctcatggcaagctgtggacccaaaatgccctaaatccattggctgtgttctaaagattgtgtatataaaaatatgtaactctttatgtatggacttgatatgaggcatcagaagaaagaggtaaacagtgaaccaggtatgccaagtacagacaggttagccctggggccactttagcagtggtgtcccactctaagagtgaaggggtttttttgcttgtttttttcattttgttttgttttgagacagggtctcactctgttacagcagtgcaattagagctcactgcagctttgacctcccaggctcaagcaatcttcccatctcagcctcccaagtagatgagacggcaggtgtacaccaccacacctggcatttattttttttgtagagatggggtcttgctgtgctgtccaggttggtctcaaactcctgggctcaagcagtcctctggcctcagcctcccaaagcacggggattacaggcacgagctatcatgcctagcctcaaagtgaagttttataagaatcattcctgcaagtcccagaagacccaccagaaacaagaagggtgtctgtgggtggatggaagcagaaggcctccctctggtcctggtcttgattcctgaacactaccctggggcaatatgccttcaaaagggaggaaaaacagcagacaggaggcagaggaagaaaaacgagaattaaagtagcaaaaaaaggtacaagtttaaaataagtttttattgttttttctaataacataataaatgcccaatgtaaaaagttgaggaaattaagaaaaagataaaaaataaaataacaatgacctaaaatatgattacttggaggaaatgatcattaaaatttttgtgtatgtattgctttctatgaaaatttacacatataaataagtttaaaaataatggaaatatatgtgtattaatacatatatataaacatacatatgtacacatacaaacacaatactaatttattagctcttcttaattttaatttgttgtgaacatctttccacacaaataaataaataaatggcaatgttataattttatggctatatagtattctattatagatataacataatttacacaccaaatcccttatcaatgaacttttctcagtgtttcactattataaacaatgttccaattattcccatgatatgtgcgcttgtgtttgtgtatttgcaaatttgttccattctttcccagaagtaaaattgctaagtcaaatgtatacatttttttaaaaggcttttcacaaatgctattaaactgccttccagcaatgttgtaccaattaaaaattccactagtagggtatggatatccattttcctgttgaacctcctatcacatttactggccattttgggttttgtttctgttgcacatatttttcagttcgaacgttcatctttattttcttgttgatttgtaaaaactctacattgagggtttttacccttgccatatgtgttgttgttgagttgacatttaagagaagattaaaactaaaataaaataataagacaagaaaatgttttagctaataaaaataagaaaaaaaagttactttaaaagcaagatataagattcagatgagacaagttcaagaaagccagaatagaaagaggaaactttaaggtaaaacaagtagaaaaatacaaaatatataaacaatatcaataaaatcaaagagaagttctagaacaatgactacattctaatttgtataatagaagctactcataagaaaacaaaactggtggttgtggaagacaatattacttaccttgggtaggccagggacagcgtctcagatctttaatcaagttcttggtagagattggcagaaaagatcaaaacgggaatagtatacaaatcttttgcagtgctctattcacttgttcagaccattagcaaatcctcctgaggagtccaaatccatttaaagctacatttaagacgggcaacagataaaaaagtaggtaagcaaagaattacaaaaaacaggatgaagtcttgatgggagcaggttaatctgtcattttaatcacattgtctctttgtccactaattagatcaagaagctattacagttgcagacactaagaagtgacttctcgtgaagaaacagagagagaggaggagagagggagagagagagagagagagagagagaggacttatcccacctactccagatttccagatttagcgtaagatagattgaactaaacatgagatttcaaggagatatatagcctaagagtgtttttttcttgagagcatatgacacttagtctgtccggaatagtttgagaacagttttactatttttcccattttacgtatgaggacactaaggttcaaaaaggataagcgacttgcttcatcaaagcgctcccaacagtgaactgtggagctggaatcagaaacaactccagaccagtgctgcccgatagagatataacttgagccacataggttatttaaaattttctagtagacgcatttaaaaaataaaagaaacaatttaattaactctaataatgttttatttagcacagtacatttagactatcattttaacatgtaatcaatattaaaatgggatactttacattccatttttcatgcttgatctgaaatatctaatacatcttttacatttacagcacatcctaatttgcagtagccaaatttccaatactgaagtacatttcaagtacttaacagtcatgtggctagtggctacctcctcggacagcccaattctagaactatggtcctcaaggtgctgtctccagattggctgtatcaacatcacctgggaacttgctaaatgtgcaaattcttgggcaccatcccaaaccccctaaatcagaacctcaggtggttaaacacagcaattcatgtttaagcaagccccttcagttatttctgatacatgtcaaagtttgagaaccattgctctacccaactgcctctgcatcccaatccaaataaacccagagcagccattgcggactagccctgaggacgaagagcctctgctcttgagataagcaattcttggctaaatgaagctggctttctcttgtatggaaatatcctagtcctagctatggttccatttcttgggattatggaatttccagacacaatttaaacatggtttaatttgtcattttgtttaaggaaaaggaaaaaaatccagtaacctctgtatactgtcaccttgagttagttacttaacttttcttttcctcagtttcctcctccataggatgcagatcatttaataaatgttagcaacttttcttaaaaagtagtgtgtacaaaaagaaaaaagtcagcaaaagggacagatttttttaaactacagtaaaaacaagtagtgggccggaaaggcaatattatagattttgagcacagaagcagaagctgattcacttataatttcttagaacattagatttgctgagggggaaggtagggttcttgccaaaatcattaaggagagcgattctgagtatgccttaaagcagaactttcagtaaacaggaattacctataaagaaaatcaggaagccaaagtgtttctttttatgaagttacatcctgccatagaaaagctggataggaaataaagaccgatgcactcccaactgtatactaaaccggcaattatttcatcaagggaaatatgagcaaaagctcagattcagtgaaggggaaaaaaacatgagaagtttgaatgttatgagaaaccaaagacaaccaatgactacaattaaacgaggttttttgggggtggggcggggaatgtacgaacaaatctctgtcatttcaggttccttagtcgccgcttggcccctccccctatttcagtaatacttcctccagacttttgctagaaaaaaaatataaatgagtgtccgcagaaataggggactgataaaatgatcctaatctccttctcctcctcattgttatttgttgtgcgtttccacgtttcaggacaggattctactttgctccgtactcttttcagtttgatcaaagaaaacgctgctatcaccgcccaattttccatttcatcctctcaccctcaaatgaaaagacaccagaaaggcaagatagccctgtctcgaggcagtttcccatggttttgggggaatggcaggtgccaatctgcagcagcagctgcaaccttccgcaaagcggaaactgcagttcacactctccgctctttctcccgccctactccgccacctcacaactccacacaatccttaaaaacacacagacctcctcctccaacctcgcattttcttgcacaccctgcaccgcacgcaccctgggatgcccgctgccacagtaacgctcaacccactcggcggccccacctactgccgtcccgcccacgccccaggcgccaatggttgcggctcgcagctcccaaggggctctttgatagggcagccgggcctgtcactctcgaggcgcgccccgccccctcctcgctcccctccggagctggaggggcagagcatcagcaagagtagcagcgagcagccgcgctggtggcggcggcgcgtcgttgcagttgcgccatctgtcaggagcggagccggcgaggagggggctgccgcgggcgaggaggaggggtcgccgcgagccgaaggccttcgagacccgcccgccgcccggcggcgagagtagaggcgaggttgttgtgcgagcggcgcgtcctctcccgcccgggcgcgccgcgcttctcccagcgcaccgaggaccgcccgggcgcacacaaagccgccgcccgcgccgcaccgcccggcggccgccgcccgcgccagggagggattcggccgccgggccggggacaccccggcgccgccccctcggtgctctcggaaggcccaccggctcccgggcccgccggggaccccccggagccgcctcggccgcgccggaggagggcggggagaggaccatgtgagtgggctccggagcctcagcgccgcgcaggtaagcaggcggcggggatgcgtcgcgggaggcctcggggatgctgcggagaagcccggccgccggcgcccccgcgcacgccgcccccgccgcagggcccggtgctgcggtcccttggccgccagggcgctccgcggggctgccggggagtcggtgcttggggtcttcccgcggttgcaccggaggacacccctgcggggtgcggccccgaggcagcgcggggatggggaccccatttcctcgcccgcaagcgggcgccgggtgaaaatgggaattggcttgggggcgaggctggcccagactccgcccccgccctccttttggggccccccgcggggactggggctgtgtgtgttgttttaatgtcagggatgatgtaatcacttaataattgatgccccgtgctgcttccctccccacccaacccctgccccactcctccacctctcggcctcctccctcggcggcggtcgccttctccaacccatcctcctgcctatttctggcacctcccttgcacttcccccatcctccccttcactcttcctgtgccaccacccacccacccttcccctttcccctgtgctggagccttccctcctcttcctctgtcccccacccctctgctccctccagctcttttctcct

SEQ ID NO: 3450 - DNA, 6000 bp, Homo sapiens
tcctgcctcagcctcccgagtagctgggactacagtcacccaccaccatgtccagctaagtttttgtatttttagtagagacggggtttcaccatgttagccgggatggtctcgatctcctgacctcgtgatccacccacctcaggctcccaaagtgctgggattacaggcatgagccaccacacccagccagaatacacattattttcctcagcacatgaatcgttcttaaggataggccagatgttaggtcacaaaacgaaccttaaaacattaaaaaaactgagataatatcaagcatcttctctgacaaaaataaaactagaaattaataacaagagaaattttggaaactattcaaatacatagaatttaaacaatatgctcctgaacgatcagtgagccaatgaagaaattaagaaggaaattgaaaaatttcttgaaacaaatgataatgaaaacacaatataccaaaatctatgggatacagcaaaagcaatagtaagatagaattttatagctctaagtatctacatcaaaaaaaaaggaaaaacttcaaatgacaatctaatgatgcattttaaagaactagaaaagcaagagcaaaccaaacccagaattagtagaagaaaagaaataataaagatcagagcaggacaaaatggaaaaaacaaaaaaaaagaaacaaagttttatttttttgaaaagttaaacaaaatggacaaacctttagccagtttaagaaaaaaagaaagaagatcaaaataaataaaatcagaaatgaaaaaggagacattacaactgatatctgcagtattcaaaggatcattagtggctactctgagcaactatatgctaataaatggaaacatatagaagcaatggacaagttcctagatacatataacctgccaaaattgaaccaggaagaaatccaaaacctgagcagaccaataacaagtaatgagattgaagctgtaataaaagtctcccagtaaagaaaagcctgagacctaatagcttcactgctgaattctagcaaatatttaaagaaaaactaatacgaatcctactcaacttattctgaaaaacagagaaggagggaatacttccaaactcattctatgaggccagtacttccctgatactgaaaccagataaagacacaccaaaaaagaaaactacaggccaatctttgatacatattgatgcaaaagtccacaactaaatactagcaaattgaattcaacaatacattagaaagatcattcatcatgaccaagtgggatttatccctgggatggaaggatgattcaacatatacaaatcaatcagtgtgctacatcatatcaaaagaatgaaggatcaaaagcatatgatcattttaattgatgctgaaaaagcatttggtaaaattcaacatccttttatgataaaaaccctaaaaaaaaaaactggggatagaaggaacatacctgaacataataaaagccatatataacctacccacagctagtattatactgaatggggaaaaactgaaagcctttcctctaaggtctggaacatgacaaagatgcccacttcaccactgttattcaacacagtactggacatcccagctagagcaatcagacaagagaaagatattaagggcatccaaattgtaaaggaggaagtcaaatcatccttgtttgcagatgacatatctcacatgctgagaaacctggagactccacaggaaaactagcagaactgataaacaaatttagtaattcagtagtagcatttctgtatgtcaagagtgaacaatctgaaaaagaaatcaagaaagtaattccatttacaatagctacaaataaaattaagtatctaggaattaaccaaagaagtgaaagatctctgtaatgaaaactataaaacactgattaaagacattgattaggacacacaaaaaatggaaaaacattccatgttcattaattggaaaagtcaatattgttaaaatgtccatactccccaaagcaatctacagattcaatgcaatccctataaaaataccaatgacattcttcacagaaatagaaaaaaacaatcctaagatttatattgaaccacaagagaccaagaatagccaaagctatcctaagcaaaagaacaaaactggaggaattacattacctgacttcaaattatactacagagctatagtaaccaaaacagcatgctactggcataaaaatagacacacagatcagtgaaacagactagggaatccagaaagaaatccacacacctacagtaaactcatttttgacaaagatgccaagaacatacactggggaaaagacagtctcttcaataaatggtgtggggaaaactggatatacatatataaaggaataaaactagacccctatctctctccatatacaaaattcaaatcaaaatggactaaagacttaaatctaagacctcaaaccatgaaactactacaaaaaacattggggaaatctccaggacattggttggggtaaaaatttcttgagcaatacccaacaagcacaggcaaccaaagcaaaaatggacaaacgagatcacatcaagttaaaaatcttctttacagcaaaggatacaattaacaaagttaagagaaaacccacagaatgggagaaaatatttgcaaactacccatcagacaagggattaataaccagaataaataaaaagctcaaacaactctatagaaaaaaaatcaaataatccaatcaaaggatgggcaaaagatttgaatagacatttctcaaaagacatacgaatgacaaacaggcatatgaaaaggtgtttaacatcattaatcatcagaaaaatgcaaatcaaaactacaatgggatatcatcttacccagttaaaatggcttatgtccaaaagacaggctataacaaatgctggtggcaatgtggagaaaaggaaacccttgtatatttttgatgagaatgtaaatcaatacaaccactatggagaacagtttggaagttcctcaaaaaactaaaaattgagctaccatatgatctagaattctactgctgggtatatgcctaaaagaaagaaaatcagtatatcaaagaaatatctgcatgtgaatgtttattgcagcactgtttacaatagctaagatttggaagcaacctaagtatgcatcaacagatgaatgggtaaagaaaatgtggtacatatacacaatggagaactattcagccatattcagtcacgtccaacaacatggatggaactggagattattacgttaagtgaattgagctaggcacagaaaggcaagcattgcatgttttcacttatttatgggatctagaaatcaaaacaattgaattcatggacaaagagagtataaggatggttgccagaggctgggaagggtggtggtgggtggggtgggggatgggagatggggacagttaatgggtacaaaaaatgtagaaagaataaataagacctactatttgatagcacaacagggtgactacagtcaataataactgtacatattaaaatgacttagaacatacttggattgtttgcaactcagtggataaatgcttgaggggatggacaccccattcttcatgatgtgctcatttcacatggcatgtctgtttcaaaacatctcctgtaccccataaatacatacacctactatgtacccacaaaaattaaaaaacaaacaaacaaaaatccaatcaaaagacgttcagctcaaaacaaaacctcatgcatgtgttactcatagggagaaccttatatcattaagaaaaggttaagttacatttagtataatttatttaagaaaacaaggaggttggcctgttgtaccgcggtggctcacgcctgtaatcctagcacttttggaggccgaggtgggcggatcacgaggtcaagagatcgagaccactctgggcaacatggtgaaaccccatctctactaaaaatacaaaaattagctgggcatggtggcgggcgtctgtagtctcagctactcgggaggctgaggcaggagaatcgcttgaacctgggaggcggaggttgcagtgagctgggatcatgccactgcactgtagcctgggcgacagacagaaattcagtctcaaagaaagagagagagagagagagaggaaggaaggcaggcaggaaggaagcttgtacaatgtttccttctcaaagcagacacttgaacatatcttaggtttctggtaactagtttcagctgtctcgatagacctgataagtcagtattttagttaatatgtagtaaagttctgagagtactctaaccaacttccttgtttttaactctctcccagggtatttgtctattaatttcagctttgtttgctcttaaatttaaaaatatgtatttggcttctgagttctgttttctctctcagttgcattgcttgatttgggtgcctctatttttccaataattctttattataatagtgctactgtttgctaaagcatacgtggtcaaaacccaattccctgcagagctgaaaagagctcagagaagtaaggtggtggacgacccactgaaatgttccagtttcagactgcatgtgtcacacccttgctgaaatacaattcgttttctttaatttccatgtgaagtgcacttctaagaactaacctttagtcactgggtgactttatgggagtaaaaggaagctgttatgaaatagctcttatggaactgttacaagctttcaagcattcaaaggtctaaatgaaaaaggctaagtattatttcaaaaggcaagtatatcctaatatagcaaaacaaacaaagcaaaatccatcagctactcctccaattgaagtgatgaagcccaaataattcatatagcaaaatggagaaaattagaccggccatctaaaaatctgccattggtgaagtgatgaagaacatttactgtcttattccgaagcttgtcaattttgcaactcttggctgcctatggatttctgtggtgcagtgtacagttttaaatagctgcctaaagtcgtgtgtaactaatctggtaagtctcacaatctaatatttgtctttgcaggaactagaacatgtagcattcagcttgttataactgatagaattgttttctctttatgaggagttttcttatgagaagtggtggcaacaaggcaagatagattattttttcttaaataagttaggagcccttataattgcagaagataaagcaggctattttatttctttagggtatgtggtcatatattttttgggctagaggactgggtaaaggaggtttaaatggaatcaattttgccaattttgcacacttaaaaactttctatttaaacttatttattacaaagtcattagtagttgtcttgaaacctgaaatcggtttggccacaggataatgcctgctaattccagctgtgtagggagctggatgaaaaaggaagcagatacagttgccatgtaaaataatattttaaagcaataattatttgtacatttctttatttctgtttgtgcatttattattttagttagtgagttttttatatggaaattcatgctttcattctcatttctgggtgtcatcccttctctaactattgtaccatctcttttcagttgtaatttagttgtgcttaaaacagtcactgaattaactttaaaaaccaagtactctatagacagagaaaatgcactcttcctgtctaaagacaaataaaatatcatgatagtttgcatatgaccctatctatagccatacttttaaacataatgcaagtactaaatatagtattcattatattattctaaagtattggagatagaattatgtggcagattaaaaagaaacttgcacttatacacttttgatttaaactgtagtttaaaacactacttaggtttaccatggttagtagcatttttttaaaagt

SEQ ID NO: 3451 - DNA, 6000 bp, Homo sapiens
cccaagtaacattgggattattcttgaacagtacttatttttctctgaaatgaaatctgagaccggcagtctagagttgatacggcagctccacaaatattagagatccagattccttccatcactgtgctctgccatttttagcttatggtttccatcctcaggatttcttcatgtctgcatttcaggcaggaagaaggattaatctaaggaaagggcaaaaagatgcttctccatgatgttagccttctttaaagaacttattattaaatctttctcagtaatttttgccagcatttcattgaccatccccagctgcatgtcagtctcctattggccatatggccacttccagtaaaactggagtctgttaataaggaagaagtaagaaatggaattgggtaccaaccagtagcacattcttttcttttgctcttaatatattgtaagcatttttcctgccactgtgtaccacatatgttttgagtgtgtaagagatagcagatattttgttcctatatgggacacagcaataaataagacagctattgcttggcagaggcaggacatgaaatgatgttgatgatataatgagagtaatacatttataagttttatttgttttcagttaatttcatttggttaattagttcctagtactgatgtgttaaaattcatgaaaataattttaagttaaactcttaagttttctaactctgtgaatctgtgttagaagggttttatttaactgaaataaaagctcataactgcttcttcgagctatttgacattaacattcagaaacaatctaaattttctctagaaaagaatttacctgaagttttaacattagaatttgaaagagtatgatgaaaagaacactgtaccagttatgttgactaattttgataaaacaaaaagttttaatctaatgctattacagttactattgtttatagattgcaaatatatttgttctaatgaactttacccaaatgatatccaacatgtgggatttttccttataatgactataccactaaataaaatcatttgtttgatctttttctaattataaaacttttttcttatatctgaagtctggcccctctgtggaggagctggtaagtatattgtttctgttttgctttaatatgtcacgctgaagtgttcttagtgttttatttgcatattatatgttgtcactcattgtatttgaaaatagcattaataatggcaattttttaatgttccagtacctgaaaagttcagtggatggcccattgctcttttctcactgcatgttgttaaacatttttcttttgttagtgatttatagccattatttgcagagcctgtcaatttttgacaatttttgagccttgtagcttgctcatacctctacttcaaagagcaattggttttcccacttcagggtattgaagatatatcaagcaggcttagtttttaacccccttaagtttctgtttgaaattatttccagaaaagaatgtgcatgttggtttcttcttcatctactgcgttacaacttttcaagagtcttgagaataatcgtatggcctttgaaacaattgaattttgaaatgctttagcagaagttattttagaaaataacaatacatttttaatatttttctcattaccccaacctaatcaagttccaatttgtcttatggctttacctcttttgaagatataatctttggtatctaaatgtaaaatgaacatcttgggtgttacctagtaacaaacaggttaactaagaaccaagaaaatttttttctggaaatctagaaatggttaacttcagtttccttcatcttattcttgcttacctctgttaatttcgggcccaagagtttgtcagattcattagggatttgaatcattaaaaccccagtgagtggtagcttagtatgtctcccacatttcattaatgtagtataaatagctcattaaagtaattgaaagtaggtaatcatcaacataaagtttatttagcccataagccaaagaaatcttggtctaggagtgctctttcaaaagttgcatcaactttaacatgtcataagaaagatttttgtttgtatctccaaactggtttcttttgaaacagatacttgcccttttaggacataggttctgaaataagagtttaataattccaaaattatgttaaaaggaggattctagattgagtttttcgaatcctttaaaaccagtatctagaaattacgttctaatcttttttttcccagaaattgagtctgctaatctttcatctgtttgtcatatatataacaaatatttttaatcaaagaagtgataaatatatctagcatttagtagttgtcattaattttagcttgtatgtgtgtgtgtatatgtaaatatattttttttaggattatcgtatttattgactagtattcaaatatatctattttgatgttgttcaaaacagtagaccaaaggaggcacattaaattagtaccaaaatatattccatgaattgctgaaaatttgcttaaatttgtttcttagcttctcaatatccagaataaaaagggaaataattatgtaaaataatcagtgcccatacaatagaaacaatactattcatcatttcctcaagagaaacaatttctctggtgctaaggtaggtttttatttacgtcctcacaaaagggacaaagggggtatagggaataatgtcttccacatattgtgaacaaatgtaaccatgttttcataggatttgtggattctgtaaaagcagttctgctcaggataaatgcaagttttcagtgtttacgtggtttttttgatctataaataacagttaaaatgtctattggggtccttatttaactctcaaaagggttttagaagtaaatagcagattcaactatccattgaagccacttttactaatatgtgataacatgagcttagagtagactacttttcttactatactccatatcagggtaacccatggcgtgcaattattttatctagaagtagttccaagatgttatggtactagttcaaaagaactacatccagatctttgtgttccattttatagagatgatacattgttgaactgtaggcttttgtgcattttcaggaacatggtctagtgctaaagagtttttattttcattaaattatatgcttttaaaaattacataggaaagagagcttgaggcaaacaaaaaagaaaaaatgaaagaagcacaacttgaagctgaagtgaaattgttgagaaaagagaatgaagcccttcgtagacatatagctgttctccaggctgaagtatatggggcgagactagctgccaagtacttggataaggaactggcaggaaggtgtgtaaaaaatgggtattattgtactcttaagtgacaaattggatatttaatgaggttgactcttacttctttctttttttattttttatttttttgagatggagtcttgctctgttgcccaggctggagtgcagtggcatgatctctgctcactgcaacctctgcctcctgggttcaagcgattctcctacctcagcctcctgagtagctgggattacaggtgcctgccaccacggccagctaaattttgtatttttagtagagatggggtttcaccatgttggccaggctggtctcaaactcctgaccttgtgatccatccaccttggcctcccaaagtgctgggattacaggtgtgagccaccgcacctggcctactcttttttcttatggtaaatgaagcattaatctttttcctcagaattattttacagttggttttaacttactgttgttaaattaatactgacagcattatgtatcgcagatctagttatccatactaaatatgtttagtttacacacacaaacactgatagtatcttactgtgaaatgctaacaactctgtagagcagcacttttcaactattttgtgccttgagaccagtacagccgatattcacatgcatagcagaacttccataaggaattctttttatgatcactgaaacccagtctttcttgcccttcaaaaaaacgtgttggtatttagttaatgacaatgattttatcataatcatacacagaattctgctgtatttattaagtaaattattaacaaactttggtgacttattagtactaaatcattttgtgcatattcttttaatgtcacattaaaaacatggaacaaagaaaaaataatttatatcatcttgaagtacaaattttctagtaacttttttttttttttaaattttgtgagatggggtctcactctgtcgctcaggatggagtgcagtggtgcaacgttggctcactgcagcgtccacctttcaggctcaagtgatcctcccacctcagccttccaagtagctgagaccacaggcatgccaccatgcctggttaattgttaaggttttgccttgttgccctggctggttctagtaacttttaaccacatttaaagtaatcattttgtgaaaagaaactctaattagaagaaatatttttgtccatttatctcatctaaaagctaacatttaatagtatctgagttcagtgactttgcatgcaagacatagattgacattaatctcataaatttttttttagatttatttgaattaagtatatgactaaaggagttcacattaattcctttaaaaattttttttactggtttttcccttgaggatacctgttcttttcagagttttcatattttttttatatctgagagacatcaagaagttcgtgagtattagttttatcactaatttgagattcatgcaaaagctacttatgttcactaattttcctgaattctcactgtagtgaatataatgaaaaatcaatgtactcttttcccaatatgaagggtccaacagatacaattgctaggacgagatatgaagggacctgctcatgataagctttggaaccaattagaagctgaaatacatttgcatcgtcacaaaactgtgatccgagcctgcagaggacgtaatgacttgaaacgaccaatgcaagcaccaccaggccatgtatgtttgctttgctgctgcttcccacccagcctcttctttctttctttaatcacagttgctttccattctttcctttattctagtattgtttgaaacctttatttaaaagtgaaaatgggattcaacttattcaaagtagatgaagtttcaacacccatagaaattttagtagctcttcacagacttactaatgccctgagagtgctgcagacagtgagccattgttagcaaatgcatattgctataatgttggatcatatttccagtttttcctggatcatgattgggcatgcttgaatttgttttaatcttagcttagagtgtgtggtcatattgataatttggcagatattttggggtagttctttaagggaacttttagtaactgaatccaaatgtagattctgaactaacatttacacctgtttggtcttggattaagatagaatttgagatctgtagccagttgtctgcttctgtagccaccattatataaaagcttctatctggataaatctttattgaattttatcataacagctgcttgataatatagaccttaatatatgaaagcatgtctcccaagggttcacatatcttagtaccagataatgtatggccttaaatagtaaaatagtttgttggctctgcaaagatttttgtaagaagaattggtatgtaaatagagttggtggaagagaagtggggatagcgataagcacttatgccattgttttctagggcactggtggttcccattaacttctaggtccagtagatttgggaaatggagcggttaggaggaagacaaagtagtttgtatcagatgtgtctgagtgataaaagcatgcttgttaaattagctaaatatgaggttggggttttaggtagt

SEQ ID NO: 3452 - DNA, 6000 bp, Homo sapiens
aaaatttagctcccgtgtattcctgacccagcttgacttcgccagcaggctctgatcccacactctctaccacctgctgaacaactctacccggatgtcttccataagaaaccacaaatttaacataccgaaatctaaacatgctttcctctttgaatctcccagtgcatacttctcttcgcctcttgacttccctatttctattaatggtgcctctaatatccttagcaacccaatcagttgctaagtcttgaaggctctgcctatgttcttctgatctgcctcctccttttcattccacttacggttactgtcctaccccagacaattacctagcctcttccccttgtctcttctcactccaatctatctgacaatactgatagattaatcttccacacacacagctctgataatatagctttgctattcaacgcacatacatgaatccggccttcaaagctctccttgcttcaggcaatctggctagctccttctttcctgtgctgggaacatgccttgtggattctgattgtgtgattttgctctcacttttgactttctctggactgtccttccctctttatggaaagactcataacttttatacaagacagctcaaacaacaataaaaatatgtgggttggttgtcataggaatatgtaagttgatgagaatctggagagcggaaacaaacaagaagtgccaaatccaggaatcattttaaaataaaaatttatttggtcactatctgttatggaggttctatgaaacatactacactgttatggaggttctatgaaacatgctacactgaggtagcacttagtccactgtcattactaaaagattttctgggggagtcaacatgagatttatctcaaaactatggatttcaattatacatgccacagcttttcttcattaactgaaataattaagaattgtctgcattttaaccatttactgtaactatttccctcttaatgccctgagccaaactgggttgagtgggtgaggaaaggtgggtggtagagacatggagcccctaatctggtctgttttcaccattgatgagcctgattcatctttgggatgtggatcacgaggattaaagatccaccacgtgcccaggatttcccagcaattagaagcaaagaaactagaatttgtatcttttatatatattttgtccttcagcccttctccagtgcttagagtaaaataaaatcccttaagtgcttgcttttttcagcaggagaatcctaatgatgagcagcatgtgatcaagcgattccttttccttcaagctgaggttgaagttcagtagcgaaggaagaaggaacaggcagctacagccctctggtcagcagcaccaactttctcacggagttaaattagtttgggttatggagagcctgaatctttagcccaggagaggtgaaagtgaatgagggagaggaaggcggtgagagacaaatggcaaaggtaaaagtgggctgggtgcagtggctcacaactgtaatcccagcactttgggaggctgaggcaggaggatcaagcgcttgagcctaggagtttgagaccagcttgggcaatatggtgagacctcttctcaacaaaatatttaaaaattaactgggcatggaggtgcatgcctgtagttctagctacttgggaggctgagatggaaaaatcacttaagcctgggaggtggagactacaatgaactgtgatggtgccactggactccagcctgagcaatagagggagaccctgtctcaaaaatatacatatttttttatttttaaaaaaggtaaaagtgtatcaaagcagtctgccttcactctgatactgagattatcaaccagtgctctgcagaccttccatgaaaactactgttaaagatgcagattgttaggcctcatctcaaacctactgaatcatggtctctagggggacagcctgggactgtgcatctttcatgggtacacccagcaattctgatacactcgaaagcaagtttgtctaacctgtgacccgcaggctgcatatagccaaggacagctttgaatgcagcccaacgcaaatttgtgaactttcttaaaacattatgagtttttttgtggtatttctttaagctcatcagctatcgttagtgttagtatatttcatgtgtggcccttcttccaatgtggcccagggaagccaaaagattggacacttgggctctaaagattgaggatcactgctctagtgttggccaactactctagtgttggcctgcagactcaatacagcctttgagctaaaaacggtttttacatttttaaagggttgtaaaaaaagacaaaaagaaagacagacaaggaaagacacagaagaatatacaacatagcctacaaagcatttactatctggtcttttacaaaagagttttctgacccctttctagtgcactgcaaatgaaaggctgtacccaaatttagctccagtgcagccctgccacagctgaaataactgatgtagcaagcagatcttaaaaaaaaaagtgatgaaatgtgtaaagttgtcatctaaaaatacttttgtaataattataaatggagagagaaaatgtataaatacaaacattctgtaatgagtttaaaaatatagtttcatccatacaagaattttgataactccatttgattctgtttttccataagcttatcagatagcaatatatccaacattagcctaataaaattactgcatgtgaattctttattggactatgcatattcccaaacatattattgtcatacaactgagggaaaaatgtaaaactatatctgggaaatgaaaaattataaattctcaaaatgatacataggaaaatgatttacaaagaaaaaaaggaaaactgaacttagtatctttctactttaaaggggttcaagaacttaggagtagttacacacctcctaaaatcttgaaaaagaggctatgaactcacttcacaaagggttcagatactcacattgtgtccaagagactcagcaattgggaatcttgccagttagattcataaagcaatccgaaagccagaatgcaatttctttaggggtggtttctagatgtttattctagatatttttaaaagattttgtttatttttgatgtgaagaaagaaaattattatagaatctagaaataaatattggctttaaaagtattaatttgccttgtcctttgtaattgtgatccgaaatatctcacaataattttgtttcagtgttattttcttctcaggaggaaaggaatgttaaaaccttactagcaactaacacttgataaagatttaaactatataacaattttaaagaaagtctaaaacaccagatagtcttgaaacctcgcatgcttcaccgtttaataaaattatgactcattttagtaagaacatgcttttttagtaagaaaaaatgctttctgagctaagtttgaactgctggggcacatgggacacccacaaacccagtcagcagaagtctcaaactcctaaaagattaaaggaaaaatacattagtgtgtacagagaatgaaaaaaaaatccccaatggttctaatctataaacggaagtaaaactaaaactcccctaaaatccccccagtcatcaatccttataaattcagcacttatcttcttcctttacttctggagaccctcattaaacaacacgaaagcctttgctgacttttatctcgtaaaatagagccctcaaatgacactaagcagggataccgacctccaaaatcacaaactgttttacttctaaaaccatgcatgcaaacgtggggtttcctgagttctgctaggggcgggctgtctggacccccgtgtattttttttttttttttttttttttttttttttttgcaggtgtgcaatccagggtgcgcgctctgtgcagggaggggagcaaaggtgtgcggtgggcaccgcctgggccgggcggggcggggtgggtggggcccgggtgtgtgctggggtgagagtgaaggacatgtgacaatacgacggtggcggctgcaggatccgggaggggagtgaaagctccgctggggcgctccattagtgagcggtgatggttgccgcccacttgtattgaagcgtcctttgtcactaacaagttaaattagagatgttatttatttaagaagaaggaaaaaaaaccctagccaaacagcctatgaatacatatgctcacatcccctactcctccaactcctaatttccccgtctccagagggcacagttgtaaaccttgacgaaaatccaatcttctgtgcgggaatttccccccaccgcttgccgcccccgcgacagtgagtgggagctggaggagctctggtcccgctgcccgggagcacgcggagccgggcgaccgcggtgcggcagccagggaggaggggaggcggcgggactgggcgcgggtcggcgccgccgcgacccgggagcggggtttgctcaggaaaaggcgccgtcgcggcccccggccacccctccctggccccgggctccctgcccgcgcgcctcccgggcctcgcggcgcgctaggcgcaccgcggcggcgcgagcgccgaatgggagcggcgacccggccagcccggcagccccgcgggcggcagccagggcgaccgcggaggcggcgggcagggcgcgtgcgcactgcaggggcgccagatttggcgggagggggagtgtccaaagctctttgtttgatggcatctctgtttacagagtttacactttaatatcaacctgtttcctcctcctccttctcctcctcctccgtgacctcctcctcctctttctcctgagaaacttcgccccagcggtgcggagcgccgctgcgcagccggggagggacgcaggcaggcggcgggcagcgggaggcggcagcccggtgcggtccccgcggctctcggcggagccccgcgcccgccgcgccatggcccgaagaccccggcacaggtaacggggagccgggcgggcggccgagggcgggggcgcgcgggggcgcgcggggcgccaggctcccgggagcaggtgggaattcgttccgggatcatctgaggggctgtcagaccctccgaggacctggagcccctgcctcggcagcagaagccgctccagagactgatgaatggaagagtctttgcgggaaatgtatccggacgttgggaagcacgccctgcggctcattttgcaagttgcatggggatacatttttctttagggggaaaaagaaagcacgttccagccgagggcagagcggtgcccaccagccccggggagcccaccaggtgcctggcttgatgccgcgggtgtcggcgagggatccgcagcgtaattgctggatgcattgagatatgtttggacttggaagtgcagagcatatggcagatacagggaaaatgctggattgtttagtagctgcaggtagttcatttaaatttcattcattctttatggaggcgaggaccagtgtcagctgacaggcggctgaaaagcagattttagggggataaaggggtctctacttttgcaaattgtcttaagacctggttttggaggttcgaatcatttttctctgaaaggcttttacttccactgcaaacattgcacgcgcacccacacgcgccgccgtcgcacatgtcactgcacttagggaggctcgccgggaagatgggtgcagtcccttcacatttttggccggacagatgggaagagggagaggaggaggaggagggaaatcctcgtccgaactgtcagttgctcgttccccagtctccaccggcctctggactttcccagcagcacacgccggggctccctgcgagcggcgggtgccagggctagctcggcagccgtcgcagtcgccactcggctcaaggggacagaggccggcagcacccaaggccgctgccgcgcaaccgggacgcgatccc

SEQ ID NO: 3453 - DNA, 6000 bp, Homo sapiens
gaaacataataaatgtgtaggggaacatcacagggtgactttctgagtgggctatttttttatgtagtaaatggaaatgtctgtttaaaataaaggcagtcgtatttattcagtgacaagtctcagattacctgtattatgttctctttatttcatgtgtggaaagaaaacttgttttcctctaaaatgtcagttcaggattctaacacttatccattctcccccaaccttctccagttcagggctgtacacgcagatattgtccaacacttacttacagtacttggtattatgtatgtctggtttctttagtgtgtgcatcatgcttatctaggtttgtttgtgttttaatacagattcctgggatccccttctaaaacattaaaacagaaggtcggggctaattaactagctagctccctaggtaagtcagatacacagcaaatgtgggaactactgaattctaatctgaacccgtgtgtattagtcagggttctctagagggacaggactaataggatagatgtatatataaaggggagtttattaaggagtattcattcacaagatcacaaggtgaagtcccacagtaggccatctgcaagatgaagaacaaggaagccagtctgagtccttgaacctcaaaagtagggaagccaacagtgcagctgccaatctgtggctgaaggcctaagagcccctggcaaaccactggtgtaagtccaagagtccaaaagctgaagaacttggagtctgatgttcaagggcaggaagtatccagcacaggagaaagatgaacactggaagactagtccgtccacattcctctgcctgctttaattctagccacactggcagctgaatagatggtgcccaccaaggttgagggtgggtcttcctctcccagtccactgacacaagtgttaatctcctttggcaacaccctcacagacacacccatgaacaatactttgcatccttcaatccaatcaagttgacattaaatattaaccatcacaccttgctaacaaaagtgtggtctaccaacagcattgacatcacctagaaacttgttagaaattttgaatttcaggttccatcccagatatgctgaatcagaatttaaacttttctaagatcctacataatttatgtgaactttaataattgtattgtagtaagaacacaacataaaatttactttcttaaatgtttaagtgtgcaagactattgttaactgtaggcacaatgtggtgcagcagatctctagaacttattcatcttgcataattgaaattagcaatttcccttttctccctgactccagaccctgaaaaccaccattctccttcctgattttctgagtttggctattttagataccttatataagtggattcatgcagaattcttcctattgtgactggcttatttcactcggcataacgtctttgaggttcatccatgttgttgcatattgtggaaattccttatttttaaggtggaataatattccattatataaggatggctattatattttttaaaagacaacaagtgttggtagagatgcagagaaaattgaacgcttgtatactggtgatgagaatgcaaaatggtgcagccactatagaaaataatatggagatttctcaaaaaattaaaaatggaaccaccatatgatccagcaatcccacttccaggtatttctccaaaagaatgaaaatcagaatcttgaagagatattagcacccaaatgttcaatacagcacaattgacaatagtcaaagtgtggaagcaatctcaatatctacggaaggataaatggatttaaaaaaaagtggtatgtattactagatacataagaacttttaagttcgagaagcaaattctgatccaaaccactgtgctcctagacacttagcagcaacatctcctgggaacttgttagaaatgcaaattatttgcctcaccctagatctgaatcagaacccctctgttttaacaaacccagaactctcaagtttgaaaaccactcatctaaactcttatcctgtctttgaatcgttgatccacaactttatcctgcctttagcagtgaccttttctaattttaagcaccaccacaattctacctctaaagtcagtggaaattcagcagggctagagaaggacgaataaaaaaaaacatctatggtattacatacgtacggaacaaaatgctgcactttgtccaaaaattggaggatttcctttttttcccaaactgtacatgggtttggaagggctctctaattgggtgaacataaaagccatgtactggttggctgtacttccacatctgtggtttttcaatagctattctagaaaaaggttttactcccaccttgacttctaaattttaaaacgcctccatctctgaaaaacacttttcaataattgtcaattagagtgaggatagtagggtaagcagctgctttagtttatttaaggaagctgccagatgatgtcagctccaggtgtttctaaatattaaggtgatggggtgcatccctcaactttatagatagagaaagcaaggggctgtcccccatgtttcttctttaaaataaaaacccacaagtctactactttccaatcaatttcctatgatttatcttagagcatttacatctaatccaaacactaccagatgaaggttgaaaaaggattgttagggaagtaaagtaagatggcttcagagtccctgtgtcttctttctcaaactccttccataatttaaatgctaaagcatgataaggtttttaatagactattttgttgtgtgtgtgtgtatatatatatatatctatatctaaggtatacggcatgatgctttgatatacatagtgaaatagttactagagttaagcaaattaacaaattaacatgtccatcatctcacatagttacacaattttttcttttcattttttcttttctttttttttttttttttttttgagatggtctcactctgtcgcccaggtggaatacagtggtgcgattaagctcactgaagcctggacctcccaggctcaggtagtcgtcccacctcagtcttctgggtagctgggactacaggtgggtgccaccacacctggctgcaatttttttttaatggtaacagcacttacagtctactctcttagcaaatttccagtttaaaatacaatattattaactataacgctcatgctacattagatcattaggactcattcatcctatataactgcaactttgtacactttgacctgcatcattccgtttcttccctgcccctggtaaccaccactgtttccacgtattccgtgtgtgtgtgtgtgtgtgtgtgtgtgtttaagattccacatataagtgatattgcacagtatctttctttttgtgtctggcttatttcgcttagcataatgtcctccaggtttatccatgttgttgcaaatgtcaggatcgccttctaaaggctgaatgatattccattgtgtgtgtgtgtgcgtctgtgtatatgcgcgcgtgcatgcctatgtatgtattacaatttctttatccattcatcgttaacagacactttggttgtttccaaatcttcgcaactgtgaataatgctgcatgaacttgagagcgatttctgagatcctgatttcatttcctttgagtatacacccagaagagggatagctgggtcactggctttagcaacgatttttgcaatatcacaccaaaagcccaggcaaccaaagcaaacctagataaatgggacttcatccaactaaaatgcttctgcaccgcataggaaataatcaacaaaatgaaaaaacagcctatagattgggagaaaatatttgtgagccatatatctgataaggggttaatatccaaaatacattacgttcacagaactcagccaaaataaataaataaaacacccagttaactaacgggcaaaggatgtgaatggactttttttttttttccagaggaagtacaaattgccaacaggtataagaaaaggcgctcaaaatcactaatgaacagggaaaagccactaggtatctcctcacacctgctaggatgactgttataaaaaagataagcgataataagtgtcggtgatgtgcggagcaaagggaaccttgtacactggtggtgggaatgcggactggaacagccattatggaaaaccctacggaggttcactcaaaaagttaaaaacagaactaccagcccagtgttatccgtccttcgttaagttcaaagtcacggtgccacttcctttcccatctaaaggggactgctcgcgacccaagccaaggcccgcaagtgtggctctccctgcggggagagtagggcaggaggtggatttccaggccagaggcttccaggctgggcccggaccccacgccgaccccggccccggggggggctcagcgacctcggcgcctcctcaggcccccagtgaacctccggggcccataaaggctccaggccggctccccggaggcccaccagcgggcgtctgggcctccctccgcgccgcgaccgccaggaggcgccgcccgggagaggaagtccagctgggcccggccgggcttcggaggcgccgcccgggagaggaagtccagttgggcccggccgggcttcagaggcgcagggcgggagccgcctcgcgcagggtcctccccaagccggcgccaggccctgccctcgtccggccctgccctcgtctggccccgcccgggccgcgagcactggcgggttctgggtcctgtgaccggtcaggcggcgtcagcgggcgcggcggagggctggccggcctcgggggagtttccgcggccgccgggggcgcggcggcagagcgcgaggccgggcagggggccagactcggagtcgaggcgcgcccgacagccgcagcgctcatggcgggcggaggagccggggaccccggcctgggggcggccgccgccccagcgcccgagacccgcgagcacctcttcaaggtgctggtgatcggcgagcttggcgtgggcaagaccagcatcatcaagcgctacgtccaccagctcttctcccagcactaccgggccaccatcggggtggacttcgccctcaaggtcctcaactgggacagcaggactctggtgcgcctgcagctgtgggacatcgcgggtaagcgcggccgcgagtttcccactccagagccccgccgggccgcctggctcctctctgcttcttttctttttcttttctgcctgaactcgtctgcctgggtacctttaggagaagagagaggcccaatccaagggcgagatgcgatggacgcggtcggctggactcggtggggcccagaggatgggatgggcagtaggagttggagcaggtcctgcacgccagagctcgctctcctgaagggaggcgaggaggccagggggccttttccagaagtttgaactctgaataatgcaagtatatcatacatacaccaggactagttgagaaggctgctttggagcgggccggcgcctctcagcctcaactcaagttcagagggattgggtgacttaacccgaagctgcactcctagttagtgacaccaccaagaccaaaagccaggttcctttccagatcattttccaccacccgccttggctctgagactggcctttgtgagggaaactccattcctcaaatactttgctctcatcggaagccgaggacagacactccgtgaagatttgggaaagcttttctgaaaccttacactcaccccttcctctcttgctaaaccaacacctagtcccatccctggtgccctcgcccccccccgccccccccccactcctcaatacagtgtttctctgccatttgctttcatttgttctgtttgagggggtacatttccctctgctctgatttatgaacacttgaactttgcctggtgtggtggttgggagtgggcgt

SEQ ID NO: 3454 - DNA, 6000 bp, Homo sapiens
aagaaaagttgaatacagaaatagaaactggtattgtgaaaggaaagggtaggacaggccgcttgggagaatgggtcagtagtaaaaatagagcatgccttgaatctaggatgagcaagcagggtgacagagaaggggaggtgacctggggtaactgagagctctctccacacagcaagaagttgcagctgaaggatgtggtccatgagagatcccagggcatggaccagaggcagaaagaggatcttgtcagtaacctcaaaaactcggattaggtcctgaatttacatctctggtctttggtttaggtttgtaattaaaagatgaaagcacttggcttccttgcataagcgactttggttttgccatggctgtctacctgtgttggccaacatggcagccccgagtcacatgaggctcctgagcatagggaaccaggctcatctgaagcgagatgcactgcaagagtgaagtacccgctgcatctgggggacttaatgcatgcaaaagaacatgaaatacctcatccatatttttggtattgatgacgtgttgaaataatattttaaacacattaggctaaataaagtatgttattaaaatggattttgctggtttctttttactttctttaacatggctattagaacttcacttgcacaggtggcccacgttgtgtttctgttggacggcgctggtccaggcccttgtcacccctaccttttgtgtactttgaattttcttccctctctcctctctctccaacaccagcagcagcaggagcaacaaaacaccagtctctgaagtgcgtgccggccactgtatcgcctcccaccctccttgctgtggttggttcggacccctgggctgctgtcccaaattccttgacgatttcagcacctggattacagccacgttttccaacaatattcctggtctccaacactatttctcagcgatttcagcatctgtggataattcttccagccctgtggctccaggttctgctctcagctcaaatgatcttatcctccactctccctcagcccttcttttccacagtcacactctgcacttaatactgataaccccaaaactacactgccccaggctcagttttaagcgtcacgttctccagcccccacctcctccttccccttcagtgcctttagtacggggacttcaatgattccctgacaccgctgggacctccgatatgtagctcctatttcctgctcacatctgttacctccctcatgccctcatttttctcctaaccccactgggctccagagtccatcatcgtagcccttcccttctatgtgctttgcttcctttgacccccactctgtgtcgtacccgcctggtaaaccccagccctggttaaatccacctctcctctttctccatgtcggcacctggacagctgaactaagccgtagagaagcacaggtgaggctgagtagtctctcccaggttcccgagcactaagctgggcgggctgtaggttagcctggctggagatcctgcactttgtgtatgtccctagccctctctttccctcatgtatttcacatcgtgccctctctccttaaaccctgaacatctcctcactcttagctgatgaccttgctccttactttactgtaaaagagatactgcactttcagaagacagcttctcgccttgggcactcccacaaccacatctacccacctcaccggatctgcagccacacaccctgccttccccttcaccaggtataaattatgctgtggcaaggctgtgactcctcccagctctagacccctacttcctgactcctcagttatttgctttctatccatgtataattcttatccatgtatcacttctcaaccccacagcccccaagagggttgtctacactcactgtcttcacctgttctcctcccattctgtctaaaccacttgcatcaggcattcattttgtccagtctactgaaaatactcctaccaaggtcagcaatggctccactcccatggtcaatatcaagttccgggtctcagcccacttgaacttgcagtagaatttagcccagttgattccactttcttccccttgaactcgttcttacttggcctcctgggagcccttcttccccagttgtcctcctgcctctctgtcaggtcatcctcagtttcctctccttcttcctcctcatctccccagcctctaactttgaaatgcctcaaggcccagtccttgaatgtcttctcctttttaatggcccgtatttcacagatactctcatcttgcctcacagataccctcgtcttgcctcacggcctcaaattccacctgtttgcatacaacacccacatttatatacccaagctacaactttcctccggctcctgacactcccctggacatggcctggctgcctcacaggcttctcgaactccacaggccctgctaacccgcttcacctgcacctgtccattcagcaaatggctaaacacgtattctctctttctaccacaacacgtatctcttccgtcagtgaatcaaatcgaagacctcccaccagatagtactacctctgccacaacctgatttatgctaacatcctccctgtgtctaggccagtgccttcacctcccacctgacctcctccttcctgccatggcccctagagtgtcacctgaacacaggggccataccgaggctgttcacgcctcagtcccccaagttaaccacattcctcctctcagaacctcctgtggtttattatctcactgggggtaaaagcaccagcccacaaagcccgtttggacctggtcgccaaagacccctgccttcagcacctgactgttctccttgccgggccgttcctgccttgctggcctttctgcggttcttcactcctggctgcctcctgcttctggaacttcgaacttgctgtttcttttgcctggaatacttttcccccaagaacctgctggcctcggtcgcctatttccttcatgtctttgcccaagtgtgacctcatgagtgagacgtttcccatcacactatggacgatggaacccccaggtccctgccactcctttcctttaatgatgctttacttttttccatagaactgttcacgcactgacatcagtttgattgttgttgctgttattgtattttgcttgactgcctccctactgggatacagactccaccaggccggcactttgttttatttactgccatgtcccagtgcctagcacagtgcctggcatgggctaaatgtgtggggggagaatttggggaacatggtggtcttacttgcaaacttctaacaaggcctggtctctacagcagggctttggttaggcatgacagggcatgcgagctctcatcctgtgtgggttcttttccgggtctctgtctactaattatgaagtaaaaggaagctctcctccagtgaaagtaatttcctgcatcccattagaacagctgagggaagtgtcaatgggataggtgtgattgggaccacggaggcagtgtcctcctgggtgcctggatcacatcgctggaaggaaacacctgtttcaccaacccaaaggctacctgctggtccagggtccaggcccggctgtactgagatcacagctcagggccctgcacatgctggggctctgctgacttgattctagaaatgtctaatatcaccagaaccattcaagtgccacgaaataacacatttatgtattattctgcttcaggtgagctcaggaggaaaagacagatatctattcactaaaaatattcttttgattggccggcacggtggcttacacctgtaatcccagcactttgggaggctgaggcaggtggatcacctgaggtcgggagttcaagaccagcctcaccaacatggtgaaaccccgtctctactaaaatacaaaaaattagccaggcattgtggcacgcgcctgtagtcccagctactcaggaagctgaggcaggagaatcgcttgaacctgggaggcggaggttgcagtgagctaacatctcaccactgcactccagcctggtgacagagcaagtctctgtctcaaaaaaaaaaaagttattttgatcaacttcttatggacaaagttcagaaagcaaagaacaatgttttactacatacacatacacatgcatgcacacaaactagaaaaaaaaatttttttgagtgctttgtctggcatctggcgatggtgtttcccgcaccatctggcctgtggtctgtggggacgtacatacgtcttgttagggctctccatccagtccacacatcaatggcttgcctggcttacgtagtctgagcaggtgcccagctttgtcgcagatattgaagccgtgtaaaataaatgccttttgattgttcacactttaagcaatattggtacaatattaaacccattgtcccaggcactccctctccttactgcttatggcacttcatgtattaaaaaatgacagtggcagcattgcccagacatgcgttttgtcatcaagtcttaatgcagtccacctggtccctcaggcaaatgaatggaggcacagaagatgaaatgattttcaaaatgccattaggaaagctcaggccagaactggaaatgggtcccgcacagggcactcggccactcttgcctggccatctcctttttggcactaagccacaagcacacaatgatatagaatgaatggttatcactggggatccagaagggtcattcaatcagttctcagtcttatcaggtctaagttcctttcttatcaggtcctaaaggcctaatcttatcattgtgacaaagataactgtagagtctgttaaacttttttttaataacatgaagattatgatttatagctgaatttctcccttttattccaattcaacaattttcatggctttttgtgtttgttttgttctggacatatttacagaaaattacctgaagagttccaacctgaggcctcctcatggatgggtcaaacgtgacatcatttgttgttgaggaacccacgaacatctcaactggcaggaacgcctcagtcgggaatgcacatcggcaaatccccatcgtgcactgggtcattatgagcatctccccagtggggtttgttgagaatgggattctcctctggttcctgtgcttccggatgagaagaaatcccttcactgtctacatcacccacctgtctatcgcagacatctcactgctcttctgtattttcatcttgtctatcgactatgctttagattatgagctttcttctggccattactacacaattgtcacattatcagtgacttttctgtttggctacaacacgggcctctatctgctgacggccattagtgtggagaggtgcctgtcagtcctttaccccatctggtaccgatgccatcgccccaagtaccagtcggcattggtctgtgcccttctgtgggctctttcttgcttggtgaccaccatggagtatgtcatgtgcatcgacagagaagaagagagtcactctcggaatgactgccgagcagtcatcatctttatagccatcctgagcttcctggtcttcacgcccctcatgctggtgtccagcaccatcttggtcgtgaagatccggaagaacacgtgggcttcccattcctccaagctttacatagtcatcatggtcaccatcattatattcctcatcttcgctatgcccatgagactcctttacctgctgtactatgagtattggtcgacctttgggaacctacaccacatttccctgctcttctccacaatcaacagtagcgccaaccctttcatttacttctttgtgggaagcagtaagaagaagagattcaaggagtccttaaaagttgttctgaccagggctttcaaagatgaaatgcaacctcggcgccagaaagacaattgtaatacggtcacagttgagactgtcgtctaagaactgtgagggaa

SEQ ID NO: 3455 - DNA, 6000 bp, Homo sapiens
aacgtttccattaacaggtgcactctaacatcgtatcaaaattaactctatagtaacacttttattagcaagctttcaagtaacacaaagcagcaacactggtgccagctatctgaaagctcatatggcttttaagaaaaacagataatcaactaccaaaaataatctaaatgtaaaaaactatcagttgtcaaattctattaactttcagcttaatattaactcatttgtatcaaaggtttcaaaagatagatgtaaaaatcattattcttactgtgctagtttcaggttgaaaaacagccaaagtaaagtcaaggttaaaaaactgaagaaattctgcaacaagactagccactaaacgacctataaagatcaagaaaaaggtaagtaagcaaatcttcaaaaactgaattttttaaattaacattatgaaatagatacactaaattaatggaagaaaggtttctaaattttttaagttacaaatttcctctttgaataatatgattaagtaatgaaaatctcaatctcctgattttttcactgggatcatcagtctgtaactaactgtaagacaatcatctcatagatttcagtgtttcgctttttaatggttaatattggctttttgtagtaaaactggctttaagcaacaacatcccaaatccaaaaatatgtaatagcaacacgattgttgtacaataaaatattattttaaaatgaggacctataacaattgaagacaaaaaaaaagccctgaaattcctgatttctcccaaatggtatcaagattcaaaaattcagagatagataaacaagaacaaactgaacatcttaccgtctttggtatttaaaaactttttcaggctctcattaactaaaggagttttgttctgttaaaaaaaaaaaaatttaagtgtcatgtgtttaccctaaaaacaactacaaaatataaagtttaacgttttcattgataaaattatggttttacaaaatccattctacaactgttaattactacaggacttactttgtgctatttagtaatttctcaaagttaatataacaaaaccatatatgaagatttgtatttttaatttttaaatgttttataaactgcttttgaagctagatattttcaaatacctgtgtgaaatacaattaaatgtcaacaactgtttattatttcaaatacatgaagtttgataaaagttttgtcatctcaggtatctaccatttatagcatacttactatgaacaggaatttaattatacacttgtaattcccagtttatccatgaaatgtgagatgatcttatgcggcccataggccaacttatttttgtaattatacatttatttgaataagtatggaaaaaatacttctagaccatcaagcctgtgattgttgctgagaagaggctacagtaggtagcacatggtaagcttccttaagaccacattaattgctgctacagtggcagcctcatacactgctgatgggaatgcaaaatggcataacgagtttggacagcaatttggtagtgtttcttaaaagtcacaaatattcctagcatgtgacctagtcacttcacctctacatattttctcaagagaaatcacagatccaagcaaagacttgtatgtgactgttcacagaaaccttatttgtaatactcaaaaactggaaacagcctaaatgtctgtcagcaggtaatggctaaactgtcatatctgtacaatgtattaatgaaatgatttattaatacataccacaacatgaatgaatttcaaatgcattatgttgaagaaacagaccaaaaaaaaagagtacctactatacgattccatttatataattcttaaaaaggtttggggtgggggagagggttacataaggggcacaaggaaaacttttgaaggtcaaaagtttgaaggatatgcgcagtaccttgattgtgatgatcatttcacagctgcataaattaactattaaaaatcaaattgtacatattaaatactttagctttactataggtcaattttacctcaataaagttgttaaaataaaagacaaggagaggagagatcctcaaggtagttggtaggctggttcagggaattctaagatagggagtcaactgaaatattttaagagaatggagggacagatcagatgtgtactataaacagccaatctaggagcaatgtggaaaaaggacttcagggagatggtgagggacaccacggaaacggagactggcaagtaggaaggggataaggcaatctggaaaagaagaaacaagcacaaaggaggcagcagagcactcccttggggacacttcagatacacacctgacagacacagagccaggtgatggctgagcaggtggaaagaagagcaaggcctaagaaacgcttagatttcttgccagataaatgatggtcccattaagggcataatacagtgggcagtttaacatacaggtctgaagctcgggaaagaaacatgcatgaaagttacagggctggagttactggatgaataaggtcagtctgtgagacagtacagaatgacaactgtggataagtctcagtcaggtgtacaggaaaaagatcatgctaaagaaaccaaggagtggtcaaaaccaggttgtgaaggaaaaaaaccacagcggtattaaaagcagaatgtgagtaaaggaaaacagtttactcctaatagttatttaaacatgttttcaagctcaaaagaaaagccatcagaaaaggaaggggtcaaagatacagtaaataattaaagacttgaaagtatacacaagacagagtgattattcttggacaggacagagcctcttcttctaaagcagtaaggaaagaggtacagataaacatagacacaggtaagcattttcacaggtgagcaatagattgagggacaggagaggaggacataaagttaggatctaatggcttctaccttccctgtggaggaagcaacaagaccatgtgttcagagagaaggaagcaggggtgacatagaaggctactgcacagctagggtgaagaagagagctgctgggcctgctcaggacctaaccaggttggtacctgccaatttgcaacatcagcaatccacaggattgactgactcttctccaagagcacatatgtgcaaagtgggaagagttagtttgctgggttaaatgaccactgagatttcttccagaccacgtatgaccgttaaggcaaggtaattaggggtccagacccatagggtccagagcaaaatgctgccaagagaagactgatgcctgcacagacatggaaagggcaaagaactgaagattttgatgaaattagagattaggtatacaggtctaaagaagtgagaggacagtagactgatttgtcatacagcaagagtttaaggctttgatgatggttctattcttgttgacaaattccagaatatttactcaggatggttggtgggactccgaaaaagttaaattacccacttaaatatagagtagtggctgcacttttaaaataatcgctgtctttttcattgtcaaaataattgagtggtcagataattttgggaaaagttgcatactatataccccgtttcatagggattaataacatattagcttactaaaggatctgagtgaacctgcacttaacacattgacaatggcaccatttcttcaagaaactcctatgaccatttgtttcagattaagcattagtatcagagttactgtggtaccttaagattacccccaaattcaaaagctacacgaaaaaagaataattttggctctctctcaatagtaatgtaatccttaacagttcaaaattatccctagctatatgttactataaactatttttaagacggtttttaatgaataagaaattaagtattaacgaatacagccatgttaaaatctggaaacttcatacctctactttttcttgctcctctagtgctaaaaacacagctgctcggagttcagccttaaaaaaaagttaagaaacaggaaattataatttcaagacaattttcacaacaagctcacatttatccagcaacaaacacgagcaagccaacgagctgggagggcaggtgcaaaggtcagaaacgccttccgaaacgttctcagtcacacaagctctccgacccccaggcttcggctggacgcgctgctttcccgccgcggatcatgcccgagcctgaggaagagacgctggggccgcactccagggcccagctgcgggccgcccgtgtggcccccaagccccgcggtcccgcccccacggaatgaggcaggggatgggccaggcacccccagtccgcggtgccctccgggaccacacgaacgaacgagccgaccccctctgtggggcgggcaggacggaggccatgccggggcgcgcccccagtgcccgccggccccggtccctcgccagggaggcggcctcctcgccgcgaccgttgtgacgcccgctgtccacgcaagccctgcggatccgccaggcccggccccagcctccggcctcaccttgatgcggttcaggaccccgctgttctccagcgtctgcaccagcaggtcccgcagctccgtgtcctcctcggccaccactgcggccgccgtcgccgccatcttgcttctccaagacaaccgccgaagccgcgctaacggccaacggccgcagcagggtacgctccgcgcgcgggctacgcggccgacgcagccaaagccccgccccgacgcgcagcgcgctggccctgccccctggcgtcgggaggcggggcatagagacctcggggttgacgctggacaccgagccttggggagcgccggaccactgagcgccgaaacttagggtcggcgctgggggcggggctgcggggcgcgggtgggcacgcaaggggcggggcgtcggcggggcctccagccggcaacccgttggctgccgtcgcctgaggcgcgagctttgaagccggcgagcggtgaggaggaggcgccctcgcgtgtggagagcggactccgcctggactccaccgcccacggccgcatcccatcgccgcacaagatcgccggagtcatattatcgacgtagttaaagcccactagcctaaagccgggcggactgcggtaaggaggccccgagaccgaacctgcagcccctgcagccccgggggggcgccggggaagggactcccgagaggtcgcgaggggcggaaggccctgcaggttgtcacccggaaataacgttctgaggccccccagccaggcgaacgcaccctgctcggccacggcctccgaggctaaccggaaaggtgccaggccgaggtgcaggggcgggatggccccaggaagagccgagggccgaggagggcgttgggtgggctccgcgctgcccgaactggggccgcagtctccactccctcctgccccgcggccctccgccgacagccaggcgccggcggggagtcctggacccctcccgggccctggaagccccgtcccgccggagctgacgcgccctcttggtatccatccggccgcctgggctgcccctcgcccctcgccttggcaaaaccagcccccggaccgagccctgccttggagagtgtgggtgcgcaaggccagccgagctgtcggttccggggtttcggggtgcgccactgtatggcggcgtaagccgagaagtgtccgaggccgggctccagcagttgagaggctgatttggccacggtgaaggacgcgcccggaggaaggaaacgggaatccgaaacgggcggtggccgcgcctttcccgaggccggcgtcgagggcttcagcgcctcagggtgggcgggaggggaaggtcgtgcgacccgcgtggccggcggaaaggagcagcgggagccgcggccgtagggaagccacgggaagacgggcggctgcgctgcgatgcgcggccctctccctgaagccctcggct

SEQ ID NO: 3456 - DNA, 6000 bp, Homo sapiens
tactgtattcttataataaagtaagctaaagaaaacgttttaaggaaatcatgaggagaaaatatatttactctccattaagtgtaagtgaatcatcataaatgtctccgtcctcataattttcaccttgaataggctgagaagcgggggttggctttgctgtctcaggggtggcagaagtagaagaggtggaagaggaggcaggagagggaggcacaataagtgtaatctgatggagatacatcataatttgtctgacttttttgcttttccatttctctaaacatgtttccatttagcaccaattcttcttccaccatttgctttagattcagtgcctgtttcatagaaaagtccatgttataagagaagtcaaaagccatattgaataagtggaacccttctgccagattgtctaatgtcaatttgttttctggcactgcttcgtcttcttcctcatcgtctggcactgggttcagaaggagtcatctccatcaagtggtcttctgttaattcctctggtgtggtgtctcttagctcttgaatttctccaagatttgtatcttgaaaccttttttgccatatctgcaatctctttcatgatttccttgattggctctgtcataaatcctgtgaagtgatgcacaacatctggagttcctccagcaggaatttgtttgggcttgatggcttttcatggttttttctgaaacaacaatggcatcttcaatggtgtaatcctttcagacgttcatgatattctctcaattggggttctcttccacagagtactgtgtgtaatgatccttaaagtccttatgactcccttatctagaggttgaattagaggtgttgtgtttaggcgcatgtagaccatttcaatgtgtttgtattgaactcatggggttctgggtggccaggggcattgtccaatatcaaaagaacattaaaggcaatcccttactggcaaggtacttcccgactttaaaaacaaagcatttatataactgatccagaaaaagagttgctgctcagccatcttgctgtacaaccaaaagagtggcaggcagtgtttcttttcccttcaaggctcaattttatagataagggcagtcctgatcatacatctggctgcatttgcacaaaacagtacagttagcccatcccttcccgccttggatcctgatgttcacttctcttcctaataaatatcctctgtggcactattttcccccagaatagggcattttcgtttgccttaaaaacctgttcaggcagatatcttttctcctcagtgattttctctatttttttttatttttattttttatttatttttttttgagagagtctcattctgtctcccaggctggagtgcagtggtgcaatctcactgtaacctctgcctcctgggttcaagcgattctcatgccttagcctcctcagtagctgggattatagatgtgcaccaccacacctggctaaattttgtatttttagaagagacagggttttgccatgttggccaggctggtctcgaactcctggcttcaagcaatccacccacctcagccttccaaagtgctgggattacaggcatgagccacaaagcctggccttttgtcctcaataatttccttaatggtatctgggaactcgtcggctgcatctgggtcagcagaagctgcttctcctgttatcttgacattttttgaaagccaacccactttttaaaattatcataccttccttcatcttccttttgctttgtcagataatgacttcactttttcttgaatattagattatataggtatgcctttctcatagcaatcctgcacccacaaaaagctgcatttgcaatatgagataaaaaggtatttcccaaaaagtgcaaggttttcatgcttgttggtgtagctgcagcgatggcttcataaacttccttttgtttttataccacagtccttatactggattcatttatcttaaaatggcaggcgaccttagctgcagacctcaatctacaatacacagcaagcaattccgctttttctgtaatgtcattaacttttctctgattcttgggagcatttccagcaccactagcggcacttcgtaatggtcccatggtgttacgcaaggtttacagtactgcagtgaacacaacgagaaatatgtgagaacctcaagagcttaccttttactgtgatatgcaatgtactggagagatcaactgctcactcagagatgattatgttacttggaatttttagccaataccagcaacactgacgctcactgcaatagcaacaggaggtggctacaaaatcattacagtagtactctatgtactacagtgaatttgatgcagttattatttaatattgcatctttacaactgtttacacctctcttgaacctaatgggtgccatgtaactgtctgtttgtacgtgtaagttttgataaattttaactttttataacaggcttgtatatattttatgatagtaaataataaaatggcctagtatctacatatattttatgcattcatgacatatctagctttttcttttctttttttttccatatttcttggctaagcgactcatctgtgaggtttttcacaaaattgttgccatcgccaaaaatattccatttactgaaaaaaatccacatataagtgtactcacgcagttcaaactaatgttgttcaagagtcaactgtataaaaggtattaatatgtctggaaagagatatgtttccaatttaacagacactaccaatgagaagagttgggctaggcaggaaacttcaaattttccttttttactttatatattctatttgtatctcaacttataacctgtggaccacgtttattagaagaaaatgcagattcctgaaacttcctgcagaccccatgagtgacaatctcagggagatggagttccagaatctgctttttttcatagatgtttctttgccattcctgtgtatatctgagtttcagtagcactgctaatcaattgtttggggttctctctccttcaccagcatgttcttgcaaaactaaccaaacacatataaagcgcaaacagtacaatagtgcactgcaccttcatgacccttacctgttccagcctcttcctacctcttccacatgtgatatgtgtgtacatacccacagacagaaacacagagacatgtttggaagccagtgtggatgccctgtgatctgtgtgtacacatgacaagtgcatacacacgcacataaaggaacccagagacgtgtttggaagccagtgtggacaccctgtgatctgtgcgtacacatttgacacctgcgtacacactcacagacagaaacacagagatgtgtttggaagccagtgtggacatcctgtggtctgcgcgtacacatgtgacaggtacgtgcacgcccacatacaggaacacacagaggcctttggaagccagcatgggcagacaggccctatcccaaagcggccggcaggcgtctcctaagaatggttctcggacacacctctgaaaggaaaatacaactcggcaccgcagttgactcggccaaaggaaaaaaacttaagctgaaagctgaggcctgcccgaaggagcctttcctgtggcgcctgagccgagggcttcagggagagggccgcgcatcgcagcgcagccgcccgtcttcccgtggcttccctacggccgcggctcccgctgctcctttccgccggccacgcgggtcgcacgaccttcccctcccgcccaccctgaggcgctgaagccctcgacgccggcctcgggaaaggcgcggccaccgcccgtttcggattcccgtttccttcctccgggcgcgtccttcaccgtggccaaatcagcctctcaactgctggagcccggcctcggacacttctcggcttacgccgccatacagtggcgcaccccgaaaccccggaaccgacagctcggctggccttgcgcacccacactctccaaggcagggctcggtccgggggctggttttgccaaggcgaggggcgaggggcagcccaggcggccggatggataccaagagggcgcgtcagctccggcgggacggggcttccagggcccgggaggggtccaggactccccgccggcgcctggctgtcggcggagggccgcggggcaggagggagtggagactgcggccccagttcgggcagcgcggagcccacccaacgccctcctcggccctcggctcttcctggggccatcccgcccctgcacctcggcctggcacctttccggttagcctcggaggccgtggccgagcagggtgcgttcgcctggctggggggcctcagaacgttatttccgggtgacaacctgcagggccttccgcccctcgcgacctctcgggagtcccttccccggcgcccccccggggctgcaggggctgcaggttcggtctcggggcctccttaccgcagtccgcccggctttaggctagtgggctttaactacgtcgataatatgactccggcgatcttgtgcggcgatgggatgcggccgtgggcggtggagtccaggcggagtccgctctccacacgcgagggcgcctcctcctcaccgctcgccggcttcaaagctcgcgcctcaggcgacggcagccaacgggttgccggctggaggccccgccgacgccccgccccttgcgtgcccacccgcgccccgcagccccgcccccagcgccgaccctaagtttcggcgctcagtggtccggcgctccccaaggctcggtgtccagcgtcaaccccgaggtctctatgccccgcctcccgacgccagggggcagggccagcgcgctgcgcgtcggggcggggctttggctgcgtcggccgcgtagcccgcgcgcggagcgtaccctgctgcggccgttggccgttagcgcggcttcggcggttgtcttggagaagcaagatggcggcgacggcggccgcagtggtggccgaggaggacacggagctgcgggacctgctggtgcagacgctggagaacagcggggtcctgaaccgcatcaaggtgaggccggaggctggggccgggcctggcggatccgcagggcttgcgtggacagcgggcgtcacaacggtcgcggcgaggaggccgcctccctggcgagggaccggggccggcgggcactgggggcgcgccccggcatggcctccgtcctgcccgccccacagagggggtcggctcgttcgttcgtgtggtcccggagggcaccgcggactgggggtgcctggcccatcccctgcctcattccgtgggggcgggaccgcggggcttgggggccacacgggcggcccgcagctgggccctggagtgcggccccagcgtctcttcctcaggctcgggcatgatccgcggcgggaaagcagcgcgtccagccgaagcctgggggtcggagagcttgtgtgactgagaacgtttcggaaggcgtttctgacctttgcacctgccctcccagctcgttggcttgctcgtgtttgttgctggataaatgtgagcttgttgtgaaaattgtcttgaaattataatttcctgtttcttaacttttttttaaggctgaactccgagcagctgtgtttttagcactagaggagcaagaaaaagtagaggtatgaagtttccagattttaacatggctgtattcgttaatacttaatttcttattcattaaaaaccgtcttaaaaatagtttatagtaacatatagctagggataattttgaactgttaaggattacattactattgagagagagccaaaattattcttttttcgtgtagcttttgaatttgggggtaatcttaaggtaccacagtaactctgatactaatgcttaatctgaaacaaatggtcataggagtttcttgaagaaatggtgccattgtcaatgtgttaagtgcaggttcactcagatcctttagta

SEQ ID NO: 3457 - DNA, 6000 bp, Homo sapiens
ttagagacaaggtctcactctgtcacctaggctggagtgcagtggtgtgatcatggctcacaccacttgtcctcctggggtcaagtgcccacttcagcctcttgggtagctaggacaacaggtgcatgccagcacagctggctaattttttaaaaaatgttttcatgtagaggcaggggtctcactatggttgtccattctgatcctcaactgtggggctcaagtgatcctcctgcctcggcctcccaaagtgctgggattacaggcatgagccaccgtgcctggcccagttttcaggtattttaaaactaacatgtattgagatgctttttcacattacgtgtaggttttggggcatatgtttttgtatctttggcagtcacctgaggattttccaaaccaggcgttaccattccctgtcacactctcacaccatcctgaatgaatggatacatggatgcatgaatgttcccacacttagccctgtagtaaaattacttctctaaataattcattagtaagtcatggatcagaaactgtcgttggcagggagagaggtggggggcagaggcatgggtgaagagaattttaaatacagtcagcctcatatctggaggtttcatatgcattgctttcacacctgcagattcagtcgtatgtaaatggaaaaatggttataaaaaataataatacaaattttatttattatttatttatttttttttttttttatttttttgagatggagtctctctctgtcgcccaggctggagtgcagtggcacgatctcggctcactgcaagctccgcctcccgggttcacgggaggctcctgcctcagcctcctgagtagctgggattacaggcgcccaccaccaagcccggctaattttttgtatttttagtagagacggggtttcactgtgttagctaggatggtcttgatctcctgacctcgtgatccacctgccttgggctcccaaagtgctgggattacaggtgtgagccaccgcgcctggccaataatgatacaaattttaaaataatggtatacaactgtctacatagcattacatttattaggtattacaagtaatctagagatgattcaaagcatatgggaggatgtgtgtaggctatgtgcaaatactacagcattttatacgagggacttgagcatcctcggactttggtgtctgcaggtgtcctgggtactgagggacaactgtattgcatgaattttttgaatacttttgcaaaacaatagtatttctttgatatttttcctacatgaacagtttggaaaaaaattcttttttttttttttcaggttcttaagtcagtctgatacaattcagtttttgactactgaaaaattaaggtttctcattgtgaaacttctctagtgctgactttttgttaatctagaaatgattggcttctttattatatgagtgtactattggataatttaaatatatactaaagctttcttatggctgcactataatttcccatagagcttattattagtcttgagctccagccaagagaacttaatgaccgttgtagtgctgtgcaataggtccctcacttttatgaaaagacaaaacttgttttagttttttgttataaatgacttgatttgtttcctagggctaatgtaatataagtaccaatattgggtggcttaaaacaacacatgtgttgtgtcacagttctagaggcttaaaaatgtgaaatcaaggttcgcggagggctgtggctcctgttctagcttctggtggctgctagacccagatgctgtttggcttgtagatggattactccagtctttgcctccatcttcacatggacttctccctgtgtttctctgtgtctcttccccccagcaaggataccactcattaggttaggacccaggcccaccctactctttgaatggactcatcttaactaaatacatctgcagtggacactgtttccaaataaggtcacactctgaagtactgggagttaggggtttcaacatatttcatttgtgggatacagtttgacccataacttttgtgcttgtccagagaatgaattctaaggcattgccatggtatgtgtgtgtgtgtgtatttttttttgagacggattctcgctctgtcaccaggctggagtgcagtggcggcgattacagctcactgcaacctccaacttcctggttcaagcgattctcctgccccagcctcctgagtagctgggattacaggcacgtgccaccacacccagctaatttttgtatttttagtagagacggggttccactatgttggccaggatggtttcggatctcctgacctcatgatccgcctgcctcggcctcccaaagtgctgggattacaggtgtgagccactgtgcctggccttatattttttaaatcttatttgttagtttttaaacaatacttaaccttagttatttagcttcattttgaatcttcaacttagccaaatccaggtgatacaaaacccaagtaactgaagtttatgtacgtaacataagttcgtcttaactcatgataagggtttttaaagcagattcccgggtatacatacgtatacagatggtccccaatgttacaacagtttgatttatgcttttttgactttatgatggtacaaaagtgatatagattaagtagatagcatacgttgagttttgatcttttcccaggacagtaatcggtggtacgattctctctcggggccaggcagtgacgttgagccacggcttccagtcagccacatggtcacgaggcactctgatgccaggggactgaatagccagcattttttggatattgtgtttttgcacctcatgtttatgaagtgcccgttttccactttgtgatattttcacttgacggttgatgaggtgaagcgctgttgtgggttgagcatctgtgcacatgcatacacctgctgtgcacacgcatacacctgctgtgcacacacatacacctgctgtgcacacgcgtacacctgctgtgcacacgggtacacctgctgtgtacatggaggagccactgaaactgctctcagcgttttcagtgctttggttttaatctgcaaaatgtgttgatgacaaatctttctcctcttcctgtagatttttttaatagtgaagtttatttggaattaagtttagtgaattcattaataacctagttggtaatggtcttttggcaaaaatgagccatagttataaagtagtaacatgttactgtgtggtttagaactagattttgagagcagttccaaagcagattgtttcagaatttatttttactccctggattaagagaactatatttttaaaataattctgttatgtttacaagtatgtgttgtgtaatatagtaatgcccttctccgtaaaacttgtcttcctaaaactggtctttctgtctatagcgggaatattggtcaaacctgtcaaataatcatggatacctactagttgctcagctttgatactagatagttcattatgtggatttaagttacattggcagtgtgaattcttggggaaatcagaataattattgtttctcataatattgctttacatttacatttttcagtttctgtcatgccagttattctttggcactttctcatgagtgtttagaaggagagaatctgtcgtggccacaggctgtgtcattgtacatatgtttaaatatcacatcagggtatttatttccaaatgcatattcttttaaaaagacataaatccattattaaaacagtgtaaaaatcagaaattacaactgctgtgaattacataatatttttctatatttgataataccaggaaaatgtcaagaaagttgttaggaaatttttgaaagtttccatccctttgaaaatatgttgtctaaaattataacttgctatttattttttcagacatctctttataatcattaatttatattaataacatggaatgtgtagctctctagaaggcaataaaatttgcacagcatatatcttgcctactgtcaactagtcaagacctctacctggtgtaaagatgtaaacgtatatcataagacatgcataatgcattctgtctgtacccatatgaaaagtgaaaccatccttcaggagcgtcttgttcggtaatgtctaacccagactttggtcaccatgcttcagtagttactactctttaattctttctcagccatccatcccttcctagatataatttgatctgaaaaatatgaatctagttcaattcttgaggaaactcatgcctaggaaattaatttacttaagattacacgggccatgtatggtggctcacggctcacgcctgtaatcccagcactttgggaggccgaggcgggtggatcacttgaggtcagaagttcgagaccagcgtggccaacatgttgaaaccctgtttctactaaaaatacaaaaattagccaagcgtggtggcacgcgcctgaaatcccagctactcaggaggctgaggcaggagaatcgcttgaatctgggaggcggaggttgcagttagcccagattgccccactgcactccagcctgagtgacagagcgagactctgtctcaaaaaaaaaaaaaaaaaaaaaaaagattatacgactgggtgtagtttgtgcttgtaatcccataaacccagctacttgggagactgaggcaaggaggactgcttgagcccaggagttttaagaccagcctggatgacatagtgagagcctgtttcttaaaaaagaaaaaaaaaaaaaagaaaaaaaaatggagttaataattttggactacattccagattccttgtttcagttgagtgctttttctattattccacgggtattttacacaatactgctctctttagtatgcaaggctgaattttgggaaattgccatttttaacccataaagcccacaaattcattataatttagcttaatagcataaatattgagttaacctctggaagcaggctttgactttgatattgacctgaccacttaactctctggagactttgacaagtgacatcaatgtctgtctctgtgtttcctgatttatatccacagatagaaagccatctccagatcctagggccattttcaagattcagtgagataaggtgaagcatttgaatgttctccataaatgtcagctgcttttattattactagcattattttttgttttcattattattattaacatagacccgtctaagggcagaaagaaatctgaccaagaatggagtgaaagtcggctgtgaaggttaggactccctgaaaacaaaaaagaaaagtggtaacatcactctgtatccaagggcatggataaggatgattcagaatttttttataacattgatgttaatatacatagagaaatacacacacacacacacgtatatatgtccatggacatcaaaatgaggtataggttaggaagttaccctggaagttagaattgagataattactttgattagcaaaggtttatgttagaaatatgagtggttgaaggcagcgcctttcaccttgatgcctgttgtgtttagcactggatagaaaattgctatttttactgatgactactttaatgcttggttcattcatatgaaataatctttcttttctcctttaataataatgatctctcctgatttcaagttgaaaatgtattaatttaagataacttatgaagcaatgacatatggaagaggagatgggaaattgtttctcaatgggaaagtgtttataaatgggataggtatactaaaggtatttccatttagggaaagaggaaaggaatggtattaatatatttctctaatatttttccccctttgaaagtttgccatgttaggaatcctggggatggagtgatgaattgtggcattgctctgcagttcacgctgctgagagctgccccaacacacacacacaca

SEQ ID NO: 3458 - DNA, 6000 bp, Homo sapiens
acgggatttctgaggctgagtgctgtagctcacacctgtaatcccagcactttgggaggccaaggcaggaagatggtttgagcccaggagttcaagaccatcctgggcaacatagcgagaccctgtctctatgaaaaaaatataaaaattagctggatgtggtggcacacaccagtggccccagctactcaggaggctgaggctagaggatcacttcagcctggaagttcaagactgcagtgagctaggattgcactactgtactccagcctgagcagaagagactttgtctcaaaagaaaaaagaagaaggaggaggagaaggagagggaggaggagtgagaggagaaggagaagaggggaggggaggaggagaagaagaagaagaaggggggggaaaggaggagaaaggagagggaggaggagtgagaggagaaggagaagaggggaggggaggaggagaagaagaagaagaaggggggggaaaggaggagaaggagagggaggaggagtgagaggagaaggagaagaggggaggggaggggaggaggaggagaagaagaagaagggggaggagaaaggagaagaagggggaggagaaaggaggagaaggagagggaggaggagtgaaaggagaaggagaagaggggaggggaggaggagaagaagaaggaggaggagaaagaagaaaaagaggaggaagaggaaaaaggaggaagaggaagaaggagggggaggaggaaaagaaagaaaaaggaggaagagggggaagaagaggaagagggaggaggaggaggaggagaaggaggaggaggagaaggacaaagaagtagtgggattgctgggttctagcacaaatcggggccatggtctcatggacagtgtggccagactccttccctggggctccgctgcctggcccctccaccagcaatgcgtccaagggctcgctccctgagccgtgcctttggggcacgagatctgatttggggattcgcctggacaagaagcagaacggcaatgtctttctctgatgtgcatttctctgattacagacaccttttcacatgtttgtcctgtggatttctttttccgtggatgatctattcacctcctttgccttcttttattggttgtgttctttcatacacgtttaggagccctttgcctggtagatctgagttgcaagtatttttcctagtgtgtgctttgtgttgtgactttacttccgaggatttttgccttgaatctgttttgtggtatttagatttttaatcatgattagagtaacctttttccactctgaagttataaagaaagttacatatgttttcttcaaggctgggcacagttgctcatgcctgtaatcccagctctttgggaggctgaagcagatggattgcttgagcccaggagttcaagaacagcctaagcagcctagtgagaccctatctctatttaaaaatataaaagttagctgggcatgatggtgcatgcctgtagtcccagctacttgggaggctgaggcaggaggattgcttgagcccaggaggtccgggctgcagtgagccaggatcgtgccactgcccgccagcttgggtggcagaatgagatcctgtttcaaaacacacacacacacacacacacacacacacacacacacacacacacacacactttttctttttttggagacagagttttgctcttgtttcccaggctggagtacaatggtgcaatctcggctcactgaagcctccgcctcctgggttcaagtggttctcctgcctcaggctcccgagtagctgggactacaggcgtgagtcaccacatctggctaattttgtatttttagtagacatggggtttctccatgttggtcaggatgctcttgaactcccgacctcaggtgatctgcccgtctcagcctcccaaagtgctgggattataggcatgcgccaccacactcagctaattttgtatttttagtagagacagggtttctccatgttggtcaggctggtcttgaactcctgacctcaggtgatccacccaccttagcttcccaaagtgctgggattacaggcgtgagccagcttgcccagccagaacttaacatttttttacaaaaggaactactaaatgatgaaaaatttctggagatggatgatggcaatgtttgtaccacaacgtgaatgtacttaacgccaccgaaccgtacacttagaatggttaacttggcctagtgtgatggccaccatgcccagcctattcacctaatcacacctgtgatcttagcactttgggaggctgaggtaggaggattgcttgaggccaggagttcaagaccaacctgaccaacgtagcaagaccctatctctgaaaaaatatttttttaacttaaaaaaaatggttaaaatggtaaattctatgtgatgtttactttaccacaataaaaagtaaactttggctaggcacagtggctcatgcgtgtaatcccaacacgttgagaggacgaggcgggaggatcacttgagcccaggagttcaagaccagcctaggcaacagagcaagatcctgtctctacaaaaaaaaacaaagaaaattagccaagcgtggtagcaccagcccttggtcccagctacttaggaggctgaggtgggaggatcacttgaacctgggaggtggaggctacagggaactgtgattgcaccagtgaactccagtttgggcgacagtgagatgttgtctcataaaacaaacataaataaataattcaaaattttaaaaattaggctggatgcagtggctcacgcctgtaatcccagcactttgggaggccagggcgggtggatcacctgaggtcaggggttcgagaccagcctggccaacatggtgaaaccgtctctacgaaaaatacaaaaatcagccggtgtggtggcgcacgcctgtaatcccagcactttgggaggccgaggcaggcagatcacaaggtcaagagattgagaccatcctggctaacatggtgaaacccgtctctactaaaaatacaaaaaaaaaaaaaattagccgggcgtggtggcaggcatctgtagtcccagctactcaggaggctgaggcagaagaattgtttaaatctgggaggcggagcttgcagtgatccgagatcgtgctactgcactccagcctggcaacagagtgagactccatctcaaaacagcaacaagaacaaaaacaaaatttaaccagacgtggtggtgggcacctgtgatcccagctactcgagggggctgaggcaggagaatcacttgaacctgggaggcggaggctgcagtgagccgagatggtgccactgcactccagcctggacgacagagtgagactccatctcagaaataaataaatacaaattaaaaaattaaagagataataaaagtgtgtgattagtaacaaaagcctgctatggaaagaatgcatttgggttagaggagcgacaccatgagtaacgtaaagagtcccgcggagatggccacagcttctctggaggctcccagcgcatcccaggaccccgagtgcagagtgtgggccaggacaagggaagcacctttcccatccccgggggatgtctttctgcaaacatcctggggacgtgggacattgtcgctactgctgctgttgagttatttcttggcacctgtttctgcggccaggttgcaggcatcactgtggctagctgccccagacggccgtgtgggccttagcaaggaggggcctcccaggtggccagtgcagaacccgcaagtgggggggagagatggcccgggaggctgcccccgcgctccacagcaagaggccactgggctgctgcctaaatccccagccacatggtggtaaggacgacacccagaagatgcacagacctccctgcactggctcctgagtcccacctgagccgagaaaacaggctcccgggtcccacctgagctgagaaaacaggcttcccagaaccccgggcagatgccatgggtgtcctggggggccctcggttgcccaggcctgaaactcctcttcctgcagcgctcagaggggggcgggacttggggacccagaagcgtggcaaggggctccagacggatcccctctccagcctgtcctccacctgtgacaggaagcagaggcagctccctcaggggcccgcccccacctgaggatccctcacaggactccttgggccagtggtgccctaaccccatcctgggcctgctgtgtcccctggcaaccaccagctggggctttagaagggggctggccccacccacagaggctgtgatcactagccgcttatccccatttttacattgctggtttgcttgttttgtttttttgagacagggtctcaccttgtcacccaggctagagtgcagtgatgaaatcatggcagcctccaccttccaggttcaagccatcctcctgcctcagcctcctgaatatctggggccgcaggcacataccaccacgcccgactaatttttgtaatttttttgtagagatgggggtctcactgtgttgtccaggctggtctggaactcctgggctcaagcgatcctcctgctttggcctcccaaagtgctgggattacaggcatgagccaccgttcccagctggccttaatgttttttatgtttatagagacagagaatgggggaagggaggtttcgctatgttgcccaggctggtcttgaactcccggcctccagagatcttcccgcagggcctcccaaagcgcggggattgcaggtgcgcgcggggccagcggccccccgggcgggagaggagggcgtggccggggggcgtggccgcggggcggggagggggcgtggcccggggggcagggcggtgtgacgcgcgcgccgcggatcccggaagcggtgtcagatgctggggagccgggcgggcgggtgcggtggcggcgggcggcgcgggggcacttgttgttcttcgcgaagtcggagcccgagcgccaggcggcggcggcggccgaggggagcgcgacagtgagcgccggcgcgaggacagcgcgtgcccgcgaggagccgccgcgcgcccgcgccctccgcgcgacgccaggtgaggggcggtggggcagcggggcccgggccgcggcggggacggggaccggggcgcggggccggggctacctggccgctgagtcacggccgcctgggggcgcgggccgagggtggcggggttgggtgcgcggggcccgagaccctcatgcggcccgcggcgcggcccgggcacctgcccaggtgggccccgccccgcaggcccgggggcttccccgggacgcgaggctctctcccctgcacgtgccgcccgggccatgcttgccgcgccgggggccccagggcgcggaccccagacctgggaggacgaggatccacgcgggtcggcggcgcgcatcgggcccgcgccttcacacctgcggggggcggggcggggcgggcgccacgtgcgggcggtgcggggagggcgcgggcgcgtggattctccgcggcttccgccccagcgtggcttccgcgtgcggccccggactgccccccgcgcttcctcccggtgacgggcggcgctctggcccagtggctggggtcacgcgtgcccgggaacggggtgggggtaaccgggtctccccacaggcgggatcctgggactggtgtcgctctcagccgcccacctgccagggttgctggaaggaaggccgtggggaggcgggaggggggcaggtgacagtggccccaaggctcgtccctttgctcacgtgtggggcaggggctccggcctcttcccgctcccactgcgtgagttcttctgtgcctctgtcaagttcaggaaactgtgtatgtgcccgtgactgtgtgtgtctgcgtctgcacagcctctagatcctggggggtgggaccaggcgccaccgagaaacccagaaagccaggaccccgcctgg

SEQ ID NO: 3459 - DNA, 6000 bp, Homo sapiens
caggcttctcctgccttttatccttgaaccgagccagggctttgaggggctggttgcccgcagcgtcgactccccaggtgctggtaaacccgggagccagcgtttaccgagggtcagggttgtcggggcgccagcctttgtgtgcacccgggaggctgctgttaagggagaccgtcttccgggccacttcgctgtctacaaggcgtgtgctttcacccacggggctcagcgatggctgcgtttgtttacagtctctggcaaagctgtttgccacccagacggagaagaagttgtgcctgttcttgtcccagctgtttctgagtctaaaggtttctggagtggactttctgggtttcgggtccagtccacacgggaaatggaaatctggccagctgagagagggctccgtgtggccgcctttcaacagtaaacagtgactcaccgctccgtccccaccctccctgctctccgcgaatggaagatgcctttccccgctatttatttttgctttttataagtcacagactcgtcatgtttccgctttcctacagtttcaggaaactgggagtgtcgtcttaaaatcatagagttttagagcaggtacaagcgaacttgagtggccacatgccccaccccccgaccagctgctgtagatgaggaagcccaggccatgaggtctgctggcctgtcccacaggccggtggggtctggtgtagagccttcctgcttctccgcactgtgcgtcgggtgtcctggggaaggtattggggtggagactgccctctccctgccctcccatgcggggccggctcatctcgtacagcgggggctagtgtggggtgtagggaagaccttctccctgcttgcaaggagctcaccatgccttggggaggccccctgtccccagaaggatctagaaccaggccttggtagagggtgcttgcctacgcgaggaggagagcagtggggagtgtttctggaagaagcagggcagggaaccacgtgctctctgcagatggtgatcagaaacctgaaacggcattggggtgggggagtcggggtttgggaggaacccccaagacttttgactgcctgtggggctgtgtggggggcaccaggatcagggtgagggcatcccatttggcaaagctgtggtccagacaggagacgctggaggccggagcctgggcaggtgctgtgggttcaggcgggtgatgcttgagggctgggatcaagcctggttggcgcgtggatgaggaaaagagagaggggcaggggcaactccggtgaatgatgcggttgggggctggggggcatctgggccccccggaatgcccctgactggacttagaggctgggagcggattgaagccccagggcggccgggggagaacaggatgctgatggggagctggaggccgaggacaggaggatggtgtggtgggagccagggcggggactggagggggtgtggtgtgttctgcagtctgctctctgctgctgcagctgcctgagtcacctctggatgtagcggaatgacacagcttcctcagactgcaaatgcaaggtgaccagacgtcctccaagccgggccgacagtcatggcttgctggagggcagccagccagggccaggctgctggctggtatgggccgggctgcggggtgccaagtggggtgcctcccgcatgcttagtggggctgtgtccgggacagccggacagtgggggccctcgcagtgtaggacctcatcctcagtaggaagggtgtctggctggtctctgggaccagctgggctgcaattagtcggttgacacctgtttgacaggcacccactgggtaccagtgccacagcggccccacctacccttgcggcccagtgtggagggcacccggcttggggtctctggcagaaaggctcctgggagaggcgggtacaccttgggtggcctctggttttgtggattgcacctgccgtgggagtcactggtcggggggcgggagggcgcttgctgctgtgctgctgggtttctgaacccgtgtctctcgcacagagctcccgtcctccgttcctggtcttcctcctgcccctcctccctctcccgcatcccacatcctcggagacccgcggagaatagaagtggaagggccactccgtcttggtcagactggctgggcagctgagggggtggggcatggagtctgtgtcatcattcaccccttgggcaagaacaagtgacccatccagagcccccatgctggcctcgtagagcgagcggcagccccgatgcgtcctctcatctgggaagaatcagagccccaaagctgaaatccccgtttctctatgggcatccacagccgggaccgttcagaggggtcatccagccgtcagctgctcaactcacttttgcactctctctttttttttttcctaaaagataaggtcttgccctgtcactcaggctgctggagtgcagtggtgtgatcacagctcactgcaatctcgacttcgaggctcaagcaatcctcccacctcagcctcccgagtagccgggaccataggcacatatgtgccatcacaactggctatttaaaattctttttttttttttttttgtagagatggggccttgttatgttgcccaggctggcctgaaactactgggctcgagcattcggcctccggaggcgttgctattacaggcaagagccactgtgcccagtcccaacttggtggagaaaatgttccctcctggaccccaaagcaggtccttctcagcttgtgccagcacagcaagaggtgccaaggctgccagccccccactgagcagggtcaggcccatgggtgaccagtgagtatttgctgggacttaaaaagttaaaaatggccgggcatggtggctcatacctgtaatcccagcactttgggagactgaggcaggaagatcacttgagtccaggagctcgagaccagcctaggcaacatggtgagaccctgtctctacaaaaaagtttaaaattctctgggtgtgggggtgcccacccgtagtcccagctgctcgggaggctgaggcaggaggatcgcttgagctcaggaggtctgcagtgagctgtgatttcaccactgcactccagcctgggtgacagagtgacaccttgtctctaaaatgaaaattaaaagggaaaacatgatcctccagaagctgaggtggctgcctggggatcacctgctcctgaaagcacagttctggacgactgaccctgggctgcctgccctgccggggggagcccagggctctgatcctcaccctctgcaaggtgccttcctgggcggagccgccctgccctgcgctttatggagcccaggccctcagtctggatcctggaaaggggcgcccggcgtcctggctccgtcactcatccccagctgcagccgcaggaattgcctctgtctgaggctgctggcagttccttttccttgagaggaagtgatgcccccgctgagccttgtttagttctgcgtcacgtcgaggtgtctggccttgggttgaaaaccctgcctcttccatccgaaaaccagttacctgagagctgttccaagttataggtggtgccggagaactttgctgcccggcgctgctcccgggacgtggggcgtgagcgctgcacccttacttacgtcggctgctggggccccacagcggaaactcagacccgcccacccaggcccccgctgtggcgctgaacactgcacttctctggtgaccaccgaaactcagaggagctcggggtgtcgggtgcttgtgcgtggcgatgctggtgttttgttagctgctgggcgtaagacacaatgcgaggacgtcgttcctcgggggctgctggaggggagcttggctgcagtgctgaccaggtgctaatgcagtagcccctgccttgggcccggggtagtgcacgggcgtctctgcgaccccaggcacgctttccccctggatgacaccctaaggctgcgtctctggccctggggtgggagcgctttctacatgtgctctggcggccctggaggccatgtgaggtcggacagttcacaaaaccccatttagggcagtcgtcatttttagatcagttgctttacaaactttttttgtgcatacaaaactcttctctgaatgtccttccaaaagcaagctgtcatctttcttgcctctgatgtttaaagcgacattaggttaaggctacttggatttattctgtgcatggtggggagagggaggcgccagcaccatcccatcccgtgctgggttcctgagagaagctttgctgcttggctgggccgtcccgctgcgtcgtctctccaggcgcgtggctggtccaggcttcctcggcagagcagagtcgtgacctgcccaaggaggtggggggcaggcttgcgagcacagcgtgggggccgcctgggagccctgcgtccgccaggtcctcattcttcagagggccccagtgcaggtgtgcctcgaagtactggggttggagcggggcacaggcgtgcttcagtagccctggcaaccttgacctcctggaagtagtcagccacccctcctggggcgcccccggctaccgtgtgcctccgcagtgtcacagggcatcgcggaggcatctttttagtggaaagatccccacgctgaactctgcccctggcatctggccgagccccacacgtcaccgtgggtctggccagacggtcctgtcccccggaccttccttttccgcccggctgtgctgccacggcgggcagtgggcccgggggcccaggagcgggtccttgctgggtgggaggcccgggtgtgtgggaatgcgcgcggctctgtaaacatctggtgactcaccgcatagctatgtcgtggccggcctgtgcactgacgtgctcgcagtggagctggaagcggtgcccgcggcccctccctctgacatggaaaagtttctcatggtgctcccagccgccggcatttgcaggtccccacggtggcggaggcagctgggccccagcctctccactgtcaccctcaccccaggacgtggtgcgaaggagcctggagcccacctggccgtccccgggaccggctggtgccatcctgtgccatctacgtcagcgccctgagatcagctggccttggcaggggcagcggactcggcagcctggcgcaggaccctgtctcacctgtgcggccctcttgttgtgggggtttgtgggttgcgggggtggggcccccatcggaggcagggctggagggtggagggatttgggcccgagggctccctggcccagggtgtggggagggtcctgggctggcagggaggacgggatgcggtcacccgcccccatgatgcccatgtccagtggaggtgctgaccaaggacaccccccaccgccgtgtgctgctctgatgttcctgtgggaacctgtgtctggtatttggggtatgggagtgggtgctgtgaacccctgtcccgcgagctgcccggcgccttctgcccgcccgtcccggccgccgggtgcaaatgggtttgttgactgcctgccggcctcgtgatgtctgtgcaacctgacctgaagtcaggatcgcgtttgggcttctcggtttccatgacaaccgtgggggctggctcggtcccaaggtcgccatggcaactatcggagggctcatgccggggatgctttggctgggtttttcatgaatgattagaatgtgtgacacaatgcagacgtgaggacggcgggggcggcggcggggacgactcccgccagacggtcaaatgctcggcagggcggcggctcccccacctccctggtctctggctgcggcccccggacctgccgcccctcaggaaccccacacccccttgggccgcagggtcctcgctcgggggcagcttaggtggaggtggtgatgtcacagccgcagcggccagggccgtggtaggtgtcccgtggcctgtggggagggcg

SEQ ID NO: 3460 - DNA, 6000 bp, Homo sapiens
gagaattatgaagacccaaactctcataaccccactctttacacattctcattaaagctgtgtttagatattctagatgacccttttgttgtgggtcatccggactatctaagcccaacaaacatatccagaggcatatcatacaggtgactgtcatctgcatcacctacttaagcctatctctccaaggcatgacgtcattaaaaatgaagtgggaaattgaggcaatggttccaccaatttaaagtacaaacccaaataaactatcttcacatgaatgtgctgaaaatgtgtacgacctcctaaaaaagtttctgaggtgattgtatcagcttttttcccgctaattcaactaaacatcacaatatacattttactcatccccaaaatattttctgagtacttattttgggcaccatgaaggatacaaaaatgaataaaacaatgtacctgtcttcaagctggtaaagatacagccataaacataagaattgtagttttcagttttaaaaacgttaagtttggctgaattttggagatgctgcaggcaatcaataataagccagaaatgtccatattataaatacattctggactgtcatatcaagctggtgaccctggtataaagtactaaaagaaacaatatattttgagaatctcaaaatgtgtgtttgggtatgttacttgacaactgtagtgaatttttaagtctttaaaaactagtctcagagcgctagtctttcagcactctgagcctatttctttcaacaatttgtatctcacaaaattgtgaaaacaaaatgaaatagtacaaatgtcaaggtgtcacggaattttttttcttttttgagacagggtttcattttgttgcccaggctgcagtacagtgtaatgatcacaggcactgtagcctcgacctcctgggttcaagggatccacctcagcctactgagtaactgggaccacaggtgaatgccactatgcctgcctagtgttgtttttttttaatttttttttttaatagagatgagggctccctatgctgtccaagctagtctttaactcctgtattcaagcgatccacatgcctcggcctcccaaaatgctgggattacaggtgtgagccaccacaccaagtcatggtgtcatgaatcttatagataatgctcataactctaataaataataaaacatgattttgagttgatttttcaccagtggtgacaaatggctattaaccaattactttcttatctggccctaaaacacaaagaagccttgtttgtcattgctgttcccagatgtatagttaatatacattatatgataattttataaattggtatataagcaagtgtataaaaataaacatgcacattatgtagtcatgaatacatttaaatgtttacattatgcatacacctctctaaaggaaatactgaagtcaccaatttaatggaaaaaattctcatctactttagggatagacattggacaaaacttcacaagtctatatatttcattacatgtttgtgattaaacagtgatgagaatgacagagtttcacaggaatgttcaacttaattgtgtcaaacatgtaactgtctataaattctatagggactgcattattctatggggacatgaataatgtttttaatacaaaattccagttaactgactggagtagactaatcattaattctaaaacatgcttctggcaaatccctatctaccctgtattttcccccaaagcatatattagctatgagtagcatgaatataaaagttgtggttaccaaaacttctttttacttccctctttcattaactatatttgttaatacacaaggtttgatcataaatagtaaagtcaattcacaagttaagaaaaaagatctaagtgtatttcaaaacaggatccttcatgttctttgagtaatccaggcagcaaagtcaggaatgctcatgggtgctactggatattagtgctaattactaataatatgtacttacaattatgccctttcatccaagtacctcaaagagctttcatagcattaatttgttatttcctataatatctttgagaggcggctgatagaaagttattattatctctattttacagtcagagaaactagggcatagagaggttaagtaacattgctagggtcatacggtgaacaactgacaaaaaagggactcaagctaattattctcatttcctgttcagtatattatccattatatggttgttcaatacacctaaatgcttttttatcctagacaaattgagaatactgtatttaaataatctaagacgtaagtgaacgcgtttctctttttttgtgtgttcaaaaatgctgctctacagggatatagagttaaaaactaataattagtctttggtttgcagctgtagctattatttatagggcttttactatttgtggttttctgaagctctgctcaaaatgaagtattctatttctcactgctttatgctaggttagcatagctgtgagccaccaaaaagcagctgagacaggctgactaatgaatttgaggttgtctttcattgcgttcctattgctgactcttcttgaagtcatcctccttctagctctccattcagcagatatttgtgcaacccaccatcctcaatcctcagcctatggccagcttaactgttgtcaatgattaaatttaaaatatttttattggaatggagcaattcctacagaataaaaaagaaaaaaattaaaatattaaaatataaacatagataatatttcattttatgagttaatgatgctatactattaatagttaccactgttacatccagtttctgctaaacctgacctttagggtccttagaagaccattaaacattagaatattggtctatggatggacacatatcaccatattgggttttttaatgcagtatttcagtaattttcccaagtaaaggcagggagaaaggagaagtggttttgaaactgtgctcaatgacgtaagactgcagtcagcttggttatggtcatctaaacctgtggtgtttccaacttcagcccagctcctccctagagctctagacccatatagcaaccaccattagacagcaccactcttacttcactcatcaactccaaaactgaactcattttttttctgcaaaaatgtcccctcccaggactcatcctaactcttccttatcttatttagtaaaatacacccttatcctgcccctccctcaaagcaaaacaaggcatcatcattgcctcttccattctcctatctggcagctgcccctagcaaccaattaccagttgatatggcctcttgaatattttaggaatccatctcctttggatgctcactaccattcacacagggtccttaagttttctcttactggcttctgcaatggcccccttgtgggctctctgcttatccttctctgcccccccacctccacccccccaagttatctgttctctaccaacagaagaatagcttaaattgtaatctgtccactcattgcctcaccaaggcatagacgattcgtgatttggctcctgttttcttctccagcctcatcttcttcagcaacctaagtttgaacttcaagacctgtaattattactcattcttctcaacaaattatttgtccccgtgctgcatctcctttctgttcggatccggatttgccatcccacccctatttttgtagtagaaaatgcctatttatctttaaaactctaacctacgttagtaaagctatccattcttcacgctgtacatcttgataaaccatacttccaatagcaatgatttgctttcatgtatgtctgcccactagactggacattccttgaatggctcataccaggaatatagttggtactcaatttgtggggagcaaagagagataagcgaataaatgtcaagacataagaatctgtagctgctaacttaaatttacggatttagtgaaactacttctcacaagctaccaaatcacagtgccatggggccgcaagatgatctcagtgccacaccgacacctgcagagtcgcaggggggtccgacacccctcagaaagaactcgcagaccgtccgagaaagcgaattctccaggggatcagcagttagatgaggcccagggcagccacgagaccctccagccagggtaggcggctgacccgcctcctgggatttggcccgtgacaagccacgtcgccagctccgctctgaatacccccggccacgccacacgagcggcctcaaccctgagacgcccagggaacatgagctgaccctctagaagcaagatggcggcctccgctctcccctccttcccccaagaaccccctcctggtccccaaaagaaagacaaggacaccgcggcaacgacgccgagatccgggaacctccgcgaggcccgcggccactcccgagcccccgggagatgacttcacctcgcggagctcagagagccgggggtggggccgtcggaaagacagcgcggacagccctcagcttgcagggggcggaggccgggcagcctgcgccctccgagccactgttctgcggcccaggcccatgatcaccctcctctcagcccacggacaggaagtcgctccccagctgccccgccccgctccccagcgccccggaagtgatctgtggcggctgctgcagagccgccaggaggagggtggatctccccagagcaaagcgtcggagtcctcctcctccttctcctcctcctcctcctcctcctccagccgcccaggctcccccgccacccgtcagactcctccttcgaccgctcccggcgcggggccttccaggcgacaaggaccgagtaccctccggccggagccacgcagccgcggcttccggagccctcggggcggcggactggctcgcggtgcaggtgagcgatgcccgctcgggccgcccggggagggactggggccacccgggcggcggcgggggtgtgtccgggcggcggcgggccgaggccctgacgcgggttcgggctgccgagattgcacatcccacgttctgcccggggacgagctgcgagatgagcccggctggaatccggggcaccgcgttcgccgctgtggggcgagtgagcccccgagagtgagcggctgcggagaggtcccctgcgcccggcagccggtctcagttggcctcgtccgaaggtcaccccgcacctttcgtccacggcgcccaagttcccgcccgggcggtgcccgcgacctggggcaacccgctgccgccgcagtccccgcgcctcactccacccctctcccctccttccctttctttccactccttgcctgtgctagagccgctgctttttaagcatctccgccagggttttttgtttgtttgttttgtttgtttgtgtttttttttttttttgccagttaaaggaatggtttttcagacttaaagtcattagactctccgcactgaactgaatacctggccttgggcgcttgcacagctttagcccattttcaggtaatctagcttctaatatgaggaagagaatacattttgggagagaggtgtttcctctgtggttcgtttctgaaagatttccagaagtggaagatgtgattggcatgctttagcctggatatatgtgtttaagtagacgggggtgacggcacacaggggtggcagtgttgtttcaggatttagggagaattagggagttaactggcctgtgctcggaaacctgaatgtccagacttgtaagagctcatccaagtgtggctgaggtagtgtgagaagtcccgtgccacgccctacgtgtcaagctgaaaagcacctaatttacaaattgtgtggtgtggggggggaacaacctttataaaacatgtatcataagttaattcttttccagaaagtaaattgcaactttaatcatattccagaaattggataacagatttcattggtaaa

SEQ ID NO: 3461 - DNA, 6000 bp, Homo sapiens
taaattaaactggccaggcatggttgctgacgcctgtaatcccagcactttgggaggctgaggcacatggctcacgaggtcaggagttcgagaccagcctggccagcatggtgaaaccccgtctctactaaaaatacaaaaaattagccaggcatggtgccgcgtgcctgtaatcccagctactcgggaggctgaggcaggagaattgcttgaacctgggaggtggaggcggcagtgagccgaaatcgcgccactgcactccagcacgggtgaaagagcgagactccgtctcaaaaaacaaaaaacaaaaaaattaaactgttaggtgtttcttttgacctagggatgctgtgaaaaaaattactgcgataataagggtgccatgaattgagaaagtttgggcacttgactgataaaggcctacgaagaaggcctttaagagagagaaagaatgtgtgtgtgtgtgtgtgtgtgtgtgtgtgtgtgtgtagttatgaggttactgtggactgctgtcaacaaaatttacaataggctaatgaaagtactctctccagtgtagttaagagctgtaacagatattatgacagcacataagagaagcaatcagcccagtcttaaaggttttttgttttttgttttttgagggatgggatccagagagagaacctaattgtaattttttggagaattataacctaaactgagttctgaaggaccagtaggagtatactagattaggggaaggaagagaggctagaattccaggaagaggaaatggaggactgagtaaacaaacactagcattccagaagctgggtattggtagaacaaaagatcatccaagaagagagataaggctaaagggttaggtaagaaaaaaaatgaaaaatatgaaagataaaggggaaaaaagagagttaggtaaggagcacatcttgaaggttttgtatatgagattaaggataaatggagtttgaattttattaatgggcaaaaaagagccacaagaggattttaagcagagaaatatcaccattgttctaagcaagaatgggaaaagtatcagatgggttccaaccataggctagaaggctgctgtagtaatccagaatatctagacagggcagctgaactcagtgtttggtcacgcagtgtggcaacctccacttttaatggagtactatgttagcttctcaactacataagaaaacagatcctgtggcttagatgaccataatcataacttttggaaactgggggatctttgcccaccttcccaataaatctgggagtatacgccattttataatctaactatgtcttattgtccaaaataacattaccaaaccctgacatttagtttcaaaagtaaattcagcaataaaattggatcccagactttaaggagactatgtatgtcagtgttacatctattgcatctaatataggaccctagctgtgaaggcctttaagaatagtataattttatggaagcatgccttttttggcttgtaaagactaccctcttgactttcagaaactaagtcatcaccttcacgtataattaaatcaaagatgcaaattctcacctaaaatttactcatacatattttagaaacccatagaactttaatttctttttttctatacggcaacccaaatccttatgaatgcgataaggtaataagaaagatgtcttaaagaaaaaacagaataactgttacttatgggggccagacaatcagctgttttttacttaagggtacatcttttaaaaaaaaaaaagagagagagagagagatggacacattcttcaaattaagcctatttaaaagtgcattttaaaaagtgcacaggcttaggagggaagagaattctaccagcactgaatagcagctaaacccttacaagacttctgccacttttaagcctccatcttaaacccagagaaaatgattaatggtctcaaacggttaaaaacagaccaagcacatctctgcttcttttaccattctttctactgtcccccatagcttctcccccatttccattagtgaaagaacgaactaaaaaaaatgtgatttcaaggaaaggtcactacaaatagatttatggtattcctctcaaatagggacgattctgttactttaaaaagcactaatcaaacaccagaattgagtccaaatactttaccgggacacccacgggaaaaatgcccaaccatttttccatcatggcacacatggacggtgataacactgtatttgtaggcacgctgaagataaaagagaagaatggctgctgcttgaggccacctggccaggactgctggcaaccccaggccacacttgatgtccaagagagaggaatcagtatcttcaccttcctgaagctccagttccagctcagtcagaactgccttttccacagccatttaggattaactgcaataatactcagtgctctcagcaattgttactttcaaatctaggctctactaaacacaagctaggtgcctagcctctggcaaataacttcaatttaccttaataaagtatgggaaaactacctgtcttgcagaagtgttgtggagattagaaataatttaagtaaagctcttatcacagtgctcggcaggcaatcaacacatgagaactcttattaccaagagggttgctgaattaaagaaggaaaatctaacctctgtatagtggtaatgtcactgaggtaagaaattgctggcttccctctccttagtgtctaagagttaaaatattttataaaacaatgaaaatcataaactgtctccttcaaaatcatagtctttttcctcattaacattcacagcctcttattccagtattttaaaagtaattgtccttgccactcatctactaaagaatacaaatgcatattacactgatatgcatatctacaagaattgacactggtacatgtatttatgttctgtagaagctaagcttggaaaaacagtgcaggaccaccaccacatacttggagaggagagaaaacgtcagcactttcttcttatttgaacctccctaatgtgaaaataatccaaccatctacagacaaaaatattccctcacaaatggtagacaagattcttttctataattagccctttcttcctttggaaagccctgtgaagaaagtgttgtaatgaagtactgcttcaaaataaatgatccatattattgcacactcagcaaacacactagagaacagcatctggatcttggaaaataaatgtaaaagaggctattggtaaatcatgccaaggtcacatcaggatttcagaggattgcgtgtattcatgggaagaatgaaccactataagcattctgggaagcaccacgttatccaaacaatggtaactcctaatttcctctttttcattaagatagggtacagttatcaaccccaaacataaacttgatgtgtatcaccaggcagtctcttcctactaactctgaatatgctcaagtagtaagcatttaacactagaatacaagttataatgcccagcacaattttaatataattttaacctttcagaggaggatagttttggaaggcaaagaactctgactgctgaagaatgaaacacgaagtaaagtctgtaagtggcaagaacctaaaacaaaacaaacagcctagcccaacaaaaataagcaactcctggatggtgactgtgagataacctatacactcattcattcagtgcagaaatgtgtgaacagcttctatgttcaaggcatactgcatagaaacagtcataagtaggacatggctcctgccctaaagaaatccaaggtcaaaaaacggtgttgtcagataatacttcacaataatagtgtattattttaatacaggagtcggtttagaataatattgtattaccagagacagaaaaacatgagctaataagacacactgaaatacattaataaacatactgtaagagtttaccaatgaaatctgttatccaatttctggaatatgattaaagttgcaatttactttctggaaaagaattaacttatgatacatgttttataaaggttgttccccccccacaccacacaatttgtaaattaggtgcttttcagcttgacacgtagggcgtggcacgggacttctcacactacctcagccacacttggatgagctcttacaagtctggacattcaggtttccgagcacaggccagttaactccctaattctccctaaatcctgaaacaacactgccacccctgtgtgccgtcacccccgtctacttaaacacatatatccaggctaaagcatgccaatcacatcttccacttctggaaatctttcagaaacgaaccacagaggaaacacctctctcccaaaatgtattctcttcctcatattagaagctagattacctgaaaatgggctaaagctgtgcaagcgcccaaggccaggtattcagttcagtgcggagagtctaatgactttaagtctgaaaaaccattcctttaactggcaaaaaaaaaaaaaaacacaaacaaacaaaacaaacaaacaaaaaaccctggcggagatgcttaaaaagcagcggctctagcacaggcaaggagtggaaagaaagggaaggaggggagaggggtggagtgaggcgcggggactgcggcggcagcgggttgccccaggtcgcgggcaccgcccgggcgggaacttgggcgccgtggacgaaaggtgcggggtgaccttcggacgaggccaactgagaccggctgccgggcgcaggggacctctccgcagccgctcactctcgggggctcactcgccccacagcggcgaacgcggtgccccggattccagccgggctcatctcgcagctcgtccccgggcagaacgtgggatgtgcaatctcggcagcccgaacccgcgtcagggcctcggcccgccgccgcccggacacacccccgccgccgcccgggtggccccagtccctccccgggcggcccgagcgggcatcgctcacctgcaccgcgagccagtccgccgccccgagggctccggaagccgcggctgcgtggctccggccggagggtactcggtccttgtcgcctggaaggccccgcgccgggagcggtcgaaggaggagtctgacgggtggcgggggagcctgggcggctggaggaggaggaggaggaggaggagaaggaggaggaggactccgacgctttgctctggggagatccaccctcctcctggcggctctgcagcagccgccacagatcacttccggggcgctggggagcggggcggggcagctggggagcgacttcctgtccgtgggctgagaggagggtgatcatgggcctgggccgcagaacagtggctcggagggcgcaggctgcccggcctccgccccctgcaagctgagggctgtccgcgctgtctttccgacggccccacccccggctctctgagctccgcgaggtgaagtcatctcccgggggctcgggagtggccgcgggcctcgcggaggttcccggatctcggcgtcgttgccgcggtgtccttgtctttcttttggggaccaggagggggttcttgggggaaggaggggagagcggaggccgccatcttgcttctagagggtcagctcatgttccctgggcgtctcagggttgaggccgctcgtgtggcgtggccgggggtattcagagcggagctggcgacgtggcttgtcacgggccaaatcccaggaggcgggtcagccgcctaccctggctggagggtctcgtggctgccctgggcctcatctaactgctgatcccctggagaattcgctttctcggacggtctgcgagttctttctgaggggtgtcggacccccctgcgactctgcaggtgtcggtgtggcactgagatcatcttgcggccccatggcactgtgatttggtagcttgtgagaagtagtttcactaaatccgta

SEQ ID NO: 3462 - DNA, 6000 bp, Homo sapiens
acaaaaactagccaggtgtggtggcgaatgtctgtagtcacagttacttgggaggctgagacaggaggattgcttgagcctgggaggtggaggctgcagtgagccgagatcataaccactaccctccagcctgggtaatgggagtgagaccctatctcaaaaacaaaacaaaacaatggttggaatagctagtgtatctcccatttcttatgtcatccactactagaagcctgatcacaaattttcaggaatagcaagtgttatttccttttattaaattgtgaagtgtcatgctttgtcacagaacaaatgctagctctccataagatcattggctcatgcgttatcctcatctggagtccaaatagaccattaggtggaagtttcaaagatgcagattttaaatctagtcatgaaaaagtgtcatagccaccagagctggggcatggcatgtctcaggaagccatgcttgtcacagaggaatcactccgaggctaaaggaacatctgggcaatcctacttgtgtactcattggattcattcagtgaccttgttattatccttctagctaaatgctctgggtcttaattcacgactccaaggttgctcttgattttaaggaacattttggcagaatagagagaagttgagcaaatattaacagatgtccaaaggggcagtgtgatttattatgtcaagagaatcagttttatgtcgagggaagaattttggtagaaatacactgtattttttggaaaatatcatatttgggttttttcattgtataagtaatacatggatacatgcttatataaagaaaaattcataatatagaaacataaggaggaaaaatgagtcatttttctcccatagttcactcctttcccctccctttcagtaaccagtgctaacacgggtgtgtctttccagacgttaaaagcagtcatacatatctctaagggaaagtttgcatttgcttgttttttcttcctgtattaataggatttgtgtatatatatacacacacgtaatatattttgtatctgtatatatagagcatatttctgtggtgcgctttttaaattttatgacaaatcctacagctcttccatgtcactgcatatagatgtatccacattctttttaaaaccacaaagtattccatggttagacttttccataattcagccattttcctattaatgacatttatttgttacagcagtgttcacaatagccaagatacagaaccaacccaagtgccaacaacagatgaatggataaagaaaatgtgatagatatacactatagagtactattcaatcattgaaaaggatgaaatcctgtcattcatggcaatatggatagaactggagacaattaagtgaaataagccaggaacaggcagttaaacactgcatgttctcattcatatgtaaaagcttagaaaaagttgatctcatagaagtaaaaaatagaacagagaatactagaggctggaatgggagggataggtagagatttgttaaattatacagaattacagctagatatgaggaatgagctctggtgtactatactattgtagatgactatacttaacaataatgtatagtttcaaatacctgaaaggaggatattgaatgttcccaacacaaataataaatgattgagatgatggatgtgctaattaccctggtcttagtcactgtacgttatatgtttcaaaacatcactgtgtactctgtgaatatgtgtcaattaaacagacaaaattcaattgaaaataaaatcagaaattaaaccttcatctagtttccttttcatagtgatttatctgcattagaaagcaatactgggagtattccaataattacatttagtcagaatcgagacctcctgtcctagctagttagccagagacttgaaacagaggtcttctgaaattcctagtctctggggaaatagaatcacaaccactaggggcaaaaacccatggcttttatgtcatcattgtgttccgttctgttgcatactttgtgtgtgggtgtgtgttttatacttttttccctttaaccgtttatgctccttcatgttggtcctatgtccgtttgactcagcccattcatctttgatagtttcgttgctttctgacttaaattttatgcttcttgctgcagatcaggaatcagccattcatctaaggaactcaggttctgtttaggaggaatgatatttagcagccacagcatagttacataatttgcttgttgctattgtgttgtcatttttcagtgaatagttctaggaaataggtattattaaaagaaaaaaatgtgatcatgttgttatttccaattcaaatttaacattacaaatgtttacatctttgattttgtacttgtatcttttctcttacactgaagatcttggttcctaaattacattaacataattcctcccttgcattaataaaatagttccaaaagagcaacattgctgtcacaaacaaactacaaaatgaagtttggctgggtgttgtggctcacatctgtaattccagcacatttagaggctgagacaggtagatcacctgaggtcaggagttcgagaccagcctggccaacatggcaaaaccccgtctctactaaaaatacaaaaattagccagacatggtggtgcctgtctgtaatcccagctacttggaaggctgaggcaggagaatctcttgaacccgggaggcagaggttgcagtgagctgagatcacgccatcccactccagcctgggcaacagagactctctcaaaaaaaaaaaaaaaaaaagaagtttaagatttgtctttgttttgttttgttggaattttgtttctatttttatccttagcatctattctaaaatagatactttctatgctgtcttatagacctttgaaataattcctctagtcagtcttacttgtttgtgtcttgtttgtttgttttttgaaatggagtctcactctgttgcccaggctggagttcagtggcacgatctcagctcaccgcaacctccgcctcctgaattcaagtgatctgcctcagcctctcgagtagctgggattacaggcatacgccaccacacctggctaatttttgtatttttagtagagatgggatttctctatgttggccaggctggtcttgaactcctgacctcaggtgatccgcccacctcagcctcccaaagtactgggactacaggcatgaaccaccacgcctggccagtcttaatttattttaatttgattttcaatttttaggatttgctattttgttttattttttatttttatttttttgagactgagtcttgctctgtcgcccaggctggagtgcagtggcacaatctcggctcagtgcaacctccacctcctgggttcaagcaattcttgtgcctcagccttcccagtagctgggattacaagtgcccgccaccacacccagctaatttttgtattttttgtagagacgaggtttcaccatgttggccagggtagtctagaactcctgacctcaggtgatctgcccgcctcggcctcccagagtgctgagattacaggtgtgagtcaccatgcctggcctaattttatttttgaatacgtaaaacacctatgtctctaaagtagaaattctataacaagatacactcagagatgcctcactcttccttgtaccctcctcccttcttcaaaatgaaattgattattagggtttggtttattatttcattgttctttgtgcaagggcgaacaaatccatgtatactcctgccctacacacacacacaggtagcgctccatctgctattctgtgccttgcttttttcagacgcgttaggaaaggccacatcagtcatgacatacacaggcttctttactcacagcactcattgtcgctttcatatttcttgctttagtctgagttttttaattctataagtaaaaacattttttaaatccagaattcaaaagtgatcataaaagttattcctccttttatcatatactctcagccgtttatgtggagtaggagtgtgagtgtgtagccttccagacccttctgtgttacagaacagaggaatttcttattgaaatttaactttgaattgttatactcgtaattttcttagttactatgctaatatctcattatttaccggttcctagacatcagacaaaaactgataaattctcaaatacagagtaacagacaaagttgtttcatagtgtctggtatcaagatgataaagcatacacccatcttcctcagcttcatttctaaaaatggaactgaggaaaccaagttatgaaatataatcaaattattaaatataaatttaagcatatattattaaatataaattaataaaatacatttattgattataaactacttaaatataatccattgagttctatctttgggtctgtcatcaccttatagaactttttagacttttgtctcgaaaactggaacagaaagatcaggttttattacatatgaacatttttaccataaagtgtaattcagaaaacttcctagtttcctccttttttcaagatactaggaaaatcaggctttagttttatgctttccgctctgtactcccaaacaagagctcttaaatatttatacttctgttacccccaaagtttactgctgtgatttggagaagtaccaagttcatgtatctgtttgctttatttatcctattttttttctttctaggtattttttgatttaatgagagaaattcgagcgagaaagatggaagacagcaaagaaaagaatggaaaaaagaagaggaaaagtttagccaagagaatcagagaaagatgctgcattttataatcaaagcccaaactcctttcttatcttgaccatactaataaatataatttataagcattgccattgaaggcttaattgactgaaattactttaacattttggaaattgttgtatatcactaaaagcatgaattggaactgcaatgaaagtcaaatttactttaaaaagaaattaatatggcttcaccaagaagcaaagttcaacttatttcataattgcctacatttatcatggtcctgaatgtagcgtgtaagcttgtgtttcttgggcagtctttcttgaaattgaagaggtgaaatgggggtggggagtgggaggaaaggtgacttcctctggtgtttattataaagcttaaattttatatcattttaaaatgtcttggtcttctactgccttgaaaaatgacaattgtgaacatgatagttaaactaccactttttttaaccattattatgcaaaatttagaagaaaagttattggcatggttgttgcatatagttaaactgagagtaattcatctgtgaatctgctttaattacctggtgagtaacttagaaaagtggtgtaaacttgtacatggaattttttgaatatgccttaatttagaaactgaaaaatatctggttatatcattctgggtgtgttcttactgacaccaggggtccgctgccccatgtgtcctggtgagaaaatatatgcctggcacagcttttgtatagaaaattcttgagaagtaactgtccgctagaagtctgtccaaatttaaaatgtgtgccatattctggttcttgaaaataagattccagagctctttgatcgcttttaataaactgcaagttcattttaaatgaagggccagcatatatacttgcaagataattttcagctgcaaggattcagcaccagttatgtttgaatgaaccctccttttctctgagattctggtccctggaaatccctttctgctagtggtgagcatgtaagtgttaagtttttaatctgggagcagggcataggaagaaaatgtcagtagtgctaatgcattttgcactagaacgcttcgggaaaatattcatgcttgccatctgttcatttctaaatttatattc

SEQ ID NO: 3463 - DNA, 6000 bp, Homo sapiens
tgggcccaagcaatcttcccatctcggcctcccacagtgttgggattataggcatgagccaccactcctggccttgtctctggtatctttattttctttcagaaaaatagcatgaacataaaaagtatcttggtttaacccatatgctactttgatttaaatgagcagatttttaaaaaatgttttatctctatggacaattgtaaacactcccaaagaaaaagaaaggactcagctagtttctatggcaacttaatgtcagaaacctaattcaaaactcttaagacttattttcagaaactttttttttttttgagacaaggcctcactgtgtcacccaggctggagtgcagtggtgcaattgtaacttgcagcagccggtacttcccagcctcaatcaatcttcccacctcagcctcctgagcagctggcaccgcaggcatgcgccaccatgcctagctgatttattttttttctgagacagagtctcgctctgttacccaggctggagagcagtggccatgatctcagctcactgcaacctctgcctcccgggttctaagtgatcctcctgcctcagcctccggagtagctgggattacaggcatgcaccactacgccgggctaattttgtatttttagtagagacagggtttcaccatgttggccaggctggtctcgaactcctgacctcaggtaatccacctgcctcggcctcccaaagtgctgggattacaggcgtgagccatcgcacctggccggggctgatttatgattattatttttttgtagagacaggaccttgtcatgttgtccaggctagtcttgaactcctgggctcaggaaatcctcccaccttggcttcccaaagtgctgagattacaggcatgagccaccacacccaatctttagaaacttctttaaggggctgggcaaggtgatgctggttgggaatcgtattttcaacttctttttgctatttttatttattcattcatcaaataactgctgagcgcctaaatataggtcagtcctgggctaggcactggggaataaaatgtggacaagagatagggtgccggctggaggtttggtcatttaagagaggctgcaggtatccctgagagaaactcttcactgacgacactagggggtataccatcctggtaggagaatatatttggggcaaagtgaagatgcccactgttttacccaggaaagagtctgaggtcttgctctaggtatcctgaattgtctacttatttatttattttttttttgaggtagagttttgctcttgttgcccaggctggagtgcaatggcatgatctcggcttgccacaacctccacctccccagttcaagtgattctcctgcctcagcctctcgagtagccaagattacaggcatgtgccaccatgcccagctaattttatatttttagtagagacggggtttctccatgttggtcaggttggtctcgaactcccgacctcaggtgatctgcctgtctcagcctcccaaagtgctgggattacaggcatcagccactgcacccggcctgaactgtctacttctaagccactgtatgtttctcattgcaacatgggatctatttttgcactttttaaaaacttcaggctgggcacagtggcttacgcctgtaatctcagcactttgggaagccgagcagggtggatcgcttgagtccaggagtttgagaccagcctgggcaacatcgtgaggcccccgtttctaccaaaaaaaatacaaaaaattagccaggtgtggtggtgtgcgcctgtagtcccagcctcctgggaggctgagctgggaggattgcctgaacccaggaggtcaaggctgcagtgagccgagatcacactactgcactccagcccgaagagcaaaactctgtctcaaaaacaaataaaaataaaaatgaaaaacaaacaaacaaaaaacatgactccagcttttaaaaaggagatcctaggccaggtgcggcggctcgcacctgtaatcccagcactttgggaggccaaggcaggtggatcacttgaggtcaggagtttgagaccagcctggccaacatggtgaaacccccatctctactaaaaatacaaaaattagccgggtgtggtagcatgtgcctgtaatcctagctactcgggaggctaaggcaggagaatttcttgaacccgggaggcggaggttgtagtgagctgagatcatgcctctgcactccagcctgggtgacagagcaagactccgtctcaaaaaaaaaaaaaaaaaaaaaaggagatcctgacacatgccacaacacagatgaaccttgaggacattatactcagtgaaataagccagtctgaaaaatacaaatactatatgattccacttatatgatgtccctagataaagcagtcaaactcttttttttttttgaggtggagtctcgttctgtcacccaggttatagtgtagtggcgcaatctcagctcactgcaacctctgcctcccagattcaagtgattctcctgccacagcctcccaagtagctgggattacaggctaccatgcccagctaatttttgcatttttagtagagatggggtttcaccatgttggtcaggctggtctcgaactcctgaccttgtgatttgcctgcctcggcctcccaaagtgctgggattacaggcatgagccactgtgcccggccagtagtcaaactcttagaagcagaaagtacaatgatgcttaccaggagctgggaggtgggggaacaggggagttgtggcagctcaatggatacagagtttctgtttttccagctgaataaattacagagatctctcattcaataatgcaccaagagttaacaatattgtactatacatacacttaaaaatggttgagattatatattttatggaatgtggtttttacccaataattaaaaagaagagtctagcacagtgctggccatataaagcctcaataaatgtttgctgaaaattaaaaaaaaaaaaaaggccaggagtggtggttcacacatgtaatcccagcactttgggaggctgaggtgggagaattactcgagcccaggagttcaagaccagcctaggcaacatggcaaaaccctgtctctccaaaaaatatgtatattaaaaaaattagccaggcatggtggtgtgtgcctgtagtaccagctactcgggagactgaggtgggaggatcgcttgagcctggaggtcaaggctgcaatgagctgagattgtaccactgcactccagtcggggcaacagagcaagaccctgtcacaacagaaacaaaatcttgaggtgtctagtcctggcctcagcctcagagtatttgtttctgaacttgttagttttgggggttggggatgctggtttgatttcctcctttttgccttttgagtgtgtgcaatttatggtatagctgggaaacgtaaaagtcaagagttttgtaggaaaatcacgtcacttagccctgtctcctgtgccggacgagtcctgtgtgtgcacttggtgacaatggctttgagtcttcaactccagattgaggtcagccttacacatccatagttcccaaagctgaaaacaggcctgcctccaacggtacctgctaacatctggggagcttttcagcttacagagcaccctgtatgtgtttgtcttagttcaggccaccatctccagcttaccaggctctagaaccttctccacactttgccaacagggttcgtttgcagaattgaaaccttagttaaggtttgttgaggttgttgttgttgttgttgtttttacaattggctattcccacccacattcccttgagacataaatagaaaaaaaaaagaggtttcctgagtaggacaagacatttgagctgcatccacttgatccttgaaaaggaaatctaagaggttgtaactatcactttttctagcctatataaggtaggtcagtaaggtagcaaaagcacatctgttgttttgctccttcaactctttttcctgattcttcctgggggaaaacctaaaacggtgagtaactggtggacccatcagaccccagactcttcttcactgcatgcattcatattaggctcaggtgcttagactcctgttttcccatggctctgacatctggaaggattttaatctctgggagatgggcttttcatccatctgcttcccacctttcaggacaggtagcatgtcttcttccacagaatgtctgcaagcagcccaaactgtatcctttcccacgtggaatttgcaacagtgcatctctcggactgctgtaggaaaatgccagtgcatttgtaacatggtttacggctgcctatgcaaatgactgattatgtcagtataatttttataagaaaacaattgaatccttctttgggtcatgtttttttttttcatttttggcatatattcaaaagaaggctctgagacaaaaagggctggggtctttttggtatctggttttaatttggatattctgtcccgtcacttaatacaaaaccatgcttatcacattttaaaaattctagacaggcctggcttggtggcttatgcctgtaatcccagcagtttgtgaggccaaggcaggcagatcacatgaggtcaggagctcgagaccaggctggcaaacatggcaaaaccccatctctactaaaaacacaaaaatcagccaggcctggtagtgcgcacctgtaatcccagctactcggaaggctgaggcaggagaatcacttgagcccaggaggtggaggttgcagtgagccaagattgtgccactgcactccagcctgggtgacagagtgagactccatctcaaaaaaaaaaaaaaaaaaaatctagacacacatacagtttcagtgggcctgggaagatgtgtttcccctggatgtgcacgttcctgtttgtggcttatcgcctctcgtttattctgtgtgagtaggtagaaaatgagcatcacggacgtgctcagtgctgatgacattgcagcagcgctccaggaatgccaaggtagaggggacgtggggcgggggtgggatttcctcacagctttgcccctccagcgaggcaacacaaaatcaaaatgtaggccaggcggccagacgcagtggctcacgcctgtaatcctagcactttgggaggctgaggtgggtggatcacgaggtcaggagtttgagaccagcctggccaagatggtgaaaccccatctctaataaaaatacaaaaaaattagccaggcgtggtggtgggcacctgtaatcccagctactcgggaggctgaggctgagaattgcttgaacccggccttttttgtagactctgtctacaaaaaaaaaaaaaatgtagaccaggcatggtggctcacatccgtaatcccaacacttttcggaggccaaggtgagaggactgtttgagcccaggagtttgagaccagcctgggcaacataacaagactccatctctacaacataacaataaaaataaaaactagcggggcatggtggcatgtgcctgtggtcccagctactctggaaactaaggtaggaggatcactcaagcccaggaggttgaggctgtggtgagctatgatcgctacactgcactccagcctggacgacagagtgagactctgtctctaaataaataaataaataaataaataaataagtaaataagagcttggctggaaaattcatggaatcagagaagaaaactactatttattagataactaaaattatagagatctgggatctgagcacacgattacacttctgtaagacaaaagaaacctactaaacatgaaagcaagaaatcactgaagggccaggtgtggtgctcacacctgtaatcccagcactttgggaggccaaggccggtgcatcacttgaggtcaggagttcaagaccaacctggccagcctgacaaaaccctgtctctattaaaaat

SEQ ID NO: 3464 - DNA, 6000 bp, Homo sapiens
tattccagcttgggcaacaagagcgaaactccatctcaaaaaaaaaaaaaaaaaaaaaaacgcatcacaaaaatattctaaaggcctatgagtgctataagtgatcacagctatcagatatcaaccatctgtcatgtgccgggaattagactaaataacttgcatgcctcatcacattcaatcctcgtaacaaccctataggattagttttaggatcctcagtttagtttattttgttttattttatttttgtgagagtctcactctattgcccaggctggagtgcagtgacacgatcttggctcactacaacctctgcctcctggattcaagcaattctaggatccccattttagtgagagaaaaactgaggcttggctaattttataatttttttttttttttgagaggaagttttgctcttgtcgcccaggctggagagtgcagtggtgcaaccttggctcactgtaacagttgcctcctgggttcaagagattctcctgcctcagcctcccgagtagctgggattacagatgtgcaccaccacgcccggctaatttttgtatttttagtagagacggggtttcaccatgttggcgaggctggtcttgaactcctgaccttgtgatctgcccgccagcctcagcctcccaaagtgctaggattataggcgtgagccactgtgccaggtctaaacctcttttctttataaattacccagtctcaggtatgtggttgtttttgtttgtttgtttgtttgtttgttttgttttgttttgttttgagacagggtctcgctcttgttgcccaggctggagtgcaatggtacaatctcggctcactgcaacctccacctcctgggttcaagcgattgtcctgcctcagcctcccaagtagctgggatcacaggcatctgccaccacacctggctaacttttgtatttttagtagagacggggtttcaccatgtttgccaggctggtcttgaactgctggcctcgagcgatctgcccgccttggcctcccaaagttctagaattacaggtgtgagccaccacacctggcctcactcacctactttcaaattgtcttactccaaaatcggtactctttccatggcacaacaccacctcccaaaatcccttctacaggacacggccaaatgcaggctataggctcctggtccagccatatccctgtttcactgctttgccaaaagctttatcttcagttggctgggaaatattttttatattgaaagtatagctcaggctttctaatgagaattgatgaaaagttgatcattttttgtcctaaattgattttgtccatcattgattttgtcctaaaccaaacttgctggacatcatctctggctacagctttattcctttttttaaattaaaaaaaaaaaaagatgacagcattcataggggacaaaatatttccaggttacaaaccatctggtaaaattcctgtcttcaagagttgaacggaaaaggttcaaatcctcccgctgcaggagaaggtaattgaagggcatttgattcccttgagtcacgggaaacccacaatttattctttagtaataaaaactgcatgtgtaatcattgagaccgtggagggtcaactcaaagactttatggctgggggttatattaaatcttttcaaaaatttatagaagggatttgaaatatgtcaaacttatttctttaggttttttgcaagagaaagattttattgcattgaatcacagaaggaggagaaaaatgaccgagttcacccagttctcacccccgctaatgatctattgctcactttacaatcaaagcctgggtattaagctgtctgaagtcaacctcttctaattaaaatgaaagtcataaagcaaaagtatttcaataatttacaataatcatcccaaatgtatacagcacatatattgaagaaatgtaacgcatttcatattttttatttctctcacctgggccaaaaactaaaggttcttggcaagattaagggaacattcattaacttaaatatttatagagtaaatgaatatgtatgtgtttctatgtgtgtgttatgaaggggaagatgaaactgacacttcttttatctttttttttttttcttgagatggaggcttgctctgttgcccacgctggagtgcagtggcacgatcacagctcactgcaacctctgcctcccaggttcaagcgattctcctgcctcagcctcctgagtagctgggactacaggtgtgcaccaccacacccggctaatttttgtatttttagtagagacgggatttcaccatattggccaggctggtctcgaacgcctgacctcaggtgatccacccacctcagcctcccaaagtgctgggattacaggcatgagccaccgcacctggctttatcttactttttttgagtcagggtctcgttctgttgctgaggctacagtgcaatggcacgatcatggctcactgcagcctcaagcttctgggctcaagcgatcctctcacctcagcctccccagtagctgggactacaggcattccaccatacctggctgagtgtgtttgtgtgtctgtgtgtgtgtgtgtgtgtgtgtagagacagggtctttcttattgcccaggctggtctcaaatgcctggtgtcaagtgatcctcccacctcagtctcccaaagtgctgagattacatgcatgagccactgcactggcccagaaccaacactattcagcatctgtggtgtatcaggcttagagttgtgatcagtggacccaaacaccgatgagacccttcagtgagggcgtgtgttgttaagatttgtagcacacaaactacctcccagtgcaatgaagtaaacgctgaggtgaggaagcctggactctggacctggcaagaggcacaaccattactgtacatagaggggaaatggcatctttacacatagaaaggagaaccgggctgggcgcggcggctcacactgtgatcccagcactttaggaggccaaggcgggcggataccatgaggtcaggagtttgacaccagcctggccaacatggtgaagccctgttgctactaaaaatacaaaaattagccaggcatggtggtatgcgcctgtaatcccagctactcgggaggctgaggcaggataatcacttgaaccgaggaggcagaggttgcagtgagccgagatctcgccactgcactccagcatgggcgacagagcaagtctccatctcaaaaaaaaaaaaaaacagaaaaaaagaaaagaaaggagaactggagctgctgaaagcccatggttcccgcctcctccctgacatcaatttaggatactcatcacttcgccttactgtaatagctccatttgcaaatgaaaattaaactgtacatgggggtgggatcagtggctcaggcctgtaattccggcactttcagaggctgaggcgggcagatcagaaaggacttgaggtcaggggttcaagaccaacccagccaacatgacaaaaccccgtctctactaaaaacacaaaaattagctgcatgtgatggcatgtgcctgtaatcccagctactcaggaggctgaggcaggagaatcacttgaacccgggaggtggagtttgcagtgagccgagatcacaccactgcactccagcctgggcgacagagctagactccatctcaaaaaataaaataaataaaataaaataaaaataaaaataataataaaaaaaaacctgtgcatgggaatgtgcatgggaaaacacttgacaagcggcactctgcagggtggtctccccatctggcctagaatctaccaggacgaagggactgtgcagaacctcaagtgatccacctgcctcggcctcccaaagtgctgggattacaggcctgggccaccgcggccagccaagtagttcttttcaatacaaagactatgtaactatgttaccgaaggttaaagatttgatacggggttgactagaaatttttgtcatttcagcccttttatgggctagcatattttgtaccggcactctcggcacatagacatttaatatcatggcttatccaaaattctgacttgactctgtattttcagactgacctaactgattgaatttagcagcaatgtttctagacacctgcactgactaaacgattccagtcatcatctctttggtttctcctaggtcagacgaatgatagtgagtggtgaatccttttacagaaaccagactttcacctgattttttctgagctgtgccacggcagtgataaatcggctcccaggtggacggccacagtgatatcatgccacagtgataaaggagtcaaggcctggttccaaggccagcttggcacttgtatggcctgtctgagctctcgggattattgggagaaacaaaggtttggaaacggccattccgccccctcctggagtcttgctttccgcgtctctaccgagactggtggaacgggcctgcagtcccagaattttgggaggtggagatgggaggatcatttcagcccaggagttcgaaaacagcctgggcaacatagcaaaacccagtcttacaaataaaaaaattttaaaaattagtcggacgtgatggcacatgcctgtagtgccagctactcgggaggctgaggcagaaagatcgtttgagcccaaaagttggaggttgcagtgacccgagatcgcgccactgcgctccagcctgggcgacagagtgagaccctgtctctaaaagaaatacaggccaaccctgcagaaccgcgtctgcagcccgggctttgtggcttctctccgaccccctcccagtcgcagacgcgcccgctttccgccccgcgcgccggaagtggccgagtcccgtcggccctgcgggcctctctccgtcgccatggaaacgaaagcggccaagtagagctccgtcctgacgcgccgcctcccgtgggctccggccggctaagccgcggcggacaactatgctgaaagccaagatcctcttcgtggggccttgcgaggtaagtcctggcccggcgcggcagagggagcggggagcaggcctcggggcctgggcgagcgcaggtccccacccgtctgatctgcggcttgctcccggaggcgggaacccgggcccaccgcgcccatcccgactggcgcccctgccctttccgtgaactcggtgctttcagaccttgattccaaccactgcccggaggaggtagtggaggcgagcccggtgttaatgagccccgaaggcccaaggtactgagtggcatcattggaaccatagcctaggtttcgtgactctttcttttgcccccgggatccccctaatgaatgcgtctgtgggtctggacttttgtttgagacaggttgtcgctgtgtcgtccaggctggagtgcagtggtgtgatcatagctcactgcagcctcgacttccctgggctcaagcagtcctcctgcctcagcctcctgagtacctgggactacaggcgtgcaccaccacgcccgactaaatttgttgtttttgttttgttttgtttttttgagacagagtctcgccctgtcacccaggctggagtgcagtggcatgatcttggctcagtgcaaactccgcctcccgggttcaagcgattctcctgcctcagcctcctgagtagctgagattacaggcccacgccattacccctggctaatttttgtattttttgtagaggtgtgttttcaccttgttggccaggctggtctctgctgacctcaagtgatccgccagcctcggcctcccacagtgctgggattatagggatgagccaccgcgcctggccttaatttgttaattatttgtagagacaggatcttgctatgttgcctagcacctaggctggtctccaactcttgggctcaaacagtcctcccgcctcagtctctcaaagttctgggattacaggcatgagcctttgctcgagtcc

SEQ ID NO: 3465 - DNA, 6000 bp, Homo sapiens
ttaaaataattataacagaggccgggcacagtggctcacacctgtaatcccagcactttgggaggttgaggtgggtggatcacttcagatcaggagttcaagaccaccctggccaacatggtgaaaccccgtctctaataaaaatacaaaaactagcatggtggcgggagcccgtaatcctagctactcaggaggctgaggcaggagaatcacctgaacctgggaggcagaggttgcagtgagctgagatcacaccttcgcactccagtctgggccacaaagcaagactccatctcaattaaaataaataaataaataattataatggaagtgcagtcattctggaaagacacagacttaagacagctgtgtgactttggataggttacatgatctctctgagcctcatttccctcaatgtaaaccgagaagggtgatacctattctggagttcttttaatgaggatgtaagcagagctccagactcatgatgaatacatggtacacatttaataagtgacagctaaatacattatacctttgcctgattttaggagagaggtcataagctggatgtgaaaatgaaccaaatcactaacaaaattgcagcaccctgttggagacggtaattttttcttaatttttctgcctacaatttcctaggtcttctaattaacattgtgatactttagcttgtagcctagcagtcttgttcttgtcctcaatattaagtatgctcagtcatatttttagataacttaacattgcatatttatttttagacagcccagccacacataaatgaccaatacaaatcaacataaaagcagttcatatccaaagtgcccagttttaaccctctgtagctggcagttccatttttaacgcgaagtttcctaaaatgtataatctataaaactaattttatagaaaattgacactgaagatattaagaaaaatcaaagcattttgtggtcaattaaattggggagatggtagggtaagcaaagttaagaagggtttttttggtttttggttcggttttgctgttttgttttatcacatgaattttcaaaaccttcaacattcgaacatacatgacatagctctaaaaaggtaataggagtcctacatttccaaattttatctgtgctcagaaatgacattaggtgacattacctgaattcttctattgtctttttgtagagacatttgccataggcacaataataggggtgatggggcaggaggaagggaaaaacagagtgaaagaaggagttccagagtaactactctttaaggcagggatcacagatcctaatgcctacaggagaaagtgaaatcaagatcagaggtgggccagacacaacccaagagaagatggtaggtcaatggcaaacagcagatcatatggtctttctacctcaattcacacttttaaaaacattctgtgcacctgtatatgtctgtgggccctattcaccatacattgcaagcatgaagcccctattcttaggagactgctttcatttttatttcaaaaacagcaccaacttcaagagtgccttcaaagacccaaattttaatgtgttaaagggagggaaaaaaagatagagcatattagagcaggaggtggctgttcctctgtctctttgtcacagctatcactagacccatctcaaagttaagagatgggatcctgtttgtagttcaacattatgttatccacaggtggatggataagacctgcttatgcctttggatcatttatattttaccagacactgttccatgtgctctacttgtagctcctcattttatcctcacaataaccctatcatgatccccatttcacagatgagacacgagagagtttaatccactggcctgtagctacacagctagcaagagacatagctgggattgaaatccaggttgtttggttctaaaactcttaactattatgctcaactcagtcttggagatgttgttcccaatttgaggggtctatcagttttaattgctttcagctgcaggtgacagaagtcccagctaccagtgtctagaacaagttttgtttttgttttttttccacaaaacaagaaatctggaagcaggtgtctactggcagtagggctgtacctcagcaatgtcagcaccaacttctgcatgctggtcacaagatggttagttcttcactgggcatcatatatgaaatcaagaagcaagaaaggaaaaggggtggcaccagccttaaaccctttcccacaaggccccatcagacttcaacttatacctcattaccagaatgacatcacatggccatgtctagctgcaaaggagtctgggaaagcaaatatttctcttttcaagccccaagagtggaggcaggaacaggaaaatctcgttgggaacagatgctggcttagccagccaacagtgtggaccacaagagatttggtttggttaagaaaataccaacagaacttcatcatacagtgtatcacccatgacatgaacccaaggaaagttaaatagcaacaattaaaagtttgctgcaaaaccaaaattgaattatagaactcctattaccttttaaaatatctgtttccattcatttccaaaaatctgaaattatctgtaaacattttcccaatcaaatctgtctaggtagtgtgtaaaaattacttgaccttcacacacccagatacttttagttatgctattgttagttatgttatttcataaaatgttatctccttatttacagttgataaatgaaatgatgattttcaatacagtttcaaaactggattgaaattttgttagttattagaaactagaaagtttcagtgctgaaaatacacaacgggttgtttgtatttatcatctattttattttccagtttgcattggcttttctgggtctttctacaactttaattgtaaattttttcttttatatttttatcatggcactcaaactcagaaaacctgttaaggcaactacataatgtgatctaaaaatccagttaacatattgctatggaaaccaggaaatagaaacagcactctaatcattcctttagacaactatggctctgtgtgtgtgtgtgtgtgtgtgtgtgtgtgtgtgtaaaactttttaaattcattaatttattcatcttttattgaaagctgttactgaacccaaaatctgtaattgatctgtccataaataggcccagtgccttattaccagtaaattagtgttttttaatgagctatagtcattgataaattatgccatgccgtatcaggaaatctccagtcaggccgcgttgtttatttagcctgctgaggcctcttggtatggtgtgaaggacacctgactgggctgaaagctaagttctaactttgcccctcttactaaccagctatgtgactctcctgggaacttttagggactcagtttctttacctgcaaaatggttcaatgcaagactttagtaacgtaatgggaactttccttttccataaaactggggaatcaagaggtaatctcttttgaggactgaaatcactcttatgtaacctctggttacattatcatttccaagtgcctggcacttgggaaatgataactattcttactacatttttctatgtttcattctgtagtaaataagaactgaacctgcatagtaactgttattttaacccatgactttcaataacgaagatatctatgtctcattatctattgccatgattgaacaagttggtatgagagccggaacgaactcaagttctaaccggcaatgcccgttccttagatcctattacctttgagtgttcatttactcttgtaggtgccaatttttatagcgaaatacaaagttatcccaacacaattactcctaatagagttcaccgaggccccaaaagctcttttttaaaaatcatcataagatttcaacattcaagaattaaacttttgttctgttgtgcttattcatcgctatttgcccagttatttaatcagcctgcttccggctatggaaaaaaaaaaaaagaaaaaaagaaatggaagtctcctcagggttaaactcctctgttgttcttccttgcagaaatttgagttattatagtagaggataatcgttgcataatgaaatcattgggacaattcgtccatccacttctacctccgcctctaacaatgaactccttgtttctgcggtgcccaaatctctctaaacccgggtgggcgcggggcggttagcggagacgtgggagaggccgagagcaaagctcgcgcccttcccggggtcagcgagcggggtgccaggagggtgcgcgccctgcatctgagcccggggtgacactcgcctcccaagcgccaggagggggagactcggtcccgcttatctccggctgtgctaacttcagactgcctgagctgggggaggagagcgcgcagccagggcgagaaaacttctccacctagaaagtttcaccttgtcgtgggcggggcagaggcgggaggaaacgcgacccccgcggggccaggcgcggcgcggacggcaggaagggcgggggccgatttccctctgggtggtgccagtccccacctcagcggtcctcggaacccgcggactaggggacggacagcacgcgaggcagacagacacgtgctggggcgggcaggcgagcgcctcagtctggtcgcctggcggtgcctccggccccaacgcgcccgggccgccgcgggccgcgcgcgccgatgcccggctgagtcactggcagggcagcgcgcgtgtgggaaggggcggagggagtgcggccggcgggcgggcggggcgctgggctcagcccggccgcaggtgacccggaggccctcgccgcccgcggcgccccgagcgctttgtgagcagatgcggagccgagtggagggcgcgagccagatgcggggcgacagctgacttgctgagaggaggcggggaggcgcggagcgcgcgtgtggtccttgcgccgctgacttctccactggttcctgggcaccgaaaggtaaaattgcagcccctttcagatccagtacccaatccctcgcctcaggggttctgctttctttgttcccctaagagacctgactgctgttccagggggcaaaaccacgtaggtgggctagagtttaggggcttcggaaactgaagagacgtggccacggcgaggacgaaactagaatggggcttgtctttttagggggttgcttctgatggccacctgtatgacttaggagggagaggggcgctgggacagtgggtgatgtgtgactgttacggcccagcaagttttaaagctgggatctgactcagcccttacaaaagggatccggtcatcctcgtcccaccgtgatgcagctggcaaggtttgagccgagctgtttccttgttcccagccttgctttatctgtgttatgttggggtccttccaaggggcaggtgtttctgtgaaagtctgaattcatttctggcaatcacgcggggcttgtgatccatcaattttccatcgtaccttatctctttctggggcttgtggtggacatctatcttattaggtgaaatagattataaccagaggctgagcgatgtggccagtcgtagtgctgacccgataattaaagcaccagtgaaagtactttccctgactattgtcaatgcagaatttactccgaagtacggtttcccattcatatctttcatgttttaaaagagccatttgctaatttggcagttggagagggctccaatggctcacgcatgaatagttgcccagtgtattttaccttatcacagttttatgttcaaaggagccctcgggcagaatgaaatattgtcaactctcttaggcaaaataatcaagatactttaattgctatgttaagatggtccatgaatgtgagaggattgtaagaactgacgttggaggcaatatagactatctggaccctctctt

SEQ ID NO: 3466 - DNA, 6000 bp, Homo sapiens
attaactcaagatagattaaagacttaaacgcaagacctaaaaaccataaaaaccctagaagaaaacctaggcaataccattcaggacatatgcatgggcaaagacttcatgactaaaacaccaaaagcaatggcaacaaaagtctaaattgacaaatgggatctaattaaagagcttctgcacagcaaaagaaactatcatcagagtgaacaggcaacctacagaacaggattaaattgttgcaatctattcatctgactaagggctaatatccagaatctacaaggaacttaaacaaatttacaaggaaaaaaaccatcaaaaagtgggccaaggatataaacagacacttctcaaaagaagacatttaggtggccaaaaaacatatgaaaaaaagctcatcatcactggttattagagaaatgcaaatcaaaaccacaatgagatcccatctcacaccagttagaatggtgatcattaaaaagtcaggaaacaatatgtgctggagaggatgtggagaaatagggaatgcttttacactgttggtgggagtgtaaattagttcaaccattgtggaagacagtatggcgattcctcaaggatctagaatcagaaataccatttgacccagcaatcccattactgggtatatacccaaaggattataagtcattctaatataaagatacatgcacacgtatgtttattgcagcactactcacaatagcaaagacttggaaccaacccaaatgcccatcaaagatagactggataaagaaaatgtggcacatatatgccatggaatactatgcagccataaaaaaggatgagttcatgtcctttgcagggacatggatgaagctggaaaccgtaattcccagcaagctaacacaggaacagaaaaccagacactgcatgttctcactcataagtgggagttgaaccatgagaacacatggacacaaggagggaaacatcacacataggggcctgtcgggtggcgggggtctaggggagggatagcattaggagaaatacctaatgtagatgacagataatcttatgtgtcttaaactttgcaggcacaaaatccagctaatgtatggagtttcactttctaatacatgcaagttaacctgcttttcaaggtacatgatgttcagtggctaaaattctttacagttctagatatgagagatttcaggactgtaagcccattattttgcttcaaacatggtatctgatctcatacttaaagagcaatgagaaatgcttcagaaaagggagagcactttttaatatattctgaatgtattaggatgcagttatcatatcttgtaaggttgaaaattcaggccgggcgtggtggctcatgtctgtaatcccagcactttgggaggccgaggtgggcagatcacgaggtcaggagatcgagaccatcctggctaacacggtgaaaccctgtctccactaaaaataggaaaaattagctaggcatggtggcaggtgcctgtagtaccagctactcgggaggctgaggcaggagaatggcgtgaacctgggtggcggagcttgcagtgagccaagattgctccactgcactccagcctggatgacagaacgagactctgtctcaataaaaaaaaagaaagaaagaaagaaaattcaaccccagtgagacaacagaactattcattgatcagaatactcagaaaagcagtattatatagggataggagggtaggcaggcagtatactgccaccagtaaatatatttgtgagttctactaaagaggaaaggagaccccttttggagtttttttgttctgttttgtttttgttttttagttttctcatgttttatcctaatgggttttgaaagcatgatcatttaaaatactgttggaatgggcccatcagtgatgtgatctttcacctgtgaaaagacaagggctacttttgtggctgtatctcccctatccagacaggtaggagacccagcctctgtggctttatgccggacgctcatttcctgcccacagagtttctctgcccttcaggataactcagagtttgccagccattgttgggtctatccaagggtgtgtagttcacaactgcttccttcctttttccctagaagggtaaaggttaccccataagctaaggggaaaatgcccagcccagagagaaaagctaagcagagcgagcctcttggatcctgagggtctagcagagggcttataatatctcttcctattgccagtgccccagttgcgcagctctctgcgtcttttctcaaatcatcacccaatccgtttgccttttatagaaagtgatggtaatgatgtgtgtagagtgacagacttcagtttttacatagaaagacgggatgtaggcagtgggatcaggccaacatcagccttgggcagcgttttcagtggggaagcctcctcattagaagagccggcagcagctgtgtgactgcctcaggctgaagagagtcctgggagggttggatgtcttgttctctcctactggatttctaccataataataataaacagatttatttttctagtagttctcatttgactagacatggatgaggtaaattttcaggaaaggcacaacagtgtaatggatttttatgggtaaaatggctatcataaaagctttaagctaaaactttaaaggggtttgataacgagggtacattaagactttggtttgcaattatttacttaggaaggatggaaatgtttgcaagtttgaatttggctaaaagcccttcttaattgtaaaagaatcacttttagatgttcacaagctgagctttagcaaatacctttactggttcttgagttgcctctatcttagttttcccaccattgtactttacagcacaatttacaatatgtccccacccccaaaagagcatttcctttctcaattgtcacaaagctgctgagaagaagcttatttttaacttggaaatgtgttttgttttaatagttttagcctgagagcaattatcttacacactttataggtgcctaatgcggtcttaaatcatgactgaccaaggtttatcaataaatccattgataacataccagaaatgagtctgcaataacaaaatgagtctgttatttgcttaacatcaaccatcagggggaaaaatttaatcctaaaaatgagatataaaacaataccaatgaagataattaggaaaaattgttacaatactgattttgggccctctctggttccgtttttatctatttctaaaagaaacaacataacacatgtattaaatattacataatttttaaaaggctgagtgtgtcaactaaccagcctggtatacatcaaatagtgaccatatttaaagaacaaggaaaaatcttcagtcattaataaatgtgaactaataggtaaaaagaagtagattcacttttcatttgttagtgcctggtgcataggaggtgctttattaagaaataattaatgaaacctgggcagcataacaagaccccgtctctacagaaatttaaaaattagctgggtgaggtggcgcacacctgtagtcctgtctactagagaggctgaggcgggaggattgcttgagcccaggagtttgaggctgcagtgagctaggactatgccactgcactgcagactgggcaagagtgagacccccatctctaaaagtaaataagtaaataatgaatgaatgaatgaatgaatgaattattggcagatatgtgttccaaaaccatctatatgtttcatattatgctagctgctgaatgcaactgggcaaacactggataccaaatgaggtatttttactgtgcaacttttgtctctgggtggggaataccatagcaaccagaatgtagtgcacgcagccagtgcacagagcaaggcgtataatggctggaccttggcttatagagcacatgaaggagtttgataagagctcagtccgaaggctgatgaagagttacaatcagagttatgagcaagtaaaagtctgggcccaacgtgtttctactcctaccctaaagagccctagaagatgaattcacttcagaatggcccaaaaagggccaggtccaatggctcatgcttgtaatcctagcactttgggaggccaaggcaggaggatcacttgagcccaggagtttgagaccagctgggcaacgtagtgagaccctgtctctagaaaaaaaaaaaatagccaagcatggtggcccacgcctgtgatcccagctactcaggaggctaatgtgggaggattgcttgagctcaagaggttgaggctgcagtgagccatgatcacgccactgcactccagcctgaacaacagagccagactctgtctgaaaaagaaaagaaaagaaagaaggaagaaaggaagggagggaaagaaaaagaaagaaagagagagagagagaaagagagaaagaaagaaagaaagaaagaaagaaagaaagaaagaaagaaagaaagaaagaaagagaaagaaagagaaggaaggaagcagagaaaggaaagaaagaaagaaagaaagaaagaaagaaagaaagaaagaaagaaagaaagaaagaaaagaaagaaagaacggaaggactcgaaaagcccctttattcctaccaagctgcatctgctctttgtcccatctttggatctcctgaaaacaacttgtttcattaacatgtcatgtagttttaatgtttgttccagatgctctgaaatttgtgacccttttccctttagtgaaaattaaatttttactaaattgtgggaaaatgaaagaatttcagactatttaaggatatacattttgtttgttcgttttccatatatgtgaaaaattataatatattgggtttttttaaaagttctatgttgtccttgtaggttttcccaaatagtgcaccccttgaaggagggacaaggctgaccatatgtggctgggactttggatttcggaggaataataaatttgatttaaagaaaactagagttctccttggaaatgagagctgcaccttgactttaagtgagagcacgatgaatacgtaaggatcttaaaatgctttgctggggtgtgcttggaaaataggttttgtttttgaatgaatatttcttttaaaattgctcaagaagctcatctcttgaattaaaaagggtcttggcctgtcacatgccttgtgggtctgttctgttttgttcttgtaatcccatttactcattggatttgaagagagagaaaggtgacatggcctaggtgaagagaagaggccagaaatgggagtttctcaaccatttatgcgacaagtcttcaggtgttgtctgagtagatttgcaagagtagcactagttgggatcacttcatccttggagtcttcaaatgtagagtctccaaaggctttttctacagaaatcagtaaacagctcagcatggatcctctcttttaaattcactttctaaacctcagaaatgtagtgaggcagctgaatcacgtgtttgagacttttttagatgagttaaaatttatattcagcttatatttactggcactgcaatatatgggctgtatctcactgaaccatccccacggtcctgggagggagcagtatcattcctataatataaaagaggtacctgaagttcagagagatgaagtgtggcttcacagaggtaatccagagagtaagagctgaacaagccttcagctcagctctgatcatcttctgatccaagacccgtgctagttctactgtattctacatgtacccttctacaagctttgaattccataatcatcagagaatccagaaattattcattatcacataataacaacactcaaatatttaaagttttatggttgaatctttatgattgaacccattctatcaggtggttattttatatctaatagaattcatttcagggttacacaaaggtccgaatctatccattt

SEQ ID NO: 3467 - DNA, 6000 bp, Homo sapiens
cgtcctttaattccttggaaaattacccaactccatcccccttttatgtgactttgtctccagacaaatctacatgtagcgtagactgtcagatagggagacctgatcacagaactttggcttcctcatcctaaaataaaaccaattacatcacaggattgtaaccaagtacaatccattataaggattaaataagatgttttgtaaaggatataatgcctatgcatgaatcattatatgacaaatacactctttcactaccttaattccagagaaaagcctcataggcttccgtattgtaggtatgcaggagtgtccctcacctattcttattcagaaacctcctaactggcctccatattgtgaatcagcttctcctttctgttctaagcttggcgcttacagatgccatctccctgagcacaactcagaactcagccatgtcccattgatttcagtctaacgcactttctttttttttttttttgagacggagtctcactctatcgcccaagctggagtgcaggggcgcgatctcagctcactgcaacttccacctcccaggttcaagcgattgtcctgcttcagcctcccaagtagctgggattacaggtgcacaccaccatgcctggctaatttttgtatttttagtagagacagggtttcaccatgttggccaggctggtcccgaactcttgacctcaagtgatctgcccacccccgcctcccaaagtgctgggattacagatgtgaaccaccttgtcccgtcctgtctaacccactttcaacatttaaaaacctccacagcacagtcccatttcaatcttatgggtccctaatcccttcccctactccaacatgtcaagcaacgtgaactattatactttatggtttaataagaacacatatgcagccaggcgccgtggctcatgcctgtaatcccagcactttgggaggccaaggagggtggatcacctgaggtcaggagttagagaccagcctggccaacatggagaaaccccgtctctactaaaaatacaaaaattagcctggcatggtggcaggcgcctataatcccagctactcaggaggctgaggcaggagaatcgcttgaacccgggaggaagaggttgcagtacaccaagattgcaccacttcactccagcctgggcaaaagagcgaaactccatctcaaaaaataaaaaaggaaagaaagaacacatgtgtactgttactcctggccccaccccctccacccaaaactctccctctgccctcatattacctgcacctataaaacaaagtctccctgttcctcaagacccaccttactgtcactctcttcctgcagcctttctcagtaccctactattatctctttgacttttggcaacctttgtacctctttgatattactgctctatattacagctattatcttattgtcctgtgtggcagttatctgctcaattctcttaaccctgttcattcagccctgggacctatctagtaacttgaacagtaacctactcgtatgtgatcaagggtcaattgatacttgttaaattgattttaaatgttaatgcatattctgggacttgaaagttaacacgatgatgttgtcagaagtgattgttgattgttaagattttcagactttgaaaacttctactttgcaaagctgaattagacagcaaagttctgtagctccctcctggcaaggggtttgagttttctgttgggatcaaggcagtcagcagccatcaagggttcttgcacttgggcaaagaagtcattaatggtaatttgtatcagcaattacagcatctacctcatttctttctttcagtcgcagcgttcaaaggcaggctttattctccttcttgctgggtactgcaagctacacttgcctctcagttttatgtcttcctactccagctgtctggtgtggattttccttctgctccaagcttccttcatttcttcctccttatgcttcctactcttagagtggcctggaagtgttgctgggccagaactgcccccctgggtcctgtccacaggggcggcctctgcccatgctgactctcctcgtgtcattcttgcatgggcacatgtccagggggagataatatgtatgacctggtctatcctgagcacagtgttttaaatcaagaaattgcatgtttattgaagttcagtagaccaaacaagacctaagggtcaggaactcttaaatgtttatcccagtgtggactcagatgtattggggaattttagcaagtcacttaacctctccgtgtccctgtgatcttcctatatagtactgatacggctattttatatgaatctagtactttcacatcttcatgtgacagttttattgaaattaattttcaatagagaaacttgttgccttgcagttttttttatttctgatttttaatatgtatttttacttatgttgatttagaccttcccatttaatagtaacctttcaatgtggttacatttcttaaagagtatttatgttcagtttgaaaccacacaaatttaaattttgggaggctttcttcttcttttacaagtaatgtaaaattgtagtgaagctattggaaaagaaaaggatagaaacatgttagtgctttgacacagcgggagagaattttggaagagatattctaccaactacagatggaatcttcatcatcatgtagacttcagatattcttttagaaaactttacatttacttataatctaaaccttacttgtttaaacaagtcatgaaatgtatagcttaataattgcctttaagaaaattgttgcccaaaacagaaaccgtattgagtatgtaaagccaagtttagttaccaagacctactgatttcctttcatatatgtatggtcacatctctcacctcatctgtcctgtttcttgttttactagtggtcctttggcgtgctcctctgggagctgatgacaagaggagccccaccttatcctgacgtaaacacctttgatataactgtttacttgttgcaagggagaagactcctacaacccgaatactgcccagaccccttgtaagtagtctttctgtacctcttacgttctttacttttacagaaatgcctgccttcaaagggtctcttacagcatgtctttctttttggaacagatatgaagtaatgctaaaatgctggcaccctaaagccgaaatgcgcccatccttttctgaactggtgtcccggatatcagcgatcttctctactttcattggggagcactatgtccatgtgaacgctacttatgtgaacgtaaaatgtgtcgctccgtatccttctctgttgtcatcagaagataacgctgatgatgaggtggacacacgaccagcctccttctgggagacatcatagtgctagtactatgtcaaagcaacagtccacactttgtccaatggttttttcactgcctgacctttaaaaggccatcgatattctttgctcttgccaaaattgcactattataggacttgtattgttatttaaattactggattctaaggaatttcttatctgacagagcatcagaaccagaggcttggtcccacaggccacggaccaatggcctgcagccgtgacaacactcctgtcatattggagtccaaaacttgaattctgggttgaattttttaaaaatcaggtaccacttgatttcatatgggaaattgaagcaggaaatattgagggcttcttgatcacagaaaactcagaagagatagtaatgctcaggacaggagcggcagccccagaacaggccactcatttagaattctagtgtttcaaaacacttttgtgtgttgtatggtcaataacatttttcattactgatggtgtcattcacccattaggtaaacattcccttttaaatgtttgtttgttttttgagacaggatctcactctgttgccagggctgtagtgcagtggtgtgatcatagctcactgcaacctccacctcccaggctcaagcctcccgaatagctgggactacaggcgcacaccaccatccccggctaatttttgtattttttgtagagacggggttttgccatgttgccaaggctggtttcaaactcctggactcaagaaatccacccacctcagcctcccaaagtgctaggattacaggcatgagccactgcgcccagcccttataaatttttgtatagacattcctttggttggaagaatatttataggcaatacagtcaaagtttcaaaatagcatcacacaaaacatgtttataaatgaacaggatgtaatgtacatagatgacattaagaaaatttgtatgaaataatttagtcatcatgaaatatttagttgtcatataaaaacccactgtttgagaatgatgctactctgatctaatgaatgtgaacatgtagatgttttgtgtgtatttttttaaatgaaaactcaaaataagacaagtaatttgttgataaatatttttaaagataactcagcatgtttgtaaagcaggatacattttactaaaaggttcattggttccaatcacagctcataggtagagcaaagaaagggtggatggattgaaaagattagcctctgtctcggtggcaggttcccacctcgcaagcaattggaaacaaaacttttggggagttttattttgcattagggtgtgttttatgttaagcaaaacatactttagaaacaaatgaaaaaggcaattgaaaatcccagctatttcacctagatggaatagccaccctgagcagaactttgtgatgcttcattctgtggaattttgtgcttgctactgtatagtgcatgtggtgtaggttactctaactggttttgtcgacgtaaacatttaaagtgttatattttttataaaaatgtttatttttaatgatatgagaaaaattttgttaggccacaaaaacactgcactgtgaacattttagaaaaggtatgtcagactgggattaatgacagcatgattttcaatgactgtaaattgcgataaggaaatgtactgattgccaatacaccccaccctcattacatcatcaggacttgaagccaagggttaacccagcaagctacaaagagggtgtgtcacactgaaactcaatagttgagtttggctgttgttgcaggaaaatgattataactaaaagctctctgatagtgcagagacttaccagaagacacaaggaattgtactgaagagctattacaatccaaatattgccgtttcataaatgtaataagtaatactaattcacagagtattgtaaatggtggatgacaaaagaaaatctgctctgtggaaagaaagaactgtctctaccagggtcaagagcatgaacgcatcaatagaaagaactcggggaaacatcccatcaacaggactacacacttgtatatacattcttgagaacactgcaatgtgaaaatcacgtttgctatttataaacttgtccttagattaatgtgtctggacagattgtgggagtaagtgattcttctaagaattagatacttgtcactgcctatacctgcagctgaactgaatggtacttcgtatgttaatagttgttctgataaatcatgcaattaaagtaaagtgatgcaacatcttgtatactgatagtggttattgccagtcatgcttgattacctgcatttgcataatgatagaggaagcctaagatggatttcacctggctgcatagagctcatccatgtaggagagccttagtcaagtgaatgctgaggaagtagtaaaacagcatgcatccccgaatctcaggaagtctctgtctttccaagggtttggtctaagttgctgattacctggatttttctgacgatctttcaactgctagagcatctggttcctgttttagcatggtgctcttctccagcaaggtgtgtccttagactagaagacacaaaaatgg

SEQ ID NO: 3468 - DNA, 6000 bp, Homo sapiens
tttctgagcatttctcagtgggagagttgtgctgaatcagctctataattctattttctgttcgcacccaaatagcttctggaagcagccctccattaaacaatacaggaggtgttgttattcataataatgaccttgattcatatagaaaatattgaactatgatcagttatacatcattgaatctggttggcactgcagaagcttcctagaggctgcttgcttgttttccagtagttgatcatatcagtgtgggatcagacctggctgggcaggcctggctggctggtgggactctccagcatccattaaaatagaatgcaagattcgagatagaaatgctggtaggaaataaacttgtgtccggggaagaaagggtcagacctggcagtaaagctctgaatagtgtctcagtcatcaactgaagcaatgcttgagcagtacctctcacctagatttgttttccaacttcctgtgaatacatgaatgccttagggcgaaaggggattttgaagaaaacctaaaagagctgtgttgattaaaatgtctctaagactttagaatgcaagataatgctgctttgatgcccatatggcacattacaacacaaaagggaggtgttcagttttggctcagactacacaccagcttagctcattatgggctatgggctgcagggacactgttttgtgtagagggtttcagcacatcaacactgcctatggcagcactgggggtttgggggaggtgctcagaagacaggctgtgtccaatggcaaaggacttgtatctatttatgcatgcagtggaggcctcagaagctgaaaaaagaaggtaagggcttgttcattagcatactgtattagtccattttcacactgctgataaagacatacccgagactgggcaatttataaaagaggtttaattagacttacagttccacatggctgtggctggggaagcctcacaatcatggcagaaggcaaggaggagcaagtcaacgtattacacggatggtagcaggcaaagggagagtttgtgcagggaaactcccgtttttaaaaccatcagatcttgtgagactcattcactatcatgagaacagtgcagggaagatctactcccataattcaatcagctcccatggggtccctcccacaacacatgggaattcaagatgagatttgagtggggacacagccaaatactgagatgtgtcttggtgattactagtaataaagaggagagaaagttgactggtgtagaacgctttggaagaaggtttgtgtgcggctgcagatagccagtttattattttaaacatgacgtggtggttttaaaacatggctgtaaattctttgacacttcattgagaagtgggctcaatatcccctctccttgaatttgagcccgacttactgacttgctcataatataaaatgatgcagcagaagtcatgctgtgtggctttggaggctagatcataaaatgcaattcagctttaaccttgtttactgaaacactagcatttgaagccctgagctgcttcgtaagaagtctgactactctgaggcagccatgctaggaggaagctcaggccacatgaagagtagatttaggtattctggctgactgccctatctgaggtcccagcttcaaccaccagccatgtcagaaaatatgcctccaaaggatttcagtcttcaaccattgagacacccccaggcactgagtcttcccagctgaagccccagacatcatggagcagagataagccatctttgctatgccttgtctgaattctgactgagagggtaattttatatttttcaaagggtgaaagtataatgtttgatcctcacaatgatagtttggcaggttgggctagcattattataaccttcattttatagattaaaaaacaaaacaacaaacagggatttaagcttacctgctttgagattgtatagctaaggtgtggagtgctgacgctaaaatcctgatctttggactccaaagcttatgctttctctcgtttctcatctggatactgtaggactttagaatggcctaaggaagtaaaacaggatatatccagaattttaaggcaaggtcagaaaatgtcaaatgagtagaacgctaagaagaatcaatattaaatggatgagaccagtcatcctgtggagaaataatcatggaagatctgaactacagactgatactgacaaataaggctagaattcaaaatggaaccaatgtgaggataaaagcctttaaaacttttaatgttataaggaagtgttataatgatataacatttttagcagctaattttttaaaaatgaaataggacagttagagaattaacaaaaatcttgccagttgtgtttctgatgaaagggtgatgaaagggtgatgaaaggggaaaaggtgccatgactggctaatggtgctatttcagtctgcttctaagtatgtccttatagtaaagggtgcttcagattagtttagcttgatgacatcatcccttgtgatcatttactctacatttgccaagccactttttgatttaaatttatttcctcatagaaactttcctacttggaggagaatgtacaatgaagttaacaaagcataccatgttcatgtttttttttttttggagacagagtctggctctgttgcccaggctggagttcagtggtgcaatctcggctcactgcaacctctgcctcccaggttcaaatgattctcctgcctcaggctcctgagtagctgggattacaagtgtgcaccaccacaccaggctaattttttgtacttttaatagagatgaggtttcactacgttggccaggctggtctcaaactcctggcctcaggtgatccatccgcctcagactcccaaagtgttgggattacaggcgtgagccactgcgcccggcctacaatgttcatcttataggttatattttttcaatgcagaagaatgttagtattctcattcatcaagcagcctcacacagcatcctttacctgagagtaagcatcagctcccaggcttacggtgaccctaatcaatatgaagacaccctgtttcagaagtcagtaggacacctttctatttcttgaatcatccaaaatacagtaaggaggtcgctggtgacttcccccatgatgggaagtactaaaaggcagaatccacttagtttttcatgacttcatgtttaggttactttggtgattcactccaggccattgggagcccacagtaattgtttctcattcccgtttctctcttccttaaacttttcttttccaattatttattctttattagatccatgtatttttaataatgaattgaatttcattctgtaattgggcttctcaaagataattgacctcttctctcccaattgttttcatgcgtattttgcagagaatgcttggaatattctgttcatgaaaggcacaaagtacataaaatattttgagtgattttcttcaaaataaaaatgattagttttgatgcttcagatgtctagaatgctatgtgccttgtacaggccctacggcatggaaagtgctcaactgatatttgttaaatgaatgaatctggaaaacgaaaaatacacgaaatattttattcctcaacaatgaagaaaaagctttcagacttccatttagactcgttttaactggctgaattcttcaatgaaaagaaaacacgcgtcgcactgctaatttagctgttcctaaatatatttccatcaaattctgcttggctgtttcaaccttggggttgaagttcttattttgatgacacagagacgttcattgcagtggaaatagcaagtagtattggcttccccgccttcctccctctaggatttcaacttctcctcctcgaacaccagccctgctcttctagtaaatcccacattacagaacaggctgaggacggaggagacaagaggaaagtaggaaaccggagccatggaaacggcggagcggaggcaaagtgtgagagcgcgggtggttagaagggaaaaaaccctccccggacgacggcgcgaaggcgcgcctcagattacgtcacgcaccggggtgacgtcacgaccgtgacacgcgggtgacgccgttgccgcggcgacttctcgtcgtctccgcccccttcccccgctcccccccgcacccccgcctagcgtccttcccccaatcccctcaggctcggctgcgcccggggccgcgggccggtacctgaggtggcccaggcgccctccgcccgcggcgccgcccgggccgctcctccccgcgccccccgcgccccccgctcctccgcctccgcctccgcctccgcctcccccagctctccgcctcccttccccctccccgcccgacagcggccgctcgggccccggctctcggttataagatggcggcgctgagcggtggcggtggtggcggcgcggagccgggccaggctctgttcaacggggacatggagcccgaggccggcgccggcgccggcgccgcggcctcttcggctgcggaccctgccattccggaggaggtgagtgctggcgccaccctgccgccctcccgactccgggctcggcggctggctggtgtttattttggaaagaggcggcggtgggggcttgatgccctcagccaccttctcgggccagctccgcgggctgggaggtgggcatcgcccccgtgtccctctccgtcatgcagcgccttcctacgtaaacacacacaatggcccggggggtttccctggcccccaccccagatgtggggattggggcagcggtggttgagcgggaggctatcaatagggggcgaaactcagggttggtccgagaaggtcacgattggctgaagtatccagctctgcatctctgtggggtgggggcggcggcggcctcgacgtggaggatataggttagttgctggggctgagacaacagcccgagttactgtcgcgtgtaattcttacatggtcgtggggatgatggggctcatcatttcctctctcctctcccggactgccccccttctcagtccgctgccctttttcacttttctatttggggatttctcttcacctgttttacccagcaaattattttgatttagtctttactttttcaatcctaaatcgcagtttccgatgccttttctggtctctggtcctctgttcctaatgtttgtcagcgctctgtcgctgattggtaacccccattctattcccatctaccgcccgctcattttccagttgtcggacctgcctgccttctaaccccagctcccacttaagagcatttttgcacttctcttaccctggtcctcttgaggctctgtacttgatctcaccactccctaacattgttgtctgttgttatcttcacaaatcctcctggacactttggagctacttgttttctgagcccagaagctgtcaagattccatcaggtttcacttggctcttttcgcgcttgcactactggcactttttggctagtcgtccattgtgcattcacacctctttattcctacccatttttataggtctgattgatttcttagtgttgtcctcctttttgtcctatttttttccttttcctttttcctctccagtccttgcttctctcagcctgtttttgcattagtcagcctcttagcactgtgtcaaattatttacgtttttttattacataaaatttattacaaatatttggtattttattacagaaaataatactttattatgctttacaaataagatatggtataataattgtggtttacagttattgattaggtaatgtgacttactctgttgactttgctcgaagttctctttgctacttactattaacatctaatttctcaattctcataacatctcattctctctgcaattttttttttgcatcatcatctttggaaattcatccaatatgcttgctttattcagcatca

SEQ ID NO: 3469 - DNA, 6000 bp, Homo sapiens
ctgattcccaactttaacatatgtactcattcagttctattccacaataaacacaaaattgtttcagaattacaaaaccaatattgctatcaataacaaaccttctaaataaagttaaagatttacttgtagtttgttttgtccaaatttggttgcaagaaaccaaatttgcaaggaccaaatttggaacggtattcaatttataggtctatgttttaagaggaacactgaaaagagtatacagcaagaagagaaaatgctcgggagagaaaatgctaaagcaaacagtttccttcaaacacttaaaagcagttacacagaataagaaataggcttatcctgtgttcctctagaaggcaaaactcagaccagaatatagatgtcataaagaggaggatttcaattcaacttcagaaactgttagagttggatgtactatattagtaaggtccccatcattaaagtatttagacagagtctggaattccacaaaggggtttctgagcatttctcagtgggagagttgtgctgaatcagctctataattctattttctgttcgcacccaaatagcttctggaagcagccctccattaaacaatacaggaggtgttgttattcataataatgaccttgattcatatagaaaatattgaactatgatcagttatacatcattgaatctggttggcactgcagaagcttcctagaggctgcttgcttgttttccagtagttgatcatatcagtgtgggatcagacctggctgggcaggcctggctggctggtgggactctccagcatccattaaaatagaatgcaagattcgagatagaaatgctggtaggaaataaacttgtgtccggggaagaaagggtcagacctggcagtaaagctctgaatagtgtctcagtcatcaactgaagcaatgcttgagcagtacctctcacctagatttgttttccaacttcctgtgaatacatgaatgccttagggcgaaaggggattttgaagaaaacctaaaagagctgtgttgattaaaatgtctctaagactttagaatgcaagataatgctgctttgatgcccatatggcacattacaacacaaaagggaggtgttcagttttggctcagactacacaccagcttagctcattatgggctatgggctgcagggacactgttttgtgtagagggtttcagcacatcaacactgcctatggcagcactgggggtttgggggaggtgctcagaagacaggctgtgtccaatggcaaaggacttgtatctatttatgcatgcagtggaggcctcagaagctgaaaaaagaaggtaagggcttgttcattagcatactgtattagtccattttcacactgctgataaagacatacccgagactgggcaatttataaaagaggtttaattagacttacagttccacatggctgtggctggggaagcctcacaatcatggcagaaggcaaggaggagcaagtcaacgtattacacggatggtagcaggcaaagggagagtttgtgcagggaaactcccgtttttaaaaccatcagatcttgtgagactcattcactatcatgagaacagtgcagggaagatctactcccataattcaatcagctcccatggggtccctcccacaacacatgggaattcaagatgagatttgagtggggacacagccaaatactgagatgtgtcttggtgattactagtaataaagaggagagaaagttgactggtgtagaacgctttggaagaaggtttgtgtgcggctgcagatagccagtttattattttaaacatgacgtggtggttttaaaacatggctgtaaattctttgacacttcattgagaagtgggctcaatatcccctctccttgaatttgagcccgacttactgacttgctcataatataaaatgatgcagcagaagtcatgctgtgtggctttggaggctagatcataaaatgcaattcagctttaaccttgtttactgaaacactagcatttgaagccctgagctgcttcgtaagaagtctgactactctgaggcagccatgctaggaggaagctcaggccacatgaagagtagatttaggtattctggctgactgccctatctgaggtcccagcttcaaccaccagccatgtcagaaaatatgcctccaaaggatttcagtcttcaaccattgagacacccccaggcactgagtcttcccagctgaagccccagacatcatggagcagagataagccatctttgctatgccttgtctgaattctgactgagagggtaattttatatttttcaaagggtgaaagtataatgtttgatcctcacaatgatagtttggcaggttgggctagcattattataaccttcattttatagattaaaaaacaaaacaacaaacagggatttaagcttacctgctttgagattgtatagctaaggtgtggagtgctgacgctaaaatcctgatctttggactccaaagcttatgctttctctcgtttctcatctggatactgtaggactttagaatggcctaaggaagtaaaacaggatatatccagaattttaaggcaaggtcagaaaatgtcaaatgagtagaacgctaagaagaatcaatattaaatggatgagaccagtcatcctgtggagaaataatcatggaagatctgaactacagactgatactgacaaataaggctagaattcaaaatggaaccaatgtgaggataaaagcctttaaaacttttaatgttataaggaagtgttataatgatataacatttttagcagctaattttttaaaaatgaaataggacagttagagaattaacaaaaatcttgccagttgtgtttctgatgaaagggtgatgaaagggtgatgaaaggggaaaaggtgccatgactggctaatggtgctatttcagtctgcttctaagtatgtccttatagtaaagggtgcttcagattagtttagcttgatgacatcatcccttgtgatcatttactctacatttgccaagccactttttgatttaaatttatttcctcatagaaactttcctacttggaggagaatgtacaatgaagttaacaaagcataccatgttcatgtttttttttttttggagacagagtctggctctgttgcccaggctggagttcagtggtgcaatctcggctcactgcaacctctgcctcccaggttcaaatgattctcctgcctcaggctcctgagtagctgggattacaagtgtgcaccaccacaccaggctaattttttgtacttttaatagagatgaggtttcactacgttggccaggctggtctcaaactcctggcctcaggtgatccatccgcctcagactcccaaagtgttgggattacaggcgtgagccactgcgcccggcctacaatgttcatcttataggttatattttttcaatgcagaagaatgttagtattctcattcatcaagcagcctcacacagcatcctttacctgagagtaagcatcagctcccaggcttacggtgaccctaatcaatatgaagacaccctgtttcagaagtcagtaggacacctttctatttcttgaatcatccaaaatacagtaaggaggtcgctggtgacttcccccatgatgggaagtactaaaaggcagaatccacttagtttttcatgacttcatgtttaggttactttggtgattcactccaggccattgggagcccacagtaattgtttctcattcccgtttctctcttccttaaacttttcttttccaattatttattctttattagatccatgtatttttaataatgaattgaatttcattctgtaattgggcttctcaaagataattgacctcttctctcccaattgttttcatgcgtattttgcagagaatgcttggaatattctgttcatgaaaggcacaaagtacataaaatattttgagtgattttcttcaaaataaaaatgattagttttgatgcttcagatgtctagaatgctatgtgccttgtacaggccctacggcatggaaagtgctcaactgatatttgttaaatgaatgaatctggaaaacgaaaaatacacgaaatattttattcctcaacaatgaagaaaaagctttcagacttccatttagactcgttttaactggctgaattcttcaatgaaaagaaaacacgcgtcgcactgctaatttagctgttcctaaatatatttccatcaaattctgcttggctgtttcaaccttggggttgaagttcttattttgatgacacagagacgttcattgcagtggaaatagcaagtagtattggcttccccgccttcctccctctaggatttcaacttctcctcctcgaacaccagccctgctcttctagtaaatcccacattacagaacaggctgaggacggaggagacaagaggaaagtaggaaaccggagccatggaaacggcggagcggaggcaaagtgtgagagcgcgggtggttagaagggaaaaaaccctccccggacgacggcgcgaaggcgcgcctcagattacgtcacgcaccggggtgacgtcacgaccgtgacacgcgggtgacgccgttgccgcggcgacttctcgtcgtctccgcccccttcccccgctcccccccgcacccccgcctagcgtccttcccccaatcccctcaggctcggctgcgcccggggccgcgggccggtacctgaggtggcccaggcgccctccgcccgcggcgccgcccgggccgctcctccccgcgccccccgcgccccccgctcctccgcctccgcctccgcctccgcctcccccagctctccgcctcccttccccctccccgcccgacagcggccgctcgggccccggctctcggttataagatggcggcgctgagcggtggcggtggtggcggcgcggagccgggccaggctctgttcaacggggacatggagcccgaggccggcgccggcgccggcgccgcggcctcttcggctgcggaccctgccattccggaggaggtgagtgctggcgccaccctgccgccctcccgactccgggctcggcggctggctggtgtttattttggaaagaggcggcggtgggggcttgatgccctcagccaccttctcgggccagctccgcgggctgggaggtgggcatcgcccccgtgtccctctccgtcatgcagcgccttcctacgtaaacacacacaatggcccggggggtttccctggcccccaccccagatgtggggattggggcagcggtggttgagcgggaggctatcaatagggggcgaaactcagggttggtccgagaaggtcacgattggctgaagtatccagctctgcatctctgtggggtgggggcggcggcggcctcgacgtggaggatataggttagttgctggggctgagacaacagcccgagttactgtcgcgtgtaattcttacatggtcgtggggatgatggggctcatcatttcctctctcctctcccggactgccccccttctcagtccgctgccctttttcacttttctatttggggatttctcttcacctgttttacccagcaaattattttgatttagtctttactttttcaatcctaaatcgcagtttccgatgccttttctggtctctggtcctctgttcctaatgtttgtcagcgctctgtcgctgattggtaacccccattctattcccatctaccgcccgctcattttccagttgtcggacctgcctgccttctaaccccagctcccacttaagagcatttttgcacttctcttaccctggtcctcttgaggctctgtacttgatctcaccactccctaacattgttgtctgttgttatcttcacaaatcctcctggacactttggagctacttgttttctgagcccagaagctgtcaagattccatcaggtttcacttggct

SEQ ID NO: 3470 - DNA, 6000 bp, Homo sapiens
tatgggatcattttttacagcccacagacactttgatttcttgctcagaggacttcattcactcagtgcctttcatgaggtcaactttgttctagataccttgctaggcgttggggacacaaagatgactctcgctctatctgggtggacgacagcacttcatccaccaacagaagggcccggagagttttagggttaaatgtgcacgttagggccgggtgtggtggctcacacctgtaatcccagcactttgagaggctgaggcagctggatcactttagatcagaagtttgagaccagcttggccagcatggtgaaaccgtgactctactaaacatataaaaaaagttagccgggcatggtggcttacacctgtaatcccagctactcaggaggctaaggcaggagaattgcttgaacctgggaggcagaggttgcagtgagccgggatcacaccactgcacgctagcctgggcgacagagaaaggctctgtctcaaaaaaaaaaaaaaaaatgcaccttagataaagtaaaaataaggtaggtgtgctgttgcattgcagatatacctagagaggtacataacatatttttggtgaggttggaaagataaaggtagggtaattacagaatatagtagaaacttctaagctagaagttgaggagcagttttggatttttgttttaagatgcaaggtacttaagatcaggtgctagtgactgaagctggacatctaaaaggtaatttattttttatttttatttattttttttttgagacagggtctctcactgtcacccaggctggagtgcagtggtgcagtcatagctcactgcagccccaacctcccgggctcaggggatcctcccaccttagcctcctgaatagctgggacaatgcctggctagtttttgtattttttgtagagacaggatttcgccatgttgaccaggctagtcttgaactcctgagatcaagcaatcttccagctttagcctcccaaagtgctgggattacaagcatgaggcactgcgcccagccaaaaggtaatttaataataaccacaaggtcatccaaattagaaacaagacaaaacaatgcaatgaggggtggggggcaacgaatttgaaagttctttaaaagcatcagctatcttcctgaaggttatgaaaccgcctttgcaaaattataactgagacaatgaaagagatctaacttaaccgactccatcttgcttctaacctccaagctgtctttgttcattcctgggcattggctgaaccaactttgggagaaacttagtttgtagtttatagtttgtttatttatttatttggagacagagtctcactctgtcgtccaggctggagtgcagtggcatgatctcagctcactgcgccctccacctcccaggttcaagccattatcctgaatcagcctcccgaatagctaggagtacaagcatgcaccaccacacccggcaacttttttttaatttttagtagagacagggttttgccatgttgcctaggctggactcaaactcctgagctcaggaaatccacccgcctctgcctgccaaagtgctaggattacaggcatgagccactgggcccggcggtttttttttgtttgtttttgttctttttttgaagagtcttgctgtgtcgcccaggctggagtgcagtggcacaatctcggttcactgcaacctccacctcctgggttcaggcaattctgcctcagcctcctgagtagctgggattacaggcgcacatcaccacgcccggctatttttttgtatttttagtagagagggggtttcaccatgttggccaggctgttctggaactcctgactgtgatctatagtttaaacaaagacggcaacagccctttcccaaagcagacctccttcttgcctggggactagattgcctttgcaagactaacattagtcacaggattagaaattatggtttaggagtcttgcagctggaggctacaagattctgaccctccctaaactgctcctgagatcagtgcttgagatattttgcagaccctgcacttgatggatcagctggcaccacccagactgataaactggctcctctgatcttgtggcccctacgcaggaactgactcagtgcaggaacacagattcgtctccctgtgatttcatccctgaccaatcagcactcctggctcactggcttccctccacctaccaagttatccttaaaaattctggtcgctgaatgctcagggagactgatttgagtaataataaaactccgatctcccgcacagccagctctgcgtgaattactctttctctattgcaattcccctatcttgatgaatcggctctgtctaggcagcgggcaacgtgaaccccttgggcagttatatttagagtgttctctgtcttcagcattgtttttagtttgcatcacccaaccctgagtggggagggaagtggtgctaggtcttctcagtgtctcgggtgggtgtgggggcttccacggaggctgagatctaattttattttcccaaacacttaactattggagaaaaaaaatccctttattggcatataaatcctttctgacttcaagtgtttagcagctactctcatttgtttactgagtttgtgatgagagaaaagagggcttgcagccccaaagaaaggcgggagggacccagtagagctgggggctgcccgccccctggccttcgcataaagagcgccttagcaggtctactgagaacgggccagctgttagccagctggtcactcaggaggaagcccggggaagagagaagtgagaacgtttcagccaagtaactaagtgcacagccaccctgaccgtggccggaaaaccgcgaatggaaaaagaaaaactgccccgagaaactctgagaacttgcagtaagtgcacaatatccgtaccagagcttaatttctttacctgaacttaaaaacatgcacatactttgtattttaattgcagcgacctctctcctgtgctagcccgaggtccggagtcttacaaagggcttagttgagagtgcacgatttgtgagtcctcttcaacttggtgtttaaggagagcgggggtgagctcagtgaatgcggtttagcaggagagcatttgaatcccacagaggagccagcctatgccctagttctaaggcgcctctggtcctgtgtgaccgcgcccgggaggcaacagctctgagctcagtttcctcctcagcaaaatgtagccaatgacggcgttgtgaagcgtgaatgagatcaggtctatgaacgtcactttgtaaacccttaaagcaccatttcaatctttcattaaatattaactgaaaggagcactcacatagaaatgtcagtgtctacccccaactaactttcccctcttttctcacttcttctttttcacagaaccaggctacacatcttgtcattaaatttaatcaataaacatctagtgagttctactcaagacactgagctaattggtttatgttcagcaccgtcaagaaccttaccatctagttgggaaaaaccacacaaaacacattcgaagtttttaatggcactcatgtcaaattatgaaagaagaatggaagaggtctctccttagcaaatgattaattactgcgttagtctgctaggagtgccgtaataaagtagcacagacggggtggtttaaacatcagatattaattttctcacagttctggaggccagaagtctcagctgaacgtgttagcaggattggtttctcctgacacttccgtccttggcttgtagacggccatcttttctctgtcttcacagggtctttcctctgtgtgccccagtagctccccctgtatccaaatttcctctccttataaggacatcacttatatgggattagtgctcacctcattaccccattttaacttaattacctctctaaagaccctatctccaaatacagtcacattctgaggtcctgagggtcaggatttcaacatatgaatgtttggggagacagaattcagcgcataatcgttaccaaaccagaggtttagatgctgtcaggggagttttcttacagaaagagccaaacatgcaatccttcttgggtgcttttgatgacaggctgactataagttagagctatttgtactagtgctacaaatttggctatcttctagttaaataaattcaataaatcctggtttatttttacgtctacaggatattgtattaaatattcaaattgaataaaaatatttaaatcatcatttgaataaactacttctcttgtgaaaaacaatacatttattgcaacttaattatttttatcttttccctctctccctcccttattcctttggaatgaggaggccccgtgggctgtggagatttttgcccacgaatgggctgtggtaactacagccacagactacaaatgctgaaccgaggggtaggagaggcgtggaacctcttaatagaggaggtggcccttaaactggggaccaatagattgatatattcagaaattcatttctgccagattgttgttatgactgcacagaagttctccactgagttttacatagcatctctacagtacttctacatagtattgctccacgtggatgaaccacagtctatttaaaaatccatggttttgttgggaaattggtatgggggagtgaagcacaggtgcacgtgttaggaccccaaagatggtgaactgtgcctgaggagggcgaagccagaggacactctggtggaggtccgttgcagtgctgtcgtgcaaatccatcgtccgacctgggtataggggtgaaagactaattgagccatctactagctggttccctcagaagtttcccttaggatagttggtgctctcccaaaacccaacccacacagttttatccagtaaagttaatattagaggtcctggggccaaaatgatctcaacctattctcaaactttaaatgggtaagattattattgttgttatttttattttatttatttatttatttatttatttattttttgagaccaagtcttgctctgtcgcccagactggagtgcagtggcgccatctcggctcactgcaagctccgcctcccgggttcacaccattctcctgcctcagcctcctgagtagctgggactacaggcgcccgccaccatgcccagctaattatttgtattttttagtagagacggggtttcaccgtgttagccaggatggtcttgatctcctgacctcgtgatccgcccgcctcggcctcccaaagtgctgggattacaggcatgagccaccgcacctggcccttgtttttgtttttgagatggagtctggctctattgcccagactagagtgcaatgacgcgatcttggctccctgcaacctccacctcctgggttcaagcgattcttctgcctcagcctcccaggtagctgggactacaggcacccaccaccagacccagctaatttttgtatttttagaagaaacagggtttcaccatgttggccaggctggtctcgaactcctggcctcaagtgatccatctgcctgtctcagcttcccaaagtgctgggattataggcatgagccaccacgcctggcctgaatgggtaagattattaaaaaaaaaaaaaaaaatcatggctttggggtatctaggccattttcaactcttgactcaaaagagtgctcagtggacatttatttattttattttacttttatttatttatttattttgagacagagtcttgttctgtcccaggctgaagtgcagtggcatgatcttggctcactgcaacctctgcctcctgggttcaagcgattctcctgccttagccttccgagtagctgggattacaggcatgcaccaccatgcccgcctaatctttgtagttttagtagagacggggtttcatcatgttggtcaggctggtctcgaa

SEQ ID NO: 3471 - DNA, 6000 bp, Homo sapiens
tctctgtgccttggtttccccatctgaaaaataaagataatgacacctgtctcataaatggtcataaggattacgtgattaatgtttgtaaagtgctctgtgtgtctggcacctggtaagcactcgctaagtattagccattataaagaaaaaatgagggatcaaagacagttgcaagaatgctaataagaaaccttccattttcattatgtgaaaactaccttcttaagaattttatgatttctttttgcaaattagtatttagaggcattctattagagttgtggtgtcttagaatgtggtgaatgggagagaacaaccgggaacggtggctcatgcctgtaatcccagcactttgggaggccgaagcaggcagatcacttgaggtcaggagtttgagaccagctggccaacatggtgaaaccctgtctctatgaaaaatttgaaaattagctgggcaggccaggcgtggtggctcacacctgtaatcccagcactttgggaggccgaggcaggtggatcacgtgaggtcaggagttccagaccagcctggccaacatggtctctactaaaaatacaaaaattataccagcgtggtggcacgtgcttgtaatcccagctacttgggaggctgaggtaacagaattgcttgaacccaggaggcagaggttgcagtgagctgtagatcctaccattgcactccagcctcagcaacaagatcgaaactccgtctcaaaaaaaaaaaaaaattagccaggcatggtggtgggtgcccatagtcccagctacttgggaggctgaggcaggagaattgcttcaacccaggaggcggaggttgcagtgagccaagactgcaccactgcactccagcctgggggatagagcgatactgtctcaaaaaaaaacaaacagatgaaaggtggagaacaagaaaaccaagagaaaaggtaaaaaattgagttactgtgttttgttattttgaatcctaaaaccttcaccttcctgatcacattgttttaatcataaacacttcttgatattgggcttggggctttaagactgtaatttgatccagtttgggcacttactctatgattttcgataattcattcagggtctctgacactttgctcatgaaaatataatcggccgggcgcagtagctcacgcctgtaatcccagcactttgggaggccgaggcgggcagatcacgaggtcaggaggtcgagaccatgctggctaacacggtgaaaccccgtctctactaaaaatacaaaaagtagctggatgtggtggcgggcgcctgtagtcccagctactggggaggctgaggcaggagaatggcatgaacccgggaggcggagcttgcagtgagccgagattgtgccactgcaccccagcctgggtgacagagcaagactctgtctcaaaaaaaaaagaaaagaaaatagaatcaacaattcccggccaggcgtggtggctcatgcttataattgcagcactttgggcggccaaggtaggcagatcacgagatcagaagttcaagaccaacctggccaacacagtgaaaccccatctttactaaaaatacaaaaattaggccaggagcagtggctcacacctgtaatcccagcactttgggaggccaaggtgggcggatcacgaggtcaagagattgagatcatcctggccaacatggcgaaaccccatctctactaaaagtacaaaaattagctgggcatggtggcacacgcctgtagtcccagctacttgggaggctgaggcagaagaatcgcttgaacccgggaggtggaggttgcagtgagtcaagatcgcaccactgcactctagcctagcgacagagtgagactccgtcaaaaaaaacaaaaaaaaaatcccactttacaaaataatcaggaggataaattaagagattgtgtagtatggtgcttaaaaactttagagtcatcagccaggcgtggtgactcacgcctataatcccagcaccttgggagaccgaggcgagtggatcacttgaggtcataagttcaagaccagcctggtcaacatggtgaaagaccatctgtactaaaaatacaaaaattagccaggtgtggtggcacatgcttgtaatcccagctacttgggaggctaaggtggaaggatcgcttgaacttgggaggcagaggttgcagtgagccaagatcgctccaccgcactccagcctgggtgacagaataagactctatcaaaaacaaacaaacaaacaactttagagtcattaatacctgtgtttgtggttcagtgtctccctgaatctcctctgcttaaaccgtgacatggtaatgatgctgtactggcatggaagtgctaagaaaacacagcttattgttcctgttacttcctaaacaacttttaagaaatgggggctgggagcggtggctcacgcctgtaatcccagcactttgggaggccgaggcgggcggatcatgaggtcaggaatttgagaccagcatggccaacacggtgaaaccccgactctattaaagatacaaaaaattagctgggtgtggtggcatgcacctgtaatctcagctattcaggaggctgaggaaggagaatcgcttgaacctgggagatggaggttgcagtgagccgagatcgcgccattgcactctagccggagcaacagggcgagactctttctcaaaaaaaaaaaaaaaaaaataagaaaagaaaagaaatgggactcagtgcagagccaatatgaagggcagttaagggccccatccatgggcttgttcatgaatagctcccctgcctaggaagcctgctagtttccactgtacattcagggtggacaagctccagctgtggtcaccgtatcatgtcctcaagtagaaatgttaaaacattcattggtatgtactgctgcttttttagtttcactaccggaaaagcctgcttggatggaaagatttcatttgctatgctttctgcctttgcgtctgggtagcattgtaggcaggtgttctttcactcaaaacatgttgtggcccttgttgaaagctgtcatgcaacaggccagtgcagccagggcacccagcaggtccagactcacccatggccatcgccagtctctagaaatacttacaacaagaagcttcaccctgtggctggcatgccatatcttatataccttgcaccaagcaaccgtccttccatttcttgtaactaagcagagcatagcagtaaatttttcaaatttctcatttctaagtcagggattagccaactatggcccacagtctgagtcattgcccaacagtttttttagatggccagcaagttaagaatggttttcacatttataaaagattgaggccgggcgtggtggctcacacctgtaatcccagcattttgggaggccaaggcaggtggatcacctgaagtcaggagttcgagaccagcctggccaacgtggcgaaaccctgtctctactaaaaatacaaaaattagtcggatgtggtggcacatgcctgtaatctcagctacttgggaagctgaggcaggagaattgcttgaacccaggaggcggaggttgcagtgagccatgattgctccattgcactctagcctgggcaaaaagagcaaaacttcatcgcaaaaaataaaaattaaaaaaataaaataaaaagaccgagtccaggtgtggtggctcacgcatgtaatcccagcactttgggaggccaagggaggggagggggtggatcacgagatcaggagttcgagaccagcctgaccaacatgatgaaaccccgtctctactaaaactacaaagattaggcgggcatggtggtgcatgcctgtaatcccagctactcggaaggctaaggcaggagaatcgcttgaacccaggaggcagaggttgcagtgagccaagatcatgccactgcacttcagcctgggacagaacaagactctgtctcaaaataaataaataaataaaagtaaaataaaataaataaatgtccactgagcactcttttgagtcaagagttgaaaatggcctagataccccaaagccatgatttttttttttttttttaataatcttacccattcaggccaggcgtggtggctcatgcctataatcccagcactttgggaagctgagacaggcagatggatcacttgaggccaggagttcgagaccagcctggccaacatggtgaaaccctgtttcttctaaaaatacaaaaattagctgggtctggtggtgggtgcctgtagtcccagctacctgggaggctgaggcagaagaatcgcttgaacccaggaggtggaggttgcagggagccaagatcgcgtcattgcactctagtctgggcaatagagccagactccatctcaaaaacaaaaacaagggccaggtgcggtggctcatgcctgtaatcccagcactttgggaggccgaggcgggcggatcacgaggtcaggagatcaagaccatcctggctaacacggtgaaaccccgtctctactaaaaaatacaaataattagctgggcatggtggcgggcgcctgtagtcccagctactcaggaggctgaggcaggagaatggtgtgaacccgggaggcggagcttgcagtgagccgagatggcgccactgcactccagtctgggcgacagagcaagacttggtctcaaaaaataaataaataaataaataaataaataaaataaaaataacaacaataataatcttacccatttaaagtttgagaataggttgagatcattttggccccaggacctctaatattaactttactggataaaactgtgtgggttgggttttgggagagcaccaactatcctaagggaaacttctgagggaaccagctagtagatggctcaattagtctttcacccctatacccaggtcggacgatggatttgcacgacagcactgcaacggacctccaccagagtgtcctctggcttcgccctcctcaggcacagttcaccatctttggggtcctaacacgtgcacctgtgcttcactcccccataccaatttcccaacaaaaccatggatttttaaatagactgtggttcatccacgtggagcaatactatgtagaagtactgtagagatgctatgtaaaactcagtggagaacttctgtgcagtcataacaacaatctggcagaaatgaatttctgaatatatcaatctattggtccccagtttaagggccacctcctctattaagaggttccacgcctctcctacccctcggttcagcatttgtagtctgtggctgtagttaccacagcccattcgtgggcaaaaatctccacagcccacggggcctcctcattccaaaggaataagggagggagagagggaaaagataaaaataattaagttgcaataaatgtattgtttttcacaagagaagtagtttattcaaatgatgatttaaatatttttattcaatttgaatatttaatacaatatcctgtagacgtaaaaataaaccaggatttattgaatttatttaactagaagatagccaaatttgtagcactagtacaaatagctctaacttatagtcagcctgtcatcaaaagcacccaagaaggattgcatgtttggctctttctgtaagaaaactcccctgacagcatctaaacctctggtttggtaacgattatgcgctgaattctgtctccccaaacattcatatgttgaaatcctgaccctcaggacctcagaatgtgactgtatttggagatagggtctttagagaggtaattaagttaaaatggggtaatgaggtgagcactaatcccatataagtgatgtccttataaggagaggaaatttggatacagggggagctactggggcacacagaggaaagaccctgtgaagacagagaaaagatggccgtctacaagccaaggacggaagtgtcaggagaaaccaatc

SEQ ID NO: 3472 - DNA, 6000 bp, Homo sapiens
attgcactccagcccgggtgacacagtgagactccatctcaaaaaataaataaacacacacacacacaaaactattttgctgtgatgcctatgccagtggccaaggcagcagcacatcagcgagcacagttccaggagatctgctggtgccaggtggcagtgatgcatgacattcctgcccactctcagctgtcttacggtgtatgaacattcagcttttctgaatttagtttagggtgatgatgaaacaacggctagcttggtggctctgagaggtctctattcacatcaatagctgtgtcttctgcttgacagctggtcccaggtgcagctttcagcaaatccatcacctgggtatatgatctgggacaaaaatacacttagctccttcatggagattgacagtgacatcactgtgctacaaggagctttgtgagactgggttcagctcaaaaagttgccaaacctacttgaccataaatactttctccatgtcagacctgtttttttttttttttttttttgagacggaggctcactctatcacccaggctggagtgcagtggtgcgatctctgctcactgcaagctctgcctcccgggttcacgccattctcctgcctcagcctcccgagtagttgggactacaggtgcccatcaccatgcccggctaatttttttttatatttttagtagagatggggtttcactgtgttagccaggatggtctcgatctcctgacctcgtgatctgcccgcctcggcctcccaaagtgctgggattacaggcgtgagccactgtgcctggcctgtaataccggttaacattggataagtatttaagaaaaaatctaccttgtggcaatttatgtataaataatatttcatatagttgttaaaatttttttgtagcctaaaataattcttagcaatttttgtttttctttattaattccttgtatctataatcacttgtgctaaagtcacccattttccccagtaatacaggtttaatattctcaatccttaccactttaccctcacacagaggcatatatccatgctactttttttttttttttttttttttgagaccgagtctcactctgttgtccaggctggagtgcagtggcgtgatcttggctcactgcaacctccacctcctgggttcaagcaattctcttgcctcagcctcccgagtaactaggactacaggtgtgagccaccacacccagctaatttttgtatttttagtagagacagggtttcaccatgttggccaggctggtctcaaactcctgatctcaggtgatccacccacgtcagcctcccaaagtgctgggattataggtttgagccactgcccctggccacatgctactctcttaaagacagaggacctgggggcatgagggcttgaggaaggtggacgttgttcagagaggtgagctccaggctaggggagggcggagcacactccaccagtggttcccaaacttggctgctcattggaaccacctggcaaggttttcagtctctgataattggggttcccctcaccatccccatcccccaaagactttgatttaactggtctaggtagggcctgggcatggagatattttagcagctcaggtgattctaatgtgcccccagggttgagcaccactactctgtattatttgctacttggtagttaggtctgtggccaagttggcaagagttaggtggaagaatactagaagaggcagcaggggcagcccacacagtggcagtgggatgggttgcagcacagatgatttggtggaccaacatgaacaggtgagcagcatgaccaatcctggcctcaagcaccatgaccacgcatgagatgatgatggcggtgctaatgaagaagttcctagaggtcagatatttcattttcccacagtggatgatgggatgctcttgtatgctgcgtcccattatttgtggtagttatgttctatagtcactgtgaacactgaattagcgaataccgagtcactgcttcttaggttcctgtgagtctctggacacaacattttcattacattatgattaatacataaccttatatggtgtgtgtttctgtttaatggacaccttatttaatatatggctgattcattacattgagttcacaaccaatagcacagtagctcctgcctgcaggacggttctccagtgggcacgccacagcctctggtgcttagcaacaacagacagcactttagcaagctctacgcttcgggccatttatttttatttttattttttttaatttttttattgtggggggggtctcacgatattgcctaggatggtcttgaactcctgagctcgagcaatcctcccacctcggcctcccaaagtgctgggattacaggcatgagccactgagctcagtcgcttgggggccattttaaacagcaaaatcaccaacaaaaagcacagaagtgtggaaagcataaactaaatggacagcaaaaagaatacaagaaggcagagcatcgccttgttccactatagctgggagggtgtgcgtggggcaactcaagatttttactgctctgggatgtgcatatctatgagtgactgggaaaacacctcaagtattgattttgagattacaaatacattttagcaagtagataagttcacaaatatgatatctgcaaaaatgaggatacactgtacataacgtatttacaataccgccttctcttgccccgcccatcgtattccttcctttcttcaaaggcccatctatcctgtcaaggagccttaattgatttgcaccctgcctctgatcactgccttctgtgctcaatttagagaaaactggtgagataaatcagtcatcaatcaattaaccaatcaatcaatactaatgaactattttaaagcacccaacataatttctgggaggtagagtggggaatagataaatataaaaggcagtgccttcccaaaaggagtttaccagtagttgaggagacaagcctaacatgggcaaacaatgctaaaaagtacctaggtctagtttaaaataatgttgcacaccatacatgctacagatgctttaaaaagttgcctatcaataggagctttaaataaaactttcctgagaaatagaactttcatgggacattaagaaggaaagacagatatggagaatgattgaatgaagtattcagcaagtataaatgcagcctaagaagtggaaattagcatcgtatcgtttttttccaaataagaatgaagagatgaacttagtgaggacaattttgtgaggagttagggagttggggatctggttgcaagctcaggtaagcctgatgatgctttgttccttaccctgagagacattttaccaaaaacactgacagacattcctgatagattaaccaataccaaacgtttttgaatcctattcttatttgccacacacgtttagtcaggatctcaaggattcatcagtagcagcagaaactttaatgtagggttaatatatttgagaggtcattcttaagaaaagtctaggcaataggccctcaggtagtgaattattctgtaggattcattgttttttgtttcattttgttttgttttgttcttttttcatttttctatttttctccataggattcttgataggtttcaatcacacaccttcccatgggtatttccatgggcaacccaccccttctcttcagcagtaaactaacaactacataccagtgaacatcacaggtataaaccacctttcttcttttaaggaattagtatgcaaactttagtactcttttcctagtaacaaataactgctgtatcagattgtgtcacaaggcagctgctttgacttattgctctgtagctggggtcagcctcttcagaacattgttaatgagagaaaggaagtgctttgggcagtgtctggcccatcaggccctctgtaaatgtttgctattaatgcaatgctgagatcccagtgaacagaatctggcttagaagaagtgggtatccacggtgcccgagcctaatcttacatcttggatttgtaagtggcatttattgagttgaacatgagcttgagcacgcggtcacacattctttcagcaaacactggttaggcaccagctgctacgtgcaagcactgccctacatgctgggacgcagctgtagtaggaatgaaataacgccagcattcctgcatgcgggcagtgcgggccctgtacagaaaggtacacgagataggcatcctcacatccattgtcctgggaggaaactgaggctttgagaaacggagaacttgccgggccatttgactctacgtcatcccctcccccatcaatgccctgaacagcctcctgtacacccttaaggaacttactttgtaatgattattaagaactcagcgagaccccgagcatcacctcggcatatcgcatcctttctctagagaacccctaatgttggaagggatcagagcgcacctcctccgctcctgggagcacccccttcctaataataccttggggatgggtcggaaggaaaggaaaggagacgcgagaggtgtagtcgatgtgcctgcgaagcccaggctcctctggagatccttccgtccgtccctacaggagaaggctggcccgggctgctccactccccggagctgcagactgagtcgccaggtttctgtgccttcaaagccctgcgcgacggccacaccaaacacccaaaccttgggcagggaccaaacggtcacttccccgccctccgggctcaatatgcaaatccgagcaccaggaagtagctgggacctctcggccgagcccagagacagccagttcctctcccgccgcgccgggccgcgctgccgctcgctccccggccgtggcgcctccgggccagacgcgctgcagcctccagcccgcggcaagcggggcggccgcgccacccccggccccgcgccagcagcccctcgccgcgcgtccagcgttcccggccagcagcctccccatacgcaggtcctgctgggccgccccgtcgcgccccccactctgaactcaagtcaccgtggagctccgccgccccgaaactttcaccgcgagcgggtgagtcctctgcgcgagcccaggggtgggcgcgggcacgcgggcagtgggtgcaggggccgcggctgtgccaccagccggagtcccgggcgcagggtagactcggggccgggggcatcggcgcggcccgcggcggcttcctggccgcaccgcctctgggctccggcggcgaaggctcttagatgtcttcagccgacgggtgaccgggcccgggggagccagggcgcggggactgaggctccgcaggtgtccgccgcggagccgcgcaggggagcggtgggaggtgcgggcgcgggggcgggctcaccgcgtgtccttcccggtgagggcccgagggccggctgctgtccctgctccggccgcttctcgcacacagtggggaagccgctgcccttgcggagcgggcgcgcggcggggatactggagaggactcctcggattgtgcaatctgatctcccctctggaccctgggtctcctggcagtgggagatggggctcggccggcgccctctcgaggcccgcggacagttgccctccctggtggccccgggcaggagcgtgacgtcgaggggctgcagcggaggctggaactcaccctcccgctgcggcgcctctcggcctgccgaggagcagtccggtgcttttgccggctgagaggaagcgagagttattttaagaattcaggggttgcctttccttcgccttgggggaagggcgtaagagtcagttcccactttcctgcattctctgggcccatggtggcatcttttgcttgcggtgcattcgtaactttccaacagcctgcctgtcatgtggattagcggttgtgtttttgtatatccgagtgtgttaattatcccaaattcg

SEQ ID NO: 3473 - DNA, 6000 bp, Homo sapiens
gcaatatgtaactttgcctgaagcatggactgtagaaaggaaatgagaccaactaaaaaactatctgagctgtgaagacttcttcccagtgttctacaacccaaaagcagagcctcaaccatcaagaaacagccacttaactggattatttaaatgtatcccgattcatgcagttctataggatgtcatttaagtagcagcattctgaacactgagcatttacaataatgaggttaactgacaatctcttcccatacacggtcagctcatgccaattcctggttgaagaagcctttgtaagatgatagggaatgaagtggggagagcagaagaaggggtactggaagcctgagggttaataaagctcagtgaaagagcaatgccatggaagagttctataccaaggaaaactgtatcctgagtgtaagtacagcttttaagaaatagctctgtggcaaataaggaatgctgccagctaattcagtaatgagagaaaatgaagtacagaacaggatgaaggggataaacaacaaaggctactacaggccctgctcttgtcagcatggatgaggctttttaatacatcatcccaagtatttaaacttgctcttctaaattacaagacagggccaggcacggtggctcacacctgtaatcccagcattttgggaggccgaggcgggctcacctaaggtcaggagttcaagaccaccctggccaacatggtgaaacccatctctactaaaaatacaaaaattagccaggcatggtggcgggcgcctgtaatcacagctactagggaggctgaggcaggagaatcacttgaatccaggagatggaggtgcagtgaactgggatcacgccaaagcactccagcctgggtgacaagagcgaactctgtctcttcagtgggaggcagaataaaaaataaagagagcccttccaactaacttaagccaaatataccccagaaaggccaggcgcagtggctcacacctgtaatcccagcattttgtgaggacgagacgggcagatcacttggggtcaggagttcaagaccagcctggccaacatgatgaaaccccatttctacaggaaatacaaaaattagctgggtgtggtggcacatgcttgtaagtaatcccaactactcagaaggctgaggcagggaggattgcttgaacccaggaggcggagattgccgtgagctgagattgcaccactgcactccaggctgggcgacagagtgagccttcatctcagaaaagaagaacaaacaaaacaacaacaacaaaaatctcaaaaggtccaagtctttaaactgacaaaatttctaatccctccattggcagatttccataccattctctacacatgggtatctcccccgaaagggaacttattcaaaataaattttagaaatgataatggagtgaacttaaagtttcacaatttaagtatcaggaaaccagacagctgtaagaaatctttcagtatttctgactggaaaaaaaaaacccaacaacttcctcttccatgttcttctcttcattatcagccttaaaagatgggaggcaatgtatatctatactgttggcctagaacagtgccttgcacacagcaggtgctcaaaatgatcaggtgttttaatgtgcgtcctatgagccctgtctccttaatttatattttcacttaaatgatgctctcactgataaaacaaccaggaggttggcaaagtttacagggagacactcccagcacaggtcggggaaagtccttttgcaaagtattactcaggtacttctgtattaaccattaagcaactgattgcccccaagacagtcactagggctgctcggacagcagccagtataggtgtcatcttagcagttactggagaccaccctttcccacccccaagcaaaaagcagtgctaaaaagcacagaaattcatttctagaagacagcttgaagtgcccagcttgatggtgcatctgctatgtcctgagcagttagccacttagttcagacaattaccaagtgataaaagaaaattaactcatgatttcacttttaaaatgtttgttaaatgacctatttatttgcttttaagcacagatggtctgcaacttaatgatttttcaactttacgatggtgcaaaagcattaggcattcaataaaaactgtacttcaagtacccatacaaccatttcatttttcacttttaatacagtattcaataaattacatgagctattcaacactttattatcaaatgggctttgtgtcagatgattttgtccaacagtaggctaatgtgagtgtttcgaccatgtttaaggtaggttaggctaatctataatgtttagtaggttaagtgtattaaatgcatcttctactttcagtattttcaacttacgattgggtttattgggacacagcctcatcataagttgagaggcatttgtaattgagcacacactacaagtccaaaggtggacaagtagaaagagccaaaaaacatacctactactcctaatggtaccgcttaaccaagcctgtgaccttagacaaccccctgaatctttttctgtatctgtccctctccatcctataggagccacaagaggttcaaatgaaattagagttcaggaagacttcagagccctgaacaaatgaaaggtgctaacaccttcaccatcatcactaggaagagccagtaaaggtctgaggctatctctgctatcaatgtgacattgatcaatgtcctgactaatgattgtggtggcctttcaatgttaacactcatccatgcatcactgagatcatcagtaggagtgagcttataacaatgttccctgctgtgggcatgtatacatggtgtccttatttataaagttagtatgggtttgtacatgaataatatgatttaattttgttaagttacaactccacatagtcatgtgaaccaactggaatctcagatgtttttggtgatttatctaaaaacaaatattgcagatagaagtaaaaggctttcaaagtcattgaacagtgctggaccacttttctgctaaaagaaagctattggagggcaggggcgggattacaaagtttcgacctacctttgtaacaccaatgactctaaaataatgtaggtcttctggattgggccaactacctttgcaggaaacatcttaaccaccccacatcaggacctctcttccagtaataagtagagaagagcggtgctgagtggagactctcatttagttacccacactaaatgtgggtaactcagtgctgggtaactttacagtcaacaaagcctctcaaatccccgttttagaaaccacaacagaaagggccagtaggcttcaaacaccttagggaccagctctatttcttcatctccctatgtcctcagttttgcatagggcaagctcacaggaggccttcattccttcttccaagtaatctcgaactgagcacctactatgtaccaggcactggggctatcattttggacaagacagatgaagcagttttcatggagcttccactgtaatggttaatacagactatcaacctgcagacaaatcaatataactctggctgctgctataaaggaaatcttggctgaataaatggcccaagtggcttatcccaaatcacagcatattaaatgatggaagaggccaaaactcaaggttcctggctcctactttctctccccttacatctgctgccctctatccttcactcagcaaaagggccacacatttacatccaaagaggcccagtcaccaaagactctatgatccagtgaaatttattcaggcctcaaagcgcttacctgcttacctccaaatgagaatggagggactaactggatcccaccctttcccaacaaagcttactcttacagagaagggcttagtaaggcctgggttcttgcagtgcctattccccagggcatggctttaggtgttggctgtacagagaaaacatccctgtagcccaccagtttattggctagttctttagggaaagtcagactactgggccctgctttgggacagcaaatccctcatgtatttattaagcagatttactaataaggtcagatggctaaatctgacatggtagtcttagcttcaacatcaccaagctgcaaagaaccaagaagcctcatttatatgaatagaattcactgcaataaataacagtaacatcgtttatgaaatgcttggtacgtactaggggctttgtgtgtactaaacagcccctgaggtatatatgctctctcaaagatgaagaaactcaaacagggaatttcaataatcggtcccctaaatatacagccagaaaagtgcaaggcctagattctgagctggcgaagaagggcgaatttgggataattaacacactcggatatacaaaaacacaaccgctaatccacatgacaggcaggctgttggaaagttacgaatgcaccgcaagcaaaagatgccaccatgggcccagagaatgcaggaaagtgggaactgactcttacgcccttcccccaaggcgaaggaaaggcaacccctgaattcttaaaataactctcgcttcctctcagccggcaaaagcaccggactgctcctcggcaggccgagaggcgccgcagcgggagggtgagttccagcctccgctgcagcccctcgacgtcacgctcctgcccggggccaccagggagggcaactgtccgcgggcctcgagagggcgccggccgagccccatctcccactgccaggagacccagggtccagaggggagatcagattgcacaatccgaggagtcctctccagtatccccgccgcgcgcccgctccgcaagggcagcggcttccccactgtgtgcgagaagcggccggagcagggacagcagccggccctcgggccctcaccgggaaggacacgcggtgagcccgcccccgcgcccgcacctcccaccgctcccctgcgcggctccgcggcggacacctgcggagcctcagtccccgcgccctggctcccccgggcccggtcacccgtcggctgaagacatctaagagccttcgccgccggagcccagaggcggtgcggccaggaagccgccgcgggccgcgccgatgcccccggccccgagtctaccctgcgcccgggactccggctggtggcacagccgcggcccctgcacccactgcccgcgtgcccgcgcccacccctgggctcgcgcagaggactcacccgctcgcggtgaaagtttcggggcggcggagctccacggtgacttgagttcagagtggggggcgcgacggggcggcccagcaggacctgcgtatggggaggctgctggccgggaacgctggacgcgcggcgaggggctgctggcgcggggccgggggtggcgcggccgccccgcttgccgcgggctggaggctgcagcgcgtctggcccggaggcgccacggccggggagcgagcggcagcgcggcccggcgcggcgggagaggaactggctgtctctgggctcggccgagaggtcccagctacttcctggtgctcggatttgcatattgagcccggagggcggggaagtgaccgtttggtccctgcccaaggtttgggtgtttggtgtggccgtcgcgcagggctttgaaggcacagaaacctggcgactcagtctgcagctccggggagtggagcagcccgggccagccttctcctgtagggacggacggaaggatctccagaggagcctgggcttcgcaggcacatcgactacacctctcgcgtctcctttcctttccttccgacccatccccaaggtattattaggaagggggtgctcccaggagcggaggaggtgcgctctgatcccttccaacattaggggttctctagagaaaggatgcgatatgccgaggtgatgctcggggtctcgctgagttcttaataatcattacaaagtaa

SEQ ID NO: 3474 - DNA, 6000 bp, Homo sapiens
cagacgcctgtaatcccagctactggggaggctgaggcaggagaatcgcttgaacctaagaggtggaggttgcagtgaacccagatggcgccactgcactccagcctgggtgacaagagcaaaactccatctcaaaaaaaagaaacaaatgcttgcaattttagcatgatacataatttcactttgcaactaatttgaactatattatgatcagcaagcccctacgccaatcaggaggatgggaattagaagtaagcttgagtagttaattttttaaggtgataacttattaataattattttcatatcatgagaatttttcttccctacataaccttgtaatttcaaaagctcagaaaatgaactctcaggtaatagggactccattttatgttattagctcccaagtctctatcccagattactctctcctgagccagaaataaactttcaactacataccagacattcccccatgcccactctggcggtgcctactcatcattctaatttcagctgaaacatcacctagtgcctcccctcaaggatccatccacttaactattaaataaatctgacactcaatggtgtaccctggcatctaagacaaaggcaaagaccttcctaactaaaaagataatttaaaatgcaagtggggctgagagctgtggcttgtgcttgtaatctggcactttgggaggctgaagtgggaggatggcttaagcccaggagtttgagaccagcctgagcaacacagtgagagcccatctctacaaaaatttaaaaattagccaggcatggtggcatgtgcctgtgttcccagctacttggaagacttaggtgggaggattgcttaggcccaggagactgaagctgtagtgagtgagccgtgatagtgccactgcactcctgcctgggcaacagagatcatgtctcaatagatagataaataatataagtaaaataaaataaaatggaagtggtgggtatatacataagagtgaaaaataaaaaataaaatgtaagtgggactgggactgaagagaagggaaacagaatgagggaagagaggaggggaccagcataaaatgcaacagggagtggtaggatttgttaaactctcaaaagaatggataaaaaggagttggccaggtgacaaaaatttttgacataactttttttgatagggaagaacaagaaggagtgcttcagatattagcagaaataagaacacaaccaaacctgtgcctttgtttaccttgctgagcgttgagcagcagggagggttagtgataaggttaaaatggttggcagatgctagaatttcagaagaaaaattactatagattcgtattttttctctccatgcttgataattaactgcttattaaaaaccactttccactttacatctagatttaaatgacacattttactaaatgattcagaaacaagacaggaacaaggaaaaaatttaaagctacattttaactgcatttagtcttacagtaagaaaacagctcaatagtatcatcatgatcatgtaaaagtttttaaaacctcttctattaaagagggaattctgaaaaggaaaaatgtgcattgttcctttcctttgagaaatcaaagtactttcacatttatcctcattttatcccacatactgagagaaggttataggttacggaaacagggaaacagaaaaattaggtgatttccttcattctaagatgcatgtttttgaccctgactttttaaaaaatcaaagtggatctcacattactgattttaaagtcatcttttctaggggagggccacactgagtgtatcttacaactatgggtacactctgcattaaagaaatatggtaaaggattttgcccaaattagtaagcaagaaggtggcagaactgggcaacaacaacaacaacaacgacaccacttctgttaagttattaatatatacaaacaggaatatagtagcctgtttggctcctctcttattagttaaatatacagggcctaccttctactacgctcttcctgaaagaaatacagagccatacaaaacatcttttctgacttcaagaagtatataataggtacctacataatagaggtgcctatacaagtatctatacaacagaaaagtctgggatcaatatcagaagaatgacacaaagtgagaaacataaattcagaaacggagtagtcactttcagccaggatactgtgaaaatcttcacacaataagagcttaatatatgttgactgtgaaggcattacggaaaactcagataagactttgaaggactgatggatcttccacagggagagattgtgccggaaagcactctaagaatagagactagcagtgcccaggaaaaaaacaccaaaatcagtcactgggactcaatggcagaagcaaggtggggaatagcgggaaagaaggcgagaaatgtagataggggctaaaatatagagttcactgaaggtcaaactaaaaattgtgagcaaacaggagtagccttttgacattcatgcttcaggatgactaaactgacagtaaactacactggctgaactggagtagggagaagtactgctgcagactataacagtgtcaagaattctgttcctgaactaggtcgtatcagcagcaatgacaagaaagaagtgtcttccctttgaattgcgtggggactgcttttggataagagcaaattccaagagaacagagcattaacttgttaggatttgtagccccactactccatgcacaatactttatttatccacagtacagcctcaaataaaaaactgaaaaaaggcaaccagcaaagtctgatttgaattttcaccactaatgagatagccaaatgccacagtcacaagcttctatttctcaaacccactcatattacagttaatgtggcattcctctccaatcttgtttttacagcctaaatgaaattttgccagaagactttagaattctccttcttccaaatacaccacagcatttttcttttaaagtttacaaatccaatttccacacacacacacacgcacgcacgcatcagaaaaccttgctgaaaactcatgtatctagcagaaattttttctttcaggcagcaataaatatgctttttttttttttttttttttttttttgcaaactccaccttccgggctcaagtgatcctcccgcctcagcctcccaagtggctgggattacaggcgcctgccacgacgcccggctaacttttgtacttttagtagagacggggtttcaccacgttggccaagcaggtctcgaactcctgatctcaggtgatcccccacctcggcctccgaaagtgctgggattacaggtgtgagccaccgcgtccggccaacatgcttctttagttacttatagaacctgccacatcattagttcaactacaaactgctgcttacatgaccgaagttgtgcaaagggtccaaagttgtgcaagagtaaccactgaaatcagactctggtatattaatagttgcaacatctaaacaatctttatgtttattattagattcaaagtaatgccaaatcacaggtattaaaaatatctacgaagagtctgtttacttttctgtgaaatatactaggacgtcattttaagtgagaataactgaatttctttcagctcatggacatgagctcacctgaaaattagcagttgtgacaccggacttgacatatctaaaacatcagcgtcctcaacatacacatacctaagtacacacccagagcactgaacgactttacattactatataaccccagttcacacgtggcaaaagtccacagaactcgttcatgctttcctaaccccgaaagggattctccagccgtcaagtaatgagatgtgacttattctgacgtgagagttgaaggtgttaaaaaagcatattttatatatatgtatatatataaaatacatattttaaaggtttccttttctctttctcggctgcctgtcccacgccaaaaagcgccttgcccaggccttgatagatgcgtgctggtggaggaaggttggactggtcaggaaccaagacccgggccccaacaccttctgctcccctaggtttccctccttctttttcctggggccgcgaagagacctaacgcaaggggccctgggggtggggtgcagtcatgtgagtcgggccccggcggccctgcgctaggcctcccctcctgtcacacacttcctgaatcgggcgtcgcaaacggctgccacggccctcagctgcaagactggccgggtcgggggccgcagaccgggcctggccaggccgcggccgctcgcagtgcccacgtcaccagctccagcactgcggaaatggagcggcgcggccaggagggaggcgccgggtggagtccgcgtccccgccaccgccagacgccgtttgcccctcagcccgggtccggaggccgccgacacccgcccggccgcgcccggggccctcacctgtgtcgccgattatgatgtacttgaagagataggcgtacgccatggccgcggccgctcagtgccagggcacacggctcctcctcccgctgctgctcctcctccgcgccccaaccccggtgccgctcagcctcgaaacgccaggcgccgcccgccgccgccgctgctgctgtcagccgccgggagtgaggggctgtgaggaagccggacgaactgacacccgcagagccgagggagacagcgcccgaccgagcccagccgaacaataacagccgccgcggcgcctccgccccgcctccgcgccgacccggaagttctgcggccgccggcgccgccggaggaaaggggaggagccccgcacgctggcccagccctgcacgctggccgcgccccgccagccggagccccgccccgccccgccccgcgcctgccttgcccggtccgccctgtcttccagcagggcggggcccggctccggttgttccgccacgtttgagcgggcgagcccggcggccgggagacgccagggaacggggctggtgggggtacaaaggctcggttccgtcgccttcagccctgcggtgggggcacggggcaagtgaggggacggcagaggcggcgttcggtgtgaggctgcgccctgggctcctgaaaatgtgtgtgaaaatgtgggaggcacacggcgagggggtgggggtggcctggtatttctgtgtttggcatcggggcttgaaggtgaaaatggcagtatttataaattggaaaccgtaaatctgggactgcaaagtaaatcatggtatgcacgcacagtggagtactacgttgctctcacctgaggtcaggagttcgagaccagcctggccaacatggcgaaaccgcgtctctactaaaaatacattagccgggcgtggtggtgctcgcctgtaatcccagctactcggagtctaaggcaggagaatcacttgaacctgggaggtggaggttgtagtgagccgagattgaaccacggcactccagactgggcgacagagcgggactccgtctcaaaataataatagtaaataaaaaataaataaagtctctgaacctgtcctggttctgagggctgctctaaaaaaaaaaaaaaaaaaaaagcctgacttaggttaagcaaaaccgagatgatctgtttatgtgtgtgtatataacatgcaccatatgtaatatatgaattgtatataatttttatgtgtaacaaatagtgggaaaacatttacatacccatatatgcataatcaatctgaaaggaaagctaactggtattaagagaaaggagggaatgggattggggggaaaatgtacttttccctgaatttttttgtgcagtttgacattttttgcagtgttcatgagttacctattaggaaatactgttaaaggaaaaaacaaaatgactgtgcattcaaagaatagttattgaatactatgtttcatgtaccgccag

SEQ ID NO: 3475 - DNA, 6000 bp, Homo sapiens
gtgctgggattacagacatgagccactgcgcccagcctcctgtggttttttgttttttgttattgccagttgtgagagttggggcagagggagagatatatttcctttgcagctacagttcttattaacaggttgaaggtggaggaggacaaggaggagaggaaaggaagggggaaacaacctcaatgtttaagaagtgtcctctgtgtgcttgacatagtgctagacattttatatatgtcatctcagaggggaaactaaggcttagagcatttagtaatctatcaaagatcactcaactgatgttgagtggtaaagtcaggatttgaatctaattatttcttcttccaaaactggtactgagttccggtgtggtggttcacacctgtaatcccagcactttgggaggccaaggcaggtggatcacttgaggccaggagtttgagaccagcctggtcaacatggcaaaaccccatctctactaaaaatacaaaaattagtcgggtatggtggtgtgcacctacagtcccagctacttgggaggctgaggcatgagaatcgcttgaactcaggaggtggagcttgcagtgagctgaaatcgcaccactgcactctagcctgggtgacagagagagactttttctaaaaaacaaacaaacaaacaaactggtactgagtttaagtatttgctggaaaattagttctgttatggtacttggagatggctgaaggaaggcatttcacaattgttcttaattatttctgggtcatggaagaatctctcccataaaagtgtacatgtgcaaatatatacatcattatcagttttgcataccatttcagaaggagtggctaaggaaccatggaaaccaaggcaaaaacctcaagattacagtattcccaaccaccttctcccattccactccaccctatccctcttcccaaagcctgagagtaattaaaaccaaagaaaatataaacatgaaagtttagttgggagaagcaaatgcaaacttctaatatagtattgtactcaaaaatgtcatggagaacttgattaggagacactgaagaatgtagtgctacaatcttgaaatttcacagttatgaccttcagaccatatatgatgtaaggctgagagacagagttaccacaacacatcctaagagactgaaaatagccgaaaatcaaactgaatggaaaattccaggaagtatactatatttaatggaagagaggtttatttctgttattttgtctgggggacttttcttgaaaaatatgtttggatttttatgggctaaagaaaatgttttaaatgaggtttatgtgatttttatttataccctgtattttttcgaagatttaagagattataggtttatagaaaatataacaaaatattatgaatcatacataggaaaaaaggtagagacataaaatagagccaggaacaaacttaattttaaaccatgaatttatatagtgattaggcctttagttcctcaagttaatttcttttttttctttttaattttctgtagagacaggatctcaccatgtaacccatgctgatcttcttgaactccaaggctcaagggatcctccagactttgcctcccaaagtgttggaattacatgcatgagccaccgcactcagcccctcaagtaatttccaaaaattatgcagtgcaaagagttttatgtattaggtatacatttttcataatttacacagtattttcacatacattatctcatttgatcctaaatggactttgttaagcagttattatccacatattccaaataaggaaactgaagcccagagaagaacttgaaaatcctgttcttcaaggtgggagaattgcttgaggccagtagttcaagaccagcctgagtaacagagggagtctccatctctccaaataataataataataataaatgatataggcgtggtggcatgtgcctgtgatcccagctactcaggaggctgaggcaggacaatcacctgagcccaggaagtcaagacagcagtaagccatgactgggtcactgtactccagcctagatgacagagcaagacctcctctcaatcaatcaatcaatcaatcagaacaatatgcatttgacatctatggcccctgcattttcacgagaggattactaccttctttacagatggctttagatttggaggctggctaagcataaaattaaaagacgtcatgcttggaatagcccttttaagaaacacttaactcctttacttaatagacaagtgcactgaaccactcataattttttaaattatttttattttaataattattttatttattaagacacaaggtctcaatctatagcccaagctggagtgcagtcgcaccatcctagctcactgctgcctcaaactgcttggctcaagctatcctccctcttcagcctcccaagtagctgggaccgcaggcacaagccatcgcaacctgtgctctgaagctttaagaggccaaacgattcctcacattcatccgatcagttacaggtagagccaagaccagaagccaggtatcctattttccttataacacattgcctctatagctttatatccatttctatgatttttgttacatacccagttctgaccatttcctgtcacaatttcctttgtctactaagtaaagttctaaatgcatggtgacataacatacaaggccctacataacctggcacaagagacctctccaggtactctcctcctctaacagtgtaggaatactcctgactcctaggatgccaggcatttgtataacatcctaatagagttgtgctggtgaaggaaggccacatccctctatcttgtgagagtgaagacttgagtttctccatcaccaaggaagacttgggtgaaggcactcaagtgggagggacaaaatgacatctgaaaactggaggccttgggcagggacctccccttcctcaaactaaaggtgaatgaaccaaattttgcgattccaggtagcttttcatgtcaaattttcatgtcaaattcttccgtgccatctctgaccctttagtaaaatcccctccaaatattccagaaaaaccttgtgagttcatatttggcaaggccatccaaagcatgttagcaacccagcatgatggtgtcagtactaattacataatgagaggccccaaagagaagagtattaggcaacaggaacgagggccactaaatcccaatcgcttttccccagcaatgattctccttcaatatgaggttatgggttatgaggatatgagttagtcaattagcttccttatgcaacttcaaattccctgaacagatccaggaattttgcacattctgttccttgtccataaactttggttcccctccccaaactgttgttctttcgacaaactctatacataattcatattcctggctcagaaatcataatctctaagtaacctttcctgacaccctattctccacctcctcttccataacctgtggtctttttgaacagagtggtgacattttgggctggatgactgaaaaagcaaagtagaaaaacagaacatagaacatacagggcctccagttgctgtgcctggcggtacatgaaacatagtattcaataactattctttgaatgcacagtcattttgttttttcctttaacagtatttcctaataggtaactcatgaacactgcaaaaaatgtcaaactgcacaaaaaaattcagggaaaagtacattttccccccaatcccattccctcctttctcttaataccagttagctttcctttcagattgattatgcatatatgggtatgtaaatgttttcccactatttgttacacataaaaattatatacaattcatatattacatatggtgcatgttatatacacacacataaacagatcatctcggttttgcttaacctaagtcaggctttttttttttttttttttttagagcagccctcagaaccaggacaggttcagagactttatttattttttatttactattattattttgagacggagtcccgctctgtcgcccagtctggagtgccgtggttcaatctcggctcactacaacctccacctcccaggttcaagtgattctcctgccttagactccgagtagctgggattacaggcgagcaccaccacgcccggctaatgtatttttagtagagacgcggtttcgccatgttggccaggctggtctcgaactcctgacctcaggtgagagcaacgtagtactccactgtgcgtgcataccatgatttactttgcagtcccagatttacggtttccaatttataaatactgccattttcaccttcaagccccgatgccaaacacagaaataccaggccacccccaccccctcgccgtgtgcctcccacattttcacacacattttcaggagcccagggcgcagcctcacaccgaacgccgcctctgccgtcccctcacttgccccgtgcccccaccgcagggctgaaggcgacggaaccgagcctttgtacccccaccagccccgttccctggcgtctcccggccgccgggctcgcccgctcaaacgtggcggaacaaccggagccgggccccgccctgctggaagacagggcggaccgggcaaggcaggcgcggggcggggcggggcggggctccggctggcggggcgcggccagcgtgcagggctgggccagcgtgcggggctcctcccctttcctccggcggcgccggcggccgcagaacttccgggtcggcgcggaggcggggcggaggcgccgcggcggctgttattgttcggctgggctcggtcgggcgctgtctccctcggctctgcgggtgtcagttcgtccggcttcctcacagcccctcactcccggcggctgacagcagcagcggcggcggcgggcggcgcctggcgtttcgaggctgagcggcaccggggttggggcgcggaggaggagcagcagcgggaggaggagccgtgtgccctggcactgagcggccgcggccatggcgtacgcctatctcttcaagtacatcataatcggcgacacaggtgagggccccgggcgcggccgggcgggtgtcggcggcctccggacccgggctgaggggcaaacggcgtctggcggtggcggggacgcggactccacccggcgcctccctcctggccgcgccgctccatttccgcagtgctggagctggtgacgtgggcactgcgagcggccgcggcctggccaggcccggtctgcggcccccgacccggccagtcttgcagctgagggccgtggcagccgtttgcgacgcccgattcaggaagtgtgtgacaggaggggaggcctagcgcagggccgccggggcccgactcacatgactgcaccccacccccagggccccttgcgttaggtctcttcgcggccccaggaaaaagaaggagggaaacctaggggagcagaaggtgttggggcccgggtcttggttcctgaccagtccaaccttcctccaccagcacgcatctatcaaggcctgggcaaggcgctttttggcgtgggacaggcagccgagaaagagaaaaggaaacctttaaaatatgtattttatatatatacatatatataaaatatgcttttttaacaccttcaactctcacgtcagaataagtcacatctcattacttgacggctggagaatccctttcggggttaggaaagcatgaacgagttctgtggacttttgccacgtgtgaactggggttatatagtaatgtaaagtcgttcagtgctctgggtgtgtacttaggtatgtgtatgttgaggacgctgatgttttagatatgtcaagtccggtgtcacaactgctaattttcaggtgagctcatgtccatgagctgaaagaaattcagttattctcacttaaaatgacgtcctagtatatttcacagaaaagtaa

SEQ ID NO: 3476 - DNA, 6000 bp, Homo sapiens
tcaggaggccctgggcagagcagcgacaggctgaggagggactctcaggaggccctgggcttgttttttggttgtcgtttttaaatgcaaatgagcccctgagtggaggaggggcgcccgggcagcaggagcagggtgggggtggaggcagccccagcagccccctagcccagaagatgcagagcctctgtctgcgggacggagaaggttctgtctcctgtgatcagctccgcacagcaaacgcgggcactgggggtgtgggggttctcccacctaaatacatgccccaaaaatgacactccagaccccacgcgaggctctacgcagttccgagcacttactcttggggcagcagggtgaggttcaggaggtccacgcatggcctggcagggttagctcagccctcctgcgcagctgtgctctggcaggggtggaggagccgtgccaggagggtcccctcaggcccctccctgcagtaaaatgcatgagctcagggccccagcagacagcagactgcgtggggtcccatggtggacagcagagggagctgtggggttcagctggtgagcaccccaacctccctgtccctcctcgtaccaggtttccctccacccagagccctctgggggcccacgatgacttcctgggccctacaccagcccccatgggctctgatcttgacccagccaccctgggcccttccaggcccctcccaggcagtggctctgggctccctgctccccggcctgaagggcttgcccctccatctgctcaggtgtctgtgaggccccccaaccccaccaacccagaactccccacctagccaagcttccgccttctcacaaacgagtgtgggggacaggccctgaggtagcctcatgacgcacccccctgcccagcgttcccacccttgggtgacccctttcctccgacagactcctggagggtggccagatgccgcagctgtgatcacggcaccttacgccccgctgagagcctctccctgctggcccgaggcgtcagggcctgtgctggggctgcacctggtgaggagctcagggtggcctccagcctccagccagcaagaagccggtcctcagttgtacagatttaaggaaataattctgccaacagcctgacgatgcctggtggcacagcccttctcgtcccacgttgaaactgtagcccggccacctcctagactgcaccctggacgggggctcctgctaagccctgcctggacacctggctcacagaagccacaagaccataaatgtgtgttaagttactaaacgtgtggtaattggtgagacagcaatagaaggcaaatccactatcattttactcattattattatttgagacagaatcactctgttggccaggctgaagtgcactggcgtgatctcggctcactgcaacctccgcctcccgggttcaagcgattctcctgcctcagcctcccaagtagctgggaccacaggtgtgcaccaccacgcccggctaatttttgtattttttaagtagagacgggctcttgccaggttggccaggctggtctcaaaatcctgaccttgtgatctgcccacctcggcctcccaaagtgctgggattacaggcatgagccactgtgtccggcctcattttacttactatttttatggctgattttctgttctctgaggcccactcggcagactgtattttccaaaaacactacaacagtgcatctcagcccacaggccccttcctcacatgacctacacaggcagtgtccgtacccctgcccaggggggtggccgacctctacacacgaggaccaccagcatggtgcagtgttctgaggcacatgcacccctccaccttcctcggatgcacacactgggaaccagcagccatgctgtgaggaagcccaaccagctgcagggagcagccctgtggaggtgtcacaagcagctgttttggccgacagctctcaccatctgccaggcctgggtgtgaagaccctgcccagtggcaccatccatcagctgtcccgttaccccaacccccaagtcctcccagctgtcaggaccagaggcaagctgtgcccctattcccaggacacatctcccccttacagagcccatggatgaaataatacttgtgccatcaagctccagggggcttctcaacaagggaccctggccacctccctgatgggatgtgccccctaggcaggctggctgacgtactctaggtgctcaagagaagcctgttgggtgcattgagttacccagccacacagactgcccctgcagaattctgtgaggaccaaatgctgaaagtttggagggtgtgagaagcccttgggttgggaggctggcgggaagggaaagcgcttctgggagcccagggaacagcggagcacaggcgaattctagggagccatcctggcttggtggtgacagcaccaagcctcaaggagggcttggcaggcttggggcggatgggttggggtcaatctttgaggccaccccagcctccaccaccttctcccacctctcagagcaagatgaggcacttaggcttcctgtgggtggtggcgggatgggggtgccactgagtccaagcatggctgtggggtcagcgtccctcagcctgaggtcacagctgtggccccggggaaggttcccactgcaacagcctggggtcaggcgtctccttcattcccacgggtgtgctggagtcctcctgggctggtgaccaaacaccctctcctggtctccttggcctggcaggagccacagtgcgatgggcgggagggggggacagtggggacacagcccggtgcaaacactctctctttcctcctcaaccccctttccagtgtgccccagggcctccagggtgtggtacccagaaatgctgctagacccttggaggggccgtgggagggccctgtagccccaaggcctctcctggggctgcaggtgcagacaacctggactaccaccagctccactgcgcggcggcatcctcccttcccgggcctccctctcaacacggggtgccataaaggaaaccccacacccctggctggctgaccactcgtgtggtctcaagtccaggtacccagtgtggggacttggctctgctgcatgcccacttcatttcttcatctgtagaagggtggggagctcagagccccctctgggacaggatcgggggagaggggtccctgcaggtgggtcctcatgctgtccttggccctcccttgcggggaggaaggcctggtcttcccaaatcagcagtcccagctctgcccagaggagtgggagggcccagggaagggccagggacaccccgagacaccttaggaagcagatgttcagtcctcacttcatgacagtcttcttgttacaaaacaatagatctttgtagagggaaggaggtgagagcctggtactaaatctgcggcgccgtgaccaggcctccctgtggcctctgcgcaactccttccaggctttttttctctacacaggtggttacattttagactttttttttttttttttaaattgctgaagtcatagaacagcaatggagagaatttcgagaagaaacaataggcccacttcgggtcaccggccttgtaactcctggcgcaaccctcccatcacccggctcgctggtgtcggggacctggggtcacaggcccaccgcccatcgtcacctcctttgccccgtgaaccggagccgtctcctcccagcaggtgcacggccgccaggtggaaatccccgccttcccgtctcagttaccccccgtcccactccaggcccagcaaggcgcctccagccctgcggggggcgaaagtgggcagtggtggccgcttgggcggggattcctaacgccctgaggggctgccagcccgtgggccccgcccccgccgctcgcacccacccgcgttgtcccgcgacccccacagtcctgcgctctccgcggccccccacaagccggccctccgtccccggcccctcgcgccgccccgcacgcgtgtgtccccctccgcccgccccgtgcttcccggtgcccggaggtgccggcaactttgttgaccaaattcctgaacgcgtctgagccgcgggctaaaaataaccggctcagcgcgccgcgctctgccgggccgcgcggtgtcacccgtgtccagaggcccggaggtcccgctgccgccgccgccgccgctagcggagctgcccccggcccccaggcccggccgcaaacccagggggccgagggggcgtcccgccgcgtggcccgaggcggacgaggccccgagggggtccccgggcgcggtccccgtctgcttccccggactctccggccgccgggtgtgggagctgaggcccctggagacggcagttgtcccctgaggcggcgcgccctctgcccgtgcagtgccccgtgatggccaccagagggccctgccctctcctctagccggcggcccgtccctacctcttcccacagctgtttcccgcaggagattgacagctgggctctgagttgccatggggataagcaaatgagggcggcggggctggggctccgattggcccgggggcgcgcgcccctcccggggaggcgggcccaggcacccggctctataaaggggcgcgcgcggcttcgcgtttagccgtgggaggcggggccggccggcggcgcgggtggggcgcgggagcggtcccggagcagcccgaggcggcggccgcggggaggaggcggcgacgcgggcccggggtcgcccgagacacctggccagcggtgcccctagcgcgccgccccggagttgaccacgtgaaacttttccctgcgcccctcggcgccgccgccccgcgccggcgcccccccgcccccgccgggaccgccgcccgcggggagcaggggggggagaggcctgcagctccccccccactcccacgccgcccgtcggggcgcggccgggcgcgggccccgggcgatggccgcggagctggcgatgggcgccgagctgcccagcagcccgctggccatcgagtacgtcaacgacttcgacctgatgaagttcgaggtgaagaaggagcctcccgaggccgagcgcttctgccaccgcctgccgccaggctcgctgtcctcgacgccgctcagcacgccctgctcctccgtgccctcctcgcccagcttctgcgcgcccagcccgggcaccggcggcggcggcggcgcggggggcggcggcggctcgtctcaggccgggggcgcccccgggccgccgagcgggggccccggcgccgtcgggggcacctcggggaagccggcgctggaggatctgtactggatgagcggctaccagcatcacctcaaccccgaggcgctcaacctgacgcccgaggacgcggtggaggcgctcatcggcagcggccaccacggcgcgcaccacggcgcgcaccacccggcggccgccgcagcctacgaggctttccgcggcccgggcttcgcgggcggcggcggagcggacgacatgggcgccggccaccaccacggcgcgcaccacgccgcccaccatcaccacgccgcccaccaccaccaccaccaccaccaccaccatggcggcgcgggacacggcggtggcgcgggccaccacgtgcgcctggaggagcgcttctccgacgaccagctggtgtccatgtcggtgcgcgagctgaaccggcagctccgcggcttcagcaaggaggaggtcatccggctcaagcagaagcggcgcacgctcaagaaccgcggctacgcgcagtcctgccgcttcaagcgggtgcagcagcggcacattctggagagcgagaagtgccaactccagagccaggtggagcagctgaagctggaggtggggcgcctggccaaagagcgggacctgtacaaggagaaatacgagaagctggcgggccggggcggccccgggagcgcgggcggggccggtttcccgcggg

SEQ ID NO: 3477 - DNA, 6000 bp, Homo sapiens
ggggtgccggctgggcagtcggatgctggcctggatgcccctgggggctgggaggtgaccgaagggagagtgtctgggggtccgccgggagcgccagcaccttcctgggctaggcctgtgcccatcctgcctctgggctgagggcgttgaccccgcctcacttagcgcccagcagcacgggagctccgggagggcagggagcttgggcgtgcagtggctgagcgagtgccctgactggcgcctggcatacagcaggcgcaccatccgtgcttgagtaggggcacaaggaaggggcggagcagcgacaggctgaggagggactctcaggaggccctgggcagagcagcgacaggctgaggagggactctcaggaggccctgggcttgttttttggttgtcgtttttaaatgcaaatgagcccctgagtggaggaggggcgcccgggcagcaggagcagggtgggggtggaggcagccccagcagccccctagcccagaagatgcagagcctctgtctgcgggacggagaaggttctgtctcctgtgatcagctccgcacagcaaacgcgggcactgggggtgtgggggttctcccacctaaatacatgccccaaaaatgacactccagaccccacgcgaggctctacgcagttccgagcacttactcttggggcagcagggtgaggttcaggaggtccacgcatggcctggcagggttagctcagccctcctgcgcagctgtgctctggcaggggtggaggagccgtgccaggagggtcccctcaggcccctccctgcagtaaaatgcatgagctcagggccccagcagacagcagactgcgtggggtcccatggtggacagcagagggagctgtggggttcagctggtgagcaccccaacctccctgtccctcctcgtaccaggtttccctccacccagagccctctgggggcccacgatgacttcctgggccctacaccagcccccatgggctctgatcttgacccagccaccctgggcccttccaggcccctcccaggcagtggctctgggctccctgctccccggcctgaagggcttgcccctccatctgctcaggtgtctgtgaggccccccaaccccaccaacccagaactccccacctagccaagcttccgccttctcacaaacgagtgtgggggacaggccctgaggtagcctcatgacgcacccccctgcccagcgttcccacccttgggtgacccctttcctccgacagactcctggagggtggccagatgccgcagctgtgatcacggcaccttacgccccgctgagagcctctccctgctggcccgaggcgtcagggcctgtgctggggctgcacctggtgaggagctcagggtggcctccagcctccagccagcaagaagccggtcctcagttgtacagatttaaggaaataattctgccaacagcctgacgatgcctggtggcacagcccttctcgtcccacgttgaaactgtagcccggccacctcctagactgcaccctggacgggggctcctgctaagccctgcctggacacctggctcacagaagccacaagaccataaatgtgtgttaagttactaaacgtgtggtaattggtgagacagcaatagaaggcaaatccactatcattttactcattattattatttgagacagaatcactctgttggccaggctgaagtgcactggcgtgatctcggctcactgcaacctccgcctcccgggttcaagcgattctcctgcctcagcctcccaagtagctgggaccacaggtgtgcaccaccacgcccggctaatttttgtattttttaagtagagacgggctcttgccaggttggccaggctggtctcaaaatcctgaccttgtgatctgcccacctcggcctcccaaagtgctgggattacaggcatgagccactgtgtccggcctcattttacttactatttttatggctgattttctgttctctgaggcccactcggcagactgtattttccaaaaacactacaacagtgcatctcagcccacaggccccttcctcacatgacctacacaggcagtgtccgtacccctgcccaggggggtggccgacctctacacacgaggaccaccagcatggtgcagtgttctgaggcacatgcacccctccaccttcctcggatgcacacactgggaaccagcagccatgctgtgaggaagcccaaccagctgcagggagcagccctgtggaggtgtcacaagcagctgttttggccgacagctctcaccatctgccaggcctgggtgtgaagaccctgcccagtggcaccatccatcagctgtcccgttaccccaacccccaagtcctcccagctgtcaggaccagaggcaagctgtgcccctattcccaggacacatctcccccttacagagcccatggatgaaataatacttgtgccatcaagctccagggggcttctcaacaagggaccctggccacctccctgatgggatgtgccccctaggcaggctggctgacgtactctaggtgctcaagagaagcctgttgggtgcattgagttacccagccacacagactgcccctgcagaattctgtgaggaccaaatgctgaaagtttggagggtgtgagaagcccttgggttgggaggctggcgggaagggaaagcgcttctgggagcccagggaacagcggagcacaggcgaattctagggagccatcctggcttggtggtgacagcaccaagcctcaaggagggcttggcaggcttggggcggatgggttggggtcaatctttgaggccaccccagcctccaccaccttctcccacctctcagagcaagatgaggcacttaggcttcctgtgggtggtggcgggatgggggtgccactgagtccaagcatggctgtggggtcagcgtccctcagcctgaggtcacagctgtggccccggggaaggttcccactgcaacagcctggggtcaggcgtctccttcattcccacgggtgtgctggagtcctcctgggctggtgaccaaacaccctctcctggtctccttggcctggcaggagccacagtgcgatgggcgggagggggggacagtggggacacagcccggtgcaaacactctctctttcctcctcaaccccctttccagtgtgccccagggcctccagggtgtggtacccagaaatgctgctagacccttggaggggccgtgggagggccctgtagccccaaggcctctcctggggctgcaggtgcagacaacctggactaccaccagctccactgcgcggcggcatcctcccttcccgggcctccctctcaacacggggtgccataaaggaaaccccacacccctggctggctgaccactcgtgtggtctcaagtccaggtacccagtgtggggacttggctctgctgcatgcccacttcatttcttcatctgtagaagggtggggagctcagagccccctctgggacaggatcgggggagaggggtccctgcaggtgggtcctcatgctgtccttggccctcccttgcggggaggaaggcctggtcttcccaaatcagcagtcccagctctgcccagaggagtgggagggcccagggaagggccagggacaccccgagacaccttaggaagcagatgttcagtcctcacttcatgacagtcttcttgttacaaaacaatagatctttgtagagggaaggaggtgagagcctggtactaaatctgcggcgccgtgaccaggcctccctgtggcctctgcgcaactccttccaggctttttttctctacacaggtggttacattttagactttttttttttttttttaaattgctgaagtcatagaacagcaatggagagaatttcgagaagaaacaataggcccacttcgggtcaccggccttgtaactcctggcgcaaccctcccatcacccggctcgctggtgtcggggacctggggtcacaggcccaccgcccatcgtcacctcctttgccccgtgaaccggagccgtctcctcccagcaggtgcacggccgccaggtggaaatccccgccttcccgtctcagttaccccccgtcccactccaggcccagcaaggcgcctccagccctgcggggggcgaaagtgggcagtggtggccgcttgggcggggattcctaacgccctgaggggctgccagcccgtgggccccgcccccgccgctcgcacccacccgcgttgtcccgcgacccccacagtcctgcgctctccgcggccccccacaagccggccctccgtccccggcccctcgcgccgccccgcacgcgtgtgtccccctccgcccgccccgtgcttcccggtgcccggaggtgccggcaactttgttgaccaaattcctgaacgcgtctgagccgcgggctaaaaataaccggctcagcgcgccgcgctctgccgggccgcgcggtgtcacccgtgtccagaggcccggaggtcccgctgccgccgccgccgccgctagcggagctgcccccggcccccaggcccggccgcaaacccagggggccgagggggcgtcccgccgcgtggcccgaggcggacgaggccccgagggggtccccgggcgcggtccccgtctgcttccccggactctccggccgccgggtgtgggagctgaggcccctggagacggcagttgtcccctgaggcggcgcgccctctgcccgtgcagtgccccgtgatggccaccagagggccctgccctctcctctagccggcggcccgtccctacctcttcccacagctgtttcccgcaggagattgacagctgggctctgagttgccatggggataagcaaatgagggcggcggggctggggctccgattggcccgggggcgcgcgcccctcccggggaggcgggcccaggcacccggctctataaaggggcgcgcgcggcttcgcgtttagccgtgggaggcggggccggccggcggcgcgggtggggcgcgggagcggtcccggagcagcccgaggcggcggccgcggggaggaggcggcgacgcgggcccggggtcgcccgagacacctggccagcggtgcccctagcgcgccgccccggagttgaccacgtgaaacttttccctgcgcccctcggcgccgccgccccgcgccggcgcccccccgcccccgccgggaccgccgcccgcggggagcaggggggggagaggcctgcagctccccccccactcccacgccgcccgtcggggcgcggccgggcgcgggccccgggcgatggccgcggagctggcgatgggcgccgagctgcccagcagcccgctggccatcgagtacgtcaacgacttcgacctgatgaagttcgaggtgaagaaggagcctcccgaggccgagcgcttctgccaccgcctgccgccaggctcgctgtcctcgacgccgctcagcacgccctgctcctccgtgccctcctcgcccagcttctgcgcgcccagcccgggcaccggcggcggcggcggcgcggggggcggcggcggctcgtctcaggccgggggcgcccccgggccgccgagcgggggccccggcgccgtcgggggcacctcggggaagccggcgctggaggatctgtactggatgagcggctaccagcatcacctcaaccccgaggcgctcaacctgacgcccgaggacgcggtggaggcgctcatcggcagcggccaccacggcgcgcaccacggcgcgcaccacccggcggccgccgcagcctacgaggctttccgcggcccgggcttcgcgggcggcggcggagcggacgacatgggcgccggccaccaccacggcgcgcaccacgccgcccaccatcaccacgccgcccaccaccaccaccaccaccaccaccaccatggcggcgcgggacacggcggtggcgcgggccaccacgtgcgcctggaggagcg

SEQ ID NO: 3478 - DNA, 6000 bp, Homo sapiens
atgacaaaattgtagagatggggagtagattagtgattgccagggattagcaaagggggtggagggtggtagtggtgtgatgacatagagggcagcacagaagcagtttctttgtagtgatagaacagttctgtatcctgatagtgatgatggagatctgcacctgagataaaattacatagaaccacccatgcacgaacgcacatgtgcctgagaatgtgtaaaaactgaaatctgaataagggctgcagattgtaccaatgtcagtttcctggttttgagagtgtattatagttacataacatcctaccattagggaagtttggtgaagggtacacaggacctcactgttattttttgtaagtctctgtgactctatagctatttcaagtaaaatattaaaaacaaaactcattgtagagggcccgtggaggagtataataaaattaaccttaccgccctgtgtccttcctgcctcatttatgtgctttgaaatagaaccagatcaggagaaaaaaaatttcttgagtttttcttaagtgctccattttctatagaattgcccttgatttctgtgtagaagttgtgttctctaccattttgttgtgggcatgttttgtatctctgtaattagcatgccactttatgtcttccctttcagggagataagaagccttatttggagattcatagggaatcaggagcagggcagtatttcttgttttgagtacctatcttgtaatggccctatgctagtcattgtggctttaccagacttgattttttataaattgatttcctttttaagtatcattattttattcttttaaaatactaatggatagtatatgaaagtttcttccccttcacagtgggcactttgtccacactgtttaaagaatgctcacttttgttgtactacttaactgtccttgcatgaggtttacattcagataaaaatgattatttggtttatggacacacatttttgaaagtggaagagccaggagctgtaattttacatgaaaaaaagttaatggctgaagtgccttttagttgaaaccatccattcctaaagtgttcatatctagattaccatatctgtttggaagggggaaaaagggaaggattttaccagttggtgtcaaataagctcataaatgtacaaagacagtttatccataacccccctccccaccccaggtaaaggccaaagccctttgctgtttcccaagggtacatatttttttcttacaactttgcagagctgcctttaactttggcctaacttcacttgtatgaatggttccaaggtggatataggttggtgggtgatattttgccttggatttgaacttactgcatacgtgcccccaaacccctactcccagctgccccttgtgtatacacatagacatctcttatcagttactgttaactataaactcaatcctttctagggatagtgtggggtaggatagtatttgtctcaagatctcagtttgggtttctacctgagatctaatgtcctcctaccactgactcactgagtgaccttcagcaagtccttttgccttatttgagcttcagtttccttactgatagcctaaaggagttgaacctagtggctttcaaactttttgaggatctcagaactgtttgaaaacctgatggaagccatgaatcttctcctctagggaatgcccacaattacagtatttacagtatttcaaggtatttacagatcccctggagcttgtccatgaacccttagtaatcttactcagctatatcgtaatctttggactagaccaggtgtcaccaaagtatgtatggcctgtgggccacattcagcccacagcctgtttttgactggcttgtgaactaaggatgatttttaaatttttaaagggttgttaaaaacaacaacaaaaaaacccagcaacgaacatgtaacagagaccatatgaggcccacaaacctgaagaatatagtatttattctttacagaaagtttgtcaacccctgacctagatcattgctaaggtcctttgtagtaatgacttcatgaatctgtagccctgtctagtggataattgctagtacttggttttctttttaggcccagtcattttttctatcaagatttttggatttcagaatttgcatggttggtttaaattactgcttttgttacaaggtgtctttcttttgatcacaaattaggtaataattctcataggaaataaagcagatttggaggcacagagagatgttacatatgaagaagccaaacagtttgctgaagaaaatggtgagtttctttaagacttaatggtcacaattgggagaatttttaaggaaaggtgggcttgacagttttgttggtttttttttgcattttttttttaaatgcagactcagaaatctcaagaatgaggaagtaacaatgtgtttctatttctgtgtgatttatgttggagcagtacagttatttagtgacaaatataaagatgctctccacctcaaacttacatactttttcataaaatactatgggaggagtactaaaaactgatgggaaactttttcagatgttactaaagaagtgcacttgtgagttagtttgaagtgtcctaattatagtctgaattttatttttaggcttattgttcctcgaagcgagtgcaaaaacgtaagtgtgaccaaaatacagatatttcaattatattcaagtttctcaaagtagaaccgtatatatgaaaagtatataatgtatatacacatataaagtactatctataaatgtgtaatgcttactgcaggaagaacagcaaacatctctttgcttccttttttacatttcaaaataatatgaatttttgttacttaaaagattgtaccttgattatgcctgttggtaacccaggttaataaatgaaactttgtttacatttcaaaagtgtttgacttttcccaaatgacagtgtttgacttttcacaagtgaggttgagtttggcatctcagacaagcttggtcaatctgttcttcctgtaatacttctgatcacattaaaaagcatgatttaagggaatagtgtctactcagaagcatagtgaacattttctaattgttcttccatgtctgctattgaactgtggtacacccatcattgttcttcatttattaggccaaaaatttcttgtggtgaggagaggctaacctgttttcgtttagtctcagctgtgctattagtccaaagaaaactgaatggaggtgttaacgtggctaagcatgattatgtcaccattacccgattaaaaacagctcagttcatgcttggctgagcagaccatattattcttggaatttttttcagcatgttcagagagatttcatttctgtttggagtatcctctctgttatcacagaaatgacctatctgaattgtcatggtgtgtattaacatacagtattttaatgattgcatataacacatgtagttgtccaaatagggtttgtagaaagggctttcagtacacgtatgtatgtatgctttccatagaaagtagttttccggccgggtgtggtggctcatacctgtaatcccagcactttgggaagccaaggcaggcggatcacgaggtcaggagatcgagaccaccctggccaacatggtgaaaccctgtctttactaaaaatacaaaaattagctgggcgtggtggtgtgctcctgtagtcccagctactcgggaggctgaagcaggagaatcgcttgaacttgggaggtggaggttgcagtgagctgagatcgggccactgcactccagcctggtgacagagtgagtctctgtctcaaaaaaaaaaaaaaaaaaaaaaggaaaatagttttccatgttctcttagctcagtgttctggtaatctcttattagatgacagtggttaagttggagacatcatggcagttaactaaagattagcaaaaggtcagtgtcttgtcttttgtagaaaactgtggttctccaataaagttatcaattgcctcttaggggagagaatgtagaagatgccttccttgaggctgccaagaaaatctatcagaacattcaggatggaagcttggatctgaatgctgctgagtctggtgtacaacacaaaccttcagccccgcagggaggccggctaaccagtgaaccccaaccccagagagaaggctgtggctgctagtgacctctttgctgtggcccctcatttgacctttcacctctgtctgttggaagcagtactttttactgcctcattgtcttctgtacatcttactgggtttaattaaaaaaaaagaaaaaactctgttgtaaaaacagtttaacacaatactaaactgctaaacaactagatgtaatcaggttatcaaaggcaagtagagtaataaatctctcctgcatggtaaatctagactttttttcccccttgtcctcgtgataagtatgtcaccaatatatgatttaaaccgagcactgatgctggacttcatgatttttaccctccctttggcaaggctttgtctcactgtacggtttaatttggtgatatcttaagcctttcttcccatccttaactgttcaagtatgtctgttgtaaccaataagtttattgctgtgaaattacttctgatggtagagaaggggttctataactgcttttgttttgttttggataaatttcctgttgtgtgggtggcatttttcttaacgagatttgcttctgtcttagcctcacacagggaaaatatccatttatcttctctctcgtgcttaattaatagctttatctttttttataccattttatccttttctctttaacagaaagtaaatatgtataaaatttgaaggaatcgaactaacaatacattctgtgtatattattttaatgaagaaaataaattgattactggcattggaacagtataaaataccagtttgtacagtatgacctatatgtgaccatgttactcccttccatttcacacaaagaaatagacacaactgcagttcacaagtagtactggctccaccccttggtgctggcagtgtttggggacattatgctggaaagagctcctagcatcagaggattaacactagcagattctgttccatctttgcactgttgcttacctgctgattttcttaactgttcttgtgcaatcgacaatgtgctaacctgcttttctctttttgtaaacgtttttgcattacaggctgcattcttgccttactgtatagaaaaagaaaaaaggctgggtttactattgcacattttaagcttttatacctttatcttcttggaatggtcagattctgaactggacagtcagaaccacaggtctgctgttaagggattttaaattgtgcatttttaaccctacagtgaaataacttaagatatccctgtgttcacagtgtgaggggctgttttatgtcatgttggcataaattgttttgtaaaagggaaagtgtttctaaaggtgtttcagcgcttgtgctgatacaaagtaagttattactttgcaccaggtggtttggccactgaattaatactgtatagcaagagaaacaatcttatttttttggacaacatgttttattaagttcttcatttctgttgattttttttattgcatttatgattcagtggctgggaattgagaatttatttgaaatagaataggtaacacctcagcgtactatagaaaatgcactcagctcaactgctgtgtttaaaatacacattttaaatccctctttacagacactaacataaaagtacatctttctgggttgtaaacatgtggtagtaccagagtattgtatagtcaatgttaaataaaagccaaaactggaatgtgcagaaagtaggctttggttaatttgtggattcatttttatttttgtctttgtttaactttttaaaaaataagatttctggagtagat

SEQ ID NO: 3479 - DNA, 6000 bp, Homo sapiens
atttagctataaactacccttgctgccaagagaaatatttactaaatgcatagtaaacactaacaactgtgccatgtattcaactgactccttaaaaatattaatatgcttaatattgctttaataaaggatttctcaacctcatctcctgaacatgaaacataccagttttcaccactggggaaacataccatttcaccactgtgaaaatataccatttttcaccaccattttcaccactgttaaggtgaaaaatgtattttaaaatggggtacgccatcttgtaaaattctgcatatttcttttactcaacaaaatgatagacacattttcatgtcagtacatttagatctaagtggttactgaacaaatattaaacactaattattgttgtgacaaaaatagaatgcatggtttctatttactgaatcagacacctttctaagattacacagacatataaacgactagttttgaaacatgtaggtacagatgtgaaggtatacactttcatacatactgcttgtggaaatgtgccaacattttggaaagtaatcagtatgtttaaaaatcttaacaataatccaaatcatcctttggcccagaaagtatcctacatatacaaaagcttcagcccataaggctacaggtattagtgcatttaatgcaccatttttacagcaaaaaactggaaataatcagcaaagaaatgactgaataaagtacatctataatacaaaataatatccatgtagtttagaaaccattttgattgatatgcattaacctggaaatacatccatgattttgttaagtgaaaaaacacatgttgcagagttttatgcaacagcataccccactttcaaacacacacacacacacacacacactcaaccctatattcatataatatggaatacacaccaaattgtgaaaaatacatggacaggagaaacagggaatagagaaattattaacttttctttatatatccctgcactgacttactataatgaattaaaaataaaattttctctaccgataaatatttcaaaagcccttttctattttaatacaggttaaagaatacccaaacaaaaacaaacaaatctcccactcataatattcccaacattatttccgcatttactgataataagaggaatatcttatgaagccaataatacgattgggttcaaaatagaaaaaccaacactcaatagtagagggcatatttttgggagttttttaatagcttaactacttactgtttgctctgattttaaaaactgttatacagctattctactccttagaacctatgatgttactgtataatttttacatagctgatccaagacataacaagggaaaagcaacccattaaatattccaggtaatttaattcttatccttgttatttccactgataagttttttgtttgttttttaacatgcacgacgttttgttaaaaataccagagctgagatggactgcttctgtagttccaacataaacatatctgttaagtatctactaagcacaaagcattgtgccaggctttagcaagacagcaatgatcaaaaaagacaacactgtctctgccttcgtggaactcaacaacagaagcatgctgacttgctttagaggcccactaaaatggaccactactacctgatttgtcagtcaggcggataaaacttctgtagttaatctaataatctaatctaataaaaatgagtggtcaatttcctcaacagtagtacaagtagcccacccacttaaaaaaaaaaccttacttttgacaatatacttaatgtcacttttatataaataatgtgaatcatttttaaaagctggattgcttaatgtggcaaaagtaactttgatggtcttctatatacaggaaataaagtattctaatactggacctctgtttacagaaagaaagcacttaacaaccaaaaagccaaaaaaaacccctgcacttactgctcaagttaaaaggattaatagtgaaaattttactaccgatattgtgtctgagatttgcttcaaaataatttggcaaggaggaggcaagtgtatattgatgaagcaagactgatcactgttgacactggctgataggtatatgaatgctcagtatgctacctgattttgtatatatttaaaattgtctagaataagaagctttttaaaagtcaagtacagtacctctaatacttctatttgtcaaactgttgtctttagccatgcctggcattttttaccacataaaaatgtttcaagcctcttttaaaaaacatgaaacatctctcaatagcccaagttttcacattttatttaccttaatcaagtttcctccactagcacaatatcttactgtgactatgcaaagatatttgatattgataaaaatgaacactccaaattctgttgcaaagttgaagtatgcaacaatgataaagtttaactgtaatacaaaaaaagcaacaactttttaagatgtagctttaatttcaagggattttttaatagctattataatctaaggttttacgtctttacaataactgccatttattgagggcctaacacatgccagctactttataaacagtctctaatcctaaaaactcatttttcagataaggaaaccgaagtgatctacccgtggtcatactactactaaatggagagctagaattaaggcccaggtttaactctacatgtagctctccaaagctatactcctctctcattcattcaaaagatattaaacacccactatgtgcctggcactgttacaggcactgatttactatatgccaagcaatgtgctaagggctttctttaaaccccatttaatcctagcaacaactctaagatgcaggtccaattatcccctttatagataaggacactgagtccgaaaggttaagtaacttgcttaagatcacttaactaggaagtggcagtactggagggagaacccttgacagtatgactccaaaactcttaaccacgacatacctctaggcatgatcaaataaaactgcctaaacagaacttggaagaaaaaatttggaaaggcttgggggaataaaggggtaggagctggattactgcaaggtcaagtttgtcttcaacaatcaaatctaaataaaaggcagttgttcctctacaatatttaccttagaaaaataaaagaattttttaaaggcagttgggatagtaacgaaatgagcagtaaactttgcaagagttcaaatctgggctctgacacttgctgtggggtcaccaggaaggcacctgtcctcttggaacccgtttcttcttcatatatgaaactgaaatcctggcatctctcctttggggtttgtaagcatgaggatttgccagtgtagtggttgactttatggactttaggtcataaaagggtaatcagctgtcatccaatgcgaacacagtaaaaaaggaataaagttgtaactacattataaatggtcatgtctgtaaccctagcctaatttttgaatgtagtacagaaaccaccagccacagtgtgagccgaagccagtttgtaatgtaccatcaacagccagacacacatcacaactttaggcctcagtttcctcacttatgaagtggagacaacttatctccgagggctacgcggggcaagataaataggtacaaaaatacataaatatgtacctggcccacagttaaaacgcttaaaacactccagctctgtcgtcttctcttagattctagaaatgccacaactttctcttatttctagatgctctgtaggttcagggccgtagaggctgtccacgggcctcacaggaacgcaccaaaaccaggacatcgcaagcacaggcgcacagacccagaccccggccccggcccggcccggctgcagggccgggctccccacatcgacaaggacaccggagctgccccgagacgccaagagggctgcgaagagctgcctttgtactcagagccagacgcggcctacgggacgggaccgccacgtctggggcttgcgggctgcagggcggcgcggcacgcgtgggtacaccctgcgggggcgggctgcggccgcggggaacagcggcgagaggggggcccgcgggagatgcggtcctgcccagccgcgccgagaaggcggggaaggcgaggccggaacacacccttccctgcacgcctcggagcgccccgccggttggggagggcaggaggctcaggccggagccgcgcaggggacacctccgcccccgcccaggagtcctgtcaggccggcgccgcggcgctcaccgccgacccacgggctagccacggcctgacggggcctggccccggggcgccgcccgcctgcggcccagtctccaccgtccccacacacgcccctctgaagaacccggcgcgaggaggtatcagccggccggacactacggaaggcccgggttacctggggggttgctggtggctgggcagctttccgggcgggaggggggcgtcaggaccaggaacaggagtgcggacgcagcgggagagggggcgggggcggtcgaccgaggcgccggcaggtacactggcaggccgagaggtgcagacgcgccggcagcagtagcggcagtagcagtggcagcggtgactgctcctgtgctccctcagtatcttcctcgggctggtccaagatggcggcgctccctgcacagggtttcctgtcaccctcgcaatgggccggaccacaaaagaagggggagaagatgcgcgcgcagctggcggagcccggaagagggtggctgaggccagcccgctagccacgccccttcctcagccctcacctctggacttgtcgcgccgccgctgaggcccgccccacgggcgctcgcgcccggagggaaggtggaaagcgcgtatgcgcaagcgcagtcgcgtgtcctcgcctcttgggggagctactgcgcaggtctgcgtggaacctggtggggtgcgcctgcgtcttggagaactagggttgtcgctcgtggagacttttgaacaatttttaaagccaacatttaccacttattggacgcttaccgtatactggccaccatgctaagcatgcatttactgcattcattcaacgtgtatttatgggggcatttactgtatataccgctgtatgcttcgtatataccggtcctgtccaacaaacgtcggaggcacgcatccccattgtatccatggagaaactgaggctcaggttggtcaactctcttgtccaagatcacgcagctaggaagtgaccctgcatttcatctctattttgacttcactttggggttgcctttgacagggtgagagaaatgtgatatttttcacaatttgtctaccacctgccatcttccaacttgctctgccataatcactgccccagaaggtttcgtgcttttcgggtgcagggacacgttttgactttcttggaccctgagcacttttgccttgtggcttgtacattacacacacacatatatttcacacacatgtaagttaaatatatgtataaatatttaacatattttacaactgcattgatataaacatgacgtatcaatattatataacaaaatattttctctgacctgaaagttcatttttttcttctgactttaaaagaatgtaagccggccgggcgcggtggctcacgcctgtaatcccagcactttgggaggccacgacgggcggatcacgaggtcaggagatcgagaccatcttggctaacacggtgaaaccccgtctctactaaaaatacaaaaaaattagccgggcgtggtggcgggcgcctgtagtcccagctactcgggaggctgaggcaagagaacggcgtgaacccgggaggcggagcttgcagtgagccgagatcgcgccactgcgctccagcctgggcaacagagcgagactgtctcaaaaaaaaaaaaaaaaggaacgtaagcaag

SEQ ID NO: 3480 - DNA, 6000 bp, Homo sapiens
ccagcctgggtgacagagccagacttagtctcgaaacaaacaaacaaacaaacaaagttcaaagatgcattcttttttttttttcatgtaacatggcctcttaagtcgaaaccaccaacttctggtcgtcagccaaaggaatgcttcaatgacaataaatgagtctccggtagggtgctttcctgggaaaatttcaagcttgctttttacctcattaatgtcatgccctcataagctgtgacacgagaggatattttttgggagggggtggtataaggtgtatggggagatgaaagggcactatttcaatggacacacaatttcttttacaattgaatacagaatgtacttattgttacatttatgcatcacctttttttagtgtgataagttgaatctaatcctttttcatacccagagacgaatgagtctcatgcccttgattttgatttctttgtcaacctactaaattttgaagtatattaattgctgtttctgttttggttaatgtcgacagccataccaccatgaccgcacctgatctcaactttttttggttaaactagcttttttgaccatttctttttaattaaattatgtatcactggaagttaatcaactacattaaaatatattcgttttttaaattaggtagaacacacatgtggtaataaaatttagagtacaaattgtattagttcttctaaatcttcaatactgcttcaggaattgggacaccagtattttaaagtctgagtgtggctcggtggcaactccaaaaccactaaacaaaaaagattcaagcataggggtaggggggaatctccaattcaagataagcctatgaaccaaaattcacaagcataagaggaaaatgaacaaataaaattaagcctataatgaggagatgaattaattttgtttaaataaacacaacagagagatctgaaaatgactttaattgtttaggctctgggaagagatgaaggataaaataacatctactttttacaaaacaatttataaaaatacaagcagaaatgaagccagagcaggtgacaaacaacctgcacacctggaggattccaggcatcttcccaggaacaggtgacccctcacacatttgctatatcttccagcagatggttagcttgtgtcattatgccacactcctctctgatggacacttctttgccgtactccaatctgggactagaaagtcaaggtgggaggaagggataaggggaagcaacttcagcccctcttcatctaaggttctccccacaccatccaaagcccctccagtgctgtctctctccatctgtgttctcctttgtgcaggaagcaatagggcagagcagatcagtgctgcccaaacagatagatatccagggagttgtcagtcccatcttcctgcaggcacacccaatcctcactggtgattcttttggagcccctctcctttggttctagatgaggacacagtctccatgaggggacagaaagaaggcgtctctttccatgacattacaatttccctaaaggctgacttccctcccatgtctccaatctttctttccacagattactggtgatggtgtgtctgtggggatggggttggaaatggggaataggtgagggagtagtggagtggaggtagaagttggtcaagagctgacttcttcaacaactgctcttcaaattccctgctagaaggtagctggccccagccactggcagttttttcagtgtagaatgtgagctccttgtgggctttttattttcaagtttgggcttcagcaacagatccaggacaataggaagagatgtatacatggaataaacccctctcaatgtctagttacataaacatacatgtcttctttgccctcctcttatagtttaacaaatgttggcatactatttagttttctgcaccttgcttttttccctccaagtatttcctagacattgttccatatcaggacatatacatgggcctcattctttttgatggctgcatagtatttcacaatatagatgtactataatttactattacagctttctagtgatagacatttagtttgtctctagttttttgttattacaaacagtgctgcagtgactattccatgtatacatctcttcttatagaaacaactttttaaaaaagttaagtagaaaccccaatggatgtttggcacccaatggacagtccctcttaattatgctgcaactggtcacatacactctcctcactttgaaaattctgggacttattaaaagaattgaccattcctactgttttttaattgcattccttagcatgtgataggcactctgcatccacaagagtgtttctgttcaaagctgcatcaaagtgtaatgtctttcacataggaaagcagcagttagggacctgcatttaagctggctattgtgaaacaagagcaaataagggaggaaatggaatagggcttagtacagccctgaggtcacatgttgccagatttaagtcccacccaattttcacctaaacgactttagatctgtatgacactcagttttttcattcataaaatggggtaaatatagtactgacttcatgcggatgtggtaaggattaaatgagaaaatatgcatgattcttaggacagttgctggtacatagtaagtgttgaataaacatcagctatacataaagatctcccttcaggtgataatggctataaggaaacttactagccaggtctaagttcatacctgggcaattaatgatcattggttcacagttttctcctttacttggcacaggcaaatttcttagtttcaaaaatgttaaagtgtgacaacaaactatacttattaaagaatgtggaaatagaagcctagacctctagggttgcaaaaggatttcaatatcaccttagattagattatcatgtaataatcatttccatttcttattatataccagatattttgcatatactatcccatttaattttcacaaagacctatttgagagagatattactattttcatattgcagaaaagactgacaatctcagaaatcaagtgacatgcacaactgcataccattagattatagagcaggaattcgaacccaggtctctgaaaatatgagatgtacaaactggcacacacttttacagtgaaatctcacttgttcatggcagaaccagttcataaaaggtcctgaacgctaagagaaagattgatttaatttgggggtggggaactaaggcagggccaccttatccattaggcacagtacagtatgcacagggcttagggcctccaatacttttaggggccaacaaaaatgaatatttatttattttagagacagggtctccccatgttgcccaggctggagtgcagtggctgttcacaggtatgatcccattactgatcagcacgggagttttgacctgctccatctccgacctgggccggttcatccctccttaggcaacctgggtggtccctccctcctgaacttaagtgcagacactctatctagtgacacagtgcactacagcccagaactcctgggctcaagcgatcctctctcctcagcctccccagtagctaggattacaggcgcagactaccagccctccttgcttacgttccttttttttttttttttgagacagtctcgctctgttgcccaggctggagcgcagtggcgcgatctcggctcactgcaagctccgcctcccgggttcacgccgttctcttgcctcagcctcccgagtagctgggactacaggcgcccgccaccacgcccggctaatttttttgtatttttagtagagacggggtttcaccgtgttagccaagatggtctcgatctcctgacctcgtgatccgcccgtcgtggcctcccaaagtgctgggattacaggcgtgagccaccgcgcccggccggcttacattcttttaaagtcagaagaaaaaaatgaactttcaggtcagagaaaatattttgttatataatattgatacgtcatgtttatatcaatgcagttgtaaaatatgttaaatatttatacatatatttaacttacatgtgtgtgaaatatatgtgtgtgtgtaatgtacaagccacaaggcaaaagtgctcagggtccaagaaagtcaaaacgtgtccctgcacccgaaaagcacgaaaccttctggggcagtgattatggcagagcaagttggaagatggcaggtggtagacaaattgtgaaaaatatcacatttctctcaccctgtcaaaggcaaccccaaagtgaagtcaaaatagagatgaaatgcagggtcacttcctagctgcgtgatcttggacaagagagttgaccaacctgagcctcagtttctccatggatacaatggggatgcgtgcctccgacgtttgttggacaggaccggtatatacgaagcatacagcggtatatacagtaaatgcccccataaatacacgttgaatgaatgcagtaaatgcatgcttagcatggtggccagtatacggtaagcgtccaataagtggtaaatgttggctttaaaaattgttcaaaagtctccacgagcgacaaccctagttctccaagacgcaggcgcaccccaccaggttccacgcagacctgcgcagtagctcccccaagaggcgaggacacgcgactgcgcttgcgcatacgcgctttccaccttccctccgggcgcgagcgcccgtggggcgggcctcagcggcggcgcgacaagtccagaggtgagggctgaggaaggggcgtggctagcgggctggcctcagccaccctcttccgggctccgccagctgcgcgcgcatcttctcccccttcttttgtggtccggcccattgcgagggtgacaggaaaccctgtgcagggagcgccgccatcttggaccagcccgaggaagatactgagggagcacaggagcagtcaccgctgccactgctactgccgctactgctgccggcgcgtctgcacctctcggcctgccagtgtacctgccggcgcctcggtcgaccgcccccgccccctctcccgctgcgtccgcactcctgttcctggtcctgacgcccccctcccgcccggaaagctgcccagccaccagcaaccccccaggtaacccgggccttccgtagtgtccggccggctgatacctcctcgcgccgggttcttcagaggggcgtgtgtggggacggtggagactgggccgcaggcgggcggcgccccggggccaggccccgtcaggccgtggctagcccgtgggtcggcggtgagcgccgcggcgccggcctgacaggactcctgggcgggggcggaggtgtcccctgcgcggctccggcctgagcctcctgccctccccaaccggcggggcgctccgaggcgtgcagggaagggtgtgttccggcctcgccttccccgccttctcggcgcggctgggcaggaccgcatctcccgcgggcccccctctcgccgctgttccccgcggccgcagcccgcccccgcagggtgtacccacgcgtgccgcgccgccctgcagcccgcaagccccagacgtggcggtcccgtcccgtaggccgcgtctggctctgagtacaaaggcagctcttcgcagccctcttggcgtctcggggcagctccggtgtccttgtcgatgtggggagcccggccctgcagccgggccgggccggggccggggtctgggtctgtgcgcctgtgcttgcgatgtcctggttttggtgcgttcctgtgaggcccgtggacagcctctacggccctgaacctacagagcatctagaaataagagaaagttgtggcatttctagaatctaagagaagacgacagagctggagtgttttaagcgttttaactgtgggccaggtacatatttatgtatttttgtacctatttatcttgccccgcgtagccctcggagataagttgtctccact

SEQ ID NO: 3481 - DNA, 6000 bp, Homo sapiens
aaggaggagtgggggctgggtctgcgatgtccatccaccactgggatgaagtggagggcatagaggctgcagcctgttccatcctcagcccccgcagggcaccagaggggctccaggcaggaggctgtgtgttgtggttctgaagccagggatgtcttcagggacatttggtctcatttgacccttccggaacctattaccctgccccctgggctgggcacgctcctggactgtcctgggctctcgggagaaccagctttcaggagagccagaccggtcctctcacccagccacctctgatggtgccagcggaggcccagccaaggacctggagagcagggagcacgggagcatgtggggtaacgcaggggtggccgcagtggagatgcccctttcctggggtgctgggggctgcagtccgggcaggaggggtgcagagctgggaggagcattggttttgagcagcaccaggaccatgtgggacagaggcctatgacagagggactgcggcccagctccatgggagcctggcatccaccactgcctgccgctgcctgtgtccaccctagaccctgctcagagccttgacgtccactccgctgccacctatgatcattgtgggccctcttgcccgcataggagtccaggctctggagtaaaaggcagagcacccatctaagcagcatgcctgggccaggcaccaagggatggaaccagcaagggccctgggcctagacctcaagcagcagggcccgcttccccctgtctggtggaccccaggggttcaccagagggaggaatccagtgggtgtacttgggggagggttgggaggggattttcacaggcgggcagggtccctgtcaggtagaaggggcaggaggacctcaaggccccttggcgagccttggcatgagagaggatgggggttggaaaactgtttctggaaacaggagactcagcccaagaccctggcagggcaagctcctcacactaaacagcccctcccgttcctgggtgtttgagagtcgggtgcccagcccggacctgccgtgaccaaggagagctgatctgcagacaccaagacttcctgcatctgtgactgggcctcctgggggcatcttgactgtagactccttccaggtgtggtacctggctcctagaagcctagccagtcacctcctgcccagccttcaaacacgtcagagggttaaccattcatggccacgctgaacactactcacaagatccggaaaccagaatggggagtcagactggattcctgagatgtaaggaccgccaggaagcatcttgctgccttcatgcatggatgagacctgggcctctccatgggaggacaggctgctgcagtctccagggagcacccactcttgggcgtggagagtggggacagctgcctgccagagactgcgaggggaggtcgggagcagccggagtacttctggtctctggccacggaaaacccaggcagggacctgtctttaagctcctgctgttgctaagccgacctgcacagcaggacttgggagcccagcccagctcctctcaggaggggcttggccccattgcttctgtgtggctcgttgagggctcactagaggcacctgcagctccttgagagaaagcaggcccagtccaggggccacggtggaaaccataggaggggccgaggggaggcaggtgggtgcctgtcatgccatgcacagtgccacacgtgtcgtggagattgtcccaagagccccggggtccagggactcccccaagcgctgagcagtgtgaacacttgtgtaccctcattggctagggcccaatgaatggggcccagtggaaagggggtgggtgaggaatggggccccagtgtcctgttgaccctggagcccttggagtcggtcaagtctgaatgggaggtctacaccacagtccttacccaaccttcctagtgctgagtcctgaagcttgtgtggtgggtctatgtagagctgaccccctccctgcagccctgctagactctgaagagagccaaggccagtgggtaggagacaggtctggagctggtgcagagagaggaatgagccctgcatgggtttgatcagaaactcagccttgtgtagggacaccctggggcccggtgctgtccatgcatgacctcacagaagcgcagagctgccctctctacagaggagcgcctgatttgtgtgggagctaggcagagatctgcatgcatgcggaggagccaggcttcaagccagcctgggggacccccaagcgggactatctccccttctgcacctggctctggtgtcttcccactgtggacccagtgccctgctcacccaccacattcataccctggagtcctgggtcctcagagatccatgacactgcctcacccccaacttcaaattctctggggctccacccgctggtctcagctacgtgaagcagtcaccgtagactagagggtactttttagatttaggtcactctatcatccaggctggagtgcagtggcacaatcatagctcactgcagcctcggcttcctgggcccaagtgatcctcccacctcagcctccccgaggatacgtggttttttttttcttttttcagacagggtctcactctgtctcccaggctggagtgcagtggtgcgatcttggctcactgcagcctccgcctcccgggttcaagccattctcctgcctcagcctcctgagtagttgggatcataggcatgcatcaccccacctggctaatttttgtatttttagtagagacggggttttgccatattggccaggctagtccctgaggatacattttttttttccccgagatggagtctccctctgtcgcccaggctggagtgcaatggcgcaaccttggctcactgcaacctccgcctcccaggttcaagcaattcttctgcctcagcttcccgagtagttgggattacaggcatgcgccaccatgcccaactaatctttgtatttttactagagacagggtttcaccatgttggtcaggctggtcttgaacacctgacctcaggttatccacccgcctcagtctcccaaagtgctggagttacaggcgagagccactgcgcccagccgaggatacctttttttttttttttttaagacagaatatcgctctgttccaggctaaagtgcaaaggcgtgatctcggctcactgcaacctccgcctcccaggttcaagctgttcttctgcctcagcctcccgagtagctgggattacaggcgcctgccaccatgccctgctaatttttgtatttttagtagagatggggtttcaccgtgttggccagactggtctcgaactcctgacctcgtgatccacccgcctcagcctcccaaatgctgggattacagatgtgagccaccgcacccggcctggcagaggatactttttaaggtcaaagacagtagcagaggtggagttcctgggaacagggtcatgaggggaagagggggttcggagggagcgagtagccactggctacctctagaaagggaaggctttggtgcaacatcgttcccctgcagttttactcatctttgcttcctgccctttcatcatccaatcgggcaggcaggacagggcctgagggggcagggatccagtgggtgcctctctagactaaccccagctcaggactcccagagccccttccctgaggccctgctgcccccaagcccagattggggatcccaagcagcacgtaggcagagccagtgaggtccccgttagtcccattgaaagctctaaaaccagcgaaccctcagtccagcctcaggtcaggcatccaggacggcctcagccctcatgggtgagccatctctgcggacactgcacagggcctacgatccatcgctgcctcccgaggatgccagccaggcccccgttgagataactgcttccctgctggacaaggctgggaccagccatctcggtgacagttccagaacccctggcctgggctgctgggttcaatggaaaaaggctgtgactagagtcagggggatggtctcagtgacctcaaggataaggccagatccttgcactgtcagtgacccaaagcaacaggtgtccagagcagcagtgtggcgccttcacgcccccacacatcagcccaactcacccaggacagggactgtagcctcagcactcaacccatgtgccctgtgtggggtctcttcccactgcactcacaggagaggaagggtccctcaggggtccactggggtcccctcctgcaaatggggcaaggagaggggcaaggggctgtctcaaggcccctggagcacatgcaggtcctggactggggctcctgggagggccatgattctgggctccatgagttcagagcagacgccttgtttttccttgtccactgtcagccaccccacccttccctgacccttaaaagaaccaggaaacagcacatgatctgttggaaggaggcattcattctttcctttctgtgggtgtggggaggggaccacagggcacataccccaccctgggatccagctgagcaggggggtcagagatgacagctcttccggctcacaggccaccggcccacatacagggcaatcagaagaaagaaacagcacaaggaaggcacagagggagtcgttgtccctgccagaggtgcagcactccgggaatgtccctcactctccccgtccctctgtcttgcccaatcctgaccaggtgcagaaatcttgccaagtgtttccgcaggagttgctggcaattgcctcacattcctggccttggcaaagaatgaatcaacccaccctagatcccataaatagggccacccaggtgagcctctcactcgccacctcctcttccacccctgccaggcccagcagccaccacagcgcctgcttcctcggccctgaaatcatgcccctaggtctcctgtggctgggcctagccctgttgggggctctgcatgcccaggcccaggactccacctcagacctgatcccagccccacctctgagcaaggtccctctgcagcagaacttccaggacaaccaagtaaggggccaagaggggcacctgcaggcagggcctggggaagagtgggagcagaggggaggagaggtgaagagactcaggaagagcgttgggcaggactctaggagtccagggtccaggtttcagctcactctgtgccaccagggtcccctggtggaaaccatgccccttccccccatccccaccccctctcagcctgaacagactcccccaggtccacatcccctctcccataacccccattgtccaaagaaggtgggagcacttttagtccccctgcacagatgaggaaactgaggctcaggaaggcccaccagccacatgcctcctccagtgaggaggtcaccctcctccctgccagactcagaaccgcctcttcccccaggactcccttctggactgatggcctcctgctcctgccccttcaccagtgcaggcccagcctgggccctgctgcccagctagaggggctcatggttccaagctgggcggcccagaggtgccacagggacagagctggaggggtggctcctagggccattcctgggttgtgcctcttatcagtcccttgcagttccaggggaagtggtatgtggtaggcctggcagggaatgcaattctcagagaagacaaagacccgcaaaagatgtatgccaccatctatgagctgaaagaagacaagagctacaatgtcacctccgtcctgtttaggtgagggccgacatctcctgggggtgtgagagtcagactgacgtcacaggcaagggatggccaaagctgagggatcctgtcgttcacctcgctgttctgcccggaattcatctgtgttcatccttcctctgttccttagagcaacgtttatagcacatttccatgcagacacacagacagtggtggggatg

SEQ ID NO: 3482 - DNA, 6000 bp, Homo sapiens
gccatgctgcccacataagggcagccacctgtctacccactccttcctccaaaggtctcctctctgggaccccgaggatccaagagtcaccaggtttccaggacctccaggatgcgtggatatacttccagctgcccttccctcctttaagtcagtgtcggacccttcggctcccgtttcttagccttgctactcctgcctgtactaagggctcatttcggtaccacagtggcggggcgggggggtgtgcctgtgggctccaggcactgcgctctgttgctgactccgtatccacgtgttctagacatcagatcattttccctccctcgtcacctccccacccacatcagtgcattaagggaaagcagaaagttctaggcgtggaaagccctttcagcagcagcctctatttaggggtgcacacaggtgtcaataaggcctggcgtttggacttggctttttcctgtgttgctgggtgaccttgggcagctcaccaatgtgcttggtgagctggtttttatgttggaccactcagtacaataacagtgactagaagtgatggagtggcttgtggtttaaaggaggtgaccatcacctaggccggccactcagactcaagacacaggattggttactgcaactatgaatgctgttaaaatataacggcttgaaagtgacaatgtgcgacgtaactgcaatcttacgtagtgtaacgttaattcacatagcgatagtgttaaaatatgccacaagtcaataaataagattatattgccttttattttttattttttttgagatggggtctcactttgtcacccaggctggagtgcagtggtacgatctcgactcgatgcaacctctgcctcctgggctcaagtgatcctcccacctcagcctcccaagtagctgggactataggcgtgcaccaccatgccaggctaatttttgtattttggtggagacagcgtttcaccttgttgcctaggctggtcttgaactcctggactcaagggatccacccgcctcagcctcccaaagtgctgggattacaggcatgagccaccacgtccagcctccgattacattgccttttataagctgtctttggatcagtttaacgcatctgtggcttccatgaaagaatatattggatttaaaaattacaattacagtgatttgctagattttacctccagtgaggcgggagccccgaggtgcccatccgcgcagaagagagacagggtgtcactgagggccgactgggtccttgctggctgcggaggacaggtggaagggtggaagcgggtccaaggagagggggcctggggcttggtgggggtgggccaggagggggcagatgctggacagaacaggaaggtggactgctgggactcgctgcccacatggctgccggggagaatgagacaggagctcaggaggacactgcggtttattgttcaatgcctgagatcatggcaacactgaattcctttgtggtttaaaaatcaactcctgtccaagctctccatcctccatgtcaccctctcctagtcactgcaaccatgatcaatctctggttgtcaactcaaacctcagtttctcctggaagccttgctgctccctccccgggtgtgccctgcctggtgccctcctccgccacctgtgaccctcccccatacttggggtatgtggcccatgctggcacttcttgctccctggtttaatctgctcggctggactggcagctgctcactggcagtctgtgtaagcagctccccctggagcccatctccaaggtgtgatgggactctcgccccctggaggtgtgcagcaggcagtcctggcagacagccctgagtccaagtggacatggatggtggtaggattttcccaaacagcgtcctctctattagtcttcctggcatgtgccttgagtccacagtctcaacctgttcatcattacactcacactaaaggttacaaagggagctcctgccccattttctttaccttttattttatttttgagacagggacccactgtgttgcccaggctggtcttgaactcctggactcaagccatctgcctgcctgagcctcccaaagtgctgggactacaggcttgagctgctgtacctggccccaccaaacttttgttctttgattcacatccatcctgccctcagagcctccaaggattctgggaggtgcacagggccggtgaatgtcctatgccgatcaggacctgggaaccagggaggcctgagtggctcagggccactgtggtgaagtctgtgtctcctgagttgggtcttctcaacggtcaaccccagattttctgtgcagcccctcctgggtgcagccaggtgccccgtggtgacagcaccaccagggggcagcaggtacccatggcattgttggcgggcggctgcctgggtcccagacctggctggtcctcttggccagagcaggcaggcccaggaccgtgaggacagaggcccccttcttgctgagggagccacctggggaaagagacatttagtgcatcaatgcgccggcggtccaggcgaggggttgggagagtgggtagctcttcttcctctctgagccctttctgtcccagcacagtgggaagcctctgggtaatttatccgtccattcttcacaagcaagtccagtgggagccgggtctccccgctctagagaggaggggatgaggctttgcaggaggagggatcagtgtaggctctcagatggggctggagggccccgctcaggtttcactcctggctttctgatttcttagggagatgctgatgggtccacctgctgccccatcttgcttcggtgaggaaagctctcccccttgccctaaaggtgcccactgctgcttcctcggggaagggcaagagacctgagcccccgcctcaccagccacctggcctgagtttactgctgcaggggccagctccttcctgacctctctctacgggccagaccctaagctgggaccccctgcttccacctcagtggagaaggggtgagtctgactctgcagagaccaatttccaggacaggacccccatcggaggccctgggcccaggggaccctctctgcgctcgcatccccgttccggcccctgcgcagggaagccacggggtaaggggtccgggggctgcagtgcagccccagctcatacaggcccaggattccaccggagtccagggtgggagccctcagacaccgcaccccagcctccgggctgagccagtctcagagaagggcttggacttgcctggtgtcccccagtgaatcagcagtgaaaacccgcggttcccggcagctgagccaggatccatataatttcagttgcagaatctgtttgtccttgaagcccctcctaccgtcacacgttgccagctggacagaccgcgcccccaccacccagggtgtggcctagaagggagatcagggcggatcagcaccggggccggctgcgaccctgggccggagagcaccttcctgccctcactcatgtcacgcattccgccctggacgccaggaactgcccgctgggcagctgcgagtggccaggactttggccaaaagctggggaatcctggcctttatgcagggtcgggggtcttcctatgggcccccggccagggcggaggacaggaagagggctctgggagtcctgggcccgtgtgccttcagcctcagcctcgggtatcccgccggggcggcttgatgggccaagggggctcagtaagcttcggcccagcccggtgccctctcccgagtctgtcgttaccgaacggccatgcgagggcgcccagcgcgacagggaccacctcctgacctccacggaggaccaaaggcacccggggggacgcccggccatcactccacgggcgaggtcgctcccccagggagaagggctccccaaagtccgagcgcccttggagaaagtcggccggacctgggcctgcgccgcaacccccgcccaccgcaactttcgcgggcggtagcggggcaggaagtgggggggcgggggcggcgcttgggacacggggaggtgccaggcgagtgctccggccccgcccctgccccgcccggccgtggccgcgccccctgcgcccccagcgccccggagccgtggagccgccgagccgccgagtcgtcgagtcgcagcgccgggcgtggggactgcgggtggggcgaacaaagcggcggcgacgcgggcggcccaggcccgggacgcgcggagcgagcgaccccgccgggcctttgtctcgggcggggcaggagccgcggcggccgcggggcgccccgagcgcagaatgcggcgcccggcggcgcggattggggagcgctgcggcgactggctgcgtggagcccggcccggggcccgcaggcacttgcgtgtgtgaagcggggagatccggcgcgctgcccgttgcccgccccgcggccgcacgtgggcgggagcggcggcccgagaggagcccgaggagtaggaggaggaagaggaggggacgcacggcggcgcagcgggggacctggggcagcccgcgcgaagccccgccccggccctgagccccgcgcgcgcgcgggcgggatgccccgcggccgctgcactttggctcgagcactgccctgagccggtcgggcccgcgggcgccatggagcagtggcggcagtgcggccgctggctcatcgattgcaaggtcctgccgcccaaccaccgggtggtgtggccctcggccgtggtcttcgacctggcgcaggcgctgcgcgacggggtccttctgtgccagctgctgcacaacctctcccccggctccatcgacctcaaggacatcaacttccggccgcagatgtcccaggtgagcgcccggcgggcgggagggccccggggaggcggcgttcgcgctgcccgacgcgcggactgaacgcggaggtcgcagcggcggcggcccaggcgccctggctggggcggccgggctccgggacgcgggcgggcggctggagggtgcgccccgggcctccgagacgcgacctcaggaggcgcgaagttggccaaagtcccctcagcctgggtcgcgccgccgccgcccgcgggcactgctctggtgcgccggttccgcggtctgcgcggcctgggatgggggaggctccggcgctgcgctcgctctgcggggccctgcgagtggcccctcatttcccagggagcctgccgagccgggtgtgcgcgtcgtgggtcgcatccttgggcctcgcgcctcctggccggacgccggtggaagagcgggcgcggtcgctgcgccggcccggggcgcggctggagggcccgggaggggcgcggggcgggagccctcggggccggagggagctgggttggccccgggcaccgccccctcgccggcctccgcctcttcccggacccggacccgggccacttggcgccagtcctggctcccgggtcgagccgcctcgaggatccccagggccacttggccccagtcctggcccccatcgctttcccaacacccccacccctccttcgggcgctgagtgtggcctttgtcgcggcggaggcacgcgtgcggccgcagggccaggcaggaaaatgcctgcccagccgaacgaagctgcttttcttggcctcttaagagggaacttggctaagacttgagagaatcgaggcttccgtcctgttctccgggggtcgcggaatccttaccgggagcagcttagaagaggtcgggggaggcagagcgggtggcagccgggtccacccagcgccgaggaggtgcggtcttccagccagctcagcagcccctcaccgcgcgcagtggcaactccatgtggagagggaccattcaccagtgggacttaggacgtggttcctgggaaggagggagagtgagtcaccagcgattccaggctgggcagcgaggcctctgccctttggcggtgactgcgtttcctag

SEQ ID NO: 3483 - DNA, 6000 bp, Homo sapiens
ggaatgtggcatggatggaaggatgggttgagagacggatggatggaagagtgggtagcaagatataggagggatggatggaggggcaggtggagggatgatggacagactccagccttgggcggagctcctttgaagaagcttcagtctatccctgggatgctggctgtggaatgagggtcccctgagccttggaccttttgatgaaaagtactgagaccttgcagcaggtcttggtgttttttgggggaatactggactgagacagtgcccactctggctgtatggaggttctctgggagggcctgtatggaaagaaacagtcttgagtgagaggtaaactctcaagcccttccactgtggcatgtaacgcgctaagggacacatgtattcctgttcagaaaccagaccctggggctgcccagagaatgaggacaccaatttgatgagggcagctctgcagaaacccaggggaggggcgctgggccggtcgtggactcagattgtcctgtgccactgcccttgaaatcattatttatcagtagaaaacaaaagcaaacctctcagctggaggcataggagaaggtggacctgagttcgaatctgaactctgccagttgcataaccttggccaagtcactcaagctatgtgagccgacctcatctgtagcacagtacgatgacagtcctcgcctcctagggtgtgggtggtcctggctcagggcctgggtgcaggaaggacgtgctgagttgtaggtggagcatcactcgtggtgtgagtgactgggcagagaagccagaggggaagcccagccatgctgcccacataagggcagccacctgtctacccactccttcctccaaaggtctcctctctgggaccccgaggatccaagagtcaccaggtttccaggacctccaggatgcgtggatatacttccagctgcccttccctcctttaagtcagtgtcggacccttcggctcccgtttcttagccttgctactcctgcctgtactaagggctcatttcggtaccacagtggcggggcgggggggtgtgcctgtgggctccaggcactgcgctctgttgctgactccgtatccacgtgttctagacatcagatcattttccctccctcgtcacctccccacccacatcagtgcattaagggaaagcagaaagttctaggcgtggaaagccctttcagcagcagcctctatttaggggtgcacacaggtgtcaataaggcctggcgtttggacttggctttttcctgtgttgctgggtgaccttgggcagctcaccaatgtgcttggtgagctggtttttatgttggaccactcagtacaataacagtgactagaagtgatggagtggcttgtggtttaaaggaggtgaccatcacctaggccggccactcagactcaagacacaggattggttactgcaactatgaatgctgttaaaatataacggcttgaaagtgacaatgtgcgacgtaactgcaatcttacgtagtgtaacgttaattcacatagcgatagtgttaaaatatgccacaagtcaataaataagattatattgccttttattttttattttttttgagatggggtctcactttgtcacccaggctggagtgcagtggtacgatctcgactcgatgcaacctctgcctcctgggctcaagtgatcctcccacctcagcctcccaagtagctgggactataggcgtgcaccaccatgccaggctaatttttgtattttggtggagacagcgtttcaccttgttgcctaggctggtcttgaactcctggactcaagggatccacccgcctcagcctcccaaagtgctgggattacaggcatgagccaccacgtccagcctccgattacattgccttttataagctgtctttggatcagtttaacgcatctgtggcttccatgaaagaatatattggatttaaaaattacaattacagtgatttgctagattttacctccagtgaggcgggagccccgaggtgcccatccgcgcagaagagagacagggtgtcactgagggccgactgggtccttgctggctgcggaggacaggtggaagggtggaagcgggtccaaggagagggggcctggggcttggtgggggtgggccaggagggggcagatgctggacagaacaggaaggtggactgctgggactcgctgcccacatggctgccggggagaatgagacaggagctcaggaggacactgcggtttattgttcaatgcctgagatcatggcaacactgaattcctttgtggtttaaaaatcaactcctgtccaagctctccatcctccatgtcaccctctcctagtcactgcaaccatgatcaatctctggttgtcaactcaaacctcagtttctcctggaagccttgctgctccctccccgggtgtgccctgcctggtgccctcctccgccacctgtgaccctcccccatacttggggtatgtggcccatgctggcacttcttgctccctggtttaatctgctcggctggactggcagctgctcactggcagtctgtgtaagcagctccccctggagcccatctccaaggtgtgatgggactctcgccccctggaggtgtgcagcaggcagtcctggcagacagccctgagtccaagtggacatggatggtggtaggattttcccaaacagcgtcctctctattagtcttcctggcatgtgccttgagtccacagtctcaacctgttcatcattacactcacactaaaggttacaaagggagctcctgccccattttctttaccttttattttatttttgagacagggacccactgtgttgcccaggctggtcttgaactcctggactcaagccatctgcctgcctgagcctcccaaagtgctgggactacaggcttgagctgctgtacctggccccaccaaacttttgttctttgattcacatccatcctgccctcagagcctccaaggattctgggaggtgcacagggccggtgaatgtcctatgccgatcaggacctgggaaccagggaggcctgagtggctcagggccactgtggtgaagtctgtgtctcctgagttgggtcttctcaacggtcaaccccagattttctgtgcagcccctcctgggtgcagccaggtgccccgtggtgacagcaccaccagggggcagcaggtacccatggcattgttggcgggcggctgcctgggtcccagacctggctggtcctcttggccagagcaggcaggcccaggaccgtgaggacagaggcccccttcttgctgagggagccacctggggaaagagacatttagtgcatcaatgcgccggcggtccaggcgaggggttgggagagtgggtagctcttcttcctctctgagccctttctgtcccagcacagtgggaagcctctgggtaatttatccgtccattcttcacaagcaagtccagtgggagccgggtctccccgctctagagaggaggggatgaggctttgcaggaggagggatcagtgtaggctctcagatggggctggagggccccgctcaggtttcactcctggctttctgatttcttagggagatgctgatgggtccacctgctgccccatcttgcttcggtgaggaaagctctcccccttgccctaaaggtgcccactgctgcttcctcggggaagggcaagagacctgagcccccgcctcaccagccacctggcctgagtttactgctgcaggggccagctccttcctgacctctctctacgggccagaccctaagctgggaccccctgcttccacctcagtggagaaggggtgagtctgactctgcagagaccaatttccaggacaggacccccatcggaggccctgggcccaggggaccctctctgcgctcgcatccccgttccggcccctgcgcagggaagccacggggtaaggggtccgggggctgcagtgcagccccagctcatacaggcccaggattccaccggagtccagggtgggagccctcagacaccgcaccccagcctccgggctgagccagtctcagagaagggcttggacttgcctggtgtcccccagtgaatcagcagtgaaaacccgcggttcccggcagctgagccaggatccatataatttcagttgcagaatctgtttgtccttgaagcccctcctaccgtcacacgttgccagctggacagaccgcgcccccaccacccagggtgtggcctagaagggagatcagggcggatcagcaccggggccggctgcgaccctgggccggagagcaccttcctgccctcactcatgtcacgcattccgccctggacgccaggaactgcccgctgggcagctgcgagtggccaggactttggccaaaagctggggaatcctggcctttatgcagggtcgggggtcttcctatgggcccccggccagggcggaggacaggaagagggctctgggagtcctgggcccgtgtgccttcagcctcagcctcgggtatcccgccggggcggcttgatgggccaagggggctcagtaagcttcggcccagcccggtgccctctcccgagtctgtcgttaccgaacggccatgcgagggcgcccagcgcgacagggaccacctcctgacctccacggaggaccaaaggcacccggggggacgcccggccatcactccacgggcgaggtcgctcccccagggagaagggctccccaaagtccgagcgcccttggagaaagtcggccggacctgggcctgcgccgcaacccccgcccaccgcaactttcgcgggcggtagcggggcaggaagtgggggggcgggggcggcgcttgggacacggggaggtgccaggcgagtgctccggccccgcccctgccccgcccggccgtggccgcgccccctgcgcccccagcgccccggagccgtggagccgccgagccgccgagtcgtcgagtcgcagcgccgggcgtggggactgcgggtggggcgaacaaagcggcggcgacgcgggcggcccaggcccgggacgcgcggagcgagcgaccccgccgggcctttgtctcgggcggggcaggagccgcggcggccgcggggcgccccgagcgcagaatgcggcgcccggcggcgcggattggggagcgctgcggcgactggctgcgtggagcccggcccggggcccgcaggcacttgcgtgtgtgaagcggggagatccggcgcgctgcccgttgcccgccccgcggccgcacgtgggcgggagcggcggcccgagaggagcccgaggagtaggaggaggaagaggaggggacgcacggcggcgcagcgggggacctggggcagcccgcgcgaagccccgccccggccctgagccccgcgcgcgcgcgggcgggatgccccgcggccgctgcactttggctcgagcactgccctgagccggtcgggcccgcgggcgccatggagcagtggcggcagtgcggccgctggctcatcgattgcaaggtcctgccgcccaaccaccgggtggtgtggccctcggccgtggtcttcgacctggcgcaggcgctgcgcgacggggtccttctgtgccagctgctgcacaacctctcccccggctccatcgacctcaaggacatcaacttccggccgcagatgtcccaggtgagcgcccggcgggcgggagggccccggggaggcggcgttcgcgctgcccgacgcgcggactgaacgcggaggtcgcagcggcggcggcccaggcgccctggctggggcggccgggctccgggacgcgggcgggcggctggagggtgcgccccgggcctccgagacgcgacctcaggaggcgcgaagttggccaaagtcccctcagcctgggtcgcgccgccgccgcccgcgggcactgctctggtgcgccggttccgcggtctgcgcggcctgggatgggggaggctccggc

SEQ ID NO: 3484 - DNA, 6000 bp, Homo sapiens
agcctagatgtagctgtgactaggatccagcaccagcttggattatttatactcctgtggatggagtgagggtaggggaggtgagaggataagaagctggttatgtgagagtgatggcggtctcagctcttaaaccaaaaagtaaagaaagctgcaaatgagcactgggtatttagatagaagatcacagcgcggctggaagaggaacacttcagcatcactatcctgagtcttaggagcagcacatatggttttggacatgtctgtgtgggcttatgtctgaaggaaatagttggcaagataactggacttttgccttgcactaaccattatagcctaaggcaaagattaaattgcaaggccttatgaagtacttttaaagtttttttaaaattgcttcgttgaaaaacttccacttacttcccaaaataataatataacatggaattcaaaatttaaataaaaattacctagaatcctactgccataataattcaactgctttgattttccttgctgtcttccattcttttgtatataagcactcatatatacacactcatacaaacacacacatatactttttacataattgtaaccatgatgtgtatgcgattttccttccattgcctttaaaggttaagttcagtttttgactcatgttcatcagcaaatcagcaaagggattgaattcctcacttcattcctgaattttaatgcttgttccattttgccattttttttaattaactgagttaagctatatttagagtgtggttgagaaagtgcagcactgttcaacatacacatattattcttaagacaatacattagatcttgcatcgctagagaaagcattacaattttaagttcttccaccagttatgaaaatttaataatagttcgcctgttttctttatttagaaagatttattgaaagctgctatgtgctaagttatttgtgaccttgtttgctaagcttgtactactctttccacagcccttcccattgctgcctgctcattcttagggctcgacatgagtcacctcctcattcctgccttctctggtatcatcaccctatattcccacctactgcaccttgattattttctgcagtccatttgtaactacacatttgtttagttacttattgaatgtctcctccaatcttctctaagctctcctagaaaaggaactgaatctattttgttcaccaagaaaaagtcacataacatttttttaaaaactggtggatgggagccaaaatgtggaggagggtgtttgtcctcagagaaggggatggtggctggggacgccccctgaattcctcctgtgtcttatttactctgtattctcagcacctagcacagtgtacacactcactatatatttgttgaataaataagtattaacatgaactgacttttcatttcctgcaaatcttaaaatcacccaagggaagagacagtaaacatgtgtctatgctgcaggcattggagggatttgggtgagcgtggtggttacccacaaacttgagaggcgtgagttgtgttggctcctgcctgccatgcccacctcccttctgacagtgtgtaggttgacagaaggaagcatggcaatggcttttgacgcccaggttgccatttgacagtgtccactggatagaattcatgggactcatgaaagaatatatgttttatttgattgagggccagaattttcatttgcttacatcaatctgagtctggaaattctgaaatttgctcactggtgatatatggattaaggatgatgctcctattcatttttgcttgagaactcctttttaagcagagcagtgaagaaatccaatttctggcatttccttatacattgaaattttatctgacttaagaatcactatcaaaagttctatattagtgcaagaaacatgctgaacttagtatctaggcaaactgggtaagtgtgacattggtataaaatattgaagatgtatatattatataaatatgtaagtatataaataaatgcattattaaatacgtcaatatatgttgaaaagctatatattataaaaaacgcttcctcaaccaaattgggatttttcttccatatactatttggtaatgttctttttcacttaacatatgttgttatgaattttcactccggcttgactttaaagccaaatataacaaattttgagttacttttatgtatattttatgctttttccccctcttagtacagctatagaagaacatctatgcagtattacgaccaaatctgttatttggccaaacaacttaggaaaaatatcaaatttgtgactatttacatatgtaatataatggtgaaatggtctacaactgagttctgtgtttttccttgtatgtgaaaataaaagcagttcaattatcatcagtatttactgtacccgagtctagggcccacttacttgtagctttttttttttcttgagacagagtcttactctgttgcccaggctggagtgcagtggcacgcaatcttgactcactgcaacctccacctcccgggttcaagtgattctcctgcctcagtctcctgagttgctgggattacaggcgcacgccaccacacccagctaatttttttgtatttttagtagagacggggtttcaccatgttggccaggctagtctcaaactcctgacctcattatccaccggcctcggcctcccaaagtgctgggattacaggcgtgagccaccacgcccagccacttgtagcttttcatcagagatgccagaagtgatttctttcagtctccagcttgagatggggtattaactcctagtacttatagtaataagtaggtgttatttaagtaaaagaatcatttatgcatagcaactttggcctctttctctcccgtgagtgatgcattggtgtttacagaatataaagatgaaaatcttcgttagatgaagggagtcaaactaggttagttctttaatgttttcatcaaggaacaagtttatggagcaagagagatagcaactgtctatccaacttgcatcagcttaccaaccacacacatccaataacaaaaatcccccaaacttgcccttcagagaaaaatcttttaacccactttactcttgcactgacatagaaatgtggttaagaagtgaatggtggaagagaccagaatatactaactttcttaaatgtcagttggctagtatccaactgatagtaattttagagaaagtaactttctaagcttattctttcttaaggtactataagctacactcaaatatgtttgaatgccttcttacattttggaacagcctgagagtcacttatggaaccttcttagaacatttttatgaaagctgttgggtttgtcaaggtttattttaactcaaaatacaataattttatgagatcacttgttaatagctagttggcattagcagttgcacagataaactcctatttgatcactccttgactatggttaggatatacgattttcaggtggcatttctttaattaccctgtggattgcttgttgcaatttgacccaatgtacatgacttttttttctattggaaaattaactctagtgttcatatataatgttttactgtgtacttttaatatgtgttttaaaacaagatagtgtatatttcttcttccccccaatttaacagatttgtattttataaacgtttatacatatttccttggggaaatgacctgcagataagaaatagatttctgtttatgagaaaacaattatttaagcttatgtgtcgttttcagaagcattctaaaattgcctttttaatttgtgaggaactttctcaaacatgacctttctagtgctgaatgaaaagtcattacctgaaaatgactccccaaaaagctggagattatttaacttgttgtgagccccagcatcataaaagtgagatctttgtcttggaaaataaacagactaaatcttttttaaaaagcttttattttaggtttaggggtacatgtgtaggtttgtcatgtaggtaaactgcctgttgcaagggcttggtgtacggattatttagttacccaggtaataagcatagtacttgatacctagtttttttctgctccttttcctcctcacaccctcaaccctcaagtgggccctggtgtctcttgttcctctctatgtgaccatgagttctcatcatttagcttctacttatgagtgagaacacgcagtatttggttttctgataaacaaactaaatcaccgtacaaaacgtattgagatgtccctatgagtccctcccgcctgtagggttctgtatcataggatccatgcactcaacttcatacataaagcaaggacttaaggagagcttctccaataccaccttttgcaccatcgctttctattcagagatgacagaggcagtattttaacaagattaaaggaaagttttaatagcttcatttaaaaagttcttgtttttccacagtatcacaactgttttcatttttcatccacctgtttgttctttgtccgtttgactagtcgtttttatcattgtaatcacgacatcctgtgactgtgctcatgaggtctgtttatttccactttacgtaaacttttcaaaatgacagttatttcgtactcgctgtcgcccgaacgcagacgggaggacacttcaggagcaatcgacccgaaggaaaagcacgatccaggccccgcctgcctcggctccaccttccccgcgcccgtcccccagggtctcggccgcgggaccccgccttccaggccccgccccgctttttccctggccccgccccggcccgtcgccatgttgttccctccgcgctggacgggagcagctggagcgggagcctggctgcgctaccgcggctgcctcctgctgtgcaggtccccgaccctctctctgtcctcattgcgcccagacgggccggcccagagctcccgggtcgtctttcgtgtggccgcgaggtgagcgggactcgggactccttcgggaccgggcggagtgcgcgggtgtcggggtctgagggggcggctcgggcctcgggcagctggggcggggtgcggtgcgcgcggggctagcgcgggtcacaaggccgccccgggagagaggacggctggttgtctccctgcctcctctctgacgcaggaggaaagacggtccccacacccttggggagagggactcacagaaacacacacaaacactggagaaagggagatacaaaagcccggacacccgtgcacatacacacggagaaatacacccggtcacctgggaacacacgtacacgccagcctttcccccaaccactccgggacacacatccacagaccccaaaccaaatcctacacccgaatgattaatgtagggaaaacaaaggcgctcccatgacttgattttggcgacctctgaagttccacctagcagaacgtgtttgctcgatgtcttacgaccactcgggtgaggaattcggaaagtaaagccaatcttagaggctgcaggcgttttgggggcattatctgattcagacgctggctaacgtttcacaatcgcgttcccttttttcttccaacttggtaagtaaaaaggcaaaatgagaaatttaagtgctgaacttaataaatagttggtggacgtattgcttttttttttttttggtaagggatgacacatctcgtgactacagttcttttgaggaataacttttctgctagtttccaaatcggcacgtgaccacaatcttttcataggattttagcgtcctgataaaaatcaatgggcagaatttgattgcttctttaaaaatgtgtttgtccttcggtctctggcaccattgtaatggaaaatccctacattgcctgtactctcagaagctgtccagtgtagcaaaactagagataaagaaacctggaacgattcagttaggaacttttaagaagcc

SEQ ID NO: 3485 - DNA, 6000 bp, Homo sapiens
cagtggctccgtggtgaagtagagcctatcaatgcccagggtatcccaaggcccgccttctactgcactgctattggcagatctcgctgcctgttggggggggcctgttgcggagagaggctccctgggttggcagagaggagctggtggttgaggggcctgagtcaaacctgtgttcccggtctcagagaaatgtgcatgcacggtcaactcccccgaaatgaacagctgagaggacggcggtgggagggggtcccagagatggcgctctccaggccgcagcaggggccggtgaggtcggcggctttggaaaatgagagtcgcacgttttagaggaggtccccaggcacgcaggactgctgggtggatctgggattccttaaggaggtgcccatggcccgcacccttgttaaacactttttatcaaacgaagtcctggagcactctctccttttcccctctggttagggcagcctgaaccttaatgtcctcagctataaaagtagcattacaacggcagtcggtgaacacttcagattttaaaaaattttcagacatatttctgagactttaaaatgaacaacaataaaaaccaacaagtactttgataactttacatttttttccagatggataattacaagggggatgtcagaaaactataatcaactagtttgggttttaatttttgtcttaatacatggtacttctaatggtttaaatatggtggtgatgataatgacaaaaagtcaaaaaggccaggcgctgtgacatgcgtctgtggtcccagctttctgggaagatggcttgagcccaggaggtcgaggccgcagtgagctgtgattgcaccactgcactccagcctgggtgacagagcgagactctgtcgcaaaacaaaagaaaaccaaacctaaatcactttaaaggacttcatgctttaaagtgtcaggtacctgtaaggtacttggctgaagtgccagttgagatgggtgtgaagtgagtctatgagtccttgggggagaaagcattgcctttgagtgggctatgtcccctacccttcccctccttcccccatcctgcaaaagcaatgagcttttgctggcatttttctcatctttttgtaaacgttgaacgatggagccagaggtctgtcttcaaatactgcctagaaattaaagtttttaaacaaattaaatatttaagtgaattgaaatgtaaaatgcactcccctattcccctccccaaagcccctcactgagctccaaacaggagttgttcctgaccccactggcactgaggtgtttgccagggctcctgcagtgggagatggagattcagggtctagggatttaatttcagaaaaaagaattttttcaaaataatttctctaaccaataagaatttctaagaaacaaatgtttagaattatgtttgtggccttcttctttttttttttttttgccatgcagttcttattctggtatattacacataaagcaaaatatatccattttcagtgtagagttcaatgaggctgggcaaggtggctcatgcctgtaatcccagcactttgggaggccgaggtgggaggatcacttgagcccaggagtttaagaacagcctgggcaacatagtgagactccatctacacagaaaattttaaaaattagctgagtgtggtggtgcatgcctgtaatcccagctacttgggaggccgaggtgggagaattacttaagcccaggaggtcaaggcgcagtgagccatgaccgtgccactgcactccagtctgggtgacagagccagactctgtctcaaaaataaaaaaagataataataaaaatagagttcaatgagttctgacaaatgcatacagaacattccaatcacctgcaaaagttctttaatgcacttctcagtcattctccctcaaaacaacatctaatgtgatttccttcactatagattagttttgcctggtttagatttcatatgggtggaatacagtatttctcttttgtgtctggcttttttcattttgccccatgtctacgagattcatctatgctcttcctatatgtcagtaatttattccctttcattgctgagtagtattccataatcccattgttgtatttttttgtcagttctgtttctggacacctgggctgtttccagttttttgctattaagaaaaagctaatctgaacatttgcatacaagtttttgtgcagacatattgtaatagtagcatgttgtagctggctcaccagagcggattttgtgcatctcttttaaatctggttcagcgactgtcatattggtagcctgaaataagccatggggacagtacaaattagagctgttttcttcctggagcgttggttgtcaaacatttaccagcacaccattggacatgtgttttcatttctctagagtaaatacctaggagtgagattgctggattgattgcatggcaggtctatgtttaattttatatgaaactgccaaactgtttctaaagtgcttgtgccactttacactcccaatagcaatgtatgaaagttccaattgctctacattatcatcaatacatagtattgtcagtctttttaattttatccattggagttgggcatggtggctcatgcctgtaatcctagagtgttgggagaacgaggccaggagctcgacaccagcctgggcaacatagtgagatcctgtctctaaaaaaaaaaaaaaaatttttttagccattaaatggtgaagatccgaatagaaaagtggagttggggccaggtgtggtggctcaagcctgtaatcccagcactttgggaggccgaggtgggcagatcacttgaggtcaggagtttcagagcagcctggccaacatagtgaaatcccgtctctactaaaaatataaaaattagccaggcatggtcgtgggcgcctgtagtcccagctactcaggaggctgaggcaggagaatcacttgaacccaggaggcggaggttgcagtgagccaagatcttgccactgtactccagcctgggtgacagagcaaggctctgtctcaaaaaaaaaaaaaaaaaaaaaaaagaaagaaaagaaaagaaaagaaaaggggagttgggaaatggaaattatatgggaggccagtaggcagaacttctgtcttccttcttatagacagagaaagccatgtgataaatacagattgaaatatgttgaggccccccctcacctatgaccttcctctgatctttcccattacattgccaaaggatgctaaatctccaaacaggagaatgcagtcacttgaaacacaacaggccattcatggtgttggggaaataattaaaaagagaatctcgtgccaacccaatgaatcctctccacaaagtagacaagaatgaaaagtttttttttgttttttgttttattgagacagggtcactctgtcacccaggctggagtgcaagtggcaagtggcgtgatctcagctcactgcaatctctgtctcctgggttcaagtgattctcctgcctcagcattctaggtagctgggattacaggcgcgcgccaccgcgcccagctgactttttttttttgcatttttagtaaagacggggttttgccatgttggccaggctggtctcgaactcctggcctcaagtgatccgcccgccttggcctcccaaagtgctgggattacaggcatcagtcaccgcacccggcaggaatggaaagttttataactgaataagcattacaccagactgtgatgcacatcacaaacaatctgctaaagaggtttcaaagacagaaagaaatctcatccgtttatgtagcaggcagatacagcccattacaaacatattctcaaacaataacttgtgctcaagaaacttgacggcaccatttggtacacatacttcatcccaaattcacctggtaattagggtggctatctgtgttagttaattgcctttatccaaaggaaaacgaaaactcatatctctatgacaagcaggtaataacttgaagccaggcacgcagatcaaattcccacgaagacagggaaagacaggggtgctattttcattgatgtttacatttcaaagagatggctacaaggctcttaagaaaaacattccggggatgtaaaactggcaagagatttagcttttaaaaggacttacatacatctcaaagggacagagaaaattttacagttacaagttttctaaaggaaatgctctaagagagacgtctttctcttttgacaccagggaaaattcgatctttaaaaatttgtgtttaccccacaatacctccacacattgactggcatcgtgctcccttccaggtccgcacttccctcttcacctggccacctgtgactagtttttcatagtcctaatcaaccccattcctaaaggaagcctcccagacagcaggccgcccctcctaggcccagtcccccagcccccgccacaccagagacccgctgtcctcaaaggctatgaactacagtctcctagagctggtgaacatcgccgatcattggttctgattccaacccatttcaaagatggtaaaaactgagacacgggaaaatcataaaagggtgcttagggcactggcccaaaaagggtacttaaggatttctccgcccagatgccaaagccctaaggtcagccccaaatgacctgtgttctgctttatacgtctatgccactgttggggttaaagccctaggcacgcaggtcttgcctcaactgcgcctgcgcgagtcaggacgagcgcttgccccagatcttgacgtttcaggcggcccctcctaatccggaacacgactcacattccgttggtcttgccttgacagacgtgaccctgacccaataagggtggaaggctgagtcccgcagagccaataacgagagtccgagaggcgacggaggcggactctgtgaggaaacaagaagagaggcccaagatggagacggcggcggctgtagcggcgtgacaggtgagggcgggcccgggagggctcggtttctggagcggctgccgggcacgggcagggagcccggaccgaaagctcagctccaggatggctgcgcttgggccccggcgttccctgcccggaaccggaggagtggtttgacccggggcgagaccatcgtcgacagcgggggtggggtgggtaacaggaataggcgggcaaggctgcgggtgatggtttcgcccgctgctagtggtggtgcgcctgcgcagagccggaagccctttggtaggcgggacccgaccgagtggtgccgggattccgtcttaacccccgctaaggtgtccaatgacctttccttaccaactgcggggagtgtgtggaaacgcggttcactccccggtttccttattctggatcagtgtctgaccgcccccgccgggagaatgtcaggattctcgcctctgtaaccgccttccatgatccctcattcagtttagaccagtaatatgcctgtgacccctcacaggttgtcaaggagaattttggagctccctctttacctccatttttctccccgcaacaccataccttccttctccttttgctatgacaatgtctggtggtccaccattacctccccagttcggctcaatgtctggtcatttccatttccacccttctccccattacagtccctagtgacgcctgttacatctcccttccgcatagtatgtagtgaccccccccccccatgaattcctcatcatagaggcttgggacttccattagccacctaacaacggtgtctgtggtcctaacatcaacattacaccccagggcttagggatgtccacagtgccctttaaggacatgtttggtgcaacctccatcttccccaaactaagggcagtatctgataatcctctctttcccatcaccgtgcctgcgactcctccctcaccacagtaactggcatttcccccgttctctg

SEQ ID NO: 3486 - DNA, 6000 bp, Homo sapiens
ttatcttttcaaacctttccagccatgggaaggactagcaggtgctagtggacccaaaagaacctcagacctgctgagatttctgattcttggtgttcagaccaattagcaaatagtttaattaaacggcctgctttcatggtcaacacaattctgaactggtggtcatttagaccaagtccactttgtttttgagacggaattttgctcttgtcgcccaggctggagtgcagtggtgcgatcttggctcactgcaacctctgcctcctgggcttaagggattctcctgcctcagcctcccaagtagctgggactacaggcacccaccaccactcccgactaatttttgtatttttagtagagacagggttttgccatgttggccaggctggtctcaaactccgacctcagatgatctgcccacctcagcctccctaagtgctgggattgcaggtgtgagctaccgcgcccagctaaagtctagtttgtataagaaggctttccttgttatgtcacaggattcctgagcctatcaaatagattttaatgttttgagactccacgtacttccccaaaatgaagtatttaaattgtcagtgcctgcccccttgcctggtctttttgatgtactgacctggtctgttagtgtgatgaaaaatatggttgagtcttactgctttattgtaattagtaggactgtctagaagtttaatttttctaagagatgaagatttgagtctatgtagctggctgtcctttaaaaatatttggttacttgggatatactttgaactaactttctggtcattttatgtgatcaaaagtgtcagttcttcctgttcttagtatatttctttgtttgggaagtggaagggatgaaatctctatattctttcctgatgacacagaaaggagtacacatccacatctcatgaatagacatgtaattatagaagaaacagcctaacggccgggcgcggtggctcacacctgtaatcccagcactttgggaggccgaggtgggtggatcacgaggtcaggagttcaagaccagcctgtccaagatagtgaaaccccgtctctactaaaaatacaaaaaattagccgggaacggtggcaggcgcctgtaatcccagctacttaggaggctgaggcaggagaatcgcttgaactcggagggtggaggttgcagtgagccgagatcacgccactgcactccagcctgggcgacacagtgagactccatctcaaaaaaaaaaaaaaaagcataaccatatgactattcacactgccttacatactaaatcagtagtaatttgcttctcacatagcaaataaaaataaatcagcagtaataaacatatcccttttgtgttacagctagcatttggtgaactctgtatttttctcccttttaaagtgttgaactcataggttttcataaggtaagcttacaccattaactaattttgttctcttttttgatgttaaaattgtcccttaggagctgatcaggttcattcttctgttctttaagcattacccccagaatattcttgaaagtattcttgctctctggcaacaacacccatacttcatttatttcctgtccctaaacatacactcagccaacctcaggttccttttaatggagtagtcacttattcattcaacatacgttgggtgcctcctctgtgccacacactgttctggtccctggggatagagcaggaaacaaaaaaaaacaaaatctgccctcatacagctgacattctagtcaggggagacaaacaataaacaaatgaatgatgtagtatgtcagatgttgacagtgctatggagaaagcatatcatggagatcagaagcattacctgcaatggaacagtcatgattttaagaagaatggctgactggatgtgaagtgtgagagagaggagcccaggtttttggctgagcaactggagggatggagttgccattatctgagatggagaagttaggggaggagtagatttggaggggaaggtcaggaatttagtctggaacctgttaagtatgaggcacttattaaacactgaagtggatttttagaagatgtcattaaaactagtcaagttcaggagagagttctgggctagaaataaaaatgtgggagatattggtatatacatgggttcatactacttttttttccaatttaacatcctatcttattgctctctgcttttccaacagtatttagtttcatttacccctcaaactgactcctacattgacagcacaataaaatccacattccttattatattaagaccctgtgtgatctaacctcttcctatctcttggaccttgtcttaggccactttccctccccactcaatttctaacactctgacctcactgcttctcaaacagctctttgttgcctcttgtcctttttgtggaaaaggccttcctactgcttaaccattaggcattcttcgattccttctcattcttcattcttgagaaaggccttccttgaccctttatatcaattaggattcttttgggcgagatctgatccaaactggcttagagaaaaggagtcaactgactggttcatgtaattcaacctccttcctctgctgcaaccttcccttggctcccatctcacttaaggtcaaagccagggtccttaccatggccttgtaggcttcacacagtttgtctccctcattacctctctgacctcacctcttacattcccccttcacttattcttctccagccagagtggcctctttgctgcacctcaaacatgccaggcacactcccacctcagtgcctttgtgtttgctgccccttgtgtgtggaacacatcctccatatagccacactactcaaaattcactgtctttaagtctttactcaaatgcttctccgtgaagccatccctgagccctctttaaaattgcagccccccactcctgtactccttattgtctctcatttttaatttttgttattgtagttagaaccatctgacacatagcttttattccattggttttttgttatgtctttctttacaagaatttgaagtccatcaggccgggagttttgtttgttgtgtttgctgctatctcccagtgcctaaaattgcctggcatacagtaggcatttaataatctttgaatcagtgaaaaccagatggtggcttggcatttccacataggaatgagccaggtggaaatcatccaggatataagtagatcttgaagtgataaggaagggtcatcataatcatgtggggcccattttgccctttcttgtttcttttctctaggctcagcaacagcctcaccaaggactccatgaatatcaaagcccatatccacatgttgctagaggtgagagcagctcaccccactaccagactctgtgtttagggtggtgacctgaagaaggaagagagcgaaagaagggaaggaccatctttccctctaaactggagtcaagggagggaggtcagagcaagcctgggggcgtaacccagacccagtctttgttcaatctcttctgtcctctttttcaggggcttagagaactacaaggcctgcagaatttcccagagaagcctcaccattgacttcttccccccatcctcagacattaaagagcctgaatgcctttgagtcacatggcccttctttttccccataaaccctgctagttgccacgggggcctgttcctagggcacaaagttactgagagacccagagatccagtctctctgtggaacctccaaaatgccccagcagtcctgcctccagcctgttgcctggcagtatttgccagttgaccttatgcactgccctctcttctgtcatcttggcaacctgggccccccacctcaccctttcttccattccttttcctagacgccaccctttgaattgccatagagaatgggccaattcatggtggaggtttgttcattcccacaacaatcaaagggccctaaggtttacgctttcacacacccaatcattccccaggtaccccaaattacacccaaaccctaactcagccctaccttgtcttagcccctgcttgtaagtgttccagcttccaatgggcacagacctggatcccgctctccctagtcgggcccctattctaggttgagtccagccaccgccaatcaatgcagagccaggttcctcccctttttaactctggccgcagttcaaccctgccctctgaaagcatttcgtttctgccactcaatgctctttcgtgtgcctgacagccatcctgccctcctacctccgctgtgttctaaattcgtctttacccagctctatggtcttgtctaaccgtagagctgccctgcccgcctacgcggagcccagtccgacccactcccgccggctgctacgcccatttctatacaagccctgcttccgctgagcagcatggcgtgcgacaccgcccccttggtgttttggcaggggtctagaagtccctcgtccgccaatcagagaaaaacagggccacccacccccgtccttgggggctgtcttccatcaatcccatgtaagccaatcagtgtgaggcagacccccgcccccccgacacaggccccgagccttttcagttgctcacagtccgtcagtccttgagccaatcggcgtggagcaccgtgaaggccgaacgcgcctcctcgggactccaggggccgtgagcgttccatcatttccccttacgccaatcacggcacagctctgtagggaagggcccgtcccccaacccctcgaggccttgcggccgattaatagcgctttggccaatcagcgagcggcgggacattgggctcctcctcctcgggcccacgtgagctgtagggaaacgcaggggcggcttctaggtgctgccgccgccaccgccaccaccacctccaccgccgcctcggaacccaggcctggggggcggtggggccgcgtatggagcccccgccccccggagctgccaacattgccaacgccaccgccacgctacacacaggtgagctctgggcctggagggtggagggcccagtccgtgaccccacgtatccttcccgcccccgcgcagaggatgtggcttggccggtggcctgctggtgttcgactccccgccgccaccaccacggctggtggacctgcgtgtggcattgctcaagcccttcgtcccttatagtggatctgaccgtggcctaacctccccctcccgttgtataatggatcggtctgcgtgcttatgtttttccccacgccaacttagggtggactcgtccataggctttccccctacccctacccccacccgccccccacccacccccacttatagggagctagcctgtgacagtgttcagcccccttaatagtaggtgtatctgagtgtttggatttctcctagcctcaactttcaggagacccgtccgtggccttatttattccacccttcctgtacatcgtagcgaatcaatccgtggcgccgcactcctccgcatccctctttaacagtgagtctacctgagtttgtattcctgcctcctccagtcccccaatgcatcagtccatggcttttttcaaaaccaccccccccccccaccaccaccaccaccattttatagtggatcagtcttcatgtttggattcacgtccctttagctatcagtccattgccctgtctcctctttttcgtagactgtcgctctagcgcttggggttctctcctttttaatagtgggttagtttagtgctttacatctccctattttcagtagctcagtccatagccttttccctctctgctttgaatcagtctgtgtgatggcttttctctcctctcactgtggtgcaggagtctgtaaggttttctgctccccttcccctcagacgatgagcctcatcacccctccctttgcagtggatctgttcattggccttcctcccccacacccctgtat

SEQ ID NO: 3487 - DNA, 6000 bp, Homo sapiens
actagccggtccccgcggcagcggagttcagcctcgtcacctgagcaccctgagctgcatgctgaattgggcatgaagcccccttccccaggcactgttttagctcttgccaaacctccttcgccctgtgcgccaggtcagtgacttgcccacagggaatgtgctgggagttaggaggcacgtcctgggtcctgggtcctggatcctgggtccctacctttgactgtccgtctgcttcaggtacaagcagtcagttctcggcaggggccgaccgggcaacttccccccttgtgtccctctaccctgctttggagtgccgggccctcattcagcagatgtccccctctgcctttggtaagcctcctttgtctggggggatggaggctgctaggagctgggagagactggaagaagtggcaagtcctgagaggggctttctggagcctctggccatctccccaagaaaagaagggagaggcactggaggggatttttcagatccaaggaatttgccccagaagggtctggggtctaagtggggtttcacaggcctagcagatccttctgttttgagaaaggagtgagaagggccctatgggatttctccagagccccagatgtcggcacagggtgaggagaaggcaggctgagagcgctccatcatccttttcctcttcctctcgcccagcaggtctgaatgactgggatgatgatgagatcctagcttcggtgctggcagtgtcccaacaggaatacctagacagtatgaagaaaaacaaagtgcacagagacccgcccccagacaagagttgatggagacccagggattggacaccatctcccaaccccagtactcctgctctccggtgccacctcaccttctttggcttcttccctcttgcctccttctgttctttctgctctcccctcttttccctcctcctcacttccctctggctagcccacccctgcactctctctcattgccgctgccactatcacctgtctctctgccagctgatgtgccctgttgccccccaccccatcccgcacagaaccatccctgcattccacaggggactcgggcaagggtgccgaagatagacaagaggcacacagagacagaccaactggcagccaggcagccccagaggagagagacattcagacagaggaaagtctccctgcccctcattccttccaagatgagaaaaacttgccgccaccccccgacactgatgccagggaggtgggaggaagaagtgggaaatttcccttcccagtacccccaagaacgtctgagccttcaatgttgaattttttctttattaaaattacttttatcttataaaatcaactaatcaaaaatgatatagacgacagcactggctctgtgaaggtggcatctttctgggcaggcaggccatggggcatggaggagggtgcaaagatatgggttgctgtcttctggcctccagctgcatggaggccggcccagggtctagggtgtgcactgggcaagggcagggcggcaggtgtcaggccggcttggacaatgaaaccctgaccttgctgcattccttttgcttccaccaccactagcttctttggaatcttggggtgggggtcatctttggggattatggctgccacccgggatttgagtgtagggagtgtgggagcagccttggcagatggggcacccgtgccctgcaggtgttgacaagatccgccatctgtaatgtccttggcacaataaaaccaaatgtcagtttccctgagcgactctgttctgtgtggggcaggggttgggcgggcctctgggcagaggatgcaatggcacggaccttggcttgacctcagaggtgtgaatgctctccagcagggtctgtctgggggcctggagtttgtatttgatttgctgcttattaaacctccttctggacctattgccactggaaaagctgcgtctttgcctgctgaccccacccctgcctaccctatttcctgggggggggggggtgatggtagcagaggactgtgagcttgaacttcctgcctgaattccagcttctccgcctgcctctcaccatgaatgctgctctttccttatcatgatctgatgaagaaaagccttggaaaagtgcaactgatactttgtagcaacatgagtttagtggaagtaaccagaggggcctcacccactaggttttagaaggtgaaggacggctaaacccttttttgttcttgtcccccagtctgacacctctttgcctgtcctccctaggggtaaatccaaggtaaagaaggctggctggcccccaggttttctcaagcagctttttcaccatgccatgataatggagaccctctgacaggatgtgtgtctggttctgcagttgagggcatggctagctgagtggctgtctgcggagtgtgtctggaacccagtggccaagcatctatttgttgtagagttgctttgaaaccttcctggccctggtcaattgcttctctgtttcaagtgtctcatctgtacaagaggtgattaggctgggtgcagtgactcacacctataatcccagcactttggaaggctgaggtgggtgaatcacctgagatcaggagttcgagaccagcctggccaacatggagaaaccccatctctactaaaaatacaaaaattagccgttcatggttgtacgtgcctgtaatcccagctacttgggtggctgaggcatgagaatcgcttgaacccaggaggtggaggttgcagtgagccgagattgcgccaccacactccagcctgggtgacagagcgagactcagtcttaaaaaaaaaaaaaaaaagtgatatctactccctcatgcttctgctgtgatcatctagagggaatatgtatgatcaaagtaacgtactacctgggcacagtgcttggcacattgagagagcacaaatgttagtagtattctttttgtagaagtttctgcaccatttggcccctgccaatctctcgccgctctgtccagtgttcttggcctttgcctgcaatttgccctcccctgtcctgagccaccaaccttctttgtctttcaagacagagggtcacctgctgagaagcccattcacattctcacttctatctaaaaatctccccagtagctgtactacagataaacttcatggcacgggtttgatgcctgacttatctgtacatctctgataccaacatccccatcaaggcctggcaggcttatagcaaaccacccccaataacgttgggtgaacaaaggagagtacatgtgtgcttttttggtgttgtctgtgtgtgtgtgactgtggtgagtccaagtcttcatgtgcagctcacagagtgtccccagttgtgtgtgtgatgaagggcttgtttccaggtgtgtcagatggtgactgagtgtgggactcttatctctgacagtttgtgtctaaatccaagatgcgtgcatgcctgcgtgggtctgtctgtgacagtgcatctgtggtttctgtctgatggggtggatgtccgtttgtgttcctgcaacagattctgggtagctatttctggacagtttgttccattgataaactgcatgtgtcatggtgtatgtatgtctgtgtctgaacaggtctatccatgtctgtttttgtgacactgccacaaaatgtgattctatcacatcagtacatgtctgccttcagagcagtgcatgtgtgtccctggagcatctgtgcatcttcctgtgacagactctgcgtctctcatttctgggacagtacaagtcttgctgtgacagtgcatatctgatggtgacagtgtgtttgtgacaagttctgccagtgtgacgggacatttctgtgtcatcacatggcaaatgtaggtctgcgtgagtgcctttctgtaacagtgtatctctgggtgtcattctaggacataactatttttctgacagtgtgcttgcctgaaagtgtatgtcagtctctggctgcatgtgtatctaggtcgtttctgtgaatgtgtctgacagtatgtgtttgtgtatatcttggcattcatgtgtctttggagtgcatttttcttcctggggtgtggcgccttttctggctgtttttcacaaatttgtgtctgagagttgccacttctctagcagcctctatcatgtctctcagtccttgcctctctcaactccaagagcagccccatgccaccaccactctgggctcacccccatcccccaagaaccaccccctgctgttctagattctagacttgctgactgggcccagggctcagggttaaaagctccaataaacactcaccaggcaatgctgcctttgaccaatgcacacccgtggcgttgatggtaggggttccccctccctggctaccagatatttccagggccctggcctcagctttccagtgaaggccgccagtcgcctggaggactccggtgaaggagtccgacaagcacctttcgagacggagtcttggatagccacaagcgcgaattcttagaagcccggcctggcgctatctctgtgctaatatccaggcagcggcggcaaaccaacttcccaggaaaggatactgcgcagttattttttaagtgtaaatacacacacacaccgccaccactaccaacaacaaccccgcgcaacaaccaaaacaagcgcggtgctgcaaagggattcccagaaccggtttcctcttggtgtgagccccacctcaagccccctcatttacatgcaggccccgcctcctcggaagaaccgagcgtgtatttgcataagggggcccttgaaacgatgagggtggtatgcaaataagaactggctccgattggctgtggtacagcaggtgccgcgtccggattgatcaaagccaggtgggcggggctgtcgcccagggtgactctcccgggaggcgcgtgcccaggctcagtagcattggggctggcgcgcgcggcgaatctcaacgctgcgccgtctgcgggcgcttccgggccaccagtttctctgctttccaccctggcgccccccagccctggctccccagctgcgctgccccgggcgtccacgccctgcgggcttagcgggttcagtgggctcaatctgcgcagcgccacctccatgttgaccaagcctctacaggggcctcccgcgccccccgggacccccacgccgccgccaggtgagtacatcctcccctactgcaaccagacggggtgggctggaatgatgggttgcagcgcggggggagggagtcgtggctgggctcagcacgccgccaccctgacttcctcgcctccgcctgcgtaggaggcaaggatcgggaagcgttcgaggccgagtatcgactcggccccctcctgggtaaggggggctttggcaccgtcttcgcaggacaccgcctcacagatcgactccaggtatccgtcatgagggtcttgggagggtcaggtgcgtgtggcgggggcgggggtcctggccctggaatgctggttgaccgaggagtgagcctgcagagtgtgtagaggaccaggtgtgtgtgtgtgtgtgtccgtgtccgtgtccgaggagtgagcctgcagtgtgtgtagagggccaggtgtgtgtgcgtgcgcgtgtgtgtgtcggtctaggaggttatgggcggggggggggggcagggggcttcagattccggagttccttgaccccggggtccaggctgtgtatgtgtgggaaagcagggacctagatgtgagatttgtgggacttttggaggtaggtgtccagtgtggagtcatgcggaccaggaccctggtacagagttggggtgtcgtagagctaaataggaagattgtgggcctggggtatcaggaaatctagaactcaggacttggagtgatgagtcctgatgcctgagaacggagagcccagggctaaggaaggtgggagagataaacttggttccgaggacctggagggcaggggag

SEQ ID NO: 3488 - DNA, 6000 bp, Homo sapiens
ccatagtttaataacctttggtctacatgcttacattaagggactagaggagttctctgagggaggccttcccctgctcccattcttaagcaacaattggactatgggggtggcatgggagaggtctgtgggtctgaaaggaggacgctctggctaatctcttggtctctgctcagagactatgtgcggctggttgtccggaaagtacaatttgcaccaccggaggcaggccctggcccctcagcccagaccatccgccgcttccttctgtcagctcagcccctacaactccaggcctggatggacagggaggtttgtgacccccactttttgcctcccaccccagaacccctctgatgccctttcttcactgatttcctacttgggcaggcagagatgggagccagggtggcaatagcgctaaggaagcaggggttctaggtctccatctgcgtattcgtcctccagccttgacatgggtccccgctcctgctttaggttcactaccacggagaacccatctctgtcaatgtttctatcaacaactgcaccaacaaggtcatcaaaaaaatcaagatttcaggtgagtttcttttcccatccctgtgcacctggtcccaaagccacaggtcttttcccaaaattctatctcacttacctgtctgcattcatctaggctttccctctaacatgggcttgtcaaaatgcatatcttgttttgtcaatgagcatgtctcactgcatcatgtatagtgtgcctatgtataaggtcacatctaaggacactgagctggggtctcaaggatgactgactgattataatcatgtgcttttcctggcttgttcagttgaccagatcacagatgttgtcctgtattcactagacaagtacaccaagactgtgttcattcaggaattcacgtgagctggtgctggggctaggaccagagagccaaggggtggggtggtgggaagaggtccaggaggcagttgagggggtagagtgggggagaagagtggtggaagattccagggagggattcccaggagaactagatggaggggatgcaacttacccccaggagtcccatcacgatgctgagcgagggcaggggcataaggatttcccaccagaactaatttctcccagtcttcagttaaacatgttacctctcttggatactccagtaggttcttgtataatcttgtacaagatactcttgggagtaaaagtatgcttagtcagcaagcccagcctaaattcttctcttgttcttcttttgtagggagactgtagctgctaattccagcttctcccagagctttgcagtaaccccaatcctggctgccagctgccagaaacggggcctggcactggatggcaaacttaagcatgaagataccaacctggcctctagcacaatgtaagctcaaatataactctcagcctccatttcctacccctcaaccattccacatgctacatttacagctctgaggtttcatgttcagtaaagcctacctgttttttaaagtgtctctagggcagtgttcagagactcctccaggcctaaaggcctgcagcaagctcaataatgcctgtgggaccaacggcaggcttaggtcagcggcagaaaaaaaggaaaacatggagaggaaaacaatccttatgttgtataagatttcacagttcacaaaggtccgacatatgtactatgctatctttgtgagaatcccactaaagtagcctggacaggtgttcttattcccttttacacttaaggaccctgaggctcagagagaagaaggaactcacttaaagtggcatagctgataagtggtagatgtagacaggattatatcacatgtcatctggctctgaatactgtgatctctacagaagctactctctagaaaaaataaagatggagtagaagactaggagatgagaaatggaggaaaaggaggacaaaaaaggaaaatgatgcaacaggaattaatagaattctaggaagtcattcacttggtcctgtgccttcggaggccctagtgttagatgtgtcttccaccaaaaaccacctgccaccatctgtcaagtgtaatccctccatctctccatacgtcttttcaatcaagtagctatagactgttattgctagaaatacccttagaaatcatccaaactgcattattttatatgtaagagatcagcagcccagagcaatgaagagattttctcaagctcatgcagctttcgctgtcttatttttcaatcagtgggttttttactgaacccctattacatgctctttcctatgctaagcaatgtggagaatataaagaagtttaagacagtctctgccttcagtcaatttatggcctagatgaggaacgaagagagatgcaaatacaacccaacagttaaatgttagtacacgtggttcagagtaaatcgcaacaaagttaaaagaagccaggagagctggtgagggcttcctggaggaggtagaatgagctagatcttgaagaatgtgaaggatctggataccaacagaggaaaaaaaggagcactgtagactagggacacagcatgggcaaaggctagaaggtgggaatccacatggcatgttctgatcacggagagaagatgggtctgcttaggttgtatcccaggagttaggggagaaaaggttagagaggctagatagggcaaggttgttaggggtcttgaaagtcaggcagagtagttgttatattcaaaaggtaggctcttgagcagagagtgacatggtaaaagtgaatgtcaggaagagaaatgtggtctcaacgggtaggaaaggttagagcctgggagatattctgggataagactaaacataatagggtgtggtgataggaatgcatgagaagaaactggggacagaatgaattactcttcatgccccaaacaccctaaaacgaatactacaacctccagtattagaccgggaatggacaaagagctgctggggatcctggtgtcctacaaagtcagagtcaacctgatggtgtcctgtggtgggtaagtgagggttctgggtctgtctgggcaggggctgaagagtcaagggcttttcgcctctgtttttctcccagttagattgacccaatcaaaccattccccaccctttctcccagaccaggttcccaaacctgtgagctcagtgagcaagtcactttcccttccagaaacccattctgtggctggctcattaggtcttatgatccctcatccccttgtgaaactaggttgccccttctctatttcccgctgctaattttgggtgtcattctacccacagcatcctaggagacctgacagccaggtgagagactgtggggtgggggaacttgggcaagaagaggaggacaaggggataaggagagcaaaataatgattgattctggagggtctgagggcatccaaagactggaaaactaagggagggaggttcagggattgggcttgtagagagaggagatgtaactccaccttgggatccttgcagcgatgttggtgtggagctacccttggtcctgatccatccgaagccatctcatggtgagtgaccaggtggaactcacagggacggctgtcctgagggctggggtccaaaccattctgatctcatgaattggagactagcagtttgcctggggatggaatagcaataggtaggctgggtgtctaggtattcaggggaagtgtgtgtgtcgtgtgtgctggagcaaaggattgggaagttgggggggggggaagtaaagatacttcttcagggaaccgaagagcctctaatcagcttcagctccattttttccctccgtctccatgcttgctacagaggccgctaggtaatggaatacaagattgggaagccccattcccctcttcccatttccaccctccatgttatgacgatagaaatgtgaaaatgcttccttggggtgctttcaatacatgtgcagtggaaacatatggcttagcttcgtgtcacagttcggtgcttttcatatgccctcctttccctttctgcatccccccgccctccaccttctgctcttgttggaatcatccttccccctcatccccttcccatttttctttttccttttcccccacccgctcgcccttacttctttcgtctttcattctttgataccttccctccttcccatccctcatccttatgtccctttcagtgctcctgggggacttttgtgctgggaaatttgggcgggaatgaaaggaaacaagccagagtggctgatggaaaagtggggacaccaagagggggccgaggagcctacctgggaagcagggaggggatcacttttctgggatcaggaaaaaagagtggacacggaggacacccagaaaggggttcctaaccttccattctcttctgctgcttctgcaagctctgaggacatagtcatcgaggagtttacgcggaaaggcgaggaggagagccagaaggctgtggaggctgagggagatgaggggagctgagcacctcgctctggtgcccgtctgtgtgggagcccccactgtaacactctaataaatcagtttgttcagatgtgcctagcgatctcttgcctatttcctcttcctggagggtcacggaactactgagaacaatcttccccacctccacccctttgctgtgattacactacacttagcccgtgcttttccccatacgctgaccccaacttccctctgacacggtcagtggccatccctctctccaccccatgaccccactcgagtggtcataggattgcgctgaacaccaggcgcagtgcaagctgccaggagggggccgagggggcgtggccatgcccaggcctgggtgtgaagccaatggccgtcagccgacgtcagtagagcatggcgtgaagtccggcggctcaggctgagcgttggaagccattttggctgcaacctacctgaagcgatgtctgcctttggtcacgacgaggcctggatggaggccggaggctttggtctggaggctgccgaaagaacggaataccagtctctgtgcaaatctaaactcttattcctgggagagcagagcggtgtgggtctgggttgggctttggggacatggaggtgtaattggtatgaaatggggtggggcattctctggggaaccgagttcctcctcgttgggaaagattggagttggaggaggagggagggctcatagaaactttgaggggagaaagggcactgagggcgacgattggcctgcttatctccctcacagtagggaagacatccatcatcagccgcttcatgtacaacagcttcggctgcgcctgccaggtaagaccaccaccgagtcatatggtacatttttgccactcttcttggcggactcacctggagattctcctcctcaaagttatgtattgtaagcattgggaagtggagccaggacaacttcttgaagggtcattctccactttgggttctaagactgcctcatattgggaatagagggaatgctggagtgtatctgattttcttttgcaggcaactgttggaattgacttcttgtctaagaccatgtacttggaggaccaaatagtgagtgttaactctcataccactaaccctacacttcaaccccttaggcctattcatcacagttgggtagcaccatcaaaaaaaactgaagcctcttcaaattaccaagccctatgatgtttcttgttctgtctgccttcatctaatctccaactgtaacataaagtccaagagaccttgaatccttaaatctgctgtgctgtagggtcttcctgaatcaaaacagtatattgaaattggttggacctgtcctaggactataggccatttggtctgaggctatagcagccacttctcagggatccagtctacctgaccttttgtattctgcctttattaggtttgagctttttaaaaaggct

SEQ ID NO: 3489 - DNA, 6000 bp, Homo sapiens
cagtgtccccctctgtaaaatggggataattatgccaacccgcaggattgctgcaagctgcagtgataacacaggtgcaagcccatagccctgtggttactgcacgatcaggaatgcctgtgtgaattcaggcctcttcttagtcctttacagatttgttgttaggagatagaggaggaaaggaggagaaaaaggccctggtgagaaacccattgtatcttctggttgtaatgatcactacccaattgtatcagtgtcactggtcactgacccagtgcctaagatggttcctggcacactgttactctaagaaagcacagtgattgctggattctctctgtccctgtgcagatcttcatcaggttattgaactcataacaggtgtatgaaggagatgggctttgaggatctgggtcgtgatggctgctgaagcttctacttcagatttgaagggcagcagtcctaaggagacccccaacacttccatccctggtgggatatgatgcctggctcaagtgagctcatagatctggacagaagcatgttgtggaatacctctgtgaggtttataatatagtctaaaagcagagaaactcctttgatcccatctttggagaagaggtttagcatgtggaatttcctttcatcagcagctatgtgctttgaagccgcccttgaggcccatgtttaaaatgcctttcgttgttacaaagcaatgaataattcatttggggaatcaacttgatgtttaacatgtatttgaaataaatttacatatgttttctgcctgtataaataatgatcagtgattcccatgtatctctcagatgggcattgaaatacacagttggtcagaaggtcttccaagcaactggagattgtaatatgcatttttcaatggtaaccatgttattatccattctgtaatacattttttaagaaggcaaaaatgtacaaagtattagttaaaactgtcaaaatgtcagatacaaaagttcaatattttgaaaaataataatttccatataatttgctctattataatgatacccagtcatgtcccctaaaataaccagctaggcctaaatattattatcattgtttcccagaacataagattttcagttctgtactactaggactctctatccctcctattgccctgtccccagacaaacacaatactttgtcactatagattaagttttatgtcctagacatttatttaaatggaattgtagaaatgtttttctgcgtttgtttttgatttttggtttggcttctttcattcacccaatttatttttagatgtatccattttgttgcacatatcaatagttcattcttttttattgctgaatagtattccagtatatggctatatcataaattttttatccattcacctgttgttggatattttaattatttccaattaggatctcttgtaaacaaagcttctatgaatatttgtgaataagtctttccatggaaataggctttctttctctaataaatacttaggagtgcaatggctggatcatgtggtagatgtaagattaacattgtaagaaactgcctgtttccaagtgtttgtaccatttttcattaccaccagtaatgtatcactgtttcatcctccacaacctcgacagagcttggtataatctgtctttttaatttttttaattctcacaggagtttagtaggatctcattgaaattttcatttacatttcccttataacgagtgatgctgagcatcatttcctgtgcttacatgatatttgtatgtcttctttagtggaatgtctattcaaatattttgcctgtttctttactggtgtgtgttttcttcttactaagattttaaacatattctggatacaagtcctttattaaatatataattttcaaacattttaccccggtcagcagcttacttgtctattttttcaaccatgtagttggaaagctaaagtttttaactttgaggaagtccaatttttcaatttctttgcttatagattgtggttttgttgtctcatctatgaaatcttcacctgacccattgtcaaaaagattttctcctgttttttttttttctgctagaagttttatagcatcaaattttatatttagatctcaggtccattttgaatagacttttgtatatagtgtgatatctgagtcacagtttatatttgtgcatgtcaatattcacttgtcccagcaccatttgttgaaacaataatcctttctccactgaatcaccattgcatctttgtcaaactcagttgtccatatacttgtgggtctatagctggactctttattctgttcctttgatctactaatccatcttgatgccaatagcacactgtctggattactgtatgtttgtaaggagtcttgaaatcaggtagtgtttgtcttctaattttgttctttatcaaagttgtacttcatagttgatatggtttggaactgtgtccctacccaaatctcatgtcaaattgtaatccccaatgttggatatgaggactggtgggaggtgattggatcgtgagagtggatttctccctttggttctgttctcataatagaattctcataagatctggttgtttacaagtgtgtagcaccttccctgccatgtaaaacgcctgcttccgctttacctttcgccatgagttaaagctccctgaggcctctccagaagcagatgcctctatggttcctatatagcctgcagaaccgtaagccatgaaaaccccttttttaaaataaatcacccagtttcatgtgtttgtttttagcaatatgggaacagactaatagagtctaggtcttttacatgtccatatgaatgttagaatcagcctgtcggtttctttaaaaattttttaataggatttccatttgaattgctctgaatctatagatcagttttggaagaattgacatcttaacaatactgaatcttctcagtattgtttgtgacccatgagcatggtaagtcctccacttatttaggtctttaattctctcagcaatgatgtgtggtgttcagtgtacaggcactgcacatctgtggacagattgttcataaatatttcatactcttgatgatgctatacatggctttgtttgttaaacacaattgctaattactatattttcacagtactatcagcaaccaagtgtttaacatcagtgaggcatttttttggttgaaagcacagcttactctaggatggaaaaggtatttgatccttaacctgtgtttacctgtatttccgtatctgcttttacaagtcattggcgatatattgaaactatggaggaaaatgttccagagacaattctacaggtcatcttcagaaatcacaccaaaagaacatagtttagtagctttcaactttatatgtgtggtcagaaatgattttgttgcaatgtgtggctcaggctggagtgcaatggtgcaatcatagctcactgcagccttgaactcccaggctcaagcaatcctctcacctcagcctcctgaataactgactacaggtgtgtgcccccatgctcagctaaacttaaaaacatttttcagagacagagttttgctatgttgtttagacttctctcacactcctaacctcaagcaatcctcctacctcagccatctgagtagctgggattatagccacgagccaccatgcctggcgagatttacttctttacccaccagtaaatcaacctcaataaattcttggaatttggagtggtgagagggtgagcaagcatatatgtatgtgagtatgtatacatttgtatgtcactgaagctgtcaggaatttttattgtaaggactacttgaggttaattactgtgcatcatgtcaatcctatttagttcctagtacatattaggaacaagctcgggatagtggtgtttgttttttctcagctttccttggccagaatggttaccatggtgactcagtgactgcggtgtgatttggtgcagactgagcatccatttaggattcttgcccgaatctctcacaccacattgcctgtccatcagatatagtattagcttttcatcttatgtgtaattaatcacttttcaagggctcagaagaaagttgcttcacttatctgaggttaagctacagataacataaaaagacactaagtaccttgaaataaaaggaaatgagttgttgatattcctctcctgccccaatctctattgggaggttagaagagaaattcttggaatcatacagcatgtgctcttttgtgtcttgcttctttcagtcaacataatgtatgtgaaattaatatttattgtggtctatattgtagattgcttattctcattggtgtaaagtattatattatttggatatttcacactatatttatctgtgatggagatttgtgtattttccagtttttgacatctcatgaataatggtgttatgaatgttcatgttcattcttttggatgaacatatattttcttttttaaaaaaatcttattatcaataatatttgaactatttaatatctgtcatcttaaaattattattcataacactttttaccttgtagctatagacaaatacattcccattttagcaggttaatgaaattatctttataatactatagaagcatttatttgaagaataccagaaggaacatcctgaaaaccaagaactcaaaatgcctttttatcccaaagacatgttttacaaatatatacccattcatccatttgttttcacaaatgaagctacagagaactttgaatataatgatgtgcagcaggggcttattcctaacatatttaaaatttaggtcaaccaaacttctctgtggaaactgagttgaaatccgaaatcttacaatcctaatttcgagccacattcattttaacttaattttaacatgttttgcaaaatgttccaatataaacttaatagttcctataccaccaaacatggatcctcatgattttattttctagattggctgataggctgaataatctcctgtagggtaagaagtgtcaactgtatcaagcacatggaggtggactggctacaggagaaaggttttccaaatcaaattccaagtatttctttctctttttatattaccattaggagaaataactaatgtagatgacgggttgatgggtgcagcaaaccaccatggcacgtgtatacctatgtaacaaacctgtacattctccacatgtatcccagaacttaaaagtataataaaaaaatttaacaaaatggtgttagattcagaggcttgattcaatttagatttgttttggtcagaagtacttcatatgtggtattgtttattcctatagtgttacacagggggctcattgtgtctaattgtctctcctcttgtgatgttaagattaattactatgttcaagtattgttaagctgatccatccattataaaatttcccatccctttttcacctcgatttttctgcagcgtctaaggattgttgcttagttctatattcattaaaggtcataaaaggatgatattctaattctataattttctctgctttattagctggaattattctattaaataaactttcataaaccattaggttacactgagggatagtatgtatagaaagggttggatgagtgcctaattcttttgcaatatttccacttttcaaaacaatgagttgtttccctagggttctccaaaggcaagcaatgagttgatattgtttgttttattttatttttcttttagagtgtcatcatgagctgtagaagtttttatattataatgtgttttaatccatagtagtcattattttatttaatgttcaaattgcttcatctttgtccagcgagagccccttaagcttggcttctgagtctttttgacgcactctctggcatgatagtttggtccagattcatctagtagaatggctacac

SEQ ID NO: 3490 - DNA, 6000 bp, Homo sapiens
ttgtaagatttttttaaatatgttctagataacttccttatcaagtatattatttgcaaatattttcccttattctgtgagttgtctttttacatttctgatagtgttctttgaagcacaaacatttctcattttcatgaagtccaatttatttattttttcttttgttgcccttgcttttggtgtcatatctaagaatccattgcctaactcaagaccagacttactactgctttcttctaacaattttatagtataatccatttttagttaattttgtatgtgctgtgaggtgagggtcccacttcattcttctgcatgtggctatcctgttattccagcacactttgttgaaaaaatctattctttccccattaaatggccttggcagctttgttgaaaatcaattgaccatagacacgtgtgtttatttctggattctcaattatattttactgatctacatgttagccttatgccagtaccacactattttggtaactgtagttttgtagtaagttttgaaattgaaaaggctgagttctcttgcgggattgtgttggctattctgggttccttgagtttccataagaatattaggatcagcttgtaaatttctacaaagaagccagctggggttctgacaggaattgcgttgaatctgtagatcaatttgaagagtatttccaccttataaatattgtctttcaatccacaaacatatgatatctttccgtttatttagatcttttttaatttctttcaacaaagttttgtgtttttaagagtgttacttttgcacttcttttttttgcacttcttttttaaaatttacttctaaatatttcattctctttgatgtcattgtaaatgcattctttttaactttcatttttgtattctttcttaaaatttatttgttgaagaaaccacgtttttttctgcagtttctcccccctcaacacacagacacacacacacacacctgcactctaaaccacacacacacacacctgcactctaaacctaagtctggatgttgttgcttacatccctacaatgttaacatatttttccttgtatttttctaaaaattcatagttatatctaggagcttgatagggttcaaattgcattttttgacaaaaaatactttctatgtgctgctgtgtttttccatcaagaggcatatgatatatggttaacactccttttgtaatgttagaagacattaactattattacctagatccactaattcattaaaggttgtaattttatcattccttcataatttattagctgggaatctttttaaaacactttcctcgccaactcctttgttacaccaaggaataatttgtatttaaaaaaagcaggttaaatgtttgagtcactctctttatttaccagttttaaaataatgagctagctttctaggtttggccaaattgagcaattatgtttttaagtgtttttatgaatttgtatatttaaacatatttgatatatttcaattcattgtagttattatctttactgatgctcaaattgccccgtgtttgactgatgacagcctcttcaagtccttttgactcaactctaataatgtttttagcttccttgctatctggtgtgacaagatattttatgttcatcttggatatttcttgccacatatctgaagtcagccatttatttaagtaatcctgggtccttttattgggaaatagcatttagaaccatcctatgggcactataggtgaatttggacactgagattttcattgtttctaagtatttttagtggacagagcttaaaaattttttttaaatgactaaactgagttcatactgatgccttccataattggataatcttaagagatctttccttcaggctatgaaaaatctggcaaagtattcctattccataatattatccctgtgtcaaatgattttttaaaaaaatattgtatcaccagaaactgtgacttgctcttggacaatgataggtaaatagttcacaaattcttactaatttcctatttacatatctatgactgccataatttctgaataaaacattagatgatctcatgagtattgttgtaaaaattaggacaataggacaaagtatttgaaatcaggactatctggaaaatataacgtgtatagttgccacataaatattctaggacaaagatgacaaatacgttggcctatgaatatgttcaatattaatgattaggacagtagttgctaaattgggtcctgagctgttctagtcctgctaatagatgttccataaacaaaagaaattcatgttcacaaaagttttggaaatgtaagattgaaaaacaacacaacagatttctttacttcaggactccaagagacgttaatgttttaatatgcaacgtgactcttctggaagggaaatagtatgcagtgtttatacacttatttgaatgcttcacggaaccctcttgtacataacaacttgtgactgctggaccaggctgttcttttaaattaatcacattacaattatgtcttcctgaagctcaggtcaatgtatttcaaactgatcaggatgagactttgggagatcttgttcattgaatgttgaagagcgtatgtgtgtgtgtgtgtgtgtgtgtgtgtgtgactctgaaggtaaccctatctctggtatccaaacgcaatcttggtttggccttctatctaccgactacactatgattctattgtgtgtgtgtgtgtgtgtgtgtaactgtgttataaaaatagaatttttattgtgtgtgaaggacactatttgacagatctcaatgattgaccattgggaatagtcccatctgagagccacaaaaccatccacagctgttactttgaatcttcgtgctgtccatttttgctgatccctcacaactagtgttagtcatgttgcttccattctagaaagataatagtagctgctttttaagtggcctctagagactcttttaatataggatttacatgtaggaatctttggtctaacaaaggatttttcttacctttaggtgttccaacattcactaaacgtgtggtgctttcagcagttgtgagatcctgactacagaacgaggtagcttagaaactaaaagatccttaaaacttgccagttggtttgggggtttctcagagatttttaaactgttggaaaatggcatctatgagaaaatgaaaaagtagtctagattgttacacctaaagacgagttactctaatatgaaggactgttatttaaagcatttcacaaaactatttattgaggtgcaaaaagaaaacattggaacatcaatatatttatttttctcattcttttaaaatttctgtggagtattttaatgtttactcattaaaatgtatgtttaaagtaatgtgtaatgtatacatgtacagtagtacatgtatataatctataaatccttatacatatgttggggcccatgctcaatagttttttaatagactaaaatgtatgcggaaaatttgatttagaggattgtgtgaatctcgtcttcatcagaagagtgttttagagtgtatgtgtggggaacggggttggtttaaataggagcacatgagattcagttacatcaatttattttatttaaatataacaactattagtgatacagcattcattcatattcagcaaatattttctgagcatgtcctatgcagcaagcattgccctaggctctgtgcatacggtggtgaacacaaacgttgtccttgacctcatagtccttccccactatagtttagtagggaagacagctgtcaaccaaataatcatacacttaaatgtaccaccaaaaatgggtaagtgttatgaaggaaaaatacagcaagttacaggaggctacaagagtataaactggggcaccatctctattctgagattatcgagaaaggttatcctgagaagtgacatttaagctggggcctgcggagattgattgcacgattgccttgtcaagagacagaggaagagtggcctagatggaagtagcgggtatgtgtgagggcctggacggggtcatgagatgagtgagggcctgtgccacaaggtcacagggtttcgggcaatggggaagcttcagagatggagctgcctgacagagaggtggagtgcaggctaaatgacctcaggagctttgtccttcttcaattccagggggaaaatcacaaactagttggaagtaccagagggctacagaaaacaacaaaaagagactagctggtcggctaggcacaattaaaacatcaaattctgccccagcagcaattccgggaaattcaagtaatgccccctgtgtggccctctagaactgtatctggtaagagtaaagggcagtgtgtcctctatgcctgcgctacagatgtggacattttttttaattgcctgaaaatttcataagctgtagccagttagagggcctagcaatgtgttgtgatcatgtgttttcctgagttatttgaaacaagagggtgtatgtactaccctcttggcaaaattaaaggattttgagctaggataaatgaggtagatcagaggataattgcaggaagtggggcagtggctagccctgcttgagggcttaggcccaggctgcagaggagctaagtggaagagcaatatttgacggtctattgccgctgtgcctactaatcggctaggggaggagaaggaggacaagggagaccagggttggacgatgagcatgaaagaagagtgggcgagccagggagcgcttgccacatggagggcgggaggcggctacaccgggtccccaccgccgagaaaggggcacgaggaggcggcgcgggccccgccccctcccctggcgggcgcgggcgcgggctcgagacgctgcgcggcggcagcggcgggcgcgagcggcagctgtcaggccaccgaggtccaagccgcacttgctgccccattgaggacgaggaggcagcaggagcagtgacggtgactctaaggagccggattcccggcacgcagagctgacctgcctggcacccgcggccctctcctgtttccttcccattgtgttgggtaaggtgcctgtgcgtgggcaggaacaggggctaggggctggaggacccggaaggccgggaggtggggggcctgtgagaagagggagaaaggaaagtctagttgatccccaggaccactcgtagcttgagaaaagggactgagccgctcccgaggtcggagtcgggggcaggtgacagtgcaggggggcgttgctgagtaatcccgagctgctgccagagccgagcagagaggcgcagggctccgtggggagcgggtgtggctcagtgcgcatgcgccacagccgactagctctaagagctgggggtgaggtgagaggacctgggtcggaggtagttgggactatgtgtgacatctcactttctaggtccgtaatgctaacagtgcccctgtcgtagagatgccagcattcttgtctcccaaggaagctttttttccttgtgttcagctcgcttgatgtcatccaaaccttatctacctatctgtccctgggcagtctactgaggaagaagtgtcctggggacgatgccagattgctatctagtgtgcctttgggcttatagccctagagctgtcgttgtgagcagtgaaaggttagatgtgggactccacattggaccctttgagttgcatataggatataaatgtgggcatgaatgtaggaatagcgtttcagtggcatgacagctgtggcatttggagtcggcatggatgtagctgataacttgttagctctgcaaaatgaatccagtgcgtcagagggtttccgcgctacgaagcacccaccaccagcaccaacgccaagtattgggttgtattggaaacacactcaaacattcaatcatttctcatccgtgttgaattttacataaatatagccg

SEQ ID NO: 3491 - DNA, 6000 bp, Homo sapiens
gaccaaagataacatttttcattgttaaacatgttgaccttggatccagaccaacccacattgaatcctggctctgccacctgggcaagtcacttaattgtgcctcattttcctcatctacaaatctcaggagggtgttcggaagactaaatgagctaatatttgtaaagtgtcttagaggaagcaccatgctgtttgttaaatgaaaaggcttggaactgttttaaaaaaccaaaacccagcacattttcgggggacaatgatagagagtacatactaagaagtattgatgtggtcaggctccgtggctcatgcctgtaatcccagcactttgggaggcctaggcgggtgaatcactttaggtcaggagtttaagaccagtctggccaacatggtgaaaccccgtctctacaaaaaatccaaaaattagccgggcgccatggcatgcgcctgtaatcccagctactagggagactgaggcaggagactcgcttgaacctgccaggtggaggctgcagtgagccaagattgtgccactgcactccagcctggatgatggagcaagactctgtctccaaaaagaaaaaaataaagaagtagtgataaagacaggcaagtatggtggggggccagatttgaactggcaagagttgggccctaactttggaggtaatgaagttactttttttttttttttggtggaatggggatagagaatgaaattacagggccgggtgcagtggctcatgcctgtaatgccagtactttgggaggacgagtgggaagattgcttgaggccaggagttccagaccagcctgagcacataatgagacatcatctctaccattttttttttaaattagccaggcgtggtggtatgtgcctgtggttccagctactcaggaggctgagatgggaggatcacttgagcctaggagatcgagactgcagtgagcagtgattgctcccgtgcactccagcctggatgacagagcgagaccctatttcaaaaaagaaaaagaaagaaattacaaagatactctttttttttttttttttttcttgagacggagtctccctttgtcacccaggctggagtgcagtggcagtatctcggctcactgcaacttctgcctcccaggttcaagcaattctcctgcctcagcctcccgagtagctgggattacaggcagatgccaccgcgccctgctaatttttctatttttagtagagacggggttccacaatgttgtccaggctggtcttgaactcctgatctcaggtgatcgcccgcctcggcctcccaaagtgcttggattacaggcatgagccacctcgcccggcctacaaagacacccttctgtgaagtttaacccaggaagtagttttgttttttggttttctttaagagacagtctcattacgttgcccaggctggtcttgaactcctgggctcaagcaatcctgctgcctcagcctctcaaagtgttgggattacacgtgtgagccactgtgccaggcctaggaagtagtcattatgtggtgaagatgatccagggctcccttacccattaagcagagtagatcagtgttcagaagtgcaggcaatgggtgacattttatctagagctcctttggataaatattgaaaatatggtcaggctctgtggctcatgcctgtaatcccagcactttgggaggccgaggagggtggatcactttaggccaggggataaatattgaaagtatcaattccaggccgggcacggtggctcatgcctgtaatctcagcactttgggaggccaaggcgggcggatcacgaggtccggagatcgagaccagcctggctaacacagtgaaaccccgtctctactaaaaatacaaaaaaattagccaggcgtggtggcgggcgcctgtagtcccagctacttgggaggctgaggcaggagaatggcgtgaacctgggaggcggagcttgcagtgagccgagattgtgtcactgcactccagcccgggtgacagagcgagactccatctcaaaaaaaaaaaaaaaaagtatcaattccaaagtaaggtaaaaattatttatatttacttaacattttaacagccttgcattgatttttattgatatttgtaaaaaccaataatcatggattgattaaatacaaagttaattatatctgatggcaaaagagactggaaaacactgtcaaaatcatgataatcaggtacctatgaaaacaactgcatgtatttgaaagtaatttaataatgcacaattaacacaaagggcattgtacagtacatttaatttttttacaataggtacaataaggtagttttcctgtccttttaattaaaaattatatttttatcttttttcaaaagcaatatatactcattgaattaattccaaaaaatataagtggaaatcccccaaagtctcaccccacagaagtaacagacaccttttattagggcaagaagcccattttgagatatcatattttcagaaatcaaagtttcttccttacaaaagtagactcagtgacaagtttttgctagaagcttacattgaaataatcttattatgtacatatgtttttttaatatctctcaggaagttagcattaattctagctgtgaattggcaaagggcaaagcccctttctactttgtgtacaggatgtacctaattaatagttacccctctccaccttaaagctattctgtagataaagatcatcaggggcattaacttccaatacagaggggaacgatccagcaaactaggcatcagactaatcaaaaccaaaaatactgtacaatgatgattgatacataatacaatgaaaattggtattcataaggatgattttggattagccaactaagaggaaatccttatctgggtagttttaatgctgagtagtataatgtagggttttagaaatgggcgacccacatatatgataaaagggttagctgtaaatatatctgctagctcagctaataaacttattaactggaagatgccattctgagtaacttggacgtccttgagtagtcacattccaatttgctttcaggtatatcactgatgcactgaattgtttttctctcagcagaaatggatttggtcatgtttgtctcttcctgcagctcaacctcccaaataagatggcagctcaactgtgctgtttgaatccctgaccttgatggcattagcaataactcacgagtcagtgctagtgacatgtgtcagtgttaccttagcttatgaaatatgtagggggagaggtaaagtcttaaaagaaacaaatgggtgcactttatcgtatgtaaattgtacccccagtaaagtcgatttcaaacaaattctgaacccgcgaatgactttagggagaaggaatactggtcttgaccaagatgtgtgtgatgattagtaagctttgggcagcagccccctaatactgtaaggaggttgtgttcatttatcatcttccaagcataatctaggcttctggcaaattagacccaaccactttgttctacattcagctgcagggggaggtgaaccctcctagggattcccaactccctctgaaactccagcgttctggagggacttatggttatatggagggcttgggaatggaaggcactgtggagcttatgccattgtcccaagatcctccacctgggccagtaatggctagccccgtaaacaaagtccccttttgctggaactgccaccactagcttcccccccttctcctagcctctgtgtggccctctcccgcggcgggccttccccattggccagccaaacacaaccgactgcggcagccaataggagccgctctcctgaacattcagaggatgggtgcgcgtggtgtgataaggggatgttggcgcctggtacgcgcccccctacatctggcaagtctgtaacagaaacagttacaccccctacacacgcacacgcgtgcccgctggctccctcctctcagctgtacaggccccggacaacccactgcgtgtcttggcagcggcctcccaggctgcctggggcccgcgagtgcacctgctcactcattaagacagagcatccctttatcccaaggcgcgggtcgggtagagggtgggggtagaggggacggggtagcggggaccgggaaggcgcggctcagctgcccgctgctcccgaggtgaaagaggtgcctccgcccccaccccatccccgcagagttgcgttgctccagggaggccgaagtgatccagtgatgtcttaaggtgcagctctttgtcctccccagctgtgctccctgcccgctgaccccgtgcgctcgagccagtgggggtggggagcccgaaacctataacataaacgggggcaaggagaaagaagtctatcccggggtggcgtgtgccgctgtccccaccccgtctctttcctcctgaggcttcttccctcgggtccgtcccgggaatgcaggcaggggagggtgtgggccgaggcgcggcggcggctggagcagcgcggtagggtccttcgccagagcatccggtccgagggcgcacacaggcagaaggctcgcggctcgtccactctcctccctctctcctcctctccctggcttttgtgttggtgcctccgagctgcaaggagggtgcgctggaggaggaggaggggggcccggagtgagaggcacccccttcacgcgcgcgcgcgcacacggtgccggcgcacgcacacacgggcggacacacacacacgcgcgcacacacacacgcacagagctcgctcgcctcgagcgcacgaacgtggacgttctctttgtgtggagccctcaaggggggttggggccccggttcggtccgggggagatggcgcagcccatcctgggccatgggagcctgcagcccgcctcggccgctggcctggcgtccctggagctcgactcgtcgctggaccagtacgtgcagattcgcatcttcaaaataatcgtgattggggactccaacgtgggcaagacctgcctgaccttccgcttctgcgggggtaccttcccagacaagactgaagccaccatcggcgtggacttcagggagaagaccgtggaaatcgagggcgagaagatcaaggtgatccagggggtcaggtccaggaagggtgggacccgggaggggacctcgcccgaggcatagctctagcggttgtcgtcgtccagcgtccagcgcgtggcggtttcgcctcttgctgagccgaggaccctcggctcctcctcaccccttttcacctctctcagcggggccccgtccccacttcactcagttttttagggcggttgagaatggggttgcattcttacccttagcccctgcctgacaggtcctgccaggaaaagcatgttggattcccatccatgacccctaccccgagcagcggcacctgtgggcagagggaggcaggaggcatctgtgggtcctagtctctgggatggatcccaaagcactttacacatcctgatgtctcttctactgcttgggtgccgataggctgcaaaaccccactttggctaagcctcaaggcgttagagggaaggaaatgatggaaatccatggagaatgaaaaagctgctttattttaaattgcagtttatagttaaaaaattagggctgagttgagatggcggtggagtggggtggttctggcagaaagccatgagcccttttaaagaaattgaggcagggtccagcccttcgtaatagacaaaacttgtttttttgtaacagcccccctggaatgatatcttctttacttgtctggggcatctaatacatgaactgctccttattcattctgttggtattgtcttcaggtctttgtaaaaatgcagtgacttaaccgagggccaggggaatgttcaatcctccccctccatgagtttatgtaataggctaagtgcaaatattcttgtctgaccatttg

SEQ ID NO: 3492 - DNA, 6000 bp, Homo sapiens
ggccctattacttatattatctgcatatagtgcatacactgtggtttcttcacactatggtaaaaatgggttgtgttctttaaaataatgcctgagcaatactttggaaaggaggttgatgcagaattaaagcaaaagttgtgaatctcaagggcatgatctctagagaagtcctcccattcccctcttcccatattcaagcctttggagtagaaaattattacttgagcagtttctatttattgagcaattaatatttggaaggctaaatgctttgaatggatttctcatttattattctatgagttagatactgctattatgcccaactttacaaatgaaggaatggaggtgtagcttgcaaaagggcagtgttaggactgtctggctctgaagtccaaattccttctaaaacgctgccctgcatttgttagtcctgaaaataccctaaagcaagtaacaatcactataaaatgctaaaattagtaatacctactgtgaggttataaaatgatacggtcatactgcattggtgggaatgtgaattggtgtgacctttctgaaggacaatttggcaatacttaccagaagaattttaagtgcaagtgccttttgtttcaattattgaattactagaaattcaccctaaacattaactgacaatgatatatgtccaaggcgtttagtgcaaaaacctagaagcaatcagtgtccttcaaaggggagctggctaattagcttatgatacagccatgaaataaaaattaagaaggccagacatggtggctcatgcctttaatcccagcactttgggaggccaagtcgggaggatcccttgagctcaggagttggagaccaccatgggcaacatagtaagactccatctctaccaaaaaaattaaattaaattaaattagctgtgtgtggtggcatgtacctgtagtcctagctactcgggaggctgaggtgggaggatcccttgagtccaggaggttgaggctgcagtgagctatgatcatgctactgccctccagcttgggtaacagagggagacactgtcttaaaaaaattaattaattaaagtttaaaaagcaaggtaaaaaatagtgtgtacagttgattacttttgtagtacagtaatttttaaaaatatatatagaaggtagattgatacactgacatatgaataatgttcccccctgaaaaacataagaagcttttaacaataaatatctttgtgaagagtaactgaattattattttcgtgccacttgcagatatttgagcttttaaaattttgttacccccatgtttgctattttttaaaaattaacaattcattaaatcttttaaataaaaaccaaatagcatttattgaggctttataatgtgcaagggactgtgctaagcactttacctgtaatacctcattacattttcacgttaacttcttatctcctttttacaagtgaggagttagaggctcagacaagtgaaatcacttgcttggggacacagagctagaatgtggcggagctgcaattttaatgcacctctgtctcatttcagagccttagctctcaactgccaggccgcactcttctgcttgctctttataccctcattgcttaatgagagtacactagcaaacaacaggagtctaatgagataatgtatgtgaaaatacttttctaagtatagagatgtttggggagggcaagcaagggtagggaatttgtttaaattgggcggacctgtccactgacccctagacagtcaggattttttttttttttttttacaaaaccaagatcaacaactttcttttgttcctcctttaaaaatattataaagttatatttacttcctttttcccaattattgtttataaattaaaatatggagaaataaaagccatttcataatagtcctcacccataattactttgtttcagatttgaatggctatgtaactattacacacctgcgttttacataaacagtagcaactagacatttgttcagtatcttgctttttcagccctacaatatatcttggccatctttttatataaacacttacaaatctgcttttctcttttaaagtagctgcataatatcctattctgtgaatacagataggtaggtaggtaggttggtagatagatagatagatgatagataatagatatagagagctatgaaacttttaaaaatcacctactgaaggacatttaagcttcttccaattgtttgatttcctaatcaatgctgtaatgaatacccttcctaagaaagtttagaaggatctttagactgagtgtaatatttgtccactgtagttgacgagagtgaccccacaggacgctgtactgaggggaggagtatgtttcactgcgtggagaaacaaagaactctctcctaagcatgaccaacacattcagagatattagaattgccaacaggtgggatgacctgaaaaagaactccttgctttgacagtttagtaatagagcaaagacttgccacgattgctcaacactggctggatcagaagaggaatttccagactcagttacaagcacggctggtggagggctgtgaatcccaccagacagtctggagacagctaggcagggagatgagcagcagagctccaaatcaggcaacagcacgtgtgaaaggagcagtgacctgtggggaaactcataactcacagaccaaaccccttccagcagagggcagtgcctctgatacgacacagggcccaggccagctggagccagagctggggacttcgctggagagatggcaccggcctgaggtcaaggagaaattgaactaaactctcctttgaagactgtaagtgacattggggaatactcagggagggacagtgggacctcacactactatgattcgcctgtgttctaatgtccaacaatttaggctgagtaataaatctctttatagagtttggccatttagggcttgtaagtaagggaatttggagtcatttttgctaggctggccactgagtctcgcaggtttctgggtacatgcttgaattgaaaagaaagtgacacacctaaaatacagcctagactcctggccctggggctctgtggatccgacacaaagtttacaaatagaaagctagcaaagggaaagatagtcggaagtaacaattttatctaaaaatagaaacttagaatctaacaccagagttactacttgcttttgaatttcaaagactacataggatggcctttaaaacaaaacttcagcatgtaagagccagccaagcaaattgttatacataatcaacgattaaaataaattagtctttaggcctaaaccgtttccaatcaaatctttcttgaatattggttaccttttctgccgtgtagtggttggaatcaaatgagaacatagctgagcagagtaccataaagtctacttctaatgctgctgttttcgagccttgtgatttttttttaagtgactttagtattcgctggtaaagtcaaggcggatctaccagacggtaaaagttctgtgtgtttgtcaggcacggctaagtaaaacgcactgcatctgaaagtctaagggtagtttgcatgcatctctcagcaaaatagcaagtggaagaaataccagcaaggagaataaactttctgggctgtttgatttcccctgcaacttctagtccagggatgtttggcgttctcccggtcgctagattattagcccgcaggttccgcaccggccagggagccgctcaagtcctagggccgggcggctggaggttgcaggtcggaggggcttctacgggtttgggggtgggacggtccgcggcagccgcgggcgggtaaggactgacgtcgcaggtttccagaggcccgttcccgaagccggagtcccgacccgaaaccgtccccggccggctcgctcgctcagcagggcgcggctccagcgccacccggctcgccccgaagaggtgggactttccccaccggaagtgatcccgtccagtctcggggaactggggcacctcagccagtgtgtcagggaaacccttccgggtgtgtgcttggtgggggtgggggtgggggtgggggtgggggtggggggtgggtgagaaaaaaaagaggtgggttcgcctggagtccctgcggccgccgcggaaggcccccgcttctttccccgcggcgagcagcagcgctggggcagcggagagacagaggagccagcgggtggccatggccttggcgtgacagagcctccccggcggccgggcgggtgcggacggcggggtaagcggcagtagcttgatccgggtgggagttgggggaggcggcggccggcgccgcaggttcggggcgggggtcagccgggtaatgtgcgtccttctccccttcacaggccggacgacccccgcgggagccggggcccagaaacccgcccgggcagcggtaactggaacggagccctcaggcctgagccggctgggctgcgcgagcaggaagcggggtccctgggcccctttgtgtgaagggcgggggaggagtgccgggcagccccgggctgcgggctcctccgacgtccgcctcgccgcagggtcccctcgccgcagcccccaccctttccctcccgggggcacgcgcctcctcgccaccctcgccgggcttttcccaggctcgccctcctccccacgccccctgctcgggctgcagttcctataggaagggcattaccatcccttccccaccctccccgactctacgctctttcccctccccctcctgtaacttcctcttcttccccggttgggccctctgctcctctgcactctcctccccagttcgcagatttccgcccaccttccgcctcgtctagccgcgccacagctagcggggtgatctttccccccctctggtaggagttggtgaaggtgagactcatgagggaatacaaggtagtggtgttagggagtggaggggttggcaaatctgcccttactgtgcagtttgtcactgggactttcattgagaaatatgaccccaccattgaagatttctaccgcaaagagatcgaagtggactcttccccctccgtgctggaaattctggacaccgcaggaactgagcagtttgcctccatgagagatctctacatcaaaaacggccaaggtttcatcctggtttatagcctggttaatcaacagtcttttcaggtaaccaaaccaagtcttgtaatttgttagaagggggtgtggtaatccgacatcgacttctgggttgcttgaaccgtgcattaatgactgtgctttgcttttgaaagttagacatgacgcatttttgaggttactcctgccatggaagactatcgggttgtttctatagagcgtagtaaaaagtaacaagcgtcaacaaatattttaaagctatttttaagtgaaagaaaagtgaaaaagaaatgtcagtctgtgtatatttcgcctggaatataaccttctgaagttgcttgctcaattcaacaagtattgattaacttacacgacaaaacatctaacaaataatctcgggtaaatagagcactttgaaaaaattatttggagccgattatctgttgcacagataagtcctctgtgtctgtcccacccacaccttcccctcccaccccccaacaccccctcccgccgccctccccttctctctcaagtttctcaactagattcataaatcttagtgttgcaagacgaagaactcaagacctgccttctaggcattttacttaattacttggggcgtgtagtaggaagaaaagttactaatagaaaagactagtacctagaattaataaccaacaaaaatcaggaatgactctttttctgcagttgatccaaattgtttctggtaacattgcctgtatttacagaaaatacgtgggtctgggaacactgaacaagtgcagatttcttactccggctgggtggcc

SEQ ID NO: 3493 - DNA, 6000 bp, Homo sapiens
caaaaaaaaaatgttctttaactctctccagaaaaaaaattgtgaaagacactaaaatgttaatagcaattttctccaggtagtgggattatacttttataattttttgcaaataacattattttcatgagaaaaaagataataataaaggtataaaattggttttgtgtactgggggagcctgacatgcagaactaatgattaactaatgattggtgtagctggaggcaggatttgaaagagaagattggaatcttagagggtaggagctagaaagaatccaggacaatttagctgatatcaatggggtccctaaagcattgaaataagatttctgtaggcaaagactgaggacattactggctcaagctttctggtaattcaagagcaacttctagcaaaagagaagggaagagcctggatggaaaatagatagccatgtatagaaagtagatggatagccatgggttttttcccaggacctagaaggcaagacggctcatttggagagtggaagttagggtaaaatatcccaggcagttggtggctccaaggattgcaactgaaggaggtaacaactcgaaaagaagaaagggataagtaagcaactggtgcctgtagcaaacatccagcactttaaacttgtgccaaactaatttcaaaaaatgagattatggccctattacttatattatctgcatatagtgcatacactgtggtttcttcacactatggtaaaaatgggttgtgttctttaaaataatgcctgagcaatactttggaaaggaggttgatgcagaattaaagcaaaagttgtgaatctcaagggcatgatctctagagaagtcctcccattcccctcttcccatattcaagcctttggagtagaaaattattacttgagcagtttctatttattgagcaattaatatttggaaggctaaatgctttgaatggatttctcatttattattctatgagttagatactgctattatgcccaactttacaaatgaaggaatggaggtgtagcttgcaaaagggcagtgttaggactgtctggctctgaagtccaaattccttctaaaacgctgccctgcatttgttagtcctgaaaataccctaaagcaagtaacaatcactataaaatgctaaaattagtaatacctactgtgaggttataaaatgatacggtcatactgcattggtgggaatgtgaattggtgtgacctttctgaaggacaatttggcaatacttaccagaagaattttaagtgcaagtgccttttgtttcaattattgaattactagaaattcaccctaaacattaactgacaatgatatatgtccaaggcgtttagtgcaaaaacctagaagcaatcagtgtccttcaaaggggagctggctaattagcttatgatacagccatgaaataaaaattaagaaggccagacatggtggctcatgcctttaatcccagcactttgggaggccaagtcgggaggatcccttgagctcaggagttggagaccaccatgggcaacatagtaagactccatctctaccaaaaaaattaaattaaattaaattagctgtgtgtggtggcatgtacctgtagtcctagctactcgggaggctgaggtgggaggatcccttgagtccaggaggttgaggctgcagtgagctatgatcatgctactgccctccagcttgggtaacagagggagacactgtcttaaaaaaattaattaattaaagtttaaaaagcaaggtaaaaaatagtgtgtacagttgattacttttgtagtacagtaatttttaaaaatatatatagaaggtagattgatacactgacatatgaataatgttcccccctgaaaaacataagaagcttttaacaataaatatctttgtgaagagtaactgaattattattttcgtgccacttgcagatatttgagcttttaaaattttgttacccccatgtttgctattttttaaaaattaacaattcattaaatcttttaaataaaaaccaaatagcatttattgaggctttataatgtgcaagggactgtgctaagcactttacctgtaatacctcattacattttcacgttaacttcttatctcctttttacaagtgaggagttagaggctcagacaagtgaaatcacttgcttggggacacagagctagaatgtggcggagctgcaattttaatgcacctctgtctcatttcagagccttagctctcaactgccaggccgcactcttctgcttgctctttataccctcattgcttaatgagagtacactagcaaacaacaggagtctaatgagataatgtatgtgaaaatacttttctaagtatagagatgtttggggagggcaagcaagggtagggaatttgtttaaattgggcggacctgtccactgacccctagacagtcaggattttttttttttttttttacaaaaccaagatcaacaactttcttttgttcctcctttaaaaatattataaagttatatttacttcctttttcccaattattgtttataaattaaaatatggagaaataaaagccatttcataatagtcctcacccataattactttgtttcagatttgaatggctatgtaactattacacacctgcgttttacataaacagtagcaactagacatttgttcagtatcttgctttttcagccctacaatatatcttggccatctttttatataaacacttacaaatctgcttttctcttttaaagtagctgcataatatcctattctgtgaatacagataggtaggtaggtaggttggtagatagatagatagatgatagataatagatatagagagctatgaaacttttaaaaatcacctactgaaggacatttaagcttcttccaattgtttgatttcctaatcaatgctgtaatgaatacccttcctaagaaagtttagaaggatctttagactgagtgtaatatttgtccactgtagttgacgagagtgaccccacaggacgctgtactgaggggaggagtatgtttcactgcgtggagaaacaaagaactctctcctaagcatgaccaacacattcagagatattagaattgccaacaggtgggatgacctgaaaaagaactccttgctttgacagtttagtaatagagcaaagacttgccacgattgctcaacactggctggatcagaagaggaatttccagactcagttacaagcacggctggtggagggctgtgaatcccaccagacagtctggagacagctaggcagggagatgagcagcagagctccaaatcaggcaacagcacgtgtgaaaggagcagtgacctgtggggaaactcataactcacagaccaaaccccttccagcagagggcagtgcctctgatacgacacagggcccaggccagctggagccagagctggggacttcgctggagagatggcaccggcctgaggtcaaggagaaattgaactaaactctcctttgaagactgtaagtgacattggggaatactcagggagggacagtgggacctcacactactatgattcgcctgtgttctaatgtccaacaatttaggctgagtaataaatctctttatagagtttggccatttagggcttgtaagtaagggaatttggagtcatttttgctaggctggccactgagtctcgcaggtttctgggtacatgcttgaattgaaaagaaagtgacacacctaaaatacagcctagactcctggccctggggctctgtggatccgacacaaagtttacaaatagaaagctagcaaagggaaagatagtcggaagtaacaattttatctaaaaatagaaacttagaatctaacaccagagttactacttgcttttgaatttcaaagactacataggatggcctttaaaacaaaacttcagcatgtaagagccagccaagcaaattgttatacataatcaacgattaaaataaattagtctttaggcctaaaccgtttccaatcaaatctttcttgaatattggttaccttttctgccgtgtagtggttggaatcaaatgagaacatagctgagcagagtaccataaagtctacttctaatgctgctgttttcgagccttgtgatttttttttaagtgactttagtattcgctggtaaagtcaaggcggatctaccagacggtaaaagttctgtgtgtttgtcaggcacggctaagtaaaacgcactgcatctgaaagtctaagggtagtttgcatgcatctctcagcaaaatagcaagtggaagaaataccagcaaggagaataaactttctgggctgtttgatttcccctgcaacttctagtccagggatgtttggcgttctcccggtcgctagattattagcccgcaggttccgcaccggccagggagccgctcaagtcctagggccgggcggctggaggttgcaggtcggaggggcttctacgggtttgggggtgggacggtccgcggcagccgcgggcgggtaaggactgacgtcgcaggtttccagaggcccgttcccgaagccggagtcccgacccgaaaccgtccccggccggctcgctcgctcagcagggcgcggctccagcgccacccggctcgccccgaagaggtgggactttccccaccggaagtgatcccgtccagtctcggggaactggggcacctcagccagtgtgtcagggaaacccttccgggtgtgtgcttggtgggggtgggggtgggggtgggggtgggggtggggggtgggtgagaaaaaaaagaggtgggttcgcctggagtccctgcggccgccgcggaaggcccccgcttctttccccgcggcgagcagcagcgctggggcagcggagagacagaggagccagcgggtggccatggccttggcgtgacagagcctccccggcggccgggcgggtgcggacggcggggtaagcggcagtagcttgatccgggtgggagttgggggaggcggcggccggcgccgcaggttcggggcgggggtcagccgggtaatgtgcgtccttctccccttcacaggccggacgacccccgcgggagccggggcccagaaacccgcccgggcagcggtaactggaacggagccctcaggcctgagccggctgggctgcgcgagcaggaagcggggtccctgggcccctttgtgtgaagggcgggggaggagtgccgggcagccccgggctgcgggctcctccgacgtccgcctcgccgcagggtcccctcgccgcagcccccaccctttccctcccgggggcacgcgcctcctcgccaccctcgccgggcttttcccaggctcgccctcctccccacgccccctgctcgggctgcagttcctataggaagggcattaccatcccttccccaccctccccgactctacgctctttcccctccccctcctgtaacttcctcttcttccccggttgggccctctgctcctctgcactctcctccccagttcgcagatttccgcccaccttccgcctcgtctagccgcgccacagctagcggggtgatctttccccccctctggtaggagttggtgaaggtgagactcatgagggaatacaaggtagtggtgttagggagtggaggggttggcaaatctgcccttactgtgcagtttgtcactgggactttcattgagaaatatgaccccaccattgaagatttctaccgcaaagagatcgaagtggactcttccccctccgtgctggaaattctggacaccgcaggaactgagcagtttgcctccatgagagatctctacatcaaaaacggccaaggtttcatcctggtttatagcctggttaatcaacagtcttttcaggtaaccaaaccaagtcttgtaatttgttagaagggggtgtggtaatccgacatcgacttctgggttgcttgaaccgtgcattaatgact

SEQ ID NO: 3494 - DNA, 6000 bp, Homo sapiens
ttgctcaattacaatctagactaaaagatcatggcataaataatcttgttttaaatgcttcgtaagttttacataatcttacttttaaaaaagtatgagttttaaaaaaaaactcattcattaaaaaaaacttgtaagttatcatttaactcagtgaaaggcctgaaggtttgttactgttcctattaatctcataatttattaaattgaataaatttttttatgcatgaaactgttccttctaacacatcacagataattcaactagattatcttttggaccgtatatttataatgaagtcagggtacactgtggcactataatttgttattatcagaggtcacttaagtccctcaagtgttaggtacagatgaatttgcttaaataattgtactgttaatcaagcacttggtgattagtaaattggtgattttaattgcagcaatttgcttgctcaggacataaaaacataaaagtacagaaaataccacaaaacttctgaaattattactcagtgctctcctgtgcattctggatgctaaatcagaagaacagggaaaaagtgtattatggtttaactcaacccaaagaaatattaccaataaagcagagaaggaagaacaataactcacttaaaatcctggtgatgggaatataagcaatttcttatctccgctttgcttatctgcatttaaaaaaattttcttcattgaatgttgactattttgtgtgatggaaaatgttattttaaaaataaagaaatttaaggcagtgccatatgtattaacactaaccagctttttgttttacttgatcaaaaaacaaaacactacctgattcatacagttccatcaaaaactaacctgctcggtatggccatgattgaggttatcttctttactggacgacacaagttgtacaacactgatcttgcttctccggcagggatgaatagttcatttgcctgacgatctcagcaaaaagttcatccaccattgatttactttttgccgatgtctccatgaaaggacagccccattcttgagccagagctctgccttctgaagacataacctctctttctggttccagatccactttatttcctactaggattagtgggactttttcatatctcttcactctgacaatttgatctctcattggcttgatatcctattcaagcaatcacaaagagaaagaaaaacattatgctgtttgtataaccataacagaaatattacagtattacaaaaagtcatacctcagtgagtatacaaagctgaatccaaaatgaaatcacacctaaacagagaaatcgtcatcattttgtccactgaagtaagaactagataatttccagagaccctacctgctgggtttgtcaagaatataaaacatgggttgcacactaaccttgactcatataatcacttttacccacccccagtctatactgattaaaaaagcaagtttccaaatgattaatccattcgtacataaggatgtttggccatctccctaaacctgcctgcttgtcatcactccttgtaacacctgttatcctagcacaggattgcagcatctatgcattcctagccatgtagcaagagggcttgagtgaaagtgttttaagtgggaaaaaaaaccactttgtaatgcctagaataaaagagttacaaccagatggatacacttaaatgttttattttaaattgaatggtatgcatttattccagtaaaatcaaacaccttacaatacacttaaattcactagaaactactgtaacagtgagcaactcctgggaaggacagtgcaaggggagtctgggtgggaagaagtcattttttttttttttgcctgtgtttgtttttactacttgtttccccatgcgtattactttttccaagtagttacaacgaattacaaaagataagagcgttagcaattctccagtagcatcagttttgggaggtgggggcaagtattgatttaatacaatattatagacttaattataaaaatcaccattttcggtaatatttcataattttaaaagtttgccttaaatagaaaatgtatgcttaattggaagtcatagtaagtacagaatattcacatgtgggcctacggaaaagcaagggactatgaaaatctataaaaatatagttatttgatatttgcatcaatttggtttgataatatatcaactcagatttctaggttacgcttatttcccattgtctttatggaaacataagttcagctgaaaatccaaacttagggcatttgggctcaaaagagtttacacctccactgaaataacggcacagtttttcactcccaattcatgtctataacacaaatggatataacagaaatcttatgaaacacccttcaaaagactctcagcctccagagagtaagctgatagaataacaaatctcctgaggatcctttagggaaaaaatgcctgtcaaacagcaccttcagtactttggtactttctgggggaaaatgcttttatgatactattgtttgggaatttatgcctacataaaatgaatttagtttggtctcaatagctttgatttatttccccagaatttatcatcttaaaaaaaaaaaatccctgaagttgttctatcaggttactgggaaagttcactatagtactttaatttaaaatactaaagaaagtggaattagcacattgtattggctaaagcacttaaggtctcttaagtaagctacattaagtgcatacctttaaatgcagaaaaaatatatccatttcctaaatcaatggaggtcaatataatgggtcaatatgaggttattcattttcaagggataaatagaaacatacattgcatatcctaaaataacgttaaaccttcagtctgtttcccagtgaaggacaggacagattttctaagagattggaccacatccagtttggccacccagccggagtaagaaatctgcacttgttcagtgttcccagacccacgtattttctgtaaatacaggcaatgttaccagaaacaatttggatcaactgcagaaaaagagtcattcctgatttttgttggttattaattctaggtactagtcttttctattagtaacttttcttcctactacacgccccaagtaattaagtaaaatgcctagaaggcaggtcttgagttcttcgtcttgcaacactaagatttatgaatctagttgagaaacttgagagagaaggggagggcggcgggagggggtgttggggggtgggaggggaaggtgtgggtgggacagacacagaggacttatctgtgcaacagataatcggctccaaataattttttcaaagtgctctatttacccgagattatttgttagatgttttgtcgtgtaagttaatcaatacttgttgaattgagcaagcaacttcagaaggttatattccaggcgaaatatacacagactgacatttctttttcacttttctttcacttaaaaatagctttaaaatatttgttgacgcttgttactttttactacgctctatagaaacaacccgatagtcttccatggcaggagtaacctcaaaaatgcgtcatgtctaactttcaaaagcaaagcacagtcattaatgcacggttcaagcaacccagaagtcgatgtcggattaccacacccccttctaacaaattacaagacttggtttggttacctgaaaagactgttgattaaccaggctataaaccaggatgaaaccttggccgtttttgatgtagagatctctcatggaggcaaactgctcagttcctgcggtgtccagaatttccagcacggagggggaagagtccacttcgatctctttgcggtagaaatcttcaatggtggggtcatatttctcaatgaaagtcccagtgacaaactgcacagtaagggcagatttgccaacccctccactccctaacaccactaccttgtattccctcatgagtctcaccttcaccaactcctaccagagggggggaaagatcaccccgctagctgtggcgcggctagacgaggcggaaggtgggcggaaatctgcgaactggggaggagagtgcagaggagcagagggcccaaccggggaagaagaggaagttacaggagggggaggggaaagagcgtagagtcggggagggtggggaagggatggtaatgcccttcctataggaactgcagcccgagcagggggcgtggggaggagggcgagcctgggaaaagcccggcgagggtggcgaggaggcgcgtgcccccgggagggaaagggtgggggctgcggcgaggggaccctgcggcgaggcggacgtcggaggagcccgcagcccggggctgcccggcactcctcccccgcccttcacacaaaggggcccagggaccccgcttcctgctcgcgcagcccagccggctcaggcctgagggctccgttccagttaccgctgcccgggcgggtttctgggccccggctcccgcgggggtcgtccggcctgtgaaggggagaaggacgcacattacccggctgacccccgccccgaacctgcggcgccggccgccgcctcccccaactcccacccggatcaagctactgccgcttaccccgccgtccgcacccgcccggccgccggggaggctctgtcacgccaaggccatggccacccgctggctcctctgtctctccgctgccccagcgctgctgctcgccgcggggaaagaagcgggggccttccgcggcggccgcagggactccaggcgaacccacctcttttttttctcacccaccccccacccccacccccacccccacccccacccccaccaagcacacacccggaagggtttccctgacacactggctgaggtgccccagttccccgagactggacgggatcacttccggtggggaaagtcccacctcttcggggcgagccgggtggcgctggagccgcgccctgctgagcgagcgagccggccggggacggtttcgggtcgggactccggcttcgggaacgggcctctggaaacctgcgacgtcagtccttacccgcccgcggctgccgcggaccgtcccacccccaaacccgtagaagcccctccgacctgcaacctccagccgcccggccctaggacttgagcggctccctggccggtgcggaacctgcgggctaataatctagcgaccgggagaacgccaaacatccctggactagaagttgcaggggaaatcaaacagcccagaaagtttattctccttgctggtatttcttccacttgctattttgctgagagatgcatgcaaactacccttagactttcagatgcagtgcgttttacttagccgtgcctgacaaacacacagaacttttaccgtctggtagatccgccttgactttaccagcgaatactaaagtcacttaaaaaaaaatcacaaggctcgaaaacagcagcattagaagtagactttatggtactctgctcagctatgttctcatttgattccaaccactacacggcagaaaaggtaaccaatattcaagaaagatttgattggaaacggtttaggcctaaagactaatttattttaatcgttgattatgtataacaatttgcttggctggctcttacatgctgaagttttgttttaaaggccatcctatgtagtctttgaaattcaaaagcaagtagtaactctggtgttagattctaagtttctatttttagataaaattgttacttccgactatctttccctttgctagctttctatttgtaaactttgtgtcggatccacagagccccagggccaggagtctaggctgtattttaggtgtgtcactttcttttcaattcaagcatgtacccagaaacctgcgagactcagtggccagcctagcaaaaatgactccaaattcccttacttacaagccctaaatggccaaactctataaagaga

SEQ ID NO: 3495 - DNA, 6000 bp, Homo sapiens
atttgcttaaataattgtactgttaatcaagcacttggtgattagtaaattggtgattttaattgcagcaatttgcttgctcaggacataaaaacataaaagtacagaaaataccacaaaacttctgaaattattactcagtgctctcctgtgcattctggatgctaaatcagaagaacagggaaaaagtgtattatggtttaactcaacccaaagaaatattaccaataaagcagagaaggaagaacaataactcacttaaaatcctggtgatgggaatataagcaatttcttatctccgctttgcttatctgcatttaaaaaaattttcttcattgaatgttgactattttgtgtgatggaaaatgttattttaaaaataaagaaatttaaggcagtgccatatgtattaacactaaccagctttttgttttacttgatcaaaaaacaaaacactacctgattcatacagttccatcaaaaactaacctgctcggtatggccatgattgaggttatcttctttactggacgacacaagttgtacaacactgatcttgcttctccggcagggatgaatagttcatttgcctgacgatctcagcaaaaagttcatccaccattgatttactttttgccgatgtctccatgaaaggacagccccattcttgagccagagctctgccttctgaagacataacctctctttctggttccagatccactttatttcctactaggattagtgggactttttcatatctcttcactctgacaatttgatctctcattggcttgatatcctattcaagcaatcacaaagagaaagaaaaacattatgctgtttgtataaccataacagaaatattacagtattacaaaaagtcatacctcagtgagtatacaaagctgaatccaaaatgaaatcacacctaaacagagaaatcgtcatcattttgtccactgaagtaagaactagataatttccagagaccctacctgctgggtttgtcaagaatataaaacatgggttgcacactaaccttgactcatataatcacttttacccacccccagtctatactgattaaaaaagcaagtttccaaatgattaatccattcgtacataaggatgtttggccatctccctaaacctgcctgcttgtcatcactccttgtaacacctgttatcctagcacaggattgcagcatctatgcattcctagccatgtagcaagagggcttgagtgaaagtgttttaagtgggaaaaaaaaccactttgtaatgcctagaataaaagagttacaaccagatggatacacttaaatgttttattttaaattgaatggtatgcatttattccagtaaaatcaaacaccttacaatacacttaaattcactagaaactactgtaacagtgagcaactcctgggaaggacagtgcaaggggagtctgggtgggaagaagtcattttttttttttttgcctgtgtttgtttttactacttgtttccccatgcgtattactttttccaagtagttacaacgaattacaaaagataagagcgttagcaattctccagtagcatcagttttgggaggtgggggcaagtattgatttaatacaatattatagacttaattataaaaatcaccattttcggtaatatttcataattttaaaagtttgccttaaatagaaaatgtatgcttaattggaagtcatagtaagtacagaatattcacatgtgggcctacggaaaagcaagggactatgaaaatctataaaaatatagttatttgatatttgcatcaatttggtttgataatatatcaactcagatttctaggttacgcttatttcccattgtctttatggaaacataagttcagctgaaaatccaaacttagggcatttgggctcaaaagagtttacacctccactgaaataacggcacagtttttcactcccaattcatgtctataacacaaatggatataacagaaatcttatgaaacacccttcaaaagactctcagcctccagagagtaagctgatagaataacaaatctcctgaggatcctttagggaaaaaatgcctgtcaaacagcaccttcagtactttggtactttctgggggaaaatgcttttatgatactattgtttgggaatttatgcctacataaaatgaatttagtttggtctcaatagctttgatttatttccccagaatttatcatcttaaaaaaaaaaaatccctgaagttgttctatcaggttactgggaaagttcactatagtactttaatttaaaatactaaagaaagtggaattagcacattgtattggctaaagcacttaaggtctcttaagtaagctacattaagtgcatacctttaaatgcagaaaaaatatatccatttcctaaatcaatggaggtcaatataatgggtcaatatgaggttattcattttcaagggataaatagaaacatacattgcatatcctaaaataacgttaaaccttcagtctgtttcccagtgaaggacaggacagattttctaagagattggaccacatccagtttggccacccagccggagtaagaaatctgcacttgttcagtgttcccagacccacgtattttctgtaaatacaggcaatgttaccagaaacaatttggatcaactgcagaaaaagagtcattcctgatttttgttggttattaattctaggtactagtcttttctattagtaacttttcttcctactacacgccccaagtaattaagtaaaatgcctagaaggcaggtcttgagttcttcgtcttgcaacactaagatttatgaatctagttgagaaacttgagagagaaggggagggcggcgggagggggtgttggggggtgggaggggaaggtgtgggtgggacagacacagaggacttatctgtgcaacagataatcggctccaaataattttttcaaagtgctctatttacccgagattatttgttagatgttttgtcgtgtaagttaatcaatacttgttgaattgagcaagcaacttcagaaggttatattccaggcgaaatatacacagactgacatttctttttcacttttctttcacttaaaaatagctttaaaatatttgttgacgcttgttactttttactacgctctatagaaacaacccgatagtcttccatggcaggagtaacctcaaaaatgcgtcatgtctaactttcaaaagcaaagcacagtcattaatgcacggttcaagcaacccagaagtcgatgtcggattaccacacccccttctaacaaattacaagacttggtttggttacctgaaaagactgttgattaaccaggctataaaccaggatgaaaccttggccgtttttgatgtagagatctctcatggaggcaaactgctcagttcctgcggtgtccagaatttccagcacggagggggaagagtccacttcgatctctttgcggtagaaatcttcaatggtggggtcatatttctcaatgaaagtcccagtgacaaactgcacagtaagggcagatttgccaacccctccactccctaacaccactaccttgtattccctcatgagtctcaccttcaccaactcctaccagagggggggaaagatcaccccgctagctgtggcgcggctagacgaggcggaaggtgggcggaaatctgcgaactggggaggagagtgcagaggagcagagggcccaaccggggaagaagaggaagttacaggagggggaggggaaagagcgtagagtcggggagggtggggaagggatggtaatgcccttcctataggaactgcagcccgagcagggggcgtggggaggagggcgagcctgggaaaagcccggcgagggtggcgaggaggcgcgtgcccccgggagggaaagggtgggggctgcggcgaggggaccctgcggcgaggcggacgtcggaggagcccgcagcccggggctgcccggcactcctcccccgcccttcacacaaaggggcccagggaccccgcttcctgctcgcgcagcccagccggctcaggcctgagggctccgttccagttaccgctgcccgggcgggtttctgggccccggctcccgcgggggtcgtccggcctgtgaaggggagaaggacgcacattacccggctgacccccgccccgaacctgcggcgccggccgccgcctcccccaactcccacccggatcaagctactgccgcttaccccgccgtccgcacccgcccggccgccggggaggctctgtcacgccaaggccatggccacccgctggctcctctgtctctccgctgccccagcgctgctgctcgccgcggggaaagaagcgggggccttccgcggcggccgcagggactccaggcgaacccacctcttttttttctcacccaccccccacccccacccccacccccacccccacccccaccaagcacacacccggaagggtttccctgacacactggctgaggtgccccagttccccgagactggacgggatcacttccggtggggaaagtcccacctcttcggggcgagccgggtggcgctggagccgcgccctgctgagcgagcgagccggccggggacggtttcgggtcgggactccggcttcgggaacgggcctctggaaacctgcgacgtcagtccttacccgcccgcggctgccgcggaccgtcccacccccaaacccgtagaagcccctccgacctgcaacctccagccgcccggccctaggacttgagcggctccctggccggtgcggaacctgcgggctaataatctagcgaccgggagaacgccaaacatccctggactagaagttgcaggggaaatcaaacagcccagaaagtttattctccttgctggtatttcttccacttgctattttgctgagagatgcatgcaaactacccttagactttcagatgcagtgcgttttacttagccgtgcctgacaaacacacagaacttttaccgtctggtagatccgccttgactttaccagcgaatactaaagtcacttaaaaaaaaatcacaaggctcgaaaacagcagcattagaagtagactttatggtactctgctcagctatgttctcatttgattccaaccactacacggcagaaaaggtaaccaatattcaagaaagatttgattggaaacggtttaggcctaaagactaatttattttaatcgttgattatgtataacaatttgcttggctggctcttacatgctgaagttttgttttaaaggccatcctatgtagtctttgaaattcaaaagcaagtagtaactctggtgttagattctaagtttctatttttagataaaattgttacttccgactatctttccctttgctagctttctatttgtaaactttgtgtcggatccacagagccccagggccaggagtctaggctgtattttaggtgtgtcactttcttttcaattcaagcatgtacccagaaacctgcgagactcagtggccagcctagcaaaaatgactccaaattcccttacttacaagccctaaatggccaaactctataaagagatttattactcagcctaaattgttggacattagaacacaggcgaatcatagtagtgtgaggtcccactgtccctccctgagtattccccaatgtcacttacagtcttcaaaggagagtttagttcaatttctccttgacctcaggccggtgccatctctccagcgaagtccccagctctggctccagctggcctgggccctgtgtcgtatcagaggcactgccctctgctggaaggggtttggtctgtgagttatgagtttccccacaggtcactgctcctttcacacgtgctgttgcctgatttggagctctgctgctcatctccctgcctagctgtctccagactgtctggtgggattcacagccctccaccag

SEQ ID NO: 3496 - DNA, 6000 bp, Homo sapiens
tttaataatctgagaagcctgtcttacacgtcatttctttctatggtttaaacctgatcataaacaccatttgttaaacacctaccgtatggtgggtacttaggcactttttcttacttaatcttcacatcaaatatggccttgatattgagactagcttggcaatttcaaatggattttaataacctgagaagcatgtcttacatgtcatttctttctatggcttaaacctgatcataatcaccatttgttaaacacctaccatatgatgggtacttaggcactttttcttacttaatcttcacaatacccaaataaggtagatctattaatattttcccttcacacatgatgaaagagaagctcagagaaggtaagaagtaacttgcctcaggctacatatgcagcacagccaatggttgaacctggcatggatgtcgctagcccctgattttgtataccgcaattaagacctttgtaaaaacacattccatggcttcctacagcctccaggggaaaagtcaaaccccttagcttactactcaaggctttcccctatggttctagcccctaccgattcttctggcctccttgcctactgcccaatcaccttctctaggaaatcttccctgatacccttcctaagtctcccataacaccctggccgatatctgtatcacaggatgtgccacgctatactgtaatgttgattgtattgtctatattcctcaaaaatgctagtaaagtgcttggcacagagtaggaattcaataactgtgtgataaatgaatgagtggatacattaatgagtatcaagcaagaaagccccaaataatgtcctaccgctttacagaacagtggtgcttaaaatgtggtccctgggccagcagcaacagtgtcatctgggaacttagatatgcaaattatagatcctgacccagacctactgaataaaaaactctggggttgagacctggccgtctgtggttcacatcacctccaggtgattctgatgtacatatattaggagtatgggagtatagttattattagtactaattctttaaatttatttggtacttgatagattacaaaataattttctaactactatctttcaaatcaaggatgaagtggagagggaaaaattgttaaggaattcagatctattttaaacacatccctatttagtacgcctctcagttctgagaaactaactttgtcagcagtcgcacaaatttgtgactttgtaggagtgtctgcctggccaggttggggtagtgtcctctgtggtcagcagcacctctagtgaaatctcattgattggatgaaggattccaggtgagcaaaattgaatgtgattaaattctcattgatgctgtaggaaagctaaagctataggaaaaaaggcttactcatgtaggggatgagggatacatgagtattttttagtgctttatgcagacatgatgtttcagtaagtgaaagaagccattcacaaatttatatgaacccattattagtttacaaaaaaaaaatgttctttaactctctccagaaaaaaaattgtgaaagacactaaaatgttaatagcaattttctccaggtagtgggattatacttttataattttttgcaaataacattattttcatgagaaaaaagataataataaaggtataaaattggttttgtgtactgggggagcctgacatgcagaactaatgattaactaatgattggtgtagctggaggcaggatttgaaagagaagattggaatcttagagggtaggagctagaaagaatccaggacaatttagctgatatcaatggggtccctaaagcattgaaataagatttctgtaggcaaagactgaggacattactggctcaagctttctggtaattcaagagcaacttctagcaaaagagaagggaagagcctggatggaaaatagatagccatgtatagaaagtagatggatagccatgggttttttcccaggacctagaaggcaagacggctcatttggagagtggaagttagggtaaaatatcccaggcagttggtggctccaaggattgcaactgaaggaggtaacaactcgaaaagaagaaagggataagtaagcaactggtgcctgtagcaaacatccagcactttaaacttgtgccaaactaatttcaaaaaatgagattatggccctattacttatattatctgcatatagtgcatacactgtggtttcttcacactatggtaaaaatgggttgtgttctttaaaataatgcctgagcaatactttggaaaggaggttgatgcagaattaaagcaaaagttgtgaatctcaagggcatgatctctagagaagtcctcccattcccctcttcccatattcaagcctttggagtagaaaattattacttgagcagtttctatttattgagcaattaatatttggaaggctaaatgctttgaatggatttctcatttattattctatgagttagatactgctattatgcccaactttacaaatgaaggaatggaggtgtagcttgcaaaagggcagtgttaggactgtctggctctgaagtccaaattccttctaaaacgctgccctgcatttgttagtcctgaaaataccctaaagcaagtaacaatcactataaaatgctaaaattagtaatacctactgtgaggttataaaatgatacggtcatactgcattggtgggaatgtgaattggtgtgacctttctgaaggacaatttggcaatacttaccagaagaattttaagtgcaagtgccttttgtttcaattattgaattactagaaattcaccctaaacattaactgacaatgatatatgtccaaggcgtttagtgcaaaaacctagaagcaatcagtgtccttcaaaggggagctggctaattagcttatgatacagccatgaaataaaaattaagaaggccagacatggtggctcatgcctttaatcccagcactttgggaggccaagtcgggaggatcccttgagctcaggagttggagaccaccatgggcaacatagtaagactccatctctaccaaaaaaattaaattaaattaaattagctgtgtgtggtggcatgtacctgtagtcctagctactcgggaggctgaggtgggaggatcccttgagtccaggaggttgaggctgcagtgagctatgatcatgctactgccctccagcttgggtaacagagggagacactgtcttaaaaaaattaattaattaaagtttaaaaagcaaggtaaaaaatagtgtgtacagttgattacttttgtagtacagtaatttttaaaaatatatatagaaggtagattgatacactgacatatgaataatgttcccccctgaaaaacataagaagcttttaacaataaatatctttgtgaagagtaactgaattattattttcgtgccacttgcagatatttgagcttttaaaattttgttacccccatgtttgctattttttaaaaattaacaattcattaaatcttttaaataaaaaccaaatagcatttattgaggctttataatgtgcaagggactgtgctaagcactttacctgtaatacctcattacattttcacgttaacttcttatctcctttttacaagtgaggagttagaggctcagacaagtgaaatcacttgcttggggacacagagctagaatgtggcggagctgcaattttaatgcacctctgtctcatttcagagccttagctctcaactgccaggccgcactcttctgcttgctctttataccctcattgcttaatgagagtacactagcaaacaacaggagtctaatgagataatgtatgtgaaaatacttttctaagtatagagatgtttggggagggcaagcaagggtagggaatttgtttaaattgggcggacctgtccactgacccctagacagtcaggattttttttttttttttttacaaaaccaagatcaacaactttcttttgttcctcctttaaaaatattataaagttatatttacttcctttttcccaattattgtttataaattaaaatatggagaaataaaagccatttcataatagtcctcacccataattactttgtttcagatttgaatggctatgtaactattacacacctgcgttttacataaacagtagcaactagacatttgttcagtatcttgctttttcagccctacaatatatcttggccatctttttatataaacacttacaaatctgcttttctcttttaaagtagctgcataatatcctattctgtgaatacagataggtaggtaggtaggttggtagatagatagatagatgatagataatagatatagagagctatgaaacttttaaaaatcacctactgaaggacatttaagcttcttccaattgtttgatttcctaatcaatgctgtaatgaatacccttcctaagaaagtttagaaggatctttagactgagtgtaatatttgtccactgtagttgacgagagtgaccccacaggacgctgtactgaggggaggagtatgtttcactgcgtggagaaacaaagaactctctcctaagcatgaccaacacattcagagatattagaattgccaacaggtgggatgacctgaaaaagaactccttgctttgacagtttagtaatagagcaaagacttgccacgattgctcaacactggctggatcagaagaggaatttccagactcagttacaagcacggctggtggagggctgtgaatcccaccagacagtctggagacagctaggcagggagatgagcagcagagctccaaatcaggcaacagcacgtgtgaaaggagcagtgacctgtggggaaactcataactcacagaccaaaccccttccagcagagggcagtgcctctgatacgacacagggcccaggccagctggagccagagctggggacttcgctggagagatggcaccggcctgaggtcaaggagaaattgaactaaactctcctttgaagactgtaagtgacattggggaatactcagggagggacagtgggacctcacactactatgattcgcctgtgttctaatgtccaacaatttaggctgagtaataaatctctttatagagtttggccatttagggcttgtaagtaagggaatttggagtcatttttgctaggctggccactgagtctcgcaggtttctgggtacatgcttgaattgaaaagaaagtgacacacctaaaatacagcctagactcctggccctggggctctgtggatccgacacaaagtttacaaatagaaagctagcaaagggaaagatagtcggaagtaacaattttatctaaaaatagaaacttagaatctaacaccagagttactacttgcttttgaatttcaaagactacataggatggcctttaaaacaaaacttcagcatgtaagagccagccaagcaaattgttatacataatcaacgattaaaataaattagtctttaggcctaaaccgtttccaatcaaatctttcttgaatattggttaccttttctgccgtgtagtggttggaatcaaatgagaacatagctgagcagagtaccataaagtctacttctaatgctgctgttttcgagccttgtgatttttttttaagtgactttagtattcgctggtaaagtcaaggcggatctaccagacggtaaaagttctgtgtgtttgtcaggcacggctaagtaaaacgcactgcatctgaaagtctaagggtagtttgcatgcatctctcagcaaaatagcaagtggaagaaataccagcaaggagaataaactttctgggctgtttgatttcccctgcaacttctagtccagggatgtttggcgttctcccggtcgctagattattagcccgcaggttccgcaccggccagggagccgctcaagtcctagggccgg

SEQ ID NO: 3497 - DNA, 6000 bp, Homo sapiens
atattcttttcaagtgtacgtggagcgttatccagaatagactatatactatgccaaaaaaacaaacctcaagaaatttaaaaggatagaaataatacaaagtatgttttctgaccacatggaatgaaattagaaatcaatagtaggaaaaagatataagaaattcacaaatatgtgagaattaaacaaaatactaataaataacaaatgggtcaaagaagagatcaaaaggaaaatcagaaaatactttcagataaatgaaaatgaagacacaagaaagataccaaaacttatggggttcagataaagcaatgctcagagggaaatgtatagctataaatgcctgtattaagaaaaaaaatctcaaatcaataacttaaccttccaacttaagaaactggaaaaagatgagctaactaaaagaaaatcaagcaaaaggaagaaaataataaagattagggcagagataaatgaaacaaagggaatagattaacaatagaatcaatgaaaccaaaagttggttctttgaaaagaacaacaaaattgccaaactcttttttggttccatatggaatttaaagtagttttttccaattctgtgaagaaagtcaatggtagcttgactggtcattagagaaatgcaaatcaaaaccacaatgagataacatctcacgccagttagaatggcaatcattaaaaagtcaggaaacagtggcacgtgcctgtaatcccagctactcgggaggctgagggaggataactgcttgagcccaggagatggaggttgcagtgagctgagatcatgccactgcactggagcctggcccacagagcgagactctgtctcaaaaaaaaaaaaaaaaaggaaacaacagatgctagagaggatgtggagaaataggaacacttttacactgttggtgggagtgtaaattagttcaagcattgtggaagacagtgtggtgattcctcaaggatcttgaaccagaaataccatttgacccagcaatcctattactggttgtatacccaaaggatcataaatcattatactataaagacacatgcacacatatgtttattgcagcactgttcacaatagcaaagacttggaaccaacccaaatgcccatcagtgacagactgtgtaaagaaaatgtggtacatatacaccatggaatactatgcagccataaagaaggatgagtgcatgtcctttgcagagacatgaatgaagctggaaaccatcattctcagcaaactaacagaagaacagaaaaccaaacaccacatgttctgactcataagtgggagttgaacaatgagaacacatggacacagggaggggaacatcacacaccggggcctgttggggggtggaggggtaggggagggatagcattagaaaaaatacctaatgtaggtgacaggttgatgggtgcagcaaatcaccatggcgcgtgtatacctatgcaacaaacctgcatgttcggcacatgtatcccagaacttactatttaaaataaataaataaataaataaaaactattaggactaataagcaagttcagcaaggttggaggatataaaatcaatatgcaaaaattaattccattttataaacttgcaaggagcaatctaaaaatgaaattaagaaaacaattccattcacaatagcatcataaataacaaaatacttgaagtacaaaacttatacactgaacactatgaaacattgttaaaacaagttttaaaaacctaaataaatggaatgatatccatcttgtgctcatggattgaaagacttaattttaataagacagcaacactctccaaattgatctacagagtcaaatcaatacctattagcattccaactgccttatttgcagaaactgataagctgttcttaaaattcatatgaaattgcaaagggctccaaataaccaaaacaatctttgaaaagattggatcctccacagtaggaggactcacactttctgatttcagaactttctacaaagctacaacagtcaagagagtgtcataccagcataagggcagacatatagaccaatgtgtattgaccatttcatttcctcttctgggaattgtctctttatatactttgtattttttatgtgtaatcttttatcattgccttactgttttaaaacaaatcagctttattaacatagaaatagaaagtccaaaaatacatccatacatccatggtcaattgattttccagagtgtcaaaatcattccatagagaaagaatagtatcctcaatagagtgctgggatagctggatatccacatgcaaaggaatgaatttgaaccccttcctcacaccatgcataaaaacgaacacaaaatggatcatagacctaaatgaatgaactacaactataaaactcttagaagaaagaatgagtaaaccttcatgaccttggattgggcaaagtattcttagacatgacaccagaagcatgagcaacaaaatagaaactcgataaattatacttcttaaaaatctaactttgtttttcaaaggacaccctcaagaaagtgaaaaaaaagaacacactgaattggagaaaatatttgcaaatcatatatgtgataaaggacttgtgtctagcatatataaagaactcttataactcaataatacaaagactagtaatccagtttaaaaatgggcaaaagatctaagtcaatatttttccaaggaagatacacaaatggccaataagaacgtaaaaatatgcttgaagtcatcagtcgttagggaaatgcaaatcaaactagaataaagtaccacttcacatccatgttagagagaatgtggagaaattggaaccccataggctgccagtgggatgtaatatggtacagccactgtgaaaaagtcaggcatttcatcaaagggttaaacatagagttgccacaggactgaggaattccgttcttaggtataaatcccaaaaaactgaaaacagatattaaaaaaaaaacctggcacatgaatattcgatggtaggattatttagaatagccaaaaggtgggaacaacccaaatgtccctcaatgaatgaatggataaacaagatatggtctatccatatgatggaatagtattcagccacaaaaaggaatgaagtactgatacttgctacagtgtgaatgaaccttgaaaacattatgctaagtgaaagcagccagtcacaaaaatgcacatattatatgatttcatgtatatgaaatgttcagaatagggaaatttatagagacagaaagtacattaatggttgccaaaggctggaggaacatgggatagagagatgatagctaaaaggttctgggttcctttttttaaaaaatatatatacatattttattatacttttagttctagggtacctgtgcagaacgtgcaggtttgttacatatgtatacgtgtgccatgttggtgtgctgcacccattaactcgtcatttacatttacattaggtaaatgtaatccctcctaatgctatccctcccccctacccccacccctctgggttactttttgaagtgataaaaatgttataaaattaactgtggtgatagttgtatatatctgtgagtatactaaaaacctatgctaagaattgttcactttaaatgggtgaattgtacagtatgtgaattttcatgttaatgaagctgattttttttaaagagtaaggcaacgataaaagattacacatagaaggccgggcgcggtggctcacgcctgtaatcccagcactttgggaggccgaggcgggcagatcacaaggtcaggagatcgagaccatcctggctaatacagtgtaaccttatctctactaaaaatacaaaaaattagccgggcgtggtggcgggcacctgtagtcccacctactcgggaggctgaggcaggagaatggcatgaacccgggaggtagaggttgcagtgggccgagatcgcgccactgcactccagcctgggcgacagagagagactctgtctcaaaaaaaaaaataaaataaaattacacataaaaaatacaaaggatatgaagagacaattcccagaagaggaaatgaaatggtcaatacacaagacttggtattgacctcatcagtagtcagagaaatgtaaaaataaagcaatgagacatatttttatttaactaaattctattgagaagaattaagaaagaataaaacatacatatgatgcttgaaataatgcagagcgatggtcttttcacacattgctgggtagaatttaaactgttaaatagttttggaaagtagaatgcccatgtccgttaaatttaaaatacttatactctttgaattcatggccccttttttaagactgtagctcacagaaataaaatacttgtggctacactttaaaataagttatgacaaaagggaaattaggtggaaatggaaagatatttatgatgctttattaattgcaaaaagcgattattaattgaaagtaaggccccagtttaatttttgtaaaaacaaacagcaataaatgcatataggaatacaaacacatataatatttgtgtgtttatgtgagcatggaaacacttgtagactaatatataattatgtgccttcccttttttgtgcagttttgtattgctttgctagtttcaatgaaaaggtatgacattggcagtttgaacgacagagaacagttttaatgaacagagggtgggtggggtagttagaaagggagggatcgcgctaatgttgcagccattttgtgtgcgctcctcttacagatagtgcggcggcccaggcgtcgcgtctacgcgggggattacagtaacccggttgtcagtgatgagtcagagtgcgtggtgctgatgctgctgccatttcatcacctttgcgagcgcagcatccatccctccgctctcccggcgcctgggcctacccagcttcgggctcccaggccagcgatgcgctcgcggctgagctagatcctgccgagccgcgctctctgaggcgtcggcggggcgccccctcccgccgtccccggtccgggccaaggagacctgcagagccgcggccatggaggccatctggctgtaccagttccggctcattgtcatcggggattccacagtgggcaagtcctgcctgatccgccgcttcaccgagggtcgctttgcccaggtttctgaccccaccgtgggggtggattttttctcccgcttggtggagatcgagccaggaaaacgcatcaagctccagatctgggataccgcgggtcaagagaggttcaggtgggagcgcagtccgggcccgcaagcagtgggagggtcttcggggtttgcaccgcctctggggagagaggacttcctggttctaggtgcggtccaggagggcaacaccaagggtcttgaggattctgccgaagcccaccttcggctaacccggagtttagtgcaaggaaagaagcgccctggcagggaaggccggtcaataacacatattgcttgcaccacaactccaccaacctgccctttggtggctaataaactagctggaattgatctctgtatctgtaattcatcaatctcagtccctatgttacatactttcaaaaacgttcccaggtcatcctaacataactgacagagatttaaatacataaatacatgtgtattatgttttatttccacatctgtgtgtgtgcacatatatatgctaacatatgttctaacatgaaatagatacgattgattccttcttgcaaccagcacacattcagtgatcatctactatgtgccagactctgggcttgttcctgggaaaacagtgtgaggagactcacacaaggggatgccatgtaatctaaacagacaaagccccttcattcttggaacttctgtgctaacatagttgagggaaatagataatcagcaattacgaaagtgtgtcttgctcatatttg

SEQ ID NO: 3498 - DNA, 6000 bp, Homo sapiens
ggcccattagtaaaaggctatactagaatgattttaaggttactttttatctcacaaagccctgttttggaggaagaaaaagccacgttatcaggaactaaagaacaagtaggtaagaagaatgaaaaagtggagctatattattttttctcttattgtcacctttggctactgtcccagtttttagccgtaggagcctttagattccagattatatgtcattcatctgcaaagaattccttgggtagagttggcagttcctcatctatgtttccataacagtttgtgtgcagctttagaatcataatcaaccataacaataacacctgtaatttattctgtatatgtcactaatgttcaatataattctctgattttttatgcatctctacaatgccaaataattggaattattgctcccactttccagataaggagactgaggcctagataattcaagagaattgtattaagccatcaggtagacaactttgtagcggagatttgaacaatgttctgacccactccaaagcccagctctagctgctcaccacactgcctactccttgcacatgacatttgaactatttgtttctggctacctgaatggtccaagaaatgctagggaccagagattctttcttgcacatatatgtatcactagaaattgatactaggtttggtgtgtagtgaccactatttgataatttcacctcaatagaatgaatgaacaaattggatgaacttttattcttagaaaattcagtagagaaaattctttattcatgcacatccgggtttatgcattaaaatggccttagtatgaatctggatataagattattgatcttatatcaagctgtcttgctaaattcactcagtagtttttacagcttttagattctttaggattttaaagctacatacacaattatgtcatctgcaaataaagatagtttacctctccctctcgaatgccagtaatttattactgataggtcatttagctcattttgtttattgttgcagagaatacaaatcaaattttagaataattcctttaaatgtttagaaatttcctatgatctctatgttaggataatgtctaaaaagacctaaaattagtgttgttcaaataaaatagaaatgtatttatttttctgaaagtttctgactagtgcagagagtgagagagcatctggattccaccaagaatactattccctaggctgctagccttgtctgcatgatcaaagcttgtctctgatgacccctttccattctgcaagaagcaggaaaaagagaaagtccagaccaagcaatttcctgttagaaaaatgaatgtgagttgcccatattacttctattcctattttaccagagagaacacagttgtatggtcacaactacctgaaggagaaggtgggaaatataatctctagctgggcagctagaaaaagttagaaaagattgggatcaatgatcatcctgccacaatctccaaaagcaaatctaataatactttcactgatctaatagtcatacttttgagcaaacctgcagaaaataaaaaagccacattactttctaatatgtgaaaatgcctgaacagaatgggcaggagtagtccctaagtcctactctctagttcatgtgagaggaggggagttatttcacatctagagcacactaacttagcattgtgagcaacattaaggcaataaagaacaagctcacatctatggttttcccctggcgtgcttcagtttttcctaggctgctgctggaggaaatgaaacatatcaaagatgtggaaaggtggaggggtgccactaggtgcagacactctggctacagggcaaagtgacagctaatgggcaggcatggagacaaagtataaaagcaccacagtctaggataatctagcacagggaaaatgtccctaaacttgcttgagtgttctctaaggcatcactgtactgctgccaagcataaaactgatgttcatgaggttgaaccctgtgaaaatcatccctagaagaggtctctaggattcaatattgtatatgtcctctccatgtctctttactctccgcatttcccacacatcaaaaaccaattctggaataacttttatcccaattaaatgagatttaagtgaacattaagaaaatacctttaacagaagggaaatcttaaaggaggaacctataaacaaatgggatgattgcagtgtgtgatcaacaaggaaggttaagtggatcaatattcacagaatggagtatgcagcacagtttataaaaatctatttaataggccaggcatggtggctcacacctggaatcccagctactcgggaggctgaggcaggagaattgcttgaacccaggaggcagaggttgcaatgagcccatatcacgccactgcattccagcctgggtgacaagaatgaaactccatctcaaaaaaaaaaaaagaacaagtggatattaatcaattcaagaattttatttgccatcaccattatgagattaatacaaagtaggaaaatgatagtgcatatagttcaaaaggcaatgattagaaaacaatttatatcttatttaaaaatatgtatctctgggtatatttgtatctgatttggacattcccaatagtccaaagaaataataaagcaacactgtagaggtcttacttggaaaacttacaaagcttgtagcttccccgctgttggcctcagtagagctaagaattaacagaattctgtctaatgttcaactccatacacgatcttttgtgtgtctattgtgtattgatttcaagtagcaaaatgcatctttagccagcttcagctccaaaaggggaacttgccataaagatacagagcaagaagttgggtctaaaaaacagagtaaccaagacttagaaagttatcagaaatttctctctctgcgtggttgcttcatatttatggatctttttactctgaaggactttctctactcctttagaccatgggcagaaatgtacacattattggtctacgtagacagacaaatttgtaatctctgaactataatttcaaatttccaggagaagaaaacatattggctcgggttgttcaagttccaattcctaatcctatcagctgtggctgatgtgggaagataacatatataaccagagctaaaaggaaaatagcccgatagaaagagaagtagttcccagaaaagggggattatttagagatgagcagatagcctcgaaattgtctttacatatttagtcctgtgaaataagcactgtagaaagaaaatagatgcttataattctagtcttaaaaaagtcacaatctcacaaacctatgtatacatgtagagtaaaggagtaaaatttagtataatgattacaaattaagtgatggttttgatcaaaagggagctggatgtagtggaaacatgacggaacttaaaatgcaaagacatgggttcaaatcttggttctggcctctagtctttatagatccttggatgggtcacacattcttcatttgtgggtcttcatcttcttatttgtaaatgtggatgattatatttaactttaagacattttgtgagaattaaatgcagtacctaccaaatgagtagtagacagcagaatccagcctacaaccatgtggttcactgaacatgttttcttttttttcttttctttttttttttttgagactgagttttgctcttgttgcccaagctggtgtgcggtggcgtgatctcagctcactgcaacctctgcctctcaggttcaagtgattctcctgccttagcctcccgagtaactggaattacaggcgcctgccaccacacccggctaattttttgtatttttagtagagagggagtttcaccatgttggtcaggctggtctcaaactcctgacctcaggtgatctgcccacctcagcctcccaaagtgctgggattgcaggggtgagccactgcacccggcgtgagcatgttttaaacatataacattggtgaaacaactgggctgtatgttggcaatagactaacatataggtgttggttgtccttagggaaatcatagtctgttgggggtgtgagacagatgaagagatattttagtaaaacgtagtacaattgtttactataattctagatgtgattggaatttgatctggaaaggtttcagggaggtgctaggacatgagcgaagccttatgttggtgggtaagattttacaccgatacattccgtatgaaagtggggtaaagccttgggctgagctgacttagctctgcaatggtgatggttcacattttcattgtgggaaggaaacaaaattagtaatttaaaagaccttttccaaacatgcttatcttaaaggaaggatctaaggaaaatatcaatacattttttaagcagatttttaaaataataaaggaagctagaaaatccagtgtcaataatctacctgtaggtaactgagagcatgttttctgtgctcagagaaaatgaaactactcaagaaatgtatatttgatataatggtataagtatataaaatgtatgccacaagctaacactaggtaaatttcaaagctacctttgctagatttaactggaaagcagaagaaataaatgataccagtatgtgaatattttaaagttgctgcttcaatatactagtcaaagtctgccagagctatttaccatctcaggacaatttgttcacttcacttagaaattagaaatgtgctctggccaatacatctaaatttattttgtggtagtcattttgcttaatggaagtgttttccagatgttgcctaagtctagtcgtctgggcccttttccaataaatgaggaaagtttgatttcataggttgtcactgttgattttgtctaacctttggactaattggttcatcccactgtatttgcactgatatataagactcccaggacgtgggataaactcatctatcctttacgggtaagtgtcaaagttaacttgcttcatagaattaaatgtgttttcattagaggtgtttgaaaaaaaatgtgtaaagatagtagttggaaatttttgaaaaggattatgtttatgcaatacacctgttggaagcctttgaatttatattgagaattaagaaaaagttggaacagtaactccatgatgcttattaaattacatttctgtgacacaggttattattttccttaagataaaattttaaccttgcactgttaagtacatgccatactttggctagagttttaagataagtctattctatattggagatttcttaagaattaaaactgtcaataacgtggctgagggtgacttgatttgttctgcataagattaagtctaatggccaaatattttctataaaattaaagctgatttaaagtcttgtttcaagaatgggatggttttattattgttacatttttaaagttactgaaatgtgtataatgcaagcctaagttagtggtgagatgaaagagctgttttctgatacttttattttattttcagcaagggtacctacggtacctgaaaacaacgatggcatggaaaacacttcccatttacctgttgttgctgctgtctgttttcgtgattcagcaagtttcatctcaaggtagcttaaccatcgaacatacttttatttaacaactattgctaatcattcagtcttgatttttataacaacggaaatatatttctaaaaatttatatttgcttgagtttaatatactgtacaaccttaaaataatatataacatgtagcctgtttgtaagtgctttggaattctcatctttttctccttttgagagttttgagcttgtataaagaataattttggtacttgttatttctatggttctctcgaaagtttaaaaagtgcagacagttcatcataaaattatgctggagctatatagtatcataaaaataactaaaaaa

SEQ ID NO: 3499 - DNA, 6000 bp, Homo sapiens
tgacatttgaactatttgtttctggctacctgaatggtccaagaaatgctagggaccagagattctttcttgcacatatatgtatcactagaaattgatactaggtttggtgtgtagtgaccactatttgataatttcacctcaatagaatgaatgaacaaattggatgaacttttattcttagaaaattcagtagagaaaattctttattcatgcacatccgggtttatgcattaaaatggccttagtatgaatctggatataagattattgatcttatatcaagctgtcttgctaaattcactcagtagtttttacagcttttagattctttaggattttaaagctacatacacaattatgtcatctgcaaataaagatagtttacctctccctctcgaatgccagtaatttattactgataggtcatttagctcattttgtttattgttgcagagaatacaaatcaaattttagaataattcctttaaatgtttagaaatttcctatgatctctatgttaggataatgtctaaaaagacctaaaattagtgttgttcaaataaaatagaaatgtatttatttttctgaaagtttctgactagtgcagagagtgagagagcatctggattccaccaagaatactattccctaggctgctagccttgtctgcatgatcaaagcttgtctctgatgacccctttccattctgcaagaagcaggaaaaagagaaagtccagaccaagcaatttcctgttagaaaaatgaatgtgagttgcccatattacttctattcctattttaccagagagaacacagttgtatggtcacaactacctgaaggagaaggtgggaaatataatctctagctgggcagctagaaaaagttagaaaagattgggatcaatgatcatcctgccacaatctccaaaagcaaatctaataatactttcactgatctaatagtcatacttttgagcaaacctgcagaaaataaaaaagccacattactttctaatatgtgaaaatgcctgaacagaatgggcaggagtagtccctaagtcctactctctagttcatgtgagaggaggggagttatttcacatctagagcacactaacttagcattgtgagcaacattaaggcaataaagaacaagctcacatctatggttttcccctggcgtgcttcagtttttcctaggctgctgctggaggaaatgaaacatatcaaagatgtggaaaggtggaggggtgccactaggtgcagacactctggctacagggcaaagtgacagctaatgggcaggcatggagacaaagtataaaagcaccacagtctaggataatctagcacagggaaaatgtccctaaacttgcttgagtgttctctaaggcatcactgtactgctgccaagcataaaactgatgttcatgaggttgaaccctgtgaaaatcatccctagaagaggtctctaggattcaatattgtatatgtcctctccatgtctctttactctccgcatttcccacacatcaaaaaccaattctggaataacttttatcccaattaaatgagatttaagtgaacattaagaaaatacctttaacagaagggaaatcttaaaggaggaacctataaacaaatgggatgattgcagtgtgtgatcaacaaggaaggttaagtggatcaatattcacagaatggagtatgcagcacagtttataaaaatctatttaataggccaggcatggtggctcacacctggaatcccagctactcgggaggctgaggcaggagaattgcttgaacccaggaggcagaggttgcaatgagcccatatcacgccactgcattccagcctgggtgacaagaatgaaactccatctcaaaaaaaaaaaaagaacaagtggatattaatcaattcaagaattttatttgccatcaccattatgagattaatacaaagtaggaaaatgatagtgcatatagttcaaaaggcaatgattagaaaacaatttatatcttatttaaaaatatgtatctctgggtatatttgtatctgatttggacattcccaatagtccaaagaaataataaagcaacactgtagaggtcttacttggaaaacttacaaagcttgtagcttccccgctgttggcctcagtagagctaagaattaacagaattctgtctaatgttcaactccatacacgatcttttgtgtgtctattgtgtattgatttcaagtagcaaaatgcatctttagccagcttcagctccaaaaggggaacttgccataaagatacagagcaagaagttgggtctaaaaaacagagtaaccaagacttagaaagttatcagaaatttctctctctgcgtggttgcttcatatttatggatctttttactctgaaggactttctctactcctttagaccatgggcagaaatgtacacattattggtctacgtagacagacaaatttgtaatctctgaactataatttcaaatttccaggagaagaaaacatattggctcgggttgttcaagttccaattcctaatcctatcagctgtggctgatgtgggaagataacatatataaccagagctaaaaggaaaatagcccgatagaaagagaagtagttcccagaaaagggggattatttagagatgagcagatagcctcgaaattgtctttacatatttagtcctgtgaaataagcactgtagaaagaaaatagatgcttataattctagtcttaaaaaagtcacaatctcacaaacctatgtatacatgtagagtaaaggagtaaaatttagtataatgattacaaattaagtgatggttttgatcaaaagggagctggatgtagtggaaacatgacggaacttaaaatgcaaagacatgggttcaaatcttggttctggcctctagtctttatagatccttggatgggtcacacattcttcatttgtgggtcttcatcttcttatttgtaaatgtggatgattatatttaactttaagacattttgtgagaattaaatgcagtacctaccaaatgagtagtagacagcagaatccagcctacaaccatgtggttcactgaacatgttttcttttttttcttttctttttttttttttgagactgagttttgctcttgttgcccaagctggtgtgcggtggcgtgatctcagctcactgcaacctctgcctctcaggttcaagtgattctcctgccttagcctcccgagtaactggaattacaggcgcctgccaccacacccggctaattttttgtatttttagtagagagggagtttcaccatgttggtcaggctggtctcaaactcctgacctcaggtgatctgcccacctcagcctcccaaagtgctgggattgcaggggtgagccactgcacccggcgtgagcatgttttaaacatataacattggtgaaacaactgggctgtatgttggcaatagactaacatataggtgttggttgtccttagggaaatcatagtctgttgggggtgtgagacagatgaagagatattttagtaaaacgtagtacaattgtttactataattctagatgtgattggaatttgatctggaaaggtttcagggaggtgctaggacatgagcgaagccttatgttggtgggtaagattttacaccgatacattccgtatgaaagtggggtaaagccttgggctgagctgacttagctctgcaatggtgatggttcacattttcattgtgggaaggaaacaaaattagtaatttaaaagaccttttccaaacatgcttatcttaaaggaaggatctaaggaaaatatcaatacattttttaagcagatttttaaaataataaaggaagctagaaaatccagtgtcaataatctacctgtaggtaactgagagcatgttttctgtgctcagagaaaatgaaactactcaagaaatgtatatttgatataatggtataagtatataaaatgtatgccacaagctaacactaggtaaatttcaaagctacctttgctagatttaactggaaagcagaagaaataaatgataccagtatgtgaatattttaaagttgctgcttcaatatactagtcaaagtctgccagagctatttaccatctcaggacaatttgttcacttcacttagaaattagaaatgtgctctggccaatacatctaaatttattttgtggtagtcattttgcttaatggaagtgttttccagatgttgcctaagtctagtcgtctgggcccttttccaataaatgaggaaagtttgatttcataggttgtcactgttgattttgtctaacctttggactaattggttcatcccactgtatttgcactgatatataagactcccaggacgtgggataaactcatctatcctttacgggtaagtgtcaaagttaacttgcttcatagaattaaatgtgttttcattagaggtgtttgaaaaaaaatgtgtaaagatagtagttggaaatttttgaaaaggattatgtttatgcaatacacctgttggaagcctttgaatttatattgagaattaagaaaaagttggaacagtaactccatgatgcttattaaattacatttctgtgacacaggttattattttccttaagataaaattttaaccttgcactgttaagtacatgccatactttggctagagttttaagataagtctattctatattggagatttcttaagaattaaaactgtcaataacgtggctgagggtgacttgatttgttctgcataagattaagtctaatggccaaatattttctataaaattaaagctgatttaaagtcttgtttcaagaatgggatggttttattattgttacatttttaaagttactgaaatgtgtataatgcaagcctaagttagtggtgagatgaaagagctgttttctgatacttttattttattttcagcaagggtacctacggtacctgaaaacaacgatggcatggaaaacacttcccatttacctgttgttgctgctgtctgttttcgtgattcagcaagtttcatctcaaggtagcttaaccatcgaacatacttttatttaacaactattgctaatcattcagtcttgatttttataacaacggaaatatatttctaaaaatttatatttgcttgagtttaatatactgtacaaccttaaaataatatataacatgtagcctgtttgtaagtgctttggaattctcatctttttctccttttgagagttttgagcttgtataaagaataattttggtacttgttatttctatggttctctcgaaagtttaaaaagtgcagacagttcatcataaaattatgctggagctatatagtatcataaaaataactaaaaaagaacaatatttagataacatgtaatttttgcctatatgttgaacaatttgttttttaaaatcaaataaattattgataaataacttattttggcatcatttagacatagataccatattataataaactatagtgtttcaaatggcattttattagtcttgaaaatgttctctttttcttacaagaactatttatccaggtatggacatatacagatgtgactgtcattttgtgttataacattaaacttttcacagttctcccaaaacaggtcctggatgaatagttcttgttactcatttttagagactgttaaagtacattcagtgaaatcacattagtaaaagatgctagcatgccatctagggggattaatagtaacaatgccaagctttggatttttcttttcttttcttttccttttgttcccctttgataagcaaaatctgagagaataaaaatcaagattcatgacagttatgatgaaattatgtttctaaagtaaacatttccagtaaaatacgagattcttatgaaacctgaacatgagtggtaactgtctgcataggcata

SEQ ID NO: 3500 - DNA, 6000 bp, Homo sapiens
cagacaatgggcaaccacacaaggacacagtgaaaagacaggctgcactccagcctggcaacagaggggaactccacctcaaaaacaaaacaaaacaaaacaaagcaaaacaaccacaaacaaaaaattagctgggcatcctggtgggtgccacctgtaggattacaagattatacctataatcctaacactttgggaggccaagtggggaggatcacttgaggccaggagttcaagaccagattgggcaacatagtaagaccctgtgtctatttttttaaaaaaattagaagatgagcaattactcacaaatcagtgtcaaccatgataggaaaaactctattcttcaccatggcctagtcaacatatttatcaagccaaggaaagagggcatcaggagaaacctaacttgctaacaacttgatcttcaacttccagcttccagaactatgagaaaataaatttctgtttaagccattcagtggtactttgttatggcaactctagaaaactaatacaattactatacaacaattcattatacatttatacaattcagtatgttactgtagaacaacgttaaaacattaaaaatgaattaaccagggccaggtgcggtggctcacacctgtcatgccagcactttgggaggctgaggcgggtggatcacgaggtcaagagtttgagaccagcctggccaacatggtgaaaccctgtctctactaagaatacaaaatatagcttggcgtggtggcgcgtgcctgtaatcccatctactccggaggctgaggcaggagaactgcttgaaccctggaggtggagattgcagtgagccaagattgcgccactgcactccagcctgggtgacggagcaagactctgtctcgaacaacaacaaaattaaattaaccataactacacggtttaacagcactgaacttcacaatgctgagcaaaaatgtaagttgcagtagaccacatatagtttgatgccatttataaaaattttaaaagcataaacagatttttaaggaatatatacacatataaactctaaaagtctaaagaaatgcatggcaggggtacataccaaattcaagatagtggttcccagaggatgaagaaaggagataccatagaggtgactacagggaacttctttgtatgtgtattgttcttaggaagaggaatgggaaaagggacatcatattctttttttttttttttttgagacagagtctcactatgttttccagggtggagtgcaatggcgccatctcagctcactgcaacctccgcctccagggttggagcgattctcctgcctcagcctcccgagtagctgggattacaggcatgcaccaccacacccggctaattgttttgtatttttagtagagatggggttttgccatgttgggcaggctggtcttgaactcccgaccccaggtgatccgtccgcctcagcatcccaaagtgctgggattacaggcctgagccactgcgcccagctgggagatcatattctttataccttttgatatgtataaagtcattaattatatttttttttcagaaaggctatagaccaataatactgacttttaatttttttaaaactagaagggccataagaaatggctgaattcagccattttgttttacagattagggaactgaagaccggaaacctgtgtaacttcttctgttttctacaaatagctagactagaacccagatttcctgtctttttattcgaatcaatggtttgtgagcatagttcttaaagaaggaagtggtgatcactcagttgagtttttaagccaatttccaatttcatttctttctttcatttcttcttttttttttttttgagatggagtcttcctctgtcgcccacgctggagcgtagtggcacgcgcctgtaatcccagcaatttgggagggtgaggcaggagaatcgtttgaatctgggaggcggagaatgcagcgagctgagatcgtgccactgcactccagcctggcaacagaagggaactccgtctcaaaaacaaaacaaaacaaaacaaaacaaaataaccacacacatagaattagctgggcgtgctggcgggtgccacctgtaggattataagattacacctgtaatcctaacactttgggaggccaaggtgtgggggaggatcacttgaggccaggagttcaagaccagactgggcgacatagtaagaccctgtgtctatttttttaaaaaaattagaagatgagcaattactcacaaatcagtgtcaaccacgatgggaaaaactctattcttcaccatggcctcgtcaacatatttatcaacgttttgttttttttgattgactgagatagagtctggctccatcacccaggctagagtgcagtggagcaatctcgactcactgcaatctcctcctccgggttcaagcaattctcctccctcagcctcccgagtagctgggattataggcgcctaccactgcacccggctaatcttttttgtatctttagacagtgttttaccatgttggccaggctagtctcgaacttctgacctcacgtgatccacctgcctcgacctcccaaagtgctgggattacaggcataagccactgcgccgggccctcgagattttaaatgaagacgaattaaagatgttggtcaatattttgcccaaattgaaaaggcttatctctcttaacctagaggaggttaactgcagctcatcaatcattgcacttaccacattctttttacctggacagtctgattcctccactagacagatttcaggtcttgttttggaatcctctagattggtgcttggcacaagtaggatgctcagctaattaatttttttttttttttttttttttttttttttgtagagatggtgttctcgctttcttgcccaggctggtcttgaactcctgggcttaaacgatcctcccaccttggcctcccaaagggttgggattacaggtgtgagccactgcacctggcctcaacaaatacctgttgatctcacacaaactgaattgcatgaacagatcatattccaaggctccaggagacattaggaaaggatccaaactaaccagatgctatttaaaagttacaaaaaaaaaattcctgttgaaagttttaaaaaatactaattgcacaaaaggacaggggaaatagttgacagtggttcacctaaaaaagcacccttgacctttttttttttttttttgtgagtgaggtggttgcagatttctatgaaaaagaagttaattcttcagctccttaatggaaccctggatctcccagctatgcaggaggttatgctagaagtagaacaaagcggaatgtacaaatttaaggaaggttactgccctgtgttcttttgcatgggtctgtatctagcattgggagccaggttttgttgttgcttattgggagagataagaatggtatatacacaaataactaaaaaaaaaatacgtggtaaatgctaaaagacaggtgcaaagaacactgagatggagctttcttgggttacacagccagttttaatgtttcctaatatagaagagctttcaacaaacctctcaggcaggctgtcttcaaatgacattacttcccccaaatacctaatttcatttatttcagaacaactctaaatgttagaggattttctgagcttaaaaatactgccttgtaatttctattggttttagttctgcactttggagaagagaataaggctccgttatttccaatattatactattcagttatttgaagacagcttccaatttctatgctcaaccctttccctctttttttttttttttttttttgagatgcagtttcgctcttgtcgcccaggctggagtgcaatggcgctatctcggctcactgcaacctccgccacccgggttcaaacgattctcctgcctcggcctcctaagtagctgggattacaggtgaccgccaccatgccccgctaattttttgtatttttagtagaaacgggggtttcgccatgttgggcaggatggtctcgaactgctgacctcaggtgatccgcccgcctcggcctcccaaagtgcgctgggattacaggggagagccactgcgcccggcctccctcgtttatatgcaggttaaaaactcccttgagccttcaactatttctttttcttttttttttttttttttgaggagtttcgctcttgttgcccaggctggaatggcgctatctcggctcactgcaacctccgcctcccaagttcaaacgattctcctgagtagctgggattacaggcatgcgccaccacacccgactaattttgtatttttagtagaaacagggtttcaccatattggtcagactggtctcgaactcctgacctcaggtgatccgcctgccttaggcctcccaaagtgctgggattacaggcgtgagccacagcggctggtgctttcaactatttatttgacatggcttcaagcttccttgccaccctagtgccgccatcgctccgtttcccttccctaccacccttggggagtaagggtgaggactggggaatggcagaggaagcgtagtttttccgaagagctgaaggcagcctgtgattatgaccttagctcttcctcttctctgttttctgatctcctaatacacgtctgtaaatatcacaagaccctgcaagtccctcacttattatctcttcaaatctgacgactttcaaccgttcgggccccacgactctctccccggactaggatctactctatggtagtgagctcagcctttctagctctctagtcctcccattgctccatctatggtttccggaggcctcaccggaagccctcgtgtgaggccgtgtgggaggccggaagttgcggcttcattactcgccatttcaaaatgctgccgaggccctaggatctgtgactgccacccctccccccacccgggctcggcgggggagcgactcatggagctgccgtaaggtgtggctcttggccttcgtcggcggggtgccgggagcgggagctggagagtgaggagcaggcggccgtaccgccagttgtgcgggtagcgggcgggaggagcttgagaggtgggtcgggcggcgtggggaaggccgcgccaggcggaagaagggctcggggggaggggaagagttgtgggatgagggctcgcggaagataaaagtggaggtggggtgacgtgaagtaactttggccaacaggtgacaaacctaaagtcgacgtagttggattgagtttaactggacacaacatttgaggactgttgaggcaatttggagaaaggaggtgggagagagggaaccgggtagaatgacattgacgtgtcttaagtttttaagttagtttttaggtctgcggacagtctaccttagaggcacttgagtgcttgtttgaaaatgcttgttttggcttggcgcggtggctcacgcctgtaatcccagcacttcaggaggccgaggtgggtggatctacctgaggacaggagttcgagaccaacctggccaacctggtgaaaccccgtctctagtaaaaatacaaaaatattagatgtgtgtggtggcgcatgcctgtaatcctagctactcgggaggctgaggcaggagaatcacttgaatccgtgggcgggggttgcagtgagtcgagatcgcgccactgcactccagcttgggctacagagggagattccgtctcaaaaaaaaaaaaagaaaaaatgttcgttttggggccacactgaaacctacagacagtatcgagatggggctcagagaaatatattttaatgagcacacctcccagtgatttttgtataccttaaagcttgaaaaccacaggtttttttggttgtgtttttgttttgtttttgttttttttgagtggagtttcgctctttttgcccaggctggcgtgcagtggcgcgatcttggc

SEQ ID NO: 3501 - DNA, 6000 bp, Homo sapiens
tagtcaaaagcagtaagctactcttttttcccctgattatagcaacaagctaccttttctctccctttgctaacaaggtaaggtgctaatcaagcttgtccaacccacagcctgtggaccacatgcggcccagaacaactttgaatcaacacaaattcataaacttttaaaaaacattatgagttttcttgcgattttttttctccttttagctcatcagttatcattagtgttagtgtattttatgtgtggcccaagacaattcttccagtgtgacccagggaagccaaaaggttggacacccctgttgtaaatgaacagcagtctgtaggagaaaacttatttcttggaaatcttgatagcttccataaccatgttgtacctaaatggaaagataagattatttctttgtagctattttagtgttaaaatagtagaaaagaggggagattgaactctgagtacatacatatggtatgtactcatgaagtactcatgtgtatggtatgtactcatgtacagatgaagagtcatacaggcaacttgctcaagactcagaagaaattggggaggagatccagtggccagcatgtagaagagtgttggtaaacatccatcggataaatacagcaaagaaaaaattgggtcatcctttttagttatttaagggattttcataagaattttgagttcctgaaggataccctagtatattcgttgtagtcaaatggtacctgggttctcttagactagttatatgggtagcattagaaggaatgcaggtggcttgaattaagacaaaagtgacatttggaaacttttatttatttatttttgagatgggatctcactgttttgcccaacctggtcttaaacttcttagctcaagtggtccttccacttcagcctcccaagtagctggggtcacaggcatgtgcagccatacctggcctaggaaacgtctatagagagagatgggacttaaaatacttggccatttgtgagaaggttgctgtacagaggttcataattgtttcataattggttttattctttttattggaccacaaaactagggctttaaatttttaaattctaaattttaaaatttagaacactccttacttttgaaacggactttttttgtttgtttctgtttctgtgggcatgtttttataggacagccagagtatcacataactagtttcacttttgaaagtgaaaagtaaatttttaagatactttgtttcattcttcctgtctgcttagataaaaaattgcacgtttaacaatttggagcttttctactctgaaattatttatttatttatttttaaattgttttagagacaagctcttattctgtcacccaggctggagtgcagtggtgagatcatagcttactgcaagccggaactcttgggctcaagcgattctcttgtctcagcccccaagtaactgggactacaggcgtgcaccaccacacctggctaattttttttattttttgcagagacagggtcttgctctgttgcctaggccagtttcaaactcctgggctcaaggtatcctcctgccttggcctcccaaagtgctgaaattataggcacctggctgtaaaatagccaccatgcccagctattttctttaaagtcataaatatgggcatcttctctcttctgaatgcaaaatttatttggtaactcttctgggtgcttttctgtcgtttgtgctactactgaaatgccaactagaagtacagaatcatgtgtttggtcttgcatttaagctgtctccttaagtgctagagatgggagaagaatgtgagttttaaattgaagcagttgtcttttttgctttcagttaattagcctcatctaaaacaagtaaacattactaatgagatgtttttgccttcacaggtgattgaagtgggaaaaaatgatgacctggaggactctaagtccttaagtgatgataccgatgtagaggttacctctgaggtatgaatctttagcaagaactattttgcaccagccccatcttcagatgatgtaatcccagcagttcacttgtgttgaagagtgctgtttacccctcatttctgtctcccttgcctagttgctaagtgatgttggtttctttacatttttttaagagatttttattggaacttaagaagggaaggggataatttgatcttatcctctccctaccttgaaaaggatgagataaatgcctctgtgtgcctttctccctgccatcaaatctctctggagacacaaagttattcaaaatagtcttgcactgctttccctgactcaacacctctctgcaatcccaaagacagacccataggctatctaaaattatttgttgaatataaaaataatattgtcattgttttcttaaaaagaagcaaatggaaaacagcttaatttccacacagattagtattaatggaggactattaaagaagacttgatattccactcttaggttaatagggatggatttgtcactagttgacaactcaagtctagacccaaatgtataccttgcttttttgttgctatttccccatgtttcttttagtcttgccacaggtaacacactatgggaaaaaggttggtggaggaaggataagaaggggattttacattttgctgcttggaaagagaaacatttttaggttgtttctggtgttgatccttcccccattcccaccacaccactgttgagcattatggtagttcattgccaatgatctgtgtgtagcttagtaataaagtaaaatatattggtccagtaagtgttcttgactgtaatacaaataacagagataaatgtttccatctgtttttttgagatggagtttcactcttgttgccaaggttggaatgcaatggcataatctcggctcactgcaacttccgcctcccggcttcgagcgattctcctgcctcagtctcccaagtagctgagattacagacatgtgccaccatgcccagctaattttgtatttttagtagagacgaggatctccatgttggtcaggctggtcttgaacttctgatctcaggtgatccgcccgcctcagcctcccacagtgctgggattacaggcgtgagccaccactcccggccatgtttccatcttaatcagacttctgtggctacttgggtgcagaaaacctattaagcaaatggactgtatttcatcatatcaaagatgccattgaatttaataagccctattattttatgtcctactaagaaaaagtgatgccaattaaactgtggcacaccatcactcatgaattccaaatctttatgaagttcctttgattatttgtatagcattttaaatgagattggaagatcttagactggcaagagtgttttgaggccatctggaatcccagtttaacacatggttgtgcccttgcctcagtctggacaattgagttatgacttctagacttgaagtgcttggcctttgacctaaaagtaatcaagttcagcttatgtcaaatcaaatcctgtcaaagccagttaaccgcattaaatattctttcttgttccctgtagctatttttgaattaagcaaagcatttaaaattcattgagatctagtgtctcctaatttgaatatggagaagtagggaaaaattacttggcattcaaggacaataacatttatttttcagagggcatgatttaggcatacagttacacctataattctgggtgcaatgagagtgcatgagtaaatttagtcgttttcaaatctcatttgttttagctttcttttttgccaaactttataacatttgctattagtgtagaaaagaatgacagagtattctcttcattcttcagcctcttgcccgataaaggagtaagttgtgcaaagaaaaataactccaaagaagcccataaggtacagcaaacaatgtaaatttcaccgagatgaggtagaaagccacctttcttaaagccactttcttaaagataactatatcagattttggcttgaaaatagcagttgtggcactatcagtgtaaaccttccaaagactttccttcatgtggctgtagaatttgctcaaatcctaggctagatcactggtgtggaatagcttagtgagaggatgtgaatgaatttgacctcctttcctttttctcagcatcatattaaccccctgagtattaattggcttcacttgtctttgtaggatgagtggcagtgtactgaatgcaagaaatttaactctccaagcaagaggtactgttttcgttgttgggccttgaggaaggattggtattcagattgttcaaagttaacccattctctctccacgtctgatatcactgccatacctgaaaaggaaaatgaaggaaatgatgtccctgattgtcgaagaaccatttcggctcctgtcgttagacctaaagatgcgtatataaagaaagaaaactccaaactttttgatccctgcaactcagtggaattcttggatttggctcacagttctgaaagccaagagaccatctcaagcatgggagaacagttagataacctttctgaacagagaacagatacagaaaacatggaggattgccagaatctcttgaagccatgtagcttatgtgagaaaagaccacgagacgggaacattattcatggaaggacgggccatcttgtcacttgttttcactgtgccagaagactaaagaaggctggggcttcatgccctatttgcaagaaagagattcagctggttattaaggtttttatagcataatggtagtacgaacataaaaatgcatttattccgttcacttaccacattatttgaaaatcaatcctttatttaattttatttccaacctgtcagagaatgttcttaggcatcaaaatccaaggtagctgtaagaaaaatactggagctaacaatgaagaacagaagtaatctgattagtcaaattattaagtgccatggattactttatgcagcagtcaggtacatagttaggtgaacccaaaagaaaaactcttgaaaacaagagatttcttccatgcacatttacaatattgaggtataattaacatgataaagtgtttccttctaacgagttgtagaaatctgagtaaccacccaaaaaagcaatagaatgtttctgtcaccccaaaacactcccttctgcccctcttcagacagtccttcagctatttcatggctctcaccctagttttttttttttttgcacttttttttttccgggggtataggggaggtgtggggcgacagggtctgtcttgttctgtctcccaggctgaagtgcagtgcagtggtatgatcatggctcactgcagccttggtttcctgggcataagtggtcttcccacttcagcctcctgagtagctgagactatagactagcataaccacactggctaattttttgtggagatgaagtctcactatgttgcccaggctggtctcgaactcctgggctcaaacaatcctcccgcctcagccttccaaattgctgggattatagtcatgaggcacctagtctggcccttttgcaagactttaatctgaaatctaaatttttaaaatttaagtacttacaaaggatatactatccaacatattgcatattatatatgtgctttaaagtttttttttttttttgagagacggtctcactttgtcatccaagctggagtgcagtggtgcaaacacggcccacctcctgggctcaagtgatcctccagcctcagcttccctcacaggcattcactatcactcccagctaattaaaataatttgtagacggtgtctcgttatgttgcccaggctggtctcgaactcctgggtttaagtgattcccccgcctcagcctcccaaagtgttgggcttacagccttgagccactatgcttggctcaaagatatttttatgaaagccctgggactatagatttagc

SEQ ID NO: 3502 - DNA, 6000 bp, Homo sapiens
gtgtgctcttctaatcagatacatgtggacattaactaattaacggcagccctgtgagttaagtattgtgatgagtgaatttgacagatgaagtacagagaagttaaatgacttgcttggggtcacactgctagcaaggggtggaacagggatttgaatctgggcagtttgcctccaaagtcctcataattaacagtgatccattctgccctcctatctgaccatttctcttatgttagactcttttgaatgcaagtgacagaaacccaagctaaggatgctccaggcaaggaagcagcatttgcaaggcttggagacccaaaagaaggaaagcggtcagggagggttctaagttactggaaagagagacagagggaagtcacaggaggaccttcaattgggtcaggcacagggaggcaggggctcaccgccatggcctgagctgaggacaccagttgtcactggggctggatgtgaggagagacactaggggactaagcatggcctggaacctgctgccttccttggcccgcgctcctcacaccctcctactcccaactctcctctctttcctcatttattattattatttttatttttttggtggtttttccaaatctttttcctgctgccgactcccctgaagtccctgaagaatgagggcttcacagaagcagctttgatctctttcagtggctcccagaggggctgtctctggtgcagattaagtgtgtagtttgacacccatcccattagtcctgttcttttaattaaacattcagtaggaggatggcgctgtggctggcattgggagccggcagggggccaccgggtacattgaagccttctttctttagtgggattgcgtgccttgattcatctttttccccctttgccactctccacttccacctctgccagttttgatgtttgagttctccctgaatccatacaggatgctggccatctcagggaggagggcaaggcaagctggcaacttggccgagctcctgttggactgagtggtttcctcctcgggctgttgtgtgtgaacttgagtgagccattcaaccttcctgggtttctgtgtcctaatgcatcagacagggcgacttgtgactgctcctcctgacctcctgtacagggagaggctacaggacaaatggaaccaagaggagacccagaaggcagaggcccgagcagtgtgtccctgagatgcccaggtcagggcatgccctaccccttcccaccagcaaaagttccagcagcaaggaggttccagctgttcccttggaatctgttaggcttctgtggttgggggatgggtgcagggaggagagaagagactggagatgatgcagtggcagagcagggggtggtggggtgaaggctgtgggcccacaaacttgcttatatgtacaaggctgcaatgaatgcagcctctccttccctcccctccagctagctggagtgctaactggggtggacagacaggttggtttgggagcaggcggcagagaggagatgggcagagccgggagcaggaggatgggccagataaccctgggacctttgttctatgacaggcaagtcagcaggatgtcaggcctggcttgatcttacacccctcgactgaatgcccgggagtccctgagcgttggggcaggaggagccttagagactgtaaggacagtgtaaccgcctagtgggttcaccttccctgctgcctagacaggggaattacagtgaagaaacagtaattcatgcagagccagctgtgcgggagaccggagttttattattactcaaattagtctccccaagcatttgagcattcagggatcagagtttttaaagataattcagtgggtaggggcttgggaagtggtcagtgctgactggtcaggttagagatggaatcatagggggtcggagtgaggttttcttgctgttttctgttcctgggtgggatggcagaactggtgaagccagattactggtcttggtggtgtcagctgatccatcgagtgcagggtctgcaaaatatctcaagcactgatcttaggttttacaatagtgatgttattcccaggaacaatttggggaggttcagactcttggagccataggcgacatgacccctaaactgtaatttctaatcttgtagctaatttgttagtcctacaaaggcagactggtccctaggcaagaaggggcccctctgggcacccagcctattagatggtaactatgcagagaggaaagggcagacttagtccgggttctgcccctcgtgcactatgtgcccttggccaaaacacttcccttctctgggcctggtttcctcatctggggtaactatacctgccttcttgtgcctcatggggtcagaggctaaaatgaggtcattctctcttttctggacatttataatttaattacaactagttcttgaccctgagagattcttaaatgtgtctataaaatttagaaggtctgagttttactaacctgcatcatttttctgggatcccaggattcccagaccagagggtggggcagggccctgtgatatgtctaacacacccatgaggcctagagtgcacccaccactggctgcaaagcactgcagctttataggtcctagagcgaaaaatggtttacatttattgaaggcttttaaaagaatgttccaggttctccatatctgttgtttcattgaagtgtcaccatctcattaatggctattgtcctcattttatttacgttatgtttttgttttttttgaggcaggatctcactcttgtcacccaggctaggatgcagtggcactgttacagctcactgcaacctcgacctcccgggctcctcaattctcccacctcagcctcccaagtagctgggaccacaggcatgtgccaccgcacctggctaaatgtttgattttgtatgtaaacaaggtcttgctatgttgcccaggctggtcttgaactcctggccttaagcgatcctcctcccgcttcagcctcccaaggtgctggaattacaggcgtgagccactgcacctggcttggcctcattttatacacgagaaatttggggcctggataaagtgtaattatgtcttcacacaactggcaagtggcagagccaagactcaaaccagggtttggggggctccaaatccctcagcctctgctgccttgaggccttggccagatggagttgtagcaggcgtgaccctgcgggtgcctcagatcaaggactccccaggtttgccaggtggtggcctcagagaagcccagggagctgctggcccctcctgagaggctaggggcaggacacaagctctcttgagtcctcccaaagctgaaggaagagacgaagtgaagggcccagggctgcagagaggctggacaaggcagagctcaagtcagctcctcctttaggagcctcctgaagcccctggggagctgtccctgactgtacttctgcaacaggtagcctggcctcttttagggcacatacatatgttactacatttatgttattgtcatctgcaggtcgtaaaattccactaggggttctcccttattcccttgaaaagtccttgagagcagagaccctattatgtgttgccctaggtaccaggtagaggcctttcaaagattagtaggtgatcaatgaatattgttgagtgagctattaataatgattatttctaagaccataaaaggtgacttcatatacatgatcttatttcctcattcattcaaatccgtgtacatttgctgggcttacgataatatgcctggactttgctagattctgggcatgcaatgacaaattagacaccctgtctgtgcccaagaaacttatgtcagggtggggagagtgcaggaaaaagactgaaaaagacaaaacaaaaccaaaaatgaaagcacagaaaatttgcagtatgtgcagccagcagtcaacgggtgctggtgaaaccgagaggaggaggctccagcccagcctggatcaggggaggctcccaggggagaggaagaagggttgggctttgtgtgccaggaaggagggggtgaaggggaggggatgggggctctggaggcaggggagcctgtgggagatgggacatgttcaatagctcagtccagcagtgcagaggggagttttgagaaatgaaacaggaagagggaagaatggaaaccacaccttttattggaacatagagtgctttgtatttctcaaaacactttcacatctattatctccagttagcctaaaaacaacagcagaagcagcagcaacaacgatgctgagtgctgactgcgagcctggcttcctcggagggagtttaccgtgcgctgcctccttggaccctcatcactgccctgcgaagcaagcactttcctcaccccctctgtctggaggagggcactgaggcaccgagaaaactgggcaggggaggcccgagaaggagagggtggcaccgtcattctcactttccagctgaggacacgggtaagtggcatgcgtccgctcctgtgacttacaggagtcccgggactcgcactcgggcctctggactcctagcctggtgttttcccctggaagtttctgaaccaaaaaaaaaaaatgtctgaaccaaagcacacaacgagattgtgagtggaaatcagcttcagcttccctggtgtttctccacggtgatcctctgtgtctgtcactgaaggggccaggatgtcaccaccaacggtaatgacctgggctttgagtggagcatttaacctgttcagccagctgttggaagtgcagaaactagtccctcccagtcacaaactaccccggttgctccaccatctgcatccagcttcattacttaattcactttgcaaagttaatccagtgatccaagctcctaatagtccccagtttgacttccgcagcttccctttctctccacacccagcctatcccgggcttctgggtcaccaagaagcaggaccctttctgttgatttcttctgggaggaggccatctcaatagccctttacaacaacccatgaggtctcctgatttccgtgttttcttggagtcccctgagctttggtttgcagcacaagctcattcccctctgtgctcccctctcactgtgtggaaccttctctaatagactcacctctggggagaggacgtgctcctttctggccgcagctgcagccattccaatgtacatcaaagcgctcgtctttctatctccacttcttaaatggttttgctttttctctatttcttccttctcatgggcagctcagagctcatctgtgacagtgaccacccttctgccccagccctggccccacgaccttccctaacactgcaaacaacttcactcttggcctcctgctggatatctggtcagtggcctacattcctcccactcatgcctctttcttttctttcttttctctctctttttttttttttttgagacaggatcttgcccaggctgaagcccaagtggcaagatcaaggctcgctgaagcctcaacctcccaggttgaagccatccacccacctcagcctccagagtagctgggaccacaggtgtgcaccacgatacctggctaattttgtctttttaaaatttttttgttgacaaggtctcactatgttgcccaggctggtcttgaactcctggactcaggcaatcctctcaccttggcctcccaaagtgctgggattacagttgtgagccaccatacctggcctgcatacccttttctatctggctttctagactttaaaatctttcttggtggctccagtttgccatatcttatggtcctgaaatgacccctgtcactgaggcagggagcagaggagactgggaatttgtgctgatggtaaatagatatggtttgaatcctggccactgcccaccagccatgtgaccaagacttaaccatattttttcggggtgttatgcagaga

SEQ ID NO: 3503 - DNA, 6000 bp, Homo sapiens
tgtgactaattttaaattgcctgagtaaagtggaagaatcttaaattagaaatataaaatataatacagtattttctaagtaaatttattggggtgttgtgagtctggaatttaaagctgtttttagagattaaaagtcttagcagtaaaaatcattaaaaatctctttagaatgctgagttatttgtagctgcttttctgtattttaggctctaaaatccatccagttggccctgattggagtccttcaaatgcagatcttttcccaagccaaggctctgcttctgtacctcaaagcactgggaatgctctggatcaaggtgagatttatttgtgctactcttgaacattaaattttggtcatctgaaaggtgctgtgtattcttttagagagtccattttctcttttctttcttcctttttttgttttttttaaagacaggatctcactcttgtcatccaggctggagtgcagtggtgcgctcatggctcactggtgcagcctccacctcctgggctcaagtgattctcctacctcagcctccctagtagctggtactacaggtgcatgccaccatgcctgactaatttctgtattttttgtagagatggggtttcaccatgttgcccagactggactcctgggctcaagtgatctacccgcttccacttcccaaagtgcttggattacaggcgtgagccactgcacccgcctgataaatcattttctagtgtgttaacaatagggacaatatttaacaatatttatttccagaacaccttaatttagctggagaactcaggtacgatcattatagtgcttgggttatccttttattagtttaattaaaaaataggaacgtgctttgtggacacagattttcagggagatttaggggagagaaacttacgagtgaatgagatactttattctaaacagtttgaatgtcattgtgatttttttgtctttagttgatgatggagaggttccgctgagggagaaagagaagaaagtgcgtccgttctcaatgtttgatgcagtagaccagtccaatgccccaccttcctttggtactctgaggaagaaccagagcagtgaagatatcttgcgggatgctcaggtacctacaaatatcctggtttttaaaatttaatagtaattctataatgcagtttttagaagggataaagtattgtgtgagggagagcagaagaaacaggatgtacctaggagattagaaaatacattagcattctgttattttaatttctcttgcgtgagtctgtttgtgctctcacacccggtgggagaatggctgacatgcttgttttgggtcatatttcatgtgattctctaaaaagtataagtgcatcgaagaacactgtatttgtattgttcaagtatcttatttcttcaaagttacaaaatgcttgtgtggtgaattttctgtaactgttacagtcttaatccttgataaccaggttatgtgtgagtgctccaagttaggtgtgttttattacagttgtctagattgcatgaaattccagtgaacaagaatggtttcccattattgatgccatctgaatatgaaagatgacagtaaaagttttcaagtgggcacttaaatgtattaaaattgcccagataggaagtggaaacaaggaggaagtcataaagggaagagattgtattgcattaatgaaaaccattattaaatgtgagtaaatacagaaatttaaaactagttaacagccaggtgtggtggctcacacctgtaatcccagcactttgggaagctgaggtgggaggatcacttgagactaggagttcgagaccagcctgggcaacaaaacgagaccctgtctatataaaaataaataagtacataaaacaaaacaaaagctaattaacaattaaaaaatatgagcttatatagatatattttccgagatggagtcttgttctgttgcccaggctggaacgcagtggtgcaatcttagctcactacaacctccacctcctggattcaagagattcttctgcctcagcctcctgagtagttgggactacaggcgcccgccaccatgcctggctgatttttgtatttttttagtagagacggggtttcaccatattggccaggctggtctcgaactcttgacctcgtgatccgcctgctttggcctcccaaagtgctgggattacaggtgtgagcccctgcacccggccagagctaatatttttatagtgtatatttacatttgtgaaattaggttatctagaacatcctgtgtacccagttatatagtattttaactggctttttatgtgtgtgttataggttgcaaataaaaatgtggctaaagtaccacctcctgttcctacaaaaccaaaacagattaatttgccttattttggacaaactaatcagccaccttcagacattaagccagacggaagttctcagcagttgtcaacagttgttccgtccatgggaactaaaccaaaaccagcagggcagcagccgagagtgctgctatctcccagcataccttcggttggccaagaccagaccctttctccaggttctaagcaagaaagtccacctgctgctgccgtccggccctttactccccagccttccaaagacaccttacttccacccttcagaaaaccccagaccgtggcagcaagttcaatatattccatgtatacgcaacagcaggcgccaggaaaaaacttccagcaggctgtgcagagcgcgttgaccaagactcataccagagggccacacttttcaagtggtaaggttcttaacgttcataggtgacgtgcttaagttctataccagaacttaagccatccctcagcagacagcaaaataactaatccctattttgactgacgctaagggtttttaactgtggcttctgttctttactgggagtttaaaagagtgcttgctaaatgtctgctcctacagtagtaggcactaaagataatagatgaataaagtgtggtctcaagtctggaggggcttatcggtgagggagaaccaaatataatgggtcattacagtgcagaaggaaggtgtgtgtcttcactgtaggttgaccagatgttcttgtcatatagaggactggaccactgcccctgtctgtgtgtgtgtgtgtatatacatatagagagacatatatacgtagacatgtatatatagatatatatacacacacacacatcacacacatatatatatgtgtgtctctgtatgtgtgtgtctgtgtctatatgtctttatatataactgtggctgggcgcagtggctcacgcctgtaatcccagcactttgggaggccaaggtgggcgggtcacctgaggttgggagttcgagaccagcctgaccaacatggagaagccccacctctaccaaaatacaaaattagctggacgtggtggtacatgcctgtaatcccagctactcaggagactgaggcaggagaattgcttgaacctgggaggcggaggttgcagtgagccgagatggtgcactccagcctgggcaacaagagtgaaactccatctaaaaaaaaaaacatacatacgtacatatatatatatattctctactgtattttaagtcattgtaatggggacatagccgctagctaaatgtaaaaacagaaggttagcttgtattaaacatacacagtttggaaatttgttgggttctttctaaattattacttcataggactagaataaaacttaccatgttttaattgaatgaaaatagctttgtagtcatgaaataaccatgtaattgtgacctaagatgccataattaaaattagcaaagaatcagtatatatgctacctcttactcttcttttcatgggtctttagtgaaaatggaataatttgggaattagataattttaatataatcagaatgttaacagggaatatctttggtaactataagtggttcttaataattttataagccaaatagaagttctcacgttgattcacttttgaaaagtgaaagatgggatagtacatgtttagttttaatctggacacatgaggattatctgttttcattgcatctaaatgtttttcacattttgttattttaaatttggatgctacagtgatttcttaaaacggcaacattttcttattgtttcatgagatatggtgcatgttacaatcagtgggggttttgattctgtaataagtttattatgcaaagatggattccctgctttgtcatttatttttaaaaattaattatatttgaaggggattatgtagtaacaactatgaaattaaaagaggctttagttattgttagctgtttctgtttcttgccagttttgtttaattaatgctaatgagggcttttttttttccttttccaattagtatatggtaagcctgtaattgctgctgcccagaatcaacagcagcacccagagaacatttattccaatagccagggcaagcctggcagtccagaacctgaaacagagcctgtttcttcagttcaggagaaccatgaaaacgaaagaattcctcggccactcagcccaactaaattactgcctttcttatctaatccttaccgaaaccagagtgatgctgacctagaagccttacgaaagaaactgtctaacgcaccaaggcctctaaagaaacgtagttctattacagagccagagggtcctaatgggccaaatattcagaagcttttatatcagaggaccaccatagcggccatggagaccatctctgtcccatcatacccatccaagtcagcttctgtgactgccagctcagaaagcccagtagaaatccagaatccatatttacatgtggagcccgaaaaggaggtggtctctctggttcctgaatcattgtccccagaggatgtggggaatgccagtacagagaacagtgacatgccagctccttctccaggccttgattatgagcctgagggagtcccagacaacagcccaaatctccagaataacccagaagaaccaaatccagaggctccacatgtgcttgatgtgtacctggaggagtaccctccatacccacccccaccatacccatctggggagcctgaagggcccggagaagactcggtgagcatgcgcccgcctgaaatcaccgggcaggtctctctgcctcctgtaagtaatgtactatctcatagccttttccggagtcctttactttgttacgattttcttggtggtcacattcatcttctccagtttgcatttttattttacgattcccttggcacagagtggatcttataaatgttttcataatgcagtttattcaatataaagaacatttttctgttttagagagaacccatttatttgtgaaagaaacagagttttgttcttatccctataaacactgcatttgctgtttcttctctagctgatgtgacatattagggaagcagcacccgactgggactcaaaagacctgggtttgaaacttttgattactagcttagctgtgtgaaatcaggcagatggtataacttctctcattgatgatgtcaatctttttaaaaattttctagcagtgaaattttaaaaaatgaaatgttaggtgaaacctcaaacttacaacagtggtaaaattggaagggttctggatggagtgagggcagggaggggtaactgggctgaggggcccctcttcagcctcttcctccccttcaacgaagtctgaaaatctctggctaatatggtgatccctaagatttctttgtactttaacatacgaaagttattctaagattttgtatgttttggcttgagtgcaccttctacactccttccagatagtaagcttttgtttgaaatttaagcttccatcctctcactttgacataggtgagagaaaataaaaatcccagaatgtctgaatgaagtctgctttttcatagtttaatttgaagccac

SEQ ID NO: 3504 - DNA, 6000 bp, Homo sapiens
taatcctgcagtcttgctatgtaacctatttatctggtagcttttttgtagattccatagcattttcttcatagatgattatattgtctgtgaaggcagttgaacttcttttttaccaatctggatgctgtttatttctctttcttgttttattgcattggctagaacctctaggacaatgttgaatagatgttgtgagagtggatgtccttgctttgtttctgatgactcaatgtgtcttgaattttttagtgctaaagtatttttaaatgatattccaatgactaaattctaggtttgctgccagtgcctcaataccatgtttaatatgatcaaacacttctgttgtaatataaattacagaacaaggtaattctgaattgttccatttatgtccctgactgttgaaactatttaattttaaacttgcaacttaaaataaaagattattgtatattagtgtgttttacattacatcttaaaaagtcaatgtggtgagtattaatataagaattaatggtctgcttgatattatgaaagaaaaatcgctaaataattttgtcatagttggttcatatgaagcttttacatagacctttgagggcggaatctctgtggtagttttatagtaagctgggattgtgtttatttgtgtttttacttgtaggttaatagtcctaggatggatctgactcttgctgaacttcaggaaatggcatctcgccagcagcaacagattgaagcccagcaacaattgctggcaactaaggtagtatcgtcctttttttttggagatgaatgctcactctgtcgcctaggctggagtgcagtggcacgatcttggctcactgcaacctccgcctcctgagttcaagtgattctcctgtctcagcctctcaagtagctgggattacaggcagacgccaccacacctggctaaattttgtatgttttgtagagatggggtttcaccatgttggccaggctggtctcaaactcctgacctcaggtgatccgcccacttcggcctcccaaagtgttgggattacaggcgtgaacccccgtgcccggctggtagtatcttcttttaaaagagctaacaggccactattgttaatatatgtgtaaggctatttacattctacccccattaagccaattacctcacagatatgaggtaacattatcaacccaaaagccacctgctgtttggtgctctctttgtgctctctttgagtccttactatagcattttgtagaaatccttgtatcatcctaattgttcaagatctttctgactcctgattctgatcaagattaaccatgctatgatgggtatcagccagacaggaaaggtggaaagagcccttcatctttgcttctaggaactactctgggccacagcaagaggaatattaaagttctaacatggtataaccataccatagattaatcttggatcagattaatctaatactgtccccttctggagcttggcaccaataacgggctgcttgcctttatttggggaacattctttatccacaaactaaccctagtcctggccttgaacaaggaaaatataagaagccactccattaccatcagaactgctgcttctcctgccagccataggcttccaatctgacccaaaagccaacagacctttctctgtaaagggctacatagtaaatattttgggctttgcaaactttgctgcctctgttgcaactactcaggtctgctgttataagcagtcatggataataggtaaacagatggtgtggttgtgtcccaataaaactttacttacaaaaacaagatagcaagctggatttggcctgcagactatagtttgtcaacccctggtctaaacacccaggatccacaactaacagtcctttagtgattatcaggtcactgaagctggggtagacaattgttggtttgtcatgggcaaagttacccaatagggctttgaaataatggccaggaattcttcaaggcagttctcaaggcagtgtggacttcatgtcatacttcctagggttcctgtgcatccatttctgtttgtaataccagaccccagtttttccaaaatcatgcatatcattgcttctcaaaccttaagatacatatgaatcacctggggatcgtgttgaaaatgcatattctgattcagtaggtgagttgaggtttgagcttctgcatttctcacaagcttccaggtgatgctgatgcacattacattgagtagcaaggatatatagtcaaaaagattggttgttgaagaacaaatttctaagctttttagtcttcaaggacttaaaaacaagtccttgtgggtttttttttcttttgagatgggttctcactgtgttgcccaggctggacttgaattcctgggttcaagtgatccttctgccttagccagggtttttgttttgattctttccatgttacttatatgttctaggcatactaatctaagaaatagtttacctgtgattataaattgtgtggctctgttactcagttttagttaaaaattttaatgtaataaaaacaaaatttctgctataacaaaagtaccttggggcaggggaaagaaacaatttcagattccatgattgcagctttctaaaggtgttaaatatttctttagctcttttcagtgaccatttattgagtatatactatgtaaaatatcattcaaagacatttacatttcacacttcatttaatcttcactatagtaacattggtagttactattgatcatccctgttttatagatgaagaaacatagacttgcatgcttggtgaggttatgcaatttgttcagggtctcatagctaataagtggtagagctgggtttgaatctaaatgtactccaaatcttgtgcatttaaatagtttcttatgatgcttcccatttctacatgagctgctttttaaaattgttgcaacagtttatgaaaactagttcaagaattgctgcatccttgctgcataagaaccacttgggttaaaaatactgattcctggatcttatccccagaagattctagggtgggctcaggagtatctgttttgaacagacttccagtgtgattctgatggcagtgtttaggaagaaggtgagaccagaccagggttacaagtgtacctcaatctcaacatctaagtgttgcagttaggctattttgagcttagtggtgtacttacctaaaatgacatacctaatgattacttttatttttaggaacagcgcttaaagtttttgaaacaacaagatcagcgacaacagcaacaagttgctgagcaggagaaacttaaaaggctaaaagaaatagctgagaatcaggaagctaagctaaaaaaagtgagagcacttaaaggccacgtggaacagaagagactaagcaatgggaaacttggtgagttgttcctcatagatttacttttttatacatttatttgtctggtttttttgagacagggtcttactgtgttgcccaggctggtcttttgaaccgtggcctcaagtgatcctcccacctcagcctcctgagtagctggggttacaggtgcaagccaccatggttgatctgtagataactttaaagggtatcttttgaaaaaatataatttactgcagttttgatgctgcaggttcctctgaattgaattcagctgttgaatgttttatacaggatttctaagatacctttggaaaatgtagcattttttccccttaatattttttgactgagaatttgatgaaggcaaggatttttattcatataatagctccatctattacgataccattttattcagaatgtttgtggtttaatagatccacctaatgttataaaattgaaagttctaaagaaatttttattgtttctaaaatttggagtttaataatatttttaatgcaaattctgataaatatacattgatattgaagcacagagatttagagatgtctctgttgatttcacttgcttctaaaagaagtcggttgcttccaggacattctgaaaaatttttctactgtttattagaaagttcattgtaaagcccggttgcctgggaagtagtccattcttatttttcttttcaactgttgttgctgttctctgtctcatctagtggaggaaattgaacagatgaataatttgttccagcaaaaacagagggagctcgtcctggctgtgtcaaaagtagaagaactgaccaggcagctagagatgctcaagaacggcaggatcgacagccaccatgacaatcagtctgcagtggctgagcttgatcgcctctataaggagctgcaggtagaccgtagctgtttgccaaaagctgtacaacctcctttccagaaacagagttgctcatataagtagcaagaggtgctagatttcagttgcctttccttaaagagaaggcaggttgtggggggaacccaaactccagagaatccagagtaaactttatagtaccctagacaggaaatttgagacattcctcataaccacagctggtggtcttgcacaggtgtcacttaattttaaaccatgagatgagaagtgtggaggggtggagggacctcatatttttagaaattatataatagttaaccatgtgattaactgtttgagacattttcttcctactccttggctaccttttttcccctctcttttattcagctaagaaacaaattgaatcaagagcagaatgccaagctacaacaacagagggagtgtttgaataagcgtaattcagaagtggcagtcatggataagcgtgttaatgagctgagggaccggctgtggaagaagaaggcagctctacagcaaaaagaaaatctaccagtaagtgggccgttttgtaatggttttggggaggagggaaaaagatgaccagcccagtgaggttactcataggcatcttcttcagaatcattactcagtgtgccctcagaaaacagatgctgtttatggatccttaaaagacaatccgctgcttttttactttttaatgttattacctgtgtagctctgtttgtctctaatacttgtaataaagtgtgggtgagagttcattggggagtgtttattttggaatgttttttgtagactctatggctagattctgaaactgctcattttaaaaagtaagaaaatgtcacatcttagtttctaagtctgatcacctgagatgatttttaatactaaaggacctgtgcttctttcctaaggtttcatctgatggaaatcttccccagcaagccgcgtcagccccaagccgtgtggctgcagtaggtccctatatccagtcgtctactatgcctcggatgccctcaaggcctgaattgctggtgaagccagccctgccggatggttccttggtcattcaggcttcagaggggccgatgaaaatacagacactgcccaacatgagatctggggctgcttcacaaactaaaggtaaaaagtcctgcacagcctagttcttcctgtccccactattctttctcccaagtttgagtttaaaaaaaatctctctttgtattcattattcatgtttgaattctaaaaatccttttatattctttgctggtgtaatgagacgtttaaaaaattaaaattgataccctggttgtacaaggatgatttttcttaaccctaaataatacaattctattcaggaaatgaaataaaatataatatctttataaacctgaaaattgttttaaaaagttccttattgttactaaggaaattttgatattaataacttgagaacttttctttttgggtaaaaacatatgtgtttgtggtgtcatctgtataggatgtgaggttctgaatctattatgttgatgagtggtgttaaatattcatatctgcttacatgtgagaatttgctgataatttttagaataacattaaacatattgggagattaaaagtgaaaatagcagaggc

SEQ ID NO: 3505 - DNA, 6000 bp, Homo sapiens
tattggtcaggctggtctcgaactcctgacctcaggtgatccactgacctcaggtgatccacccacctcggcctcccaaagtgctgggattacaggcgtgagccaccgtgcccggccctgaggtttatctttgtaatatgaatatctaattgtataagcagtatttattggaaagattattcttttttccactcagttgcttttgcacctttgtctaaaatcagttgcctcatgtatgtggggctatttttgtactctctattctgtttgattgatctacttgtctattttgacgtcaataccacatgcattggtcactggaacttttataagtcttgaagtcaggtagtgtaagttttccagcttgattcttttcagagttattttggctattctagatgctttgtacttccatatgaattttagaatcaacatcaatttttacaaaaatgcctgtttgggtttcagttgagattttgttgaatcaatttgagaataattgctgtcttgacagtattgagcttccaattcatgaacatggtgtaactctccatttatttgcattttctttcagcagtttttgagattttagtatatacatcttacctatttattaaatttatccctaagtatttcatatttttgatactataaatggtatttaaatttaaaaattttaaatttctaattgtttctaatatattgaaatgcacttgacttttgcatattgatttttttttttttaatcctgcagtcttgctatgtaacctatttatctggtagcttttttgtagattccatagcattttcttcatagatgattatattgtctgtgaaggcagttgaacttcttttttaccaatctggatgctgtttatttctctttcttgttttattgcattggctagaacctctaggacaatgttgaatagatgttgtgagagtggatgtccttgctttgtttctgatgactcaatgtgtcttgaattttttagtgctaaagtatttttaaatgatattccaatgactaaattctaggtttgctgccagtgcctcaataccatgtttaatatgatcaaacacttctgttgtaatataaattacagaacaaggtaattctgaattgttccatttatgtccctgactgttgaaactatttaattttaaacttgcaacttaaaataaaagattattgtatattagtgtgttttacattacatcttaaaaagtcaatgtggtgagtattaatataagaattaatggtctgcttgatattatgaaagaaaaatcgctaaataattttgtcatagttggttcatatgaagcttttacatagacctttgagggcggaatctctgtggtagttttatagtaagctgggattgtgtttatttgtgtttttacttgtaggttaatagtcctaggatggatctgactcttgctgaacttcaggaaatggcatctcgccagcagcaacagattgaagcccagcaacaattgctggcaactaaggtagtatcgtcctttttttttggagatgaatgctcactctgtcgcctaggctggagtgcagtggcacgatcttggctcactgcaacctccgcctcctgagttcaagtgattctcctgtctcagcctctcaagtagctgggattacaggcagacgccaccacacctggctaaattttgtatgttttgtagagatggggtttcaccatgttggccaggctggtctcaaactcctgacctcaggtgatccgcccacttcggcctcccaaagtgttgggattacaggcgtgaacccccgtgcccggctggtagtatcttcttttaaaagagctaacaggccactattgttaatatatgtgtaaggctatttacattctacccccattaagccaattacctcacagatatgaggtaacattatcaacccaaaagccacctgctgtttggtgctctctttgtgctctctttgagtccttactatagcattttgtagaaatccttgtatcatcctaattgttcaagatctttctgactcctgattctgatcaagattaaccatgctatgatgggtatcagccagacaggaaaggtggaaagagcccttcatctttgcttctaggaactactctgggccacagcaagaggaatattaaagttctaacatggtataaccataccatagattaatcttggatcagattaatctaatactgtccccttctggagcttggcaccaataacgggctgcttgcctttatttggggaacattctttatccacaaactaaccctagtcctggccttgaacaaggaaaatataagaagccactccattaccatcagaactgctgcttctcctgccagccataggcttccaatctgacccaaaagccaacagacctttctctgtaaagggctacatagtaaatattttgggctttgcaaactttgctgcctctgttgcaactactcaggtctgctgttataagcagtcatggataataggtaaacagatggtgtggttgtgtcccaataaaactttacttacaaaaacaagatagcaagctggatttggcctgcagactatagtttgtcaacccctggtctaaacacccaggatccacaactaacagtcctttagtgattatcaggtcactgaagctggggtagacaattgttggtttgtcatgggcaaagttacccaatagggctttgaaataatggccaggaattcttcaaggcagttctcaaggcagtgtggacttcatgtcatacttcctagggttcctgtgcatccatttctgtttgtaataccagaccccagtttttccaaaatcatgcatatcattgcttctcaaaccttaagatacatatgaatcacctggggatcgtgttgaaaatgcatattctgattcagtaggtgagttgaggtttgagcttctgcatttctcacaagcttccaggtgatgctgatgcacattacattgagtagcaaggatatatagtcaaaaagattggttgttgaagaacaaatttctaagctttttagtcttcaaggacttaaaaacaagtccttgtgggtttttttttcttttgagatgggttctcactgtgttgcccaggctggacttgaattcctgggttcaagtgatccttctgccttagccagggtttttgttttgattctttccatgttacttatatgttctaggcatactaatctaagaaatagtttacctgtgattataaattgtgtggctctgttactcagttttagttaaaaattttaatgtaataaaaacaaaatttctgctataacaaaagtaccttggggcaggggaaagaaacaatttcagattccatgattgcagctttctaaaggtgttaaatatttctttagctcttttcagtgaccatttattgagtatatactatgtaaaatatcattcaaagacatttacatttcacacttcatttaatcttcactatagtaacattggtagttactattgatcatccctgttttatagatgaagaaacatagacttgcatgcttggtgaggttatgcaatttgttcagggtctcatagctaataagtggtagagctgggtttgaatctaaatgtactccaaatcttgtgcatttaaatagtttcttatgatgcttcccatttctacatgagctgctttttaaaattgttgcaacagtttatgaaaactagttcaagaattgctgcatccttgctgcataagaaccacttgggttaaaaatactgattcctggatcttatccccagaagattctagggtgggctcaggagtatctgttttgaacagacttccagtgtgattctgatggcagtgtttaggaagaaggtgagaccagaccagggttacaagtgtacctcaatctcaacatctaagtgttgcagttaggctattttgagcttagtggtgtacttacctaaaatgacatacctaatgattacttttatttttaggaacagcgcttaaagtttttgaaacaacaagatcagcgacaacagcaacaagttgctgagcaggagaaacttaaaaggctaaaagaaatagctgagaatcaggaagctaagctaaaaaaagtgagagcacttaaaggccacgtggaacagaagagactaagcaatgggaaacttggtgagttgttcctcatagatttacttttttatacatttatttgtctggtttttttgagacagggtcttactgtgttgcccaggctggtcttttgaaccgtggcctcaagtgatcctcccacctcagcctcctgagtagctggggttacaggtgcaagccaccatggttgatctgtagataactttaaagggtatcttttgaaaaaatataatttactgcagttttgatgctgcaggttcctctgaattgaattcagctgttgaatgttttatacaggatttctaagatacctttggaaaatgtagcattttttccccttaatattttttgactgagaatttgatgaaggcaaggatttttattcatataatagctccatctattacgataccattttattcagaatgtttgtggtttaatagatccacctaatgttataaaattgaaagttctaaagaaatttttattgtttctaaaatttggagtttaataatatttttaatgcaaattctgataaatatacattgatattgaagcacagagatttagagatgtctctgttgatttcacttgcttctaaaagaagtcggttgcttccaggacattctgaaaaatttttctactgtttattagaaagttcattgtaaagcccggttgcctgggaagtagtccattcttatttttcttttcaactgttgttgctgttctctgtctcatctagtggaggaaattgaacagatgaataatttgttccagcaaaaacagagggagctcgtcctggctgtgtcaaaagtagaagaactgaccaggcagctagagatgctcaagaacggcaggatcgacagccaccatgacaatcagtctgcagtggctgagcttgatcgcctctataaggagctgcaggtagaccgtagctgtttgccaaaagctgtacaacctcctttccagaaacagagttgctcatataagtagcaagaggtgctagatttcagttgcctttccttaaagagaaggcaggttgtggggggaacccaaactccagagaatccagagtaaactttatagtaccctagacaggaaatttgagacattcctcataaccacagctggtggtcttgcacaggtgtcacttaattttaaaccatgagatgagaagtgtggaggggtggagggacctcatatttttagaaattatataatagttaaccatgtgattaactgtttgagacattttcttcctactccttggctaccttttttcccctctcttttattcagctaagaaacaaattgaatcaagagcagaatgccaagctacaacaacagagggagtgtttgaataagcgtaattcagaagtggcagtcatggataagcgtgttaatgagctgagggaccggctgtggaagaagaaggcagctctacagcaaaaagaaaatctaccagtaagtgggccgttttgtaatggttttggggaggagggaaaaagatgaccagcccagtgaggttactcataggcatcttcttcagaatcattactcagtgtgccctcagaaaacagatgctgtttatggatccttaaaagacaatccgctgcttttttactttttaatgttattacctgtgtagctctgtttgtctctaatacttgtaataaagtgtgggtgagagttcattggggagtgtttattttggaatgttttttgtagactctatggctagattctgaaactgctcattttaaaaagtaagaaaatgtcacatcttagtttctaagtctgatcacctgagatgatttttaatactaaaggacctgtg

SEQ ID NO: 3506 - DNA, 6000 bp, Homo sapiens
gtgggaggatggcttgatctcagcagtttgaggttacagtgagctataatcatgccactgcactccaacctcagtaacagtgtaagaccttgtttcttaaaaaaaaaaaaagacatttaggcatttaggtaggaacttgaaaggcgaataaaagtttaccatatagggtaaggtggagggaggggaaggtttttaaagcagagggaaaagtataaatggatgcaaagaggcttgatacacaagcttctgccccatttttctttcagattactgctaacttgaggggaatgtaggagataactgaataaatccgtaggttaaggaaactgtaaaaatggagtatctctggtttcaagagggaggataattggtggaatattaaatgattctacatgacctgggcactggctacatcttccacctctcttaccactcccctccttgttcactctgccctgggcacactgatctttttgccatgtctttgagatgccaagcacaaggctgcctcaagctctttgtccttgctgttcccactgcccagagtctgattccctccctcccctcattcctcagaggctttctctggccagcctatctaaaacaggtgctattctcttagatttacctagttgctatttttttcgtagcatttattattaccttattcatgtgtttgttatctagctcctcccaactagaatataagctccatgaaggcaagtctcttctctgttacctctaaagtctagaacagggcctggcaaaatacagccacacgagtattagtaaaagagataaacaaaaggagtggggagagggtagagaagaacccagatgagttggaggtgaagggaataggtattgcaggagtgcaatctcaatagtctctgtttcattggctgagtaagatgggaattcatcttctgagaggagagagggactcaaagtttgggacatctgtggaagatgagaacgagtaacacagggagaaagttgggaacttaaacatttgaattcaaaccaaatagataattaattgtactgtgccaaggggtggggtgagagccaaaagagaagatagctcctccccgctcagaatgtggcattttgacttatctttcttggagttgagtagagaattatagggtggggagaaccaaacagaggctcttgaaagaataagcaggtgagggtgggagcggagagaaattgaaacttggtagaaaacaacccttctgagagccatgtttgagtggtacagaatctgagagaatgaaaccaaagcacagacaagggttctttggtttcacgcttctatgattaaaaaaaaaaaagtcctcaacatacctgctatttggcagctgggaattctcaattggctagaagtgagtttcaggacatattgccaattgctgtcccttttctcctcccttcccttgggcagggcatttgtgtaaacagacagtaacgaaatagaactggactgtcttattccaattcttctctccttgcttccatttctattgtaattattttattaataagctagggctgccagcactcatactaagtataatttactattgtgtacaaccagttttagggtggtaatgagacacggttttttggtgagaactggaaggttagtgaccaatatccagaattcttttcctggatgactgtggatcataatatcttcagctgttttggggacttctttgtctgcaaaaaaataaaaaaaaaccccagtggaatatgaagtaggttttttggtgtaaaatagtccctttatgaactgcagtttaccaaaaagaattgttgcttcccagaactaccattcaacccaggaatcccgttattgagtgcatacccagaggaatataaatcattctaccataaagacacatgcatgtgaatgttcattgtagcactattcacaatagcaaagacattgagtcaacctaaatatccatcaataacagactggataaagaaaatgtgctacatatacaccatggaatactatgcagccataaaaaatatcaagatcatgtcttttgtgggaacatgaatggaagtggaggctattatccttagcaagctaacgtaggaacagaaaacccaatactgcatgttctcacttagaagagggagctaaatgatgagaactcatgaatgcaaagaagggaacaacagacagtagggcctacttgagggtggagggtgagcggaaggagtggagcagaaaagataactattgggtactgggcttcatacctgggtgatgaaataatctgtacaacaaacccctgtgacacgagtttgcctatgtaacaaacctgcatatgtagccccaaacctaaaagttaaaagaaaaaagaattattgcttcccacaaacgtgctaaatttcagtattagggtttcttttattattaagattctgaaagttaacatgttcccaattgatctcctcttttctgtaacttggtccactcatggtcttctccattttggtttgtggcaacttccatcttttgggacaaaaatttgggcttctttctctcatattccacatctaatctgtcaggaaattctgtgggtttggacttgaaaatatatccaaaacctgaccactatttgccatagacgctgttatcgcctttgagcaagccacttccatcttttgcttggcttatcacaagagtttcttactgttctctgttgactttcagttttccacagcagctcttaaaatatgtcagctgacatcactcttctgttcaaaacctttccataactccccatttcactcagagcaaaggtaaagtccttagaatagcctacaaggccctccttgtctggcccttcatatcactccatctcatctcctactactctcccctcatcgtctgctccagctatcttagcctccttgatggtcccagaatttgccaggcaggctcccatatcaggccttagcgttggctgttccctctgcctggaaatcttccttcatatttgtggagttcacaccctcatttccttcaagactgtgctcacacaccgccttttcagtgaggcttaccttgaccaccatatttaaagttgcacctgtacaccttatccccttctcttaccttattctatttttttcacaataactacacttgtcttttgaactttttgttcattgatgtatccctaggacttagaagaatatctaccaagtggcaggtatttaataaatatttactgaatgagggatgaatttattttgcttaactcagtataaccctcttaagaaaacaagactataaaccagattttttgagaacgttaaattctttttttttttttcagatggagtttcactctcgttgcccaggctgaagtgcagtggggtgatctctgctcattgcaacctccgcttcccaggttcaagagattctcctgcctcagcctcccgagtagctggcattacaggcatgcgccaccatgcccggctaatttttatatttttagtagagacaagggtttcaccacgtggccaggctggtctcgaactcctgacctcaggtgatctgcccgcctcggcctcccaaagtgctgggattacaggcgtgagccactgcgcccgggcgagaacgttaaattctagttgaattaaccgtaatttagtatttccagatacagtatctgggatggtgcaatagggagttcgatggagattctggtaagggatatggtgggctaagaaagaattgtctgttcttgatactagataaacccaggggatttaccccacttcaggttctagaatcatgtataaaggcagagaaaagtgattctgagtgaacttgcactgacaacttactagaacaaagcttcctggagttagggttcccgcagtatgtgtctctctggaaggtggaataaaagcctgaacccgctctgctactctttggaaggcagccctgccatttccctaggccttggcctccctccctggaaaaggatggtatccaccggctccccgtatcggaggctgtttgcagggtgttcccagcaccccccagggaagctcctcagaatgctgcctgacacatttttacaaaatttatttttattgtggtaaaacatacacaacataaaagttatccctttatccagtttgcggtgtacgtttgttaaccttacagcaagtaacacatgagttttaaattagaatttggacaacggcaaatgagatgaaaggcgaacaatccgaaagccggatcactgaggagctctgggaacgcgccgcgagctgaagccacacggggaactccattttgtcgggacagggtcggtcctggccgcctccagggagtcgggtagtttccgcggcgtggcccgggcctcccctgaagtccgtccgcctctctccgcctggcccagcggcgcggccgccggaggactctgtccacgcgcccaacgtcgggcgccctgttctgaaggcaaagggtcccctgcctcgcacgactcggagccgccgaggaggtgacggcggcagccctggggcggctcggtgccattcactaccatcctgttttcctgaggcgcggccttccaattgccccggctccgctaggaggcgcgcgctccagccgctccgccgcgcggccccgaccgcacttcagtccggggcgaagaaagaaaaggcggccggctcccgccgctccccgtctacccagccgggcccgcgcaggcgcgcgcagctcccgttcccgcggccgcccctcccccaggccgccgggcgcgccgcgggcggggtcggcgcggggggcggagccggcacgggctcggctggggcccgacccgggattagttggtttcggagcggaggagggagccccgaccgtcacgagcgtcgaagagacaaagccgcgtcagggggcccggccggggcgggggagcccggggcttgttggtgccccagcccgcgcggagggcccttcggacccgcgcgccgccgctgccgccgccgccgcctcgcaacaggtccgggcggcctcgctctccgctcccctcccccgcatccgcgaccctccggggcacctcagctcggccggggccgcagtctggccacccgcttccatgcggttcgggtccaagatgatgccggtaagtgggcgagcggccagggcgtcgggcccggaagtgtgcggggtcgcgtgccgggggctggtccgcgccctcgggcgcgtcggggaaggagcctgggggccgcagcccgcgcggaggggccggggctttccgagcttcgagcgggtttcaggaaggggaggctccatcctctgggctctgcgcccacagccgtcgtgggggcgcggcgagaccctaacctcgaggcgggttcctccagctgctccggagtcaggcgagccgcccgcgagcccagcagccactcaaacttttcgtctttcactgggtcttgacttttttgcagttcttgaaggtcaagaatacgggaaccggggaccttgttctttgctgtgtctttttactttttactggagtgaaacatacgttactggaacgggtacctttgctttgtttttaattgaatttcgatcttgatatccacagtagcagctaagtcacccttacctctttgtggaaaggggttttggtaaatgcaatctcggaagttttagattgcaggaaagcgtacgtgcctggctcccttcgtttcccacagcttttagcaagacctccggagaggattagtgccttctttaggagctccgcaggcttttgacacggccaccaggccacagatgaacagcaggtttgagacatttcagaaatgtctctgtcattcagcgatcgcggaatggaggtttgcggtgtgttgcggtggcttctgcagacttcagtagcgagtttcttcgtggaagttgtatttgcacctctcccactgaagtggggacatcttgcaggcatcctatgcttg

SEQ ID NO: 3507 - DNA, 6000 bp, Homo sapiens
ctactggggaggctgaggtgggagaatagcttgaacccgggaggcggaggttgcagtgagctgagatcatgccactgcactctagcctgggcaacagactgagaccctgtctcaaaaaaaaaaaaaagtgaaaacgtgttcacagaaaggcttgtacataaatgttcatagcaggtttatttattcacaatagccagagaaataggaaataacccaaatatctctctgtaggtgaatgggtacaaaaatcgtggtacatataaatagtggaaagttatttagcaataatagaaatgaattactgatatatgcaataacatgaatgaatctcaaaaggttatgctgactagtgaaatttgctaagagagtaagtcttaaatgttctcaccacacatacacaaatggtaattatgtgaggtaatgggtgtgttaactaacttgatcatggtaatcagttcaccatttatatgtatatcaaagcatcatgttgtatacctaaaatatatataattgtatttgtcagctattcctcaataaagcttgggaaaacccttacacacttaaaaaatataacaccgtaagaggtaaacagatggcaattctgctttgtacaatacaagcaaggtttgatcttattcatatgactttttaaatgtatataaaaatgagactgaagtcaggtgtggtggctcatgcctgtaatcccagcactttgggaggctgaggtgggtggatcacctgaggtcagtagttcgagaccagcctggccaacatggaaaaaccccatctctactgaaaacacaaaattagccgggcgttgtgttgcatgcctgtaattccagctactcgggaggctgaggcaggagaacggcttgaacccaggaggcggaggttgtggtgagctgagattgtgccattgcactccagcctgggcaacaagagcgaaactccatctcaaaaaaaaaaaaaaaaatggggagagagactgaaaattgaaatctctctttgagaaacagatacttatctgtgtagggtacaggaatttcaaattataattccccccaaaatacaacaacaacaacaaaaacgttatggtgaacaaaagaagagcaacacgaaagagtacatactattttattttattcatatgacattctggaacatggaaaactactctctggcatcagaaagcagatctgtggttgccagtgtagagaagactaatacaaaggggtatgaggatgaaggaaatgttatatagcttgatctgtttgtatttgcaagggtgtatacattggcaaaactcaaataactatacatttaagatacgtgcattactttgtatgtaaattatacctcaataaagttgacttaaaaaatgaagaacacaggcttttgcattacagtgacctgttactatttctcacttgtaccccttgtaaaagttacttatctaagttcgaatttctttatctgtaaactgggaatattaatagtatcaatttcatagggttgttatgagatttaataagatattatatgttgtatacttccaagatctgtcatggaacttaaaaatcaaaggtagttcctattactactacacatggtttttttctaatcacatcatgaaagaatgcagttgataattcagcccatttttcagaagagctgcctttatagatctcagagtagatgtgcacctttgcctaccacccacagatcaggcaggcagaaaatacagaccatactctggaaaagcaccttctttaatgccaactatcagcagggaaattgggctaaacttcctctcccagctgagctagagtatgacaatctgtgtgcctggatacagggaggggcccaatcttttattacgaattgagatttctttggagcagagctacccagttagcctggagctactccaggctgactcgagtaaaaatgggctcatctgacccagctcggtgtcagaacaatgggtctatcttagattcatctgtggtgttatgtttcgctaaggttttctgccctccttgtctatgacagcttgcttagcaacttgaacctgctctgcccacagtttggttctctgccacttaccttatgattagtatctcagtaacagctcctgtctgaacttaccactcacacaccagtttaatcacagcctgactagccagctctgcaccacctcctgcagaacttcttgcccagatggctgctgccttcttgcccagatggctcttctcttggagccaccagaagagtgaacccttcagactgaatagctctcggctggcacctgggagaagcaggaagaaatttttagattacacttatctgaatttctaatctgaagtatcaaagctgcattccatcacccctgcaagggatttcagtctaagataagaactgaggatgcataatgggtggagattaataccagagtttaatgaagcggggtttgatacagctggtgcatacaatgccttatttgtctttgtatctcctgttttagaggaagcctttctgtttgcaagagtttcctctctttcgacttttcgttccatatgttcccttgcctttggatattgctcaggttaacctaaaaacacacccagtgatgacaatgtgtagaacattctatttgtttttttaggcaatattacatagtggttttcaccttaggcaggcatagatttgaatcatctctgctatttatgagttgtgtgatttggggtgaggccctctgctctagccattctggcctttcttctgcctctccagcatgccaacctcactcttccaaggtttttgcatttgctcgtctctctgcctgagacccttttcatccaggacttctgaggatagtttcttcttgtctctcggatctctgttcaaatgtcatctctttggatagaactttcctcaccattatttctaaaatgccccacctcggtcactattgcaccatcttattttagtgtcttcatagcatttatcttatttacttgtttatcatctctcttccccaattagaataaaaacttctaagctgggcacagtggctcacgcttgtaatcctagcacttggggaggctgaggtaggcggatagcttgagctctggagtttgagacccgcctgggcaacgttgccatatcttatctctacaaaaaaataccaaaatattagctgggcacggtgccatgcacttgtagtcccagctactccggaggttgaggtgggaggatcacataaaccaggggaggtcgaggctgcagtgaactgtgatcatgccactgcactccagcctgggtgatggagtgagagcccgtctacaaaaaacaaaacaaaacaaaacaaaacaaaacaaaaagaataaaaacatctagagagcagggcagggcaggaggaacttatctgtctttttcaccacagtatccctaaagtttagaattgtacccagcacatacatagcaggtttttagaaagttatctattcaatcagtcagtaagttaacatctctaagctttagtttatctgtaaaatagagataatagtactttcctatagggttaatgaagataatatgaggaaatattcgtaaagggctgagcatgatgcctgacatatagtaattgtgctataaatggtagacatagttattattctttctgcctccatttcccctctcctgagtatataagctcctctagagcatcgacaatgccttattcatatatttcatattgctatggatatagtagacaataaaacttagtttcaatgaaataaaaatttttcctagtaaatcaaggcttcgaataagtgaaatagaaaatacactaaccgaaccaaccaaagatggtgagctcatcttttggactcagttaatcagccctcctcccagtgagggctttcatgactgtctcatcctgggagggtcaggggataaggtgactatcccttgtgtgaacttcagccagagcaccagtgcatttgatttcactcatgtgctcgtaggtacgttttcctctgctagattgcgtgtgctttgaattacttacctttgtatccccactggctggccccttgccttctctcgtactcagtatagaagtattgaagaatagaacagtggtaaagggacaatagtacagggattaagaatgtagactctgggctcaaagcatctaggttcaaatcctagcttctagcttctgccacttaccaactgggaggcttcagacaagttacttaacttctctgtgtgcctcaagttcctcattcataaaatgaggagaacaaaagtaccaatttcatgaatatggcaatgaaaatatttcctacctatagggttcttaaaataatgcttttttttttcttttttgagacagagtcttgccctgtcgcccaggcgatctcggctcactgcaacctccacctcccaggttcaagcaattctcctgcctcagcctcccaagtagctgacactacaggtttgcaccaccacacatggctaatttttgtatttttagtaagatggggtttcactatgttggccaggctggtcttgaactcctgacctcaggtgatccacccactgtggcttcacaaagtactgcgattacaggcatgagccaccacgcctggccaaatgccttcgattttatgtgtacttcatttcacataaatgtgccccagacagtgactggatcataatagacattcagtcgtgtttattgaattaaattgaaaacttgaatgtaaattgatattcaggggtaaagaaaagcatgtttatttatttatttttgtagctgggactataggcgcatgctaccatgctgggctaaatgtgtatttaaatggacagggagaatttgccatagtcggttcttttgtataagcatactttgattacttttttcaagttcatatttattctattagatgtagtaaatgtgatgtatgtttgaaaatagatttcagggtatgtgtggttggggaattcatgtggaggtcagagtagaagcagatgtgagagggtcaagcagaagaaaacatggctgccaaagtgtttgcgtccatcggcaagtttggcctggccttagctgttgcaggaggcgtggtgaactctgctttatataatgtggatgctgggcacagagctgtcatctttgaccgattccatggagtacaggacattgtggtaggggaagggactcactgtctcatcccctgggtacagaaaccaattatctttgactgccgttctcgaccacgtaaagtgccagtcatcgccggcagcaaagacttacagaatgtcaacatcacactgcgcatcctcttctgggccgttgctagccagtttctcgcatcttcaccagcatcggagaggactatgatgagcgtgtgctgctgtccatcacgaccggcatcctcaagtcagcgatgactcgctttgatgctggagagctaatcacccagagagagctggtctccaggtaggtaagcaatgaccttacggagcgagcagccacctttgggctcatcctggacgacgtgtccttgacacatctgaccttcgggaaggagttcacagaagcgatggaagccaaacaggtggctcagcaggaagtagagagggcgagatttgtggtggaaaaggctgagcagcagaaaaaggtggccatcatctctgctgagggcgactccaaggcagctgagctgattgtcaactcactggtcaccgcgggggacggtctaatcgagcaggaagctgtggaagacatcgcgtacctgctctcacgctcttggaacatcacctatctgctggcggggcagtccgtgctcctccagctgccccagtgagggcccacacggcctccacttccgcgggctgaccgggccacagccccggtgattcttaacgccgcctcccttctgctcccactccagaaatcactgtgaaatttcatgattgacttaa

SEQ ID NO: 3508 - DNA, 6000 bp, Homo sapiens
ttcccaaagtgctgggattacaggcatgagccaccgcacgcggccatgggaaactaatattaatagatgtgtggctatggtgatgagaagggaggagctggagaaggagctacacggccctgccagggatgcccttgaaactatgccctcttccagggcatccctacgttgttcctcggtaaggagaccaaggacacaatgagagctgctcccttgggatcagaagcatcaagataatttcctgaccaggtgcgtggcatgtgcctgtagtcccagctacctgggaggctgaggcaggagaattgcttgagcctcggcatttgagtccagcctgagcaacatagcaagactttgtcgtaagaaaaacaaaaggtgatttttttgtcttggccacagtctccctgtccactaaatgattgagggtgggaatggaagtagaaccaaaataataggaaactcaaagttgtctgagatccgtgaaaaaataagccactttttaaaaaaacatgcctttttttttctgtaacaccttttttaaatcagatgttttctcatttatatggactctaaataaaatgaagatctctttttaaaaggataattttttagaagttttatggaaaaaaattttttttttagacaggtctggctctgtcactcaggatgcagtgcagtggcatgatctggctcactgcgacctccacctctctggctcaagctagcctcccaactcagcctcccaagtggctgggactacaggcatgagccaccatgcccagctgattttggtatttttcacagagtcggggtcttgccatgttgcccaggctggtttcaaactcctgagctcaagtgatccgcaaaccttggcctcccaaagtgctgggattacgagtgtgggccactgtgctggcttattatgtaaattctcaaaaatatattaaagtagggaggatagtataatgaaccttcttttactcattgctcaacttcagcagttgtcaaaccaccagtataccctccccatctaccctcaaaccagattatttagaagcaaatcctagtcattttatcatgctaaacagaaatgcttagcatgtacctctacaagaaaataacaaaaaggacttctgattatttacaaatcttaatcttgcttccccttcattcctcatctatcccagggcatggattaggaagcgtgagttctaaccctggtttgccccttgctaaccgtgtgagcagaggcaaatcatttaacctttctggacttgcatttttctcacctgagtgagggaactagatgatttctaagatcccttctagttctagaaatcaaaaattcatgcaagggccgtccttcaagcctctagagacatacagatttggtgcagtatctatttactggtttttgtttgtttgtttgtttgttttgtttttttggtgcagtgcccagttcagagtcaagaccctctcaatgaagagccaagcaaaagtcctagaggctgctggtggcggaatctttaacctggagctttaggaaagaaataggccttggagcttcccctttgtgcagtttcatggtgccctctgtatctcttctcataacctcaatttatcattttttttttctttttttgagatggagtcttgctctgtcacccaagctggagtgcaatggcatgatctctgctcactgcaacctctgcctcccaggttcaagcaattctcctgcctcagcctcctgagtagctggtattagaggtgcccgccatcatgtccagataatttttttgtatttttagtagagacagggtttcaccatgttatccaggctagtctcaaactcctgaccttaggtgagtgatccgcccaccttggcctcccaaagtgctggtgtgagccaccctgccctgccggcgacccgtcactttattaaacaacaggaactgatttctgtcatgttccaggtgactgttaaggaataagaatactcattttatgggcaaataaactgaatgtgaagtaaagtaggtgcatctcaggttgcctggtgaaagaaggattaagtctggtatagggtttgtcttttaaaattgtggaaaacatgcatatcgtagattgacttttagggaaagatgtgggtcctattgggttaatggcggaatcttttggtaagatcatgcccagccctgaggactgttgccaatgcctccctcaccacgtgtgccatgtgctcttgaggacatcctgtcattggcttcccacaccatcattacatctggaacaaaggacgcataaaaagtgagtggcccagcgtggctcagctggtaagtgaagggcatgggcttggacccaggacttccagctgctgcagcatgtgtcctgctcccctacagcttgaagagggctaaatgagactggaggacttcttagaaaaagagacttgattatcagcgtagtgggagaagagcaaatgcttatgaatactgcacctgtgctttaaaagtcaccatgagctgggcgttgtggcttacgtctgtaatcccagcactttgggaggccgagacaggtggatcacttgaggtcaggagttcgagggcagcttggccaacatgacaaaaaccccatctgtactaaaaaaaagaaaagaaaagaaaagaaaagaaagaaagaaaaaaaattagtcaaatgcgtttgcttgaacccaggaggtggaggtacaccctgggcgacagagagagagaggtaaaaaacaacaacaacaccatgacccagagaaagaaagaaaaaaaatgaagttcccaaatggaaaaagcccctaaaattaccattttaaaacacagccctaatcagctctggggatttgcaggaaactcatcgaagctattgataggaactattgttttggtgccagggttttcaattgggagttagatttaaaaggaccaaagatgacatctgatatttcaaacagaaaccgacatttctcagtggaaaactttccgggccagtgcattttggggttggttactgtgcttggagacgcccctgagttggaggacacacttctggctgatgtgaggggcttctgaggagggccaaaatgtacactctttgtgttcttgcaccacggctattagactgtgagactctgtccttagcaggaaatggtaaaggaatcagcaggaagcctaaaacaagggaagggaaactcctccctcctatcaaaggccaggcaagggcgaggatgagaatggaaagtggggcacgtgcattaagccgtctgggggagcggtagggatagacatgttgaaatggagagtggttgaatcttgaaaggaagtaaggaaaatgtatatgccacaagggcaaggatgtatgataggcttgtatttattgtataactttattttattttattttattatttttagttttttgaaatagagtctctctctgtcacccaggctggagtgcaatggcacgatcttggctcactgcaacctctgcctcccgggttcaagcgattctcctaccccagcctcccgagtagctgggactacaggcactcgccaccacgcccggctaattttttgtatttttagtggagacggggtttcacggtgttagccaggatggtctcgatctcctgaccttgtgatccacccacctcagcctcccaaagtgctgggattacaggtgtggaccacagcacctggcctttattgtataactttaatatggagccttagtcctccagaaatctgcaccatgcccagggaaaatgctgttcctttatttacatgaggcagaggtttgtgttgtttgctgaggtccagcagctcactgtgaggacaacctctccctcgttcctgatttctggcttattcaaggccagaggacccaaaactcgagttgaaaattttgactaggagaacagataaaaatagaaatggaatccatcttaagaaatgctcaatgtgaaggagaggggaatgcaaaatagtttttctgttttaccacagtctttgtaactgaaaatcctatgttcttgagatagagagagagccaatgatccaatgcaagaaactgagtttaagaagaaactgtttgctgggcacggtggctcacgcctgtaatcccagcactttgggaggctgaggcaggcggatggcctgaggttgggagtttgaggccagcctggccaacatggtgacacgtcgtctctactaaaaatacaaaattagtccagcgcagtggtgtacgcctgtaatcccagctactcaggaggctgaggcaggagaattgcttgaaccctggagatggaggttgcagtgagctgagatcgcgccactgctctccagcctgggtgacagagtgagactccatctcaaaaaaaaaaaaaaaaaaaaaaaaaagaagaaaaagaagaagaagaaactgttcatctgaaatccgacaactcattcttgaaggttagagctcagctttgaagtttcacttcacgagcttggctcagtgaggtatgttactccccggtgaaaaagaaaatgaagagaatgttttatgttgaaagtgcttggtgacgaaaaggcagcacctagatcccttatctcataaaaaatgcagcagattcttaatattagcaatctagtgtttagattgttacctgaagaaaggaaaaacaaactgtcccaaatgctgattctactgtttcggtgggaaaaaaaaatgtcttgcaggcaagtggcaaacaacaaaacttttgaaaaagcaggcctggggggagtccagtacagtttcataatgggtatgaatagttattttactgtgttccccccaccccctttctttctgggttttgatgtggatgtctttctatttgttcaggaaattgtgacgtgtgttctgggcagggtttgaggttttggaacattttctaaaagggacagagagcaccctgctacatttcctaatcaagaagttggcgtgcagctgggagagctagactaagttggtcatgatgcagaagctactcaaatgcagtcggcttgtcctggctcttgccctcatcctggttctggaatcctcagttcaaggtaagactcaggagtcttgttccccagccatcttctctgtaagccctgtggtccatgcaagtcattatattcattttaaggcatagaatgtataatattgtgagaaaggaggcaaagaagaaggatttggggtcgctgaaccctttaatatgagttctgttaagtttggtaccaagaaaaattaaactctgtggcgtgtgcagtcttgtaaactcttacaatgattgaaatgtgctattttgggatgaaaatgtgaggtttataaattttaaaagctcaaaaaaggaatctagaaaatgactcctgtgcctgttgcatggaggagatggcacctttgactgttggggggtgtctgcctacccctaagtgtctacatcagccccaagttttagtgcgctgtgacggtgtcattgttattttaacactgggagacgttatattccaattggggtgaatctgactgtgtgtattttcttttcttttttttttttttaaagataaacttggttcttactgaaaactcaattatggttagacatagttcatgtaaaacctctcagattttaaagagaaggccaaataatttggtatttgtgctcttgctcagagaagcatcatattcggaaatatcttcctaggtttatctaccatttagtgttgtttagtcagactgaaacaacttaaaacctgtaatgactaagacaatgaaaatgataggcttgtaagaaaaatacaatttgttattctttggcaaataaggaatcatgtctaaataagacggaggtcatggcttgatagagagatggctgaacctatagtagaaaaacactaggttccgccaaatggtaagggaaatgttgagtcacaatgacacacatgtcctagatttgtttcgtca

SEQ ID NO: 3509 - DNA, 6000 bp, Homo sapiens
aaaacaaaaatcaaatctcttcttttgatcacataaaacttgctttaaacttgcaaaaaagacctgatataaattcataagtaacaaaaaattgaattatattagaaaccattaattcaatgaatactaaagctatgtaggatgtagcaaaatatacatattaagaaaaggattatcataaaagttttaatctccaggctcaaacctagaaaatcactctcctcaaagccagggttaatcatcatgctccaaaccaggtacatttcacatcactttgggatcctggcaactttctcttttgtttttttttttttttgagacagggtctcctctgtcacccaggatggagtgcagtggtgtgatcatagctcactgcagcctcgaactcctcaagtgatcttcctgcctcagcctcccaagtagcgggaccacaggcacacagcaccatgcccatctaattaaaaaaatttttttttgtagagacaggggtctctgtacatttcccaggctggtcatgtactcctaaactcaagcagtcctcccacctcagcctcccaaagtgccggaattacagtcatgagccaccattcccagcgctggtgactttctccatcactggtgactttctccatcactggtattcactgcattagtgatgacatcattacaatcttcaatatgcaactttgtagtcctactcttgcattcttactttaaagcctcagcattaagtttgaatgtaatattacagcatccttcattactttaaatcattggtttcaatagtaattcatttaaatctaaaatgttaggctgcagtggctcatgcctgtaatccccccagtttgggagactgaggtgggagaatcacttgaggccaagaatttgagaccagcctgggcaacacggcaagaccccatctctaaaaattagtggcccggcgctgtgcctcacgcctgtaatcccaacactttgggaggccgaggcggatagcttgaggtcaggagttcaagatcagcctggccaacatggcggaaacccatttctactaaaaatacaaaaattagctgggcatggtggcacgcctgtaatcccagctattgagaggccgaggcaggcagactgggaggccaaggcaggcagattgctttgagacctgcctgggtaacatggagaaatcctgtctctacagaaaaatacaaaaattagccaagcatggagaaacctcgtctctatagaaagacacaaaaactagccatgcatgcctgtggtccagctactcgaaaggctgaggtgggaggattgcttgatcctgagaggtcaaggctgaagtgagccatggtgtggcactgcactccagccagggtgacagactaaaaccttgtctcaaaataaataaacacatttaaaataaataaatacaattaaaactaaaattaaaaaataaaataaaatgttaagagaatagctcaaattctccaaaagaactcttgcacaccattcctcctcttctcaaatctctattttccttccccaaagccagtaactgcttctcaccctgaccctgtgctttctttcccgtcattgcgaaagaatggtccttgcttctgtgctgatcccaaacccttttgccctcagatcctcctgtccttccctggccctgctctgtattggctgtggggtgggggtggcggtggaactgacccctggcgtctgcatttctcaggctcccagggctgtggctgactttggccaatgggaggcaaggacgggagactgagagcttgggaggaagggagagaggtatgtttcttctccttactccctgcctgggatggcaccttgggcaggactctgttttgcccatggcctcagctcccaccagatgcctctagtccctgggctcaggaaatagacaacctccttccactatcgctgtagcccaaggagggaagtatttttttctttctttctttctttttttttttttttttacagagtctcactcttgttgcccaggctggagtgcagtggtgcgatctcagctcactgccacctctgcctcccgggttcaagtgattctcctgcctcagcctccagggtgtgccactatgcccagctaatttttgtatttttggtagagacggggttttgccatgttgaccaggctggtcttgaacttctgaccccaaatgatctgcctgcctcgtcctcccaaagtgctgggattacaggcatgagccactgtgcctggccgaaggaaatattttcttgctattgctaatctctgggttacctcgctatcccccatttagcttcacttctcctccatcacctgtatgaggaattccctctgtgttaaatatctggagaagtttcctgattggaccctggctgttgcagcttccaaggccacctctctttgtggctggtatccttttcccatgcatcttctccaggacttccattctgcagttatctctctgaactcagtgtcttcttcccatcagtataggggtggactttagtatctcctatgtttaggcaacatctctcctttgactctgcgtcttctccagtggttgcccttctctgctcctcttcacaataacacctcctgaaagggccacccatgcctgccccctcctttcctcaccccctctgtggctggacttctgttcctacactccaccctggttgacaaagtcactgattacttctctattttcagcttacttgatccttaattgccttcaaaaacagctaactgggccatgcatgtaatcccagcacttcgggaggccaaggcaggaggatcacttgagcccaggagttcaggaccagcctgcctgggcaacatagtgagaccctatctacaaaaaatagaaaaattagccgggcgttgtgactcatgcttgtggtcccagctacaaaggaagctgaggtgggaggatggcttgagtccgggagggtgaggctgcagtgagccatgatcacgccactgcactccagcctgcacaacagaaggaggccctttctgtaaaaaaaaaaatggttgaccactccttccttgaaatgcttttttcttgaggcttccatgccctgccttatcctgtttcttcctacttctctggttgtgctttttcctctgctcagtatttaacatgttggtgtgaccctggctctggcctgggcccccttctctatctacatgctttctctcgacgacctccatcggttgcatgggtttaactaccaaatctgtgattctagctccgacaccccaggctaaagtagccacctggtcactccctattacattggtcaatttcatttctctgtgccacctatgattttcctgatttatttattcacttttcattgtctgtcttccccactaaaataaaaacttcttgagaaggggcttcatcgatctgcctctgttctatcccaggccctcaaaacaaggaccagatattcaacaaatatttattgaatgcgtacatgaattaaaactctaattggttgtatgctggtggtttattattttcatggaggaaatgacttgtaggctgtgacactcagcttttgtctctgatgctttgttgccctgttctgtcaccgagggctgtcgtcattgctctggccattttgtgctctttgaatttctaatcatcacactcaacccagaaggcagccttacctttcagcactcttcagctgaatgagtgcaagttggaggcagggtcattttttgataggaaattgaatgtttatatgctggtaaatataaagcttagctttttacaaagaatttctcaaaagtgagctttgttgaagccctgtaaattgttagaacttttatggaaattttaatttaggaaaaaatgtcatctgtttgggctgacttagttgttagttgtttgtcctttcttttttttggtggagggtatggagttttgctcttgtaacccaggctggagtgcagtggcgcgatctcggctcactgcaacctccgcctcctgggttcaagcgattctctcacctcagccttccgagtagctgggattacaggcatgcaccaccacacttggctaatttttgtattttaagtagagaccgggtttcactatgttggtcaggctggtttcgaactcctgacctcaagtgatcacccaccttggcctcccaaagtgcttggattacagacatgagccaccacacccggccaagaggacttcttttaaaaatgatttcttgggccgggtgcagtggctcacacctgtaatcccagcactttgggaggtgggtggttcacaaggtcaggagtttgagatcagcctggccaatatggtgaaactccatctctactaaaaatacaaaaattagccaggcatggtggcgcacccctgttgtcccagctactcgggaggctgaggcaggagaatcacttgaacctgggaggtggaggttgcagtgagccgagatggcaccactgcactccagcctgggcaacagagcaagactctgcctccaaaaataaaaattaaaatgatttcttaagtaaatttcaaatatagaatgtatatgctagtgataacaaaattaacactgtttatgcaagtctgcaataggtagatgtgaagttgataggtgcaataagtataggcaaacacataggaacatttgacctgtttttttgttgattttaaaacattgaataattgggaagcttttaaatctcttaatttgagcaactagatggctgtatttatctccttatattaaaaaaactattataattatctttcccacatatcaaactccactggtttttttcccatttttctttcatacttcagaaagacgagaatccaggacttgaatcgtatcttcccactttctgaggactactctggatcaggcttcggctccggctccggctctggatcaggatctgggagtggcttcctaacggaaatggaacaggattaccaactagtagacgaaagtgatgctttccatgacaaccttaggtctcttgacaggaatctgccctcagacagccaggacttgggtcaacatggattagaagaggattttatgttataaaagaggattttcccaccttgacaccaggcaatgtagttagcatattttatgtaccatggttatatgattaatcttgggacaaagaattttatagaaatttttaaacatctgaaaaagaagcttaagttttatcatccttttttttctcatgaattcttaaaggattatgctttaatgctgttatctattttattgttcttgaaaatacctgcattttttggtatcatgttcaaccaacatcattatgaaattaattagattcccatggccataaaatggctttaaagaatatatatatatttttaaagtagcttgagaagcaaattggcaggtaatatttcatacctaaattaagactctgacttggattgtgaattataatgatatgccccttttcttataaaaacaaaaaaaaaaataatgaaacacagtgaatttgtagagtgggggtatttgacatattttacagggtggagtgtactatatactattacctttgaatgtgtttgcagagctagtggatgtgtttgtctacaagtatgattgctgttacataacaccccaaattaactcccaaattaaaacacagttgtgctgtcaatacctcatactgctttacctttttttcctggatatctgtgtattttcaaatgttactatatattaaagcagaaatataaccaaaggttaagctgtctcggatctgttgttctaaacccaggaaacagttatttttggccagacgtttctccagaagtcttatcaacaaaacaactttaaacgtattctacagtaaacacaagttttgtaaccagaatcaaatcatactaactagcaaatgaagaaagcaatgatgccttagcaagagggttatatatctcaaagcac

SEQ ID NO: 3510 - DNA, 6000 bp, Homo sapiens
ggacattctacaaaatacccaatgaataattctcaaaagtgtcaaggtcatcaaaaacaaggaaagactgagaaactgtcacagccaaggggagcctgaggagtcacaatgactgtatgcaatgtgggatcctgaatgggatcctggaacagaaaacagaaggacattaggtaaaaactaaggagatctgaatgaactttagcacataataatgtatcagtggttcattaattgtagtaaaggtaccatgctaatgtaagaggttaataattaaggagactgggtgaggggcatatgggaactttctgtactatatttgcaatttttctgtaaaactaaaactcttctaaaatgaaaagatggccttttaaacatttacaacaataaaagaattttgagaaggtgacagcagaggcgataaataagttataatgtccaagacagaattgagatttgaacccggatctgcctgagcccaaggcttttgtgaccaacggcttgcattgcctgaacagcagtgagaagaccctggaggggttggtggaaaagactgggtaagaaggatggaaggaagaaggttgtcacagtacttagtagaggttaagagtccaagtttaatgacccaggccacatatagtatgattccatttatatgaaatgtccagaataggatagaaagtagattagtgggtgccaggggctgggggaggggagaatggggttaatggtatggggtttcttttggaggtgataaaaatgttctccaattaggtagtggtgatggctgcacaacattgggaatatactaaaaaccactggattgtgcactttaaaatgtttaaagcggtacttttttttttttttttttttttttgagacagagtatcactctgtcgcccaggctggagtgcagtggcacgatctcggctcacagaaaacctctgccttctgggttcaagcgattctcgtgcctcggcctcccgagtagttgggattaacagagcacgataccatgtctagctaatttttgtattgctagtagggatggggtttcgccatgttggccaggctggtcttgaactcctgacctcaagtgatccgcccgcctccgcctcccaaagtgctggcattacaggcgggagccactgtgcccggccgaagagatttagaatagtacctggcatatagtaagcactcaaccttagctctgataatattattacaaagagatggtaaagcgttaaggacttcagctttaggcgcttcccttctccagggtccaggtttttggggtccgttctggaccgaacgactcaggggaggcaccgtgaactcattcccaagccttcccactcaagatcctgcaaacggagtcgtctgagtgccacttcccctgacaacccgggacaaggactctgtcagggcggccccaggcggggtggggccaggacaattctcccatcgccggaggagggagactggcggccacggggaggcgtaagcggcagcgcgccgcctggtggcaccttcgcgcacacggtcccgacggagcgggaggcgtcaaccccaagccggcagccactcctgccgggagcccctacagctgcttttaaatcgtaattgttatcaaataggcggtttttatacagccagattattggccttattattcttcttaatactgtgaagtaattattattcctgttttacagttgaggaaactgacgctgggaaagtttcagtaactggcttaagatccgccagcaggtaagagcagcccccaggtttagggccacagccctccagatccagaactctttcctacacactcctgtggtttgagacaagtgatggtagccgctggaagcatctgcagtccccaccaagggtgagaactggctctgggactgatttcaaagcagatctatgccacaaagcctgccctactttcagcctcagaacccccagaccccaggaaatagaggggaggggagggtggggctcacatagcaactcttaggccctttgaccatcaacccctttccccccagccttattgatgtacccactcaaccaaggttgattgcatccctgctatgccagaaactgtcttcagtgctagatatatcatggggaacagggaacacagggcacctgacttcaagcaactcactgcttcgtcctcatgcttaactcccagcaggatgcctttgctgtgaggcccatggcactcggtttgggaacaccctggcaaatcttaatcctgctatcctaatgtgtcatcccccaggcagggaccctgcccattcttcacccatcccggggaaaggtatggctcagggggagtctgactccctctgaagccccttgcctggcctcaactgacagcctgcactcttgagatgccagggctggagaggaaccacatctgcaactgctcagctgcaggtggctagagaaggctcagagacttggtacaggagcaggggcacagagcagttacagagagattcccaacatgcaaaatcccatgccctgatgctggagtcctggagggagagcagggcccgggacctcccaagagtatatttcaagagttgagagagtggttaggctgagaagggaagtggggcagggactggcaggagagggggtaatgtcttccttttgcttgcccccatctccagtcccccttctctccacccaggaattaaagccgtgaaacctgatacttggactagaagggcctgctgggtacactttaccacctaaacagcaaagttccaaggggtggaactttttagaaaaatctccaataccccactggcctgaaggagagagagaaagaggttggggagagagagagaacatgctgtggtctctgcatgctgcccgtctctgctgaggtccctgctgagctctccagcacaggcacaaccttgaccatgtgcctgcatccaggggatgaccgtcagatgtgggtcttggcacaggcgtgcctgtatgtgtttcctggcagtagttaagtatccaaatatctatttgtcttgggagtcatctgcctatttgtgtttttagttgtgtgcgcctgtgtgtttgctttttttaggcatacatctttggtatgtgggtgtctctggagtcgggtgcctatttgtaggtgtgatgtttatgggaggtgaaacattgcacctgttgtctttgttgtatgttttcgtgtgtgtacctttgcaggtgtgtatgggtgggtagttgtgtgtgtgcatgtgtatttgcaaggtggagttggtttgggtgtgctgagctgttgactgtctcatccactgcccttgctagggctgtcagaggccaagctaagcaacctacctttgcccacagcagcctttctcaattgatggaagttcttcccccagggagtcccagtccacctgttgccaccctcctgatgctgggtgcccagtcagagagggttagggagatgtgctgatggcatgcacgacctcccctagatactccaagaccccggcttgtgaggggagtgtgtgtggagagggtactagtcctgccttcacctcacctctggggaaacagctaggacagtccccttcgcacagcccaatccagccccagggaaggtgttcaagtgaggctcccccgtttagagggtttctttccaatcccatctcccccatcccctttgctcagtcactcagtcactccaagcagtgtgatctccggcaggtggctttacacctctgtgcctcaggtccttcatctgtaaaatgggatgtaaatggtgcttacttcagagggttgtgagaattaactgacatgatgcatacagagtgcttagccctgtgcctggcacagggaaggtctttgcctatgttagctgatccgctcgttctgatctctctgggtttcaatcccaagacactgcccatccttcaaacctcacctgtccccacgtgctccttggaccacctttgggtggtcaggactttccccctggaatcagactggctgggaggggagaatcttggaaagagattattgacacttgcactgcaatttccacacaagttttaaaatttaattctatacccccttatgaaatagttatccttttcctccattttacagatgatgatgaagggagcaatagaattgttaagtaacttgttcaaggtcacacagtaaataaggggcagagtccaagtttacactgagccaaaaatggctgtcccactgtcaggtaggaggctagtttacaacaacgcaggatcagagtgctggaggggtttccaggggtctggttaacagttctgccggagatcatacagacaagcagagccagccaggatgatcctaatctatacccagcttcatatcgctgtaagcccccgcgtaaccaggacttgggtgttctcattttgggagccttttttttggaaagacccccacatgtggaaggcagagcgcatactacagacaggggagccaaaagtgagagtcctatgtttaatcagaggagaaagctgacatggccaagccaaatgaaggcgcaaagccagatttccttaatttgggggagcgaaaattgggccgcctccacgtccagccattctccagcggccgggtttttcaaaacgctgcgcccagcgtctcgcgaggaccctccccccgggtcccccagctctgccgcggccgcgcccagatggccgtcggatcccccctcaaggtccccctgtcggctccgccctcggtcgcccaggccccgccccggccgcgcgcggtcccctcggttggcgaactcactccggcgagcgagcggcggcgctcggcattgtggcaggcggctggggccggctagggcgccggagccgcacgcagccgcggggctccgagaggcgcgcactggggctgggactgcgcggcgccgccgctgcgagcgccactgagcggtcgcgcaacttcggaggcacagcgccggagccaggcgagcgctcagagacccggagccagaggggcgcgccggagcctcgttcgagagccggcgccaggcacccaccgcgctccgagtgccaggcggccctccgcgcagcgtggcttccgctgcccccacggaaggcacgggctggcgctgccgggcgccggggaggacggcgaggaggaggcggcggcggcggagacggcggcggcgagactggggccagggagacagccctgggggagaggcgcccgaaccaggccgcgggagcatgggggcccggagcggagctcggggcgcgctgctgctggcactgctgctctgctgggacccgaggctgagccaagcaggtaggaagcgatcgggtctgggggcgcggggctaggggacccttgcgcctcactctgtcctgaagttgaggtggtctttcgtcgcatcgatgcgcgcaggaaaagcggcaagggcgcccaagttagaatgtagattttactgcctcccaaagtgggcaatggcgcatccacatcgcgggagcggggagcagggaaggggcttcacagtaagctgaaaggtccctgctcgctcctgaaagggatcccttcttctccctggaaggggtgtaggagtcagggtctgagtctccgggaggatccgcctcctggggacgcccggctctccgcgcgcctggcatccgccccgaaaaagaacattggctacataagcaaggtgtgcgctcgctgccgtacgccggtaacttactagtctggtcccggctcgcctaggctcttacgcgctatagggacagcaatctgcagactagagggagagagcgaaaagacctgctgaacacaggaagcgcttcggtagcctcggcaggccggcttgcagggctcctgaagcggggagggctaagtcttgcacacatagctttccccgagatcgctgggcccgcaggtctggaagaattattattattattattattattattattattaattttctgagtgttg

SEQ ID NO: 3511 - DNA, 6000 bp, Homo sapiens
actccccctactgccctgggctcgtggggaggcctcagcaggcctggtgtggggtgtggccttccgctagtcaggccccttcccctagggtctggaagctgggtaggaactgtggcctgaggccggtgtctcccctcagcccttctgcagaggccgggctggaggagaagatggcggccaagcagcccccgcctctgatgaagaagcacagccagacggacctcgtgagccgcctgaagacccgcaagatcctcggcgtgggcggggaggatgacgacggggaggtgcatcgctccaaggtggggtgcagagcaggggcctccggcacccactggggaggccaggctgacccaccattaggggagaaggttagcccaggcccaggtagccgcaggagttctaggacttagctgattttcctagaaatgtaacagcaatgccaggggaataacgagatcattagaattaagtgcctattacgtgcccggttttccagcagttgctttttaaatcttcttgttggcactagaagatgcagatactgtaaaatcattcacccattttatagatgaggaaacaaaggctcagagaggttaggcaacttgcccaaggccacaccggtaagtggcaggaccaggcttcaagtctgcatttggcagagccctgagctttcatacgtcaccatcatattttcagcttcttttaaatcctagtgtcaaggggaagcaggagagggggtggcctcatgtgaccctccccacctgggggaacctttggccaagctgaggtgcccaggctggtccctgggtgtgcagggctctgggaggatgagcgagtgggggcgctgagagctgccctcaccctggttgcctctgaccccctctgtccacagatcagccaggtcttaggcaatgaaatcaagtttaccattcgggagcctttggggctcaggtgagcatttacctgactttttgggggaggggaaggcctgcggcggtggggcagaatgcataagacctcacctcatttggcctggtccctggattttattttgtctcattaccttccccaaagctgccatccctggggatctgggctggagaggggagggtcccctggggcagggctgtgatcttctttccacgcctcccagggtctggcagttcgtctctgctgtgctcttctccggcattgccatcatggtgagcccccacccccagcccctgagatctggccccgtgtggctccctcagcccttctctggctcaccagaggtgcctcctccatcctggcccctcgtgcaggggcccatctgtcaggctctggggctgcctccgagaacctgactcctacactgccacgcctgtgccttctccaggagcacactagatcccatggtttgtggcctgactccttctcccaggaaccctggagttttctgtcctggcatgggggcgggtggggacaattgggtccagaccctggactgcccccaaggatgctgatcctgctcctggcggggaaggaagacgtctgtgggaagcatcagctgtcaccccccaccctctcccaagcgggacctctgagcccctctcgctgcccgcaggcgcttgccttccctgaccagctctatgatgcggtctttgatggagcccaggtgaccagcaagacccccatccgcctctacggcggtgccctcctcagtgagtactgctggggcgggccctgggggaggcgacgggcagctgggagacccagcggggctgaggagagcacgggggtccgtgcccgggcaccccttcctttcttcggccagatgctgcgcccacaccccggcctctgatgaagctctctgctggggatgtgctgccatcttgtggccattggtggaatacacccagtgggttggagcttgcagtcgccaccatctgcaaggagcgctcataagtgtgtgcactgcctctgggcgttgtggtacagagatggaggaagcccaggcccagcctctaggaattcacagcctagaggagaggcagatcaattcagtgtctgcaaaacccctcgcaccccccctattttatccccagagccacttctgtttgaaccacttctgtttcctctctaacctgagatgcacacgttaggatttggaattacaatttttaaagctcagcataggtaatatgcctctatttctacgaaatattctatggctccctattgcctacagaataaaggctgagctcctctggagttagggttgctggaataaaataaatgcacacccagtggcatgtctggtaccagcagacactgggtgggcggggcctgctagaggccaagtcagtggtcttctgctaaaaagtatggttcatccccctcccccaggggacttccttaaagcgagtccttaccgggctcaggttttctgtctgggagtccgtgtaaaagaaaacccaatcataggaccaggtaacccattaactcatgaactccatgaacacagcatcctcctgacagaaccggacatgggcaggggccaggggctcagtcctccccctttataaagagatcgagtctcaatgcggggaagtgactcgcccagtgtcacatagggccttggaatgacaggagcaggctgaagcagcagcattgagtctggaggggacaggatcggggacagacagctttgatttgagaaatgtgaataggggcggaggcgtggagtccaggaccccagctgtcttgcagcagtggccagaggaagcaggagcagtcctcctgccctgctgggagggagtcagctgtcccacccccagcccccttttcatcccccgccccaggcatctccctgatcatgtggaacgctctctacacggctgagaaggtcatcattcgatggaccctgctcaccgaagcttgctatttcggggtccagttcttgggtgagtcctgaggtgggcagtgagggaggctgatgggccgcttcgcccctgacctgcctgctctagccacctgggtgtgtgggaagtgatgaaaacctgtctgtggggggctagggaggggatagagggataaggactcacctggctgtgtttacttgtgtgcctgcacacctgtgcacacatgcctaacacacgtgcctgtagcttcccaaatccacacacttgtatctatggccttgcacacacatgtacctgcggcccccccacacccactgcccactgtacccagcacgtgtgtaataacacgcattcaattttgcccacctgctgtgccccagttcctgccacatgggagacatcagagcagaaacatctgtggggttggcaggggcagggggcaggtcctgtgcttcccacctgggaggatcctgggctcagagcaaagtcagggagacggccacaccagcgctccgggctaggggggcagcgctgggacacatcccctcctctgaccctgtggccttgctggactctctcccacagtggtcactgccacgctagctgagacgggcctcatgtccctggggatcctgctgctcctggtcagccgcctcctttttgtcgtcatcagcatttactactattaccaagtcggccgaagacccaagaaggcctagttgcccgctgggcctggggccctgcccatgcctgggccagagtggcgctggggcctcggcttccctttggctcctggaaggcaggagggtcccctgccctgccccagtcctgccccagggaggcagggggtggggggccttcctttcctcctgggcaccccgtgtgctgtgatctcctgggctttcaggcttgacatgctggtctggggagagacagggcctctgctgccctgttcttcaccctcacagtgatacctcctttccttgggtctcttggcctccagaccccctcaatagacactgactaaagtcaggctggagtcatgagggtagtgggctaagtcgagggtccagcctcttctgccaggaagcccttcttgcttttgagagaggctgtgaccaccccccatccttctccctacactcccagccaacctagtgcccaagcagctaaacttggcttccttctaatcctggaaaaccctgtacccctcctcctcaatctggccctctccacatgcacaccctgaaaacacacacagacacacaacacacacacatacacacccctgaacacacacacagacacacatacacccatgatgtgagcaaacacacacacgtgcgccttcatagcccagccaagggcatgcaggcagggtgtgctgcctgagatggcacctccctttcagccattcttcaagaatgggccacacacagctagaagtcctctcccagctagaagtcctgtccccactctcctggcctgacaagatgagctctcctgggaccttgctctagggcactctgcctctaccctaggacactggaatgccctgggagccccctccctgcaaccagcctgagttcagccccacggacaaagggacacacagcccccaatggagaccattgtaagtggtggggctgggagaggaggaacagaaggaaagccatagcgctctcttgccccttggcatgtaccccaaggcctgatggccactgggctcagcctgtcccccactcctgcctgcttcccggtgagctgccccccacacgtgcagcccgggctgcctccagggtctggctgagtgggatcaggtggccctccaactcagcacaggaaataagtagaaacatttcagcaggccacctcccctcatcttccccgccctgtccagcgccctggcaaaggctgacaactggctgtcttggggccgaacagcccctgccctgcctctgagggcccaccagcctgtgctgcatacccaccgcccagcttctccctgagggcccaccagcctgtgctgcatacccaccgcccagcttctccctgagggcccaccagcctgtgctgtacaccccgttagtccctgatcccaaccttctccctcctgccagcacaccgatgcacacaccggaagtggcgagcccaagccctggggacaggtgtagggagaaaagcagccccaggcctcagactcgcttcccatcctggcatagagtgggggatggctggagggtgtctataggtacagcccgctctggctgctgccaggtgggcccctgccaggggtcctcacccctgtccaccctgtgcctggctgtccctgcacccagatacagcaacatggcctgtacccagcagagtggtggcaccaccatggttacagcggatgccccgagactctgcttggtaaacgtggcagagcagaatgggaggctggaccctgaggaagggcccctctcctggcatctgtctcttgctacctaagcctgtgcctctccctaaagagctgcctccctgctgccgagccctggtctggccacgagccaccactgcctcccgctgctgcccacaggtggtgccgccaatgggcagtgccctcaggccgaagcctcaatcccccatctgagccaggcctaatcctctaatagtgatggttggtttgtcctcccataactgcaggtggattccacctggggaatgaggctgcgtgtcgggcgtctgctggccctgagacatccagtcttccacactcaactgtgggatgggagggtggcgtggccttaccccatgaggctgtccaggctctggcacacagctgtgctcacaaaatactgggtggcttggttagagctaattgtagtggagcctgcaggtgagggtgagggagggggctgcaggtcaggtaagatctggaagacagacgtacagcttggagggcagggggactctaaggcaaggagatttacagttgggaaggaggcagtggcagaggggtgagggacaggggcccttaagtccagcgaggaaagctcggtgtgggcccgctctacgctccgtttggggtgacctggaacgcctcttctcccag

SEQ ID NO: 3512 - DNA, 6000 bp, Homo sapiens
ggctgactgaggacgcgacaggtactcagcttctttctgcatctcagttgcccagcacaggggctggcacgcagtaggtgctcccaacctggtccaagatgttgctggcggtgggggagtggggggctggggaggatcatgggcagacctggggtgccgggaggggctggtggggggctgatggccgggagggcaaggcctgagcagggaatctagaccaccttagtgtccccgtcaacacccctggcagccttctctggctctgctgggtatgagggcaccccctccccttctttggtcttggcaggtttgaaggggggtggcagggagacgggagaggggctcaccggcttgcaggattgggcagaagtttggtgggggcccaaaccccagaactcagaagcccctgccccaggcttggacagaccctccccttttctaaacctcatttgccccatgaatccaggctcctttcctccccatccccccaggaagcttggatgtggccgccatccagacccaaatgccctctcctgggccctatgcctccagggctggctctaaggcaccatgcaacctgtcagatggggtgtgctgtgtccacctacagcagaccagctcccagagcctcaggggcctggagagcatttcctcaacccatttgacaaggaagccagctgtactccccctactgccctgggctcgtggggaggcctcagcaggcctggtgtggggtgtggccttccgctagtcaggccccttcccctagggtctggaagctgggtaggaactgtggcctgaggccggtgtctcccctcagcccttctgcagaggccgggctggaggagaagatggcggccaagcagcccccgcctctgatgaagaagcacagccagacggacctcgtgagccgcctgaagacccgcaagatcctcggcgtgggcggggaggatgacgacggggaggtgcatcgctccaaggtggggtgcagagcaggggcctccggcacccactggggaggccaggctgacccaccattaggggagaaggttagcccaggcccaggtagccgcaggagttctaggacttagctgattttcctagaaatgtaacagcaatgccaggggaataacgagatcattagaattaagtgcctattacgtgcccggttttccagcagttgctttttaaatcttcttgttggcactagaagatgcagatactgtaaaatcattcacccattttatagatgaggaaacaaaggctcagagaggttaggcaacttgcccaaggccacaccggtaagtggcaggaccaggcttcaagtctgcatttggcagagccctgagctttcatacgtcaccatcatattttcagcttcttttaaatcctagtgtcaaggggaagcaggagagggggtggcctcatgtgaccctccccacctgggggaacctttggccaagctgaggtgcccaggctggtccctgggtgtgcagggctctgggaggatgagcgagtgggggcgctgagagctgccctcaccctggttgcctctgaccccctctgtccacagatcagccaggtcttaggcaatgaaatcaagtttaccattcgggagcctttggggctcaggtgagcatttacctgactttttgggggaggggaaggcctgcggcggtggggcagaatgcataagacctcacctcatttggcctggtccctggattttattttgtctcattaccttccccaaagctgccatccctggggatctgggctggagaggggagggtcccctggggcagggctgtgatcttctttccacgcctcccagggtctggcagttcgtctctgctgtgctcttctccggcattgccatcatggtgagcccccacccccagcccctgagatctggccccgtgtggctccctcagcccttctctggctcaccagaggtgcctcctccatcctggcccctcgtgcaggggcccatctgtcaggctctggggctgcctccgagaacctgactcctacactgccacgcctgtgccttctccaggagcacactagatcccatggtttgtggcctgactccttctcccaggaaccctggagttttctgtcctggcatgggggcgggtggggacaattgggtccagaccctggactgcccccaaggatgctgatcctgctcctggcggggaaggaagacgtctgtgggaagcatcagctgtcaccccccaccctctcccaagcgggacctctgagcccctctcgctgcccgcaggcgcttgccttccctgaccagctctatgatgcggtctttgatggagcccaggtgaccagcaagacccccatccgcctctacggcggtgccctcctcagtgagtactgctggggcgggccctgggggaggcgacgggcagctgggagacccagcggggctgaggagagcacgggggtccgtgcccgggcaccccttcctttcttcggccagatgctgcgcccacaccccggcctctgatgaagctctctgctggggatgtgctgccatcttgtggccattggtggaatacacccagtgggttggagcttgcagtcgccaccatctgcaaggagcgctcataagtgtgtgcactgcctctgggcgttgtggtacagagatggaggaagcccaggcccagcctctaggaattcacagcctagaggagaggcagatcaattcagtgtctgcaaaacccctcgcaccccccctattttatccccagagccacttctgtttgaaccacttctgtttcctctctaacctgagatgcacacgttaggatttggaattacaatttttaaagctcagcataggtaatatgcctctatttctacgaaatattctatggctccctattgcctacagaataaaggctgagctcctctggagttagggttgctggaataaaataaatgcacacccagtggcatgtctggtaccagcagacactgggtgggcggggcctgctagaggccaagtcagtggtcttctgctaaaaagtatggttcatccccctcccccaggggacttccttaaagcgagtccttaccgggctcaggttttctgtctgggagtccgtgtaaaagaaaacccaatcataggaccaggtaacccattaactcatgaactccatgaacacagcatcctcctgacagaaccggacatgggcaggggccaggggctcagtcctccccctttataaagagatcgagtctcaatgcggggaagtgactcgcccagtgtcacatagggccttggaatgacaggagcaggctgaagcagcagcattgagtctggaggggacaggatcggggacagacagctttgatttgagaaatgtgaataggggcggaggcgtggagtccaggaccccagctgtcttgcagcagtggccagaggaagcaggagcagtcctcctgccctgctgggagggagtcagctgtcccacccccagcccccttttcatcccccgccccaggcatctccctgatcatgtggaacgctctctacacggctgagaaggtcatcattcgatggaccctgctcaccgaagcttgctatttcggggtccagttcttgggtgagtcctgaggtgggcagtgagggaggctgatgggccgcttcgcccctgacctgcctgctctagccacctgggtgtgtgggaagtgatgaaaacctgtctgtggggggctagggaggggatagagggataaggactcacctggctgtgtttacttgtgtgcctgcacacctgtgcacacatgcctaacacacgtgcctgtagcttcccaaatccacacacttgtatctatggccttgcacacacatgtacctgcggcccccccacacccactgcccactgtacccagcacgtgtgtaataacacgcattcaattttgcccacctgctgtgccccagttcctgccacatgggagacatcagagcagaaacatctgtggggttggcaggggcagggggcaggtcctgtgcttcccacctgggaggatcctgggctcagagcaaagtcagggagacggccacaccagcgctccgggctaggggggcagcgctgggacacatcccctcctctgaccctgtggccttgctggactctctcccacagtggtcactgccacgctagctgagacgggcctcatgtccctggggatcctgctgctcctggtcagccgcctcctttttgtcgtcatcagcatttactactattaccaagtcggccgaagacccaagaaggcctagttgcccgctgggcctggggccctgcccatgcctgggccagagtggcgctggggcctcggcttccctttggctcctggaaggcaggagggtcccctgccctgccccagtcctgccccagggaggcagggggtggggggccttcctttcctcctgggcaccccgtgtgctgtgatctcctgggctttcaggcttgacatgctggtctggggagagacagggcctctgctgccctgttcttcaccctcacagtgatacctcctttccttgggtctcttggcctccagaccccctcaatagacactgactaaagtcaggctggagtcatgagggtagtgggctaagtcgagggtccagcctcttctgccaggaagcccttcttgcttttgagagaggctgtgaccaccccccatccttctccctacactcccagccaacctagtgcccaagcagctaaacttggcttccttctaatcctggaaaaccctgtacccctcctcctcaatctggccctctccacatgcacaccctgaaaacacacacagacacacaacacacacacatacacacccctgaacacacacacagacacacatacacccatgatgtgagcaaacacacacacgtgcgccttcatagcccagccaagggcatgcaggcagggtgtgctgcctgagatggcacctccctttcagccattcttcaagaatgggccacacacagctagaagtcctctcccagctagaagtcctgtccccactctcctggcctgacaagatgagctctcctgggaccttgctctagggcactctgcctctaccctaggacactggaatgccctgggagccccctccctgcaaccagcctgagttcagccccacggacaaagggacacacagcccccaatggagaccattgtaagtggtggggctgggagaggaggaacagaaggaaagccatagcgctctcttgccccttggcatgtaccccaaggcctgatggccactgggctcagcctgtcccccactcctgcctgcttcccggtgagctgccccccacacgtgcagcccgggctgcctccagggtctggctgagtgggatcaggtggccctccaactcagcacaggaaataagtagaaacatttcagcaggccacctcccctcatcttccccgccctgtccagcgccctggcaaaggctgacaactggctgtcttggggccgaacagcccctgccctgcctctgagggcccaccagcctgtgctgcatacccaccgcccagcttctccctgagggcccaccagcctgtgctgcatacccaccgcccagcttctccctgagggcccaccagcctgtgctgtacaccccgttagtccctgatcccaaccttctccctcctgccagcacaccgatgcacacaccggaagtggcgagcccaagccctggggacaggtgtagggagaaaagcagccccaggcctcagactcgcttcccatcctggcatagagtgggggatggctggagggtgtctataggtacagcccgctctggctgctgccaggtgggcccctgccaggggtcctcacccctgtccaccctgtgcctggctgtccctgcacccagatacagcaacatggcctgtacccagcagagtggtggcaccaccatggttacagcggatgccccgagactctgcttgg

SEQ ID NO: 3513 - DNA, 6000 bp, Homo sapiens
cagtccccaaagctatgtgtaacagagttctcctcaccaggcaggttcacagagaacgaagctctggaggaaatgagaggaaaccaggaaggggaaccagaagcagttgtgaaagcccagctctctgcctcagtccttgtgttgtgggatggcggctccttctctctgggttttgtgccagcttcaatgaaccctggctagacaactctcaccccagagctccctgttccagttgagaatgcaccagcactcctgaggccctctccctccgctcctcccaggctgccgcataataacaccagtggcactgattgataactgtcgatgtgcctgccccatgttaagggcttcacgtgcagcctctctgctaaacctccaataactcccaccaggtaggccctgttattatcaccattttacagatgagcaaactgaggcctagagaagtgaaatcactggcccatggtcccataaccaggacttgaacccagatctgtcaggtccaaaatccctgggctcaaccacaacaggtctctgacaacatcatgttcctccacacgtgcccatcagtgctgaaacctttcccctggccccaaccccaaagactaggcccaacccccgctccgcaggcctctctcctgcagtcccaggtgataacagtagtctcactccaagcatctttgaaatccaattacatccccattcttcctcgtccatagtggtttctggctgcagacactggcaatccctgtgcccaccacaccttcctgcaggggcacaaacacagacacacaggcgcactcttaagtgctcactcacacctggccaccaaggaggtgttgctgcccctgcttgtggagggcgaccagggcagatggagcccctgctgctcccaggttcctgtgggagtctggaggagtgaccctcccacccctgcaacagccgctggctgcttcctggctccatccccaaccccactcccatccccacccccctggggccttgagaggaacacttcaccaaggtaagaatcacaataataatgtcaataataggaatcagcatttccagtttgcaaacctttttcatcgaatcacctcacttgactctcacaagttctatgaggcagatatttttatatccgtgcaggcgagggtcgtatagctacttaggagcagagccaaggtcctagccgacttatctcactctcacctagaataatgatgactcctcattgttaccgtgcaccaagcatctattcttgcctgtcgttaggggcacacttaatgaatgtcaatgttactcctcacagcagcccagtgaggtgagttttttttttatgcccagtgtaaagatcaggtaactcagaagagttgagggcagaatggctgcctaagggatgtttctgaactggacacatcactttagaaaagtatataggggccgggcgcggtggctcacgcctgtaatccccgcactttgggaggccgaggcgggcggatcatgaggtcaggagatcgagactatcctgactaacatggtgaaaccccgactctactaaaaatacaaaaaattagccgggtgtggtcgtgggtgcctgtagtcccagctactcgggaggctgaggcaggagaatggcatggacccaggaggcggagcttgcagtgagccgagatcacgccactgcactccagcctgggcgacagaacgagactccatctcaaaataaataaataagtaaataaataaatgaaaagtatatagggaggaagacaataagagcctctaatgggtgctttctggagagcggatgcagggggttatggatagagccagctgcttctcccctggtccccctccaagcactttgcctgttatcttgagcggttactgttgctgctgttgactatctgtgcagtcatctacaagggggctgtgaactctccaaggacagggacactgtcctgttcacccctggggccccagcacatagcaccttgcctggcataagggtgaggcactgtcaggatggcctcgttcacaaaggatggtggggcagccttggcccagcctgagctcccagcctccccagcttccccgttgataaggagactgagagaatacagacacccagagggcaaaggttatccactccaaataccacttaaggtgggaattcttcctctgctgtcctcatcaacccttccctggattctgcttgcatgctgctagtgacagggcactcattcatgacaactaaggcagcctcttccatgttggaaaacttggagtgattgtgacaaaggcctcccactgatgtatgatcaggctggctgggattacaagcacagaccctgctgctagtctttagggttacaccaagcagagcactggcaggtgtccccaagtctgggaggacattgcacatgaatgacgctgggggccctcccttcagcaatccagagccctgagtgccagaaaggcagaagagggagtgacaaatgaattcatcaacccagcttggcccagctctgtaaaggcagtgaggtgagactgagttgttgcagaaattactatagagccttgagtcagatggctccacccaacacaccttaaaaataatcctcatctagagtcacatactttgattgattgattgattcattcattattggctatcactgtctaggtgtttggctgggggcagtgtcagtggcactggggcatcagagtttatctaccttagtaatcaggacagtttatattcactgagcacttactatgaaccaaggactgttctgtttacttccttgccaagggcacagactctcctgcccaatcccagctctggtgaggacagtgggagcctgcatggcacagagtccatgcacagtaaacatgagcagctcctattaactctaaatctctacagcaaccatagccggttcttactattggttgctctaggtgacttactttgtccaaggccacacaggcactaaaaggcagagtcaggatttgaacctaggtgatctggttccagagcctgctctattaaccgttaaggaactggtgcagacagaaccgagacctggagtcagaatgcccacctagctagatgcctgaggcagccactcacctctttctgtcttatttacttgtgaaatggagcatgtcatcagccttgccttccttttcccgcagccccccaccccggttcctggcccactgtgaccatcagatcagatgaaagagatccaggcatttctctaaggagagcacagggtggtgggggttggggtgggagagagcacattattttcccaccataaggggttgaaggagcccagaatttgggggtggggccttgtctgtaggagcctggttctctcaggttgacacgccaccagagagcctccatgacccccaaccctcatcctcaccccagccccccataggatgtgtagagacaaaaggtttgacaactgtagcgccaacaagcgtcctagagccccagataagatcctagcctcctgacagcgcaactgacagcagcatctctgaggctggattttagggtggagtatgaagaaggtggccgtagtgacagtggggtcatgttatttggccaagtcacaccaagcagggagagagaagggtgggcctaggctggaagcctgaaggctgagtgaactcaaactttaacgaccatggcctgtaaaatgggactaagcacagcgcccttatgggttgctgtgaaaatcaaatgagttaatacttgtaactcctttagcatatggtgtctggcatcagagagtgcgcagcaaacggtgactattgtcgtgactgtgttattacacacttgggtatcaccgccagccaaagcagtcccttccatttcaggcaccggcctgggcccgggagacaccgcaaggctatttaagatggtgtggtttgcccatctacgttgatcgtcccaagaaaggggcaccgtctgcagaacttgccaggaaagtcatcctgggcggcgcgggccacgccagggtctccccgcgcggcttcctcccccggcgccttctctcgggcgcgcgtgcgccccctgcaggcggcccccgggagagcctcgcgggggagccgggagcctggtttccccgccaacccccatcccgcccgccccggcggccaccctgggggcgaggcagcccggcgcgtgggaggggacggcgcgccattggcttgtgcgcggaaccgagaggagggaccagcgcgggccgccagactcggtaagccccggccgcgcagggcgccgcgcgcagtccagccggcccggccctgccctgccctgccctgtcctgccctgccctgccctgccctgccctgcactgcccggcccggcacgggcggcgcgatgtgaggcgtccgagcccggagcctccgcctggcatcagctccacgtagcccagcgccggcacgcgcgaggcccgtaagttctgctccccgccgccgcttccgagccgcggactttcccctcccgccgcccgccgcctgcgcagcgcaacccagcggggctcctgcggccgacgggaccgcagaggggcggccgggaccccgcgcgcgctaaccgggcgccccgggacatctcggcacccgctgagcccgctgggaccccagggggtcgcctccccagctccccaaggcgccgtcccgcagccccttccgtctcccctgcgcgctctcccctcgccgcccctccctctgactcggtttcccctctcccccggctccgcggtcgccctcctcctggactgcttatttcgtcctcggccactgcctctcgggctcgagctttctgcttcagagcaggagagaaacggagcgaaagcagtttctgtctccccggggtctgactcggtcccccgcgctcggttctctgtcccctccccctcccgccattgttcccggcaggaggagtgcgcggcgcaaacttgcgagttcccccagtctttgcccccgcagggccgcggacggaggtggtggcggagttcccgctgcccacaagtctggcccgaccttctggggtgggggcctgggggcaggggccctgggccggagaacccggggccgcctaacggctcggagctcaccgccgggggacaccggcgctgaggcctgggtctcagaaagtgggtgagtgtctggagcggggacatcagggacagattgcagggggaggggcgaggctgagagagtcccccgtccccaggctggaaaggggcgggcagaaacccaggccgcgccttagcccagttagggggtgggtaggggacgcacaggtggagacgccccccactctccccaaagtcgcgcgatctgcaggaagggtacagtgtggggccactggccgggcgctgggtgggttagggcccctgccgtgggcagaacactcgcacctacccgggggaggctgtgtggaggaagggccagaacgccgcgcccaccccggcgcgccccgctgggcggggcggggcggggcgctcgccttgggtcccctcgctctaccttccttcgccctgacccagtctcgggcttccgcctcttcctggagcccggggggagtgggtttctccgccggagagatggaggctggggcaagagcagcgcggaggccaagaacccccaggctcctccaaagcccagagcggctggccaaggccccctcaccgccccactaccctgcacttcctgattggtttctttcaaacaaacttcttgacggggcgggcctgcggggagaagtcaccggggctgcccaccccaactatgtggtcccttggacctccacccctgacggcctgtggagaggggaccaggatctgcggcccgcagatcccagggacgcgggggtcgttttgttgcagagccaggagggggcactgtccgctccttagcctcagccccagacttcgagaaaggagagaaaagatttttcttgttgggttg

SEQ ID NO: 3514 - DNA, 6000 bp, Homo sapiens
tcaccgccatttccacatgtccattcattaattgagtcaatgaacattcattgagaactgactgtgagctccggactcacatgtactatctcacttaaccccccaggtaccctatgcatcatcatgattttcttctttccatttggcagatgaacacgctgaggctcagagacactgagttacttgcctaaggccacagagccggttagaagaggactaggaccttgaacctaaatccaggatggttctagtggctaaatcccactctcatactgcctccttgagccctcccccacaggaagcaggaaagggctggccatggtcttctggtcccctagctgtcatacactttctttggggagatctgagcctcatttcttccacccccatcctgatcagttctctctcccacagataagaaactgcttgacatttcctggtcctggtgtagcaacagaggtggtggggatgagtcactggagggaagcagctggcagttgtgtggggtcggggaaggagggctggtcagtgctcactctggaggggtgggggcaggaagcactggggaggcctgcctgggagttcctgagctcccagctgctccttccagtccccaaagctatgtgtaacagagttctcctcaccaggcaggttcacagagaacgaagctctggaggaaatgagaggaaaccaggaaggggaaccagaagcagttgtgaaagcccagctctctgcctcagtccttgtgttgtgggatggcggctccttctctctgggttttgtgccagcttcaatgaaccctggctagacaactctcaccccagagctccctgttccagttgagaatgcaccagcactcctgaggccctctccctccgctcctcccaggctgccgcataataacaccagtggcactgattgataactgtcgatgtgcctgccccatgttaagggcttcacgtgcagcctctctgctaaacctccaataactcccaccaggtaggccctgttattatcaccattttacagatgagcaaactgaggcctagagaagtgaaatcactggcccatggtcccataaccaggacttgaacccagatctgtcaggtccaaaatccctgggctcaaccacaacaggtctctgacaacatcatgttcctccacacgtgcccatcagtgctgaaacctttcccctggccccaaccccaaagactaggcccaacccccgctccgcaggcctctctcctgcagtcccaggtgataacagtagtctcactccaagcatctttgaaatccaattacatccccattcttcctcgtccatagtggtttctggctgcagacactggcaatccctgtgcccaccacaccttcctgcaggggcacaaacacagacacacaggcgcactcttaagtgctcactcacacctggccaccaaggaggtgttgctgcccctgcttgtggagggcgaccagggcagatggagcccctgctgctcccaggttcctgtgggagtctggaggagtgaccctcccacccctgcaacagccgctggctgcttcctggctccatccccaaccccactcccatccccacccccctggggccttgagaggaacacttcaccaaggtaagaatcacaataataatgtcaataataggaatcagcatttccagtttgcaaacctttttcatcgaatcacctcacttgactctcacaagttctatgaggcagatatttttatatccgtgcaggcgagggtcgtatagctacttaggagcagagccaaggtcctagccgacttatctcactctcacctagaataatgatgactcctcattgttaccgtgcaccaagcatctattcttgcctgtcgttaggggcacacttaatgaatgtcaatgttactcctcacagcagcccagtgaggtgagttttttttttatgcccagtgtaaagatcaggtaactcagaagagttgagggcagaatggctgcctaagggatgtttctgaactggacacatcactttagaaaagtatataggggccgggcgcggtggctcacgcctgtaatccccgcactttgggaggccgaggcgggcggatcatgaggtcaggagatcgagactatcctgactaacatggtgaaaccccgactctactaaaaatacaaaaaattagccgggtgtggtcgtgggtgcctgtagtcccagctactcgggaggctgaggcaggagaatggcatggacccaggaggcggagcttgcagtgagccgagatcacgccactgcactccagcctgggcgacagaacgagactccatctcaaaataaataaataagtaaataaataaatgaaaagtatatagggaggaagacaataagagcctctaatgggtgctttctggagagcggatgcagggggttatggatagagccagctgcttctcccctggtccccctccaagcactttgcctgttatcttgagcggttactgttgctgctgttgactatctgtgcagtcatctacaagggggctgtgaactctccaaggacagggacactgtcctgttcacccctggggccccagcacatagcaccttgcctggcataagggtgaggcactgtcaggatggcctcgttcacaaaggatggtggggcagccttggcccagcctgagctcccagcctccccagcttccccgttgataaggagactgagagaatacagacacccagagggcaaaggttatccactccaaataccacttaaggtgggaattcttcctctgctgtcctcatcaacccttccctggattctgcttgcatgctgctagtgacagggcactcattcatgacaactaaggcagcctcttccatgttggaaaacttggagtgattgtgacaaaggcctcccactgatgtatgatcaggctggctgggattacaagcacagaccctgctgctagtctttagggttacaccaagcagagcactggcaggtgtccccaagtctgggaggacattgcacatgaatgacgctgggggccctcccttcagcaatccagagccctgagtgccagaaaggcagaagagggagtgacaaatgaattcatcaacccagcttggcccagctctgtaaaggcagtgaggtgagactgagttgttgcagaaattactatagagccttgagtcagatggctccacccaacacaccttaaaaataatcctcatctagagtcacatactttgattgattgattgattcattcattattggctatcactgtctaggtgtttggctgggggcagtgtcagtggcactggggcatcagagtttatctaccttagtaatcaggacagtttatattcactgagcacttactatgaaccaaggactgttctgtttacttccttgccaagggcacagactctcctgcccaatcccagctctggtgaggacagtgggagcctgcatggcacagagtccatgcacagtaaacatgagcagctcctattaactctaaatctctacagcaaccatagccggttcttactattggttgctctaggtgacttactttgtccaaggccacacaggcactaaaaggcagagtcaggatttgaacctaggtgatctggttccagagcctgctctattaaccgttaaggaactggtgcagacagaaccgagacctggagtcagaatgcccacctagctagatgcctgaggcagccactcacctctttctgtcttatttacttgtgaaatggagcatgtcatcagccttgccttccttttcccgcagccccccaccccggttcctggcccactgtgaccatcagatcagatgaaagagatccaggcatttctctaaggagagcacagggtggtgggggttggggtgggagagagcacattattttcccaccataaggggttgaaggagcccagaatttgggggtggggccttgtctgtaggagcctggttctctcaggttgacacgccaccagagagcctccatgacccccaaccctcatcctcaccccagccccccataggatgtgtagagacaaaaggtttgacaactgtagcgccaacaagcgtcctagagccccagataagatcctagcctcctgacagcgcaactgacagcagcatctctgaggctggattttagggtggagtatgaagaaggtggccgtagtgacagtggggtcatgttatttggccaagtcacaccaagcagggagagagaagggtgggcctaggctggaagcctgaaggctgagtgaactcaaactttaacgaccatggcctgtaaaatgggactaagcacagcgcccttatgggttgctgtgaaaatcaaatgagttaatacttgtaactcctttagcatatggtgtctggcatcagagagtgcgcagcaaacggtgactattgtcgtgactgtgttattacacacttgggtatcaccgccagccaaagcagtcccttccatttcaggcaccggcctgggcccgggagacaccgcaaggctatttaagatggtgtggtttgcccatctacgttgatcgtcccaagaaaggggcaccgtctgcagaacttgccaggaaagtcatcctgggcggcgcgggccacgccagggtctccccgcgcggcttcctcccccggcgccttctctcgggcgcgcgtgcgccccctgcaggcggcccccgggagagcctcgcgggggagccgggagcctggtttccccgccaacccccatcccgcccgccccggcggccaccctgggggcgaggcagcccggcgcgtgggaggggacggcgcgccattggcttgtgcgcggaaccgagaggagggaccagcgcgggccgccagactcggtaagccccggccgcgcagggcgccgcgcgcagtccagccggcccggccctgccctgccctgccctgtcctgccctgccctgccctgccctgccctgcactgcccggcccggcacgggcggcgcgatgtgaggcgtccgagcccggagcctccgcctggcatcagctccacgtagcccagcgccggcacgcgcgaggcccgtaagttctgctccccgccgccgcttccgagccgcggactttcccctcccgccgcccgccgcctgcgcagcgcaacccagcggggctcctgcggccgacgggaccgcagaggggcggccgggaccccgcgcgcgctaaccgggcgccccgggacatctcggcacccgctgagcccgctgggaccccagggggtcgcctccccagctccccaaggcgccgtcccgcagccccttccgtctcccctgcgcgctctcccctcgccgcccctccctctgactcggtttcccctctcccccggctccgcggtcgccctcctcctggactgcttatttcgtcctcggccactgcctctcgggctcgagctttctgcttcagagcaggagagaaacggagcgaaagcagtttctgtctccccggggtctgactcggtcccccgcgctcggttctctgtcccctccccctcccgccattgttcccggcaggaggagtgcgcggcgcaaacttgcgagttcccccagtctttgcccccgcagggccgcggacggaggtggtggcggagttcccgctgcccacaagtctggcccgaccttctggggtgggggcctgggggcaggggccctgggccggagaacccggggccgcctaacggctcggagctcaccgccgggggacaccggcgctgaggcctgggtctcagaaagtgggtgagtgtctggagcggggacatcagggacagattgcagggggaggggcgaggctgagagagtcccccgtccccaggctggaaaggggcgggcagaaacccaggccgcgccttagcccagttagggggtgggtaggggacgcacaggtggagacgccccccactctccccaaagtcgcgcgatctgcaggaagggtacagtgtggg

SEQ ID NO: 3515 - DNA, 6000 bp, Homo sapiens
gtgagatttgttaggattaatgacatgtaagattctagaccagcgtctggtacatagtacgggctcagaatgctattttttgaaataatgataaagcccctggggttttatcattggacaggaggcaagtgaagcggtggccattggcctagccggctgcccagggtccaagactatgatcccacagcccagagtggctgctctgggcactcactgtgaagaggtcctgggggtcgcccaagatgagggtccaaaatctgctactcacttccctgcatagcaattcttttcttggccagggctcagcactctgaaaatctggacccagcctgaggttcttaagtcagctatgctgacaaggggtactccatactccatctgccctgagttttggaagccgtcccttcagtaccagcacagagcaacagtgtcccaggcctgcgatacaaggtccacagacatctccccgactctcccagctggtggagggtggatttcttgcagatggccacatgcacacagctcaccgccatttccacatgtccattcattaattgagtcaatgaacattcattgagaactgactgtgagctccggactcacatgtactatctcacttaaccccccaggtaccctatgcatcatcatgattttcttctttccatttggcagatgaacacgctgaggctcagagacactgagttacttgcctaaggccacagagccggttagaagaggactaggaccttgaacctaaatccaggatggttctagtggctaaatcccactctcatactgcctccttgagccctcccccacaggaagcaggaaagggctggccatggtcttctggtcccctagctgtcatacactttctttggggagatctgagcctcatttcttccacccccatcctgatcagttctctctcccacagataagaaactgcttgacatttcctggtcctggtgtagcaacagaggtggtggggatgagtcactggagggaagcagctggcagttgtgtggggtcggggaaggagggctggtcagtgctcactctggaggggtgggggcaggaagcactggggaggcctgcctgggagttcctgagctcccagctgctccttccagtccccaaagctatgtgtaacagagttctcctcaccaggcaggttcacagagaacgaagctctggaggaaatgagaggaaaccaggaaggggaaccagaagcagttgtgaaagcccagctctctgcctcagtccttgtgttgtgggatggcggctccttctctctgggttttgtgccagcttcaatgaaccctggctagacaactctcaccccagagctccctgttccagttgagaatgcaccagcactcctgaggccctctccctccgctcctcccaggctgccgcataataacaccagtggcactgattgataactgtcgatgtgcctgccccatgttaagggcttcacgtgcagcctctctgctaaacctccaataactcccaccaggtaggccctgttattatcaccattttacagatgagcaaactgaggcctagagaagtgaaatcactggcccatggtcccataaccaggacttgaacccagatctgtcaggtccaaaatccctgggctcaaccacaacaggtctctgacaacatcatgttcctccacacgtgcccatcagtgctgaaacctttcccctggccccaaccccaaagactaggcccaacccccgctccgcaggcctctctcctgcagtcccaggtgataacagtagtctcactccaagcatctttgaaatccaattacatccccattcttcctcgtccatagtggtttctggctgcagacactggcaatccctgtgcccaccacaccttcctgcaggggcacaaacacagacacacaggcgcactcttaagtgctcactcacacctggccaccaaggaggtgttgctgcccctgcttgtggagggcgaccagggcagatggagcccctgctgctcccaggttcctgtgggagtctggaggagtgaccctcccacccctgcaacagccgctggctgcttcctggctccatccccaaccccactcccatccccacccccctggggccttgagaggaacacttcaccaaggtaagaatcacaataataatgtcaataataggaatcagcatttccagtttgcaaacctttttcatcgaatcacctcacttgactctcacaagttctatgaggcagatatttttatatccgtgcaggcgagggtcgtatagctacttaggagcagagccaaggtcctagccgacttatctcactctcacctagaataatgatgactcctcattgttaccgtgcaccaagcatctattcttgcctgtcgttaggggcacacttaatgaatgtcaatgttactcctcacagcagcccagtgaggtgagttttttttttatgcccagtgtaaagatcaggtaactcagaagagttgagggcagaatggctgcctaagggatgtttctgaactggacacatcactttagaaaagtatataggggccgggcgcggtggctcacgcctgtaatccccgcactttgggaggccgaggcgggcggatcatgaggtcaggagatcgagactatcctgactaacatggtgaaaccccgactctactaaaaatacaaaaaattagccgggtgtggtcgtgggtgcctgtagtcccagctactcgggaggctgaggcaggagaatggcatggacccaggaggcggagcttgcagtgagccgagatcacgccactgcactccagcctgggcgacagaacgagactccatctcaaaataaataaataagtaaataaataaatgaaaagtatatagggaggaagacaataagagcctctaatgggtgctttctggagagcggatgcagggggttatggatagagccagctgcttctcccctggtccccctccaagcactttgcctgttatcttgagcggttactgttgctgctgttgactatctgtgcagtcatctacaagggggctgtgaactctccaaggacagggacactgtcctgttcacccctggggccccagcacatagcaccttgcctggcataagggtgaggcactgtcaggatggcctcgttcacaaaggatggtggggcagccttggcccagcctgagctcccagcctccccagcttccccgttgataaggagactgagagaatacagacacccagagggcaaaggttatccactccaaataccacttaaggtgggaattcttcctctgctgtcctcatcaacccttccctggattctgcttgcatgctgctagtgacagggcactcattcatgacaactaaggcagcctcttccatgttggaaaacttggagtgattgtgacaaaggcctcccactgatgtatgatcaggctggctgggattacaagcacagaccctgctgctagtctttagggttacaccaagcagagcactggcaggtgtccccaagtctgggaggacattgcacatgaatgacgctgggggccctcccttcagcaatccagagccctgagtgccagaaaggcagaagagggagtgacaaatgaattcatcaacccagcttggcccagctctgtaaaggcagtgaggtgagactgagttgttgcagaaattactatagagccttgagtcagatggctccacccaacacaccttaaaaataatcctcatctagagtcacatactttgattgattgattgattcattcattattggctatcactgtctaggtgtttggctgggggcagtgtcagtggcactggggcatcagagtttatctaccttagtaatcaggacagtttatattcactgagcacttactatgaaccaaggactgttctgtttacttccttgccaagggcacagactctcctgcccaatcccagctctggtgaggacagtgggagcctgcatggcacagagtccatgcacagtaaacatgagcagctcctattaactctaaatctctacagcaaccatagccggttcttactattggttgctctaggtgacttactttgtccaaggccacacaggcactaaaaggcagagtcaggatttgaacctaggtgatctggttccagagcctgctctattaaccgttaaggaactggtgcagacagaaccgagacctggagtcagaatgcccacctagctagatgcctgaggcagccactcacctctttctgtcttatttacttgtgaaatggagcatgtcatcagccttgccttccttttcccgcagccccccaccccggttcctggcccactgtgaccatcagatcagatgaaagagatccaggcatttctctaaggagagcacagggtggtgggggttggggtgggagagagcacattattttcccaccataaggggttgaaggagcccagaatttgggggtggggccttgtctgtaggagcctggttctctcaggttgacacgccaccagagagcctccatgacccccaaccctcatcctcaccccagccccccataggatgtgtagagacaaaaggtttgacaactgtagcgccaacaagcgtcctagagccccagataagatcctagcctcctgacagcgcaactgacagcagcatctctgaggctggattttagggtggagtatgaagaaggtggccgtagtgacagtggggtcatgttatttggccaagtcacaccaagcagggagagagaagggtgggcctaggctggaagcctgaaggctgagtgaactcaaactttaacgaccatggcctgtaaaatgggactaagcacagcgcccttatgggttgctgtgaaaatcaaatgagttaatacttgtaactcctttagcatatggtgtctggcatcagagagtgcgcagcaaacggtgactattgtcgtgactgtgttattacacacttgggtatcaccgccagccaaagcagtcccttccatttcaggcaccggcctgggcccgggagacaccgcaaggctatttaagatggtgtggtttgcccatctacgttgatcgtcccaagaaaggggcaccgtctgcagaacttgccaggaaagtcatcctgggcggcgcgggccacgccagggtctccccgcgcggcttcctcccccggcgccttctctcgggcgcgcgtgcgccccctgcaggcggcccccgggagagcctcgcgggggagccgggagcctggtttccccgccaacccccatcccgcccgccccggcggccaccctgggggcgaggcagcccggcgcgtgggaggggacggcgcgccattggcttgtgcgcggaaccgagaggagggaccagcgcgggccgccagactcggtaagccccggccgcgcagggcgccgcgcgcagtccagccggcccggccctgccctgccctgccctgtcctgccctgccctgccctgccctgccctgcactgcccggcccggcacgggcggcgcgatgtgaggcgtccgagcccggagcctccgcctggcatcagctccacgtagcccagcgccggcacgcgcgaggcccgtaagttctgctccccgccgccgcttccgagccgcggactttcccctcccgccgcccgccgcctgcgcagcgcaacccagcggggctcctgcggccgacgggaccgcagaggggcggccgggaccccgcgcgcgctaaccgggcgccccgggacatctcggcacccgctgagcccgctgggaccccagggggtcgcctccccagctccccaaggcgccgtcccgcagccccttccgtctcccctgcgcgctctcccctcgccgcccctccctctgactcggtttcccctctcccccggctccgcggtcgccctcctcctggactgcttatttcgtcctcggccactgcctctcgggctcgagctttctgcttcagagcaggagagaa

SEQ ID NO: 3516 - DNA, 6000 bp, Homo sapiens
tataatctagctaaaagcagacacgtgaaaccatctaaggtgataaatatgcataagatggtgtagtgaaatgtacatattttatagcatccaagtcttctaatagcaagaaagaacacttatgaattattctgcttcactgattgcttatttatcataaatgctacagtcagtgcattattggagttgttgactacctttggcttcctctgagaaattttaatgtacatgtacaatccaaagagttgtatttattaataaccactaggacctataaatgtggtataaaataacaggcaagagagtaggcccaggagccagactggctgggtgtgaatccagggctggctacttactagtgtggtgagcttggttaagtcatttgacctcactagccctctgtttgctgttctgtaaagtaaggataaaaacacctatcccgtgacatgttttgcagaacagctgggttcgtgtacattatgcattgagaataaggtctggcacatggcggagcactccatataaattcttattcttcttaggcaggcatccccaacccctgggccacagaccggtatgggtctgtgggctgttaggaactgggctgcaggaagtgagtggtgggtgagccagtgaagcttcatctgtatttacagccactccccgtcgctcaccttactgcctgagcaccacctcctgtcagatcaggggcggcattcgattctcataagagcgcgcatgaattctatcgtgaactccacatgcgagggatctaggctgcatgctttttatgagaatctaatgcctgatgatctgtcactgtctcccatcacccccagatggaactgtctagttgcagaaaaacaagctcagggctcccactgattctacattagtgagttgtgtaattatttcatgatatattagaatgtaacaataatagaaataaagtacacaataaatgtaatgcacttgagtcatcctgaaaccatccccctcctcagtccatggaaaaattgtcttccatgaaaccggtccctgctgccaaaaaggttgaggaccgctgttcttaaggtgcaattatggttaaacatttaccagggggaattgaagcataaacagaagtatactttgtgaattattaccaacaacatccacataaagtgggaaagaggaaaatccattttattcccagccaagagacatttaaagcacataccctccctgcccctactcaaatgggaggtgtagaaagcaccctcctctttgtccttccagaatatctttttgatgtgtcttatactcacatctgaaaaggtcagctggtgacatttctttctggaggcaattttactgaaagcattttcactttctcagtgtgcagggactggaggctcaatgaagaggatacagctatgtccacatcatgtcaactctcactgattgtagagctgttctcccacccaactcagtcctctctccctctacccctaacaggaacatttaactctggttattgactacatctcattgtgattactgagcaaatttattaaatagcctgggataatactttttttttagatggattattgctctgtcgcccaggctggagtgcagtggtacaatctcggctcactgcaaccttcacctcctgggttcaagtgattctccggactcagccttctgagtaactgggaataaaggtgtgcaccaccatgcctggctatttttttttttgtatttttagtagacacacagtttcgccaggttggccaggctgatcttgaactcctgacctcaagtgatccacctaccttggcctcccaaagtgctgggattacaggtgtgagccaccgtgcccggccctgggacaatacttgaatggggctccagggactgattactatccatcaaaacattctgtcctattgaaatataaatttatctgaagcagacacatgaaaacatgctttcccatataagcccccatgcactgggcaacttcccttctgcctagccctttaatgttggtgttcttgaagctttggcctcagtgccttttctttgctctcacattcttcctgagaaattgcatctactttaaagatttcctttcccacctatttggatcttttgcttggaactttctcctaagctccaggtccatggatcctacttcctgctggactgctcccatctggagatcccacaggcccctcaactcagcccctgtttctgaatcccctaattatcctctatttacttggtcactcaagccagagacttgccctggcctccttgtctcgctgtaccccgcctgatgattgagctcagctcatcaaggtctgtcacctgcagcactacagcaatcgcttgtctggcctccagtttttaaaatccgtcccacaaaacatgaccaaagtggccaatctgatgacaccatcccttggcttagattcttcagttaacatcctgatcagtgacgtaggcacaagaatctcctagaatggaagttcctgggccccacccacaaagattctgatccagcagacccggaatgcggttcaagaaccaacacatttaacactcagactgctctggggcaggtgggctgtgggcatgttctaagacgcacagcactgcaggatgttccagcgcctcgatgtggcccggacactcaccgtcttctggcatgcaaacacctctctaacctcatccatgtctaaccccttcatgtcctaaagtccagcaggcagggtcaaggactagggtgacattaggccaggcctgggaatgcctggatcttggcctgctgttcactcattgttgctttgagggtctaattggaggagctctgtccccaagctctaataggcaaaagtaagaaaagtaacccattgttagtagctcagactaagcccaatacccttgaattcatggttctcttataaaaactgaaatgctgaatatggcttagcagaggataattggcaggaagcaagactttcccgctgtgtcaagagatgggaataggccaagtctacaaagctgacctgaatccatttgtccaattggtgagcctgtctggcctatccccaggggccagaccctgccctcgccccaagcagtagatgcaagagcagagaaggatggtcaagtctatctaaggagacaggctgtatagaagtgttctgattgcatgggagcaaattttaagagaagtaccatgcatggataacaatgttcaagccacagtaaccgcacactggtaaactgtggttaaacttggtgcaaaagtaattgtggtttttgtcattattttcaaatgggtcttaaaaaggagtgttgggggccaggtgcggtagctcatgcctgtaatcccagctctttgggatgctgaggtgggcagatcacttgaggtcaggagttcgagaccagcctggccaacatggtaaaaccccatctctactaaaaaatacaaaagttagctgggtgtagtggtgggtgcctataatcccagctactccggaggctgaggcaggagaattgtttgaacccaggaggtggaggttgcagtgtgctggaggttgcggtgtgctgagatggcaccactgcactccagccggggtgacagagtgagactctgtctcaaaaaaaaaaaaaaaaaaaagattgctaggggaaggctggaagcccagggaggaagcaggtgttccctgcccagcagtgattgctccctggttgctggaggaacgatggaatcagagtcacccgaggaccaaagctccacacctcttgctatcccagactctctggaacaccaggaagaaaacatatttggacaaaaattattctttgcaacattagaacttttgattctggaatgagacaaggaaatatgtatgtatctcagagagacaatgaatttttaaaaggaaattgggaccgtttctcagggtgagatgtcttatccggttaactgcgagcccccagggatttctactcagagtgttcatcacatcaggtttccattctctacaataaaaacatggctagggagaaattacccagcactggcaagaaagagctccaaaatagaagcagcttttgaggaatttggagggataaaacggaatagtatgtctgaaagttggcaacatgtaaaaaggctaaaaatgacaattctgcctgtgatactatgtctagtgtgcaacgcttcattcaaaaggcaggcacgtctcccctccaggcgggagtgggaatctcagtggggaaccgggaactgcgtttgagctgatgcagactcagggtcaactcgacaagggagcccggcacccagacacagcggcgttcacctcaccttgcaccgtctttgtcggtcttacaggcatcagctttcccagcctcatttgagccgggatctgagttgcatttctttctgggtcaggccttgccattagggagagatgaagtcaactgatgagcgtgccagccttgaggaaggacagagtgcgggaagcagagtgtgggaagttggaaaaaataatctgcaaggtaaacaccttcaagtcaatttcaagaggctggctagaaaccgccaggacttcagggggccctgtctcgcgggtctccctgcgccctcagcactttggcttggtataaggccaccttgtccctgaagagaggcctattttaagctgagcaagaaaaggtgagaaagactaaaatcagctttgtgcagagacgccaatttctgctgcacacatggaaacgatgtgcacatacagcgagctggcccagctcccggccacgtggctcacactgtccgtgctcacccacccgttgccttcacccccagcagcactggttgtgaaaagggtaactgcctgagccaccccaccactgcgggcctgccaaggacaggcaggaactcagccatgccccgcaaggagcccaggggcatctccagggacggctccccagcctatgggctcgctccctgagaggccgtgctcgggctcgcctgctcagctcactccgaaagcctctgctcagacctgcacccagtcacagcagcacagatgtgcaggaggagaccatttccacggaccctccgactcctaggaggcaggtgaggagagggggagggaggggaccagcgctggtgcttcaggtatgctctggccactgcgattcactctgctttgtgcttggggtttcacacgcatctcggcgactgtgtgcggaaagtacagtcgtgaccatgcgcaggtgaggcctggaggaggtcagctaaactgctctctctcaatggttctgaaccctgagagtacatcagagtcacctggaggacttacgaaaacacacactgcagaatttctgacttggtcgatgcaggttggggccaaaaatgtgtatctctaacaggttcctgggcgatgctgacgccgatgctgtgcgtcctgagccacacttggggagctactgcgcaagctcgcacagctagccgaccgctgagctggggctcagacctgggtcagtcctggtccacaggccagcccctttctcacgtcccctggtgaacggcggcatggtggcctcatggacactgagcagggcccctagggaagcctgtatggaggccacttcactttgaatggatctgggatagaggaaggacgcgagctgtgggagcctgggtcctgggcacagcgggcatgtcatggcagggttcaccagcctcctttcagcagttccctagttctgccccagctacctgtggttggtggtgggaggtttatttgttagttccttcagcagtgactcaccacacttactgagagcttaccgtgtgccaggactgccacaggtatggggatgcagagtgtccacagccccccagaagattgatgatagcaccctccatgtaggaagggctgtgactgcagacagggcatggggcggggcacctgtgtttgccacaacctctagagggtc

SEQ ID NO: 3517 - DNA, 6000 bp, Homo sapiens
ctgccgcccaggctcgagtgcagtggcgcgatctcggctcactgcaacatctgcctcccaggttcaagagattctgctgcctcagcctcccgagcagctgagattacaggcttgcaccaccatgcccgcctaatttttgtatttttagcagggacggggttttacatgctggtctcaaactcctgaccttcagtgatctgcctgtcttggcctcccaaagtactgggattacaggcgtgagccactgcgtccggcccggattttgccttttaaataacactattcagttccagatgtttggaaagacataaggaatttgaactacttctgtaattttagatggtctcataaatattgtgaaactcagcattctaaacacggtttctgagctaaatcttgtttagttttcaccatgctttaaagattagttgtggccaggcacagtggctcacgcctgtaatcccagcattttgggagggtgagacgggtggatcacctgaggccaggagttcgagaccagcctggccaacatagtgaaatcccgtctctactaaaaatacaaaaattagccgggtatggtggcacaagcttgtaatcccagctactcgggaggctgaggcaggagaatcacttgaacccaggaggtggaggctgcaatgagctgagatcgtgccactgcactccaacctgggtgacagagtgagactccgtctcaaaaaaaaaaaaaaaagaaagacaaaagattagttatgactaataaatacaagtacgaagtggcccttgggtcaagataagtctgttgtagacttttttttttccccttgagacatggtctcactctgtcacataggctggagtgcagtggcaggatcacaccacaacctatccgggctcaagccatcctcccagctctggctcccaagtagctaggactataggtgagtgccaccacgcctggctaatttttttttgcaatttatagagacagggtttcgccatgttgctcaggctggtctcaaactcttggcctcaatagatcctccagccttggcctcccacagtgctgggattacaggtgtgagccttgtttgcagagtttaggtcccagagaatataaagacactcaaagtatctcaacctcttggaacacctcttgggcatcaagaacaacgctactagaaataagcagtttgcctctagagaaacttcaagtaagcacaacaaagggcaaagtgacacaagataactgtggaatgcaagcaaacagcagcagctggtctgtatttttttaaatggcaaagtcacaaacaacagcaactgcttttagagtgagcaggtagtttgctttcttttttttcaaatggaactcactttttaagtgatgacatgcacttgggggtgggtaggtgtgagttcatttgtgttttgaaatcccaaattaatgagcatgataaaccgctattgctggccctgtctgactctctactctgagtaattggtgggttccccccaaccttctcctaaccctcaccctttttccctttccattgacttgggacagtccttgtcaaagtgccaatcacagtgggaaggaggagaaggggggaggtcacagtgcatgggattcaaggtcacagtgggcggagcaacggggatcaccaggcaagtaagtcaagttcccgctgctcaagtccagctgtctgccacggtagtgcaacccttggcggacgacccaggacgcgttgacgcggcagtcgcgccatctcttcttgcctgcatttatctgcgctgtttgaagccgtgtgacccatcaggacccagaggctgtctgatcacattattgggctgtctgctgtcttcgggttaggagatcctggttggcctgaagggaagaagatcagaggaagacctatcgaggatgggtttctcctgcttctcctcgggttggcgctgcccaggatccgcttcctggcctcggtgtactcggcttcccactgtgccagggacttgactggaagggcgggcctgctagcggacttggggctgctgaccacaccgttgctggtgggcctcttgaggatgcggacctgtggagggggtcccgggggaaaattatcatcctgaatcacaatgggcactttgggagatttgaatttcctgctttctgtgtgatcttcagttttttttccagacgtctatttccccgctgtctgccgtctcctcccagctctcagcaacctcctcatattccatcttactcgccactttccagatcgcttgctttcttatttccacattttctctgacttttgcagtattcaatattattacctgattctgatttttcagacatcactatatggtccttggctttttggtcgttcctctcattcctttgctgtttcaagctctgttcccagcctaagctttttaccaccgaattctgttctgtgacccataacttaaaactaacccaacttttcattccctccagactttttttggtaagcagtatcatcatgctttaggtggacactgagtcatactgctgtggtagtgctggtacacgtagttttgaataccaggttcttgagtgaatcctttttacttctctctctctcccccacccccgcttctcccttctgccttcatttctgacccttcttttctggttccattagaaaaggactaatcttatcagttctgcctttttttttctgctctaataattttgtcaagataattttttcaaagcacaaggccaatgagaagggggaaagtcggtccagaaggcagccggcccgactattctgagtttgaatctactcttggtggtcctgttaaaatacagtttgaagcaaatcacttgtttttatgcttctaatgtctactctgtcgaaagcccaaatttccttgcttggcatttaaggagactccaagttcttaaaacttcttcttgactttcatgcaagtcaaacggatttatttattgtatctcaaacagtcctcttatattttcctttctgtattttttgataattttcttgtgcctggaatattctctgcttttatttaagtctcaccatctttcaagacacaaaatatgtgtgatctctgaggcctttgtgaactgcctccagcatttactaagcaattaattctgtctctgaacttttatagcacaaacccattcgttcacttgatatttaacaaatatcaacctctatcacttatctctttttttttttttttcttctgagatggagtcttgctctgtcacccaggctggactgcagtggcgcgatctccgctcactgcaacctctgcctcccgagatcaagcgattcttctgcctcagcctcccaagtggctaggattacaggcgcccgccacggggcccggctaatttttgtatttttagtagagacaaggtttcaccatcttggccaggctggtctcgaactcctaacctcgtgatccacccacctcagcctcccaaagtgctgggattacaagcgtgagccaccgtgcgcagcctatcacttatcttttcatgcttacattttctcactgcttgagattttctttcatccagggtcaagcactgagtctattagaaaccccactgtatatgatctgatgaagatgagattatctttttaaaagccacatattaaatctcttaagttaataatattggcaatcaacttaaatcaactgagtgaccactatgtttaaggaagtttcctttctggtaggctgggaagcgggagaagggaaggatataactttataaaaaaaaaaaagctgcagaagggaaggatataactttataaaaaaaggtccttgttcacaaggagctaatcacttactggccagagaagaaacgtgttccttctttgcaatggctgtgtttttgggtttagctaactcaattctttatgtcctcaatttatgagaccgcatcaaaaacgtttttgccacatctctgtgggaaagtaggtgagtcagaatgagtgcataatatataagtatatattttaatgataatgaatgtgtagattaacaaacccaaactttgtttttgtttttttgagagtcttgccctgtcgcccaggctggagtgcaatggcatgatcttggctcactgcagcctctgcctcccgggttcacaggattgtcctgcctcagcctccggagtagagtagctgggattacaggtgaccgccaccacgcccgactaatttttgtagtttttagtagagacggcgtttcccatgttggccaggttggtcttgaactcctgacctcaagtgatccacccgcctcggcctacccaaagtgatgggattacaagcgtgagccaccgcgcccagccaaacccaaacattctaaaagcgcagagtaaccgctcccctccccgccaacggtaaccagcatcttcgttctccaaccagaacagctgtatgcaccggtgtataagcctgccttaagtgctatttttaatcttttttaaaaacaggccttaaaataactcatttgggtacaactccagcggctggtggagtgggcttaatatattaaacagctgttaattttggtttctttttggtaacagcgacacggagatccgcatttgtcgcagtttccaccgcgggcgggaagtgtaaacacaagaaatacaaacatagcgcaacggctaaaggagtgtcacagcgccaaaccttgctggctccgcgccaggccgagccccaccctctcagctcgcggccaacacccccaccccgcctcacagcccgccgcgcccgcggggcgacaccccccactccatcatcccggaggtggtgcggccgagccccggacccaattggcggaagcggggccggttgtgtgcgcgcgcacaaatgcccggatgcgccgcgacgacccgcgcgctcccctcgggcggtagggggcgcgcaccgaggcaccgcggcgagcttggctgcttctggggcctgtgtggccctgtgtgtcggaaagatggagcaagaagccgagcccgaggggcggccgcgacccctctgaccgagatcctgctgctttcgcagccaggagcaccgtccctccccggattagtgcgtacgagcgcccagtgccctggcccggagagtggaatgatccccgaggcccagggcgtcgtgcttccgcgcgccccgtgaaggaaactggggagtcttgagggacccccgactccaagcgcgaaaaccccggatggtgaggagcaggtactggcccggcagcgagcggtcacttttgggtctgggctctgacggtgtcccctctatcgctggttcccagcctctgcccgttcgcagcctttgtgcggttcgtggctgggggctcggggcgcggggcgcggggcatggggcacgtggctttgcggaggttttgttggactggggctaggcagtcgccgccagggaggagggcgggatttcggacggctctcgcggcggtgggggtgggggtggttcggaggtctccgcgggagttcagggtaaaggtcacgggggccgggggctgcggggccgcttcggcgcgggaggtccggatgatcgcaggtgcctgtcgggtcactagtgtgaacgctgcgcgtagtctgggcgggattgggccggttcagtgggcaggttgactcagcttttcctcttgagctggtcaagttcagacacgttccgaaactgcagtaaaaggagttaagtcctgacttgtctccagctggggctatttaaaccatgcattttcccagctgtgttcagtggcgattggagggtagacctgtgggcacggacgcacgccactttttctctgctgatccaggtaagcaccgacttgcttgtagctttagttttaactgttgtttatgttctttatatatgatgtattttccacagatgtttcatgatttccagttttcatcgtgtcttttttttccttgtaggcaaatgtgcaatacca

SEQ ID NO: 3518 - DNA, 6000 bp, Homo sapiens
gctcaggctggtctcaaactcttggcctcaatagatcctccagccttggcctcccacagtgctgggattacaggtgtgagccttgtttgcagagtttaggtcccagagaatataaagacactcaaagtatctcaacctcttggaacacctcttgggcatcaagaacaacgctactagaaataagcagtttgcctctagagaaacttcaagtaagcacaacaaagggcaaagtgacacaagataactgtggaatgcaagcaaacagcagcagctggtctgtatttttttaaatggcaaagtcacaaacaacagcaactgcttttagagtgagcaggtagtttgctttcttttttttcaaatggaactcactttttaagtgatgacatgcacttgggggtgggtaggtgtgagttcatttgtgttttgaaatcccaaattaatgagcatgataaaccgctattgctggccctgtctgactctctactctgagtaattggtgggttccccccaaccttctcctaaccctcaccctttttccctttccattgacttgggacagtccttgtcaaagtgccaatcacagtgggaaggaggagaaggggggaggtcacagtgcatgggattcaaggtcacagtgggcggagcaacggggatcaccaggcaagtaagtcaagttcccgctgctcaagtccagctgtctgccacggtagtgcaacccttggcggacgacccaggacgcgttgacgcggcagtcgcgccatctcttcttgcctgcatttatctgcgctgtttgaagccgtgtgacccatcaggacccagaggctgtctgatcacattattgggctgtctgctgtcttcgggttaggagatcctggttggcctgaagggaagaagatcagaggaagacctatcgaggatgggtttctcctgcttctcctcgggttggcgctgcccaggatccgcttcctggcctcggtgtactcggcttcccactgtgccagggacttgactggaagggcgggcctgctagcggacttggggctgctgaccacaccgttgctggtgggcctcttgaggatgcggacctgtggagggggtcccgggggaaaattatcatcctgaatcacaatgggcactttgggagatttgaatttcctgctttctgtgtgatcttcagttttttttccagacgtctatttccccgctgtctgccgtctcctcccagctctcagcaacctcctcatattccatcttactcgccactttccagatcgcttgctttcttatttccacattttctctgacttttgcagtattcaatattattacctgattctgatttttcagacatcactatatggtccttggctttttggtcgttcctctcattcctttgctgtttcaagctctgttcccagcctaagctttttaccaccgaattctgttctgtgacccataacttaaaactaacccaacttttcattccctccagactttttttggtaagcagtatcatcatgctttaggtggacactgagtcatactgctgtggtagtgctggtacacgtagttttgaataccaggttcttgagtgaatcctttttacttctctctctctcccccacccccgcttctcccttctgccttcatttctgacccttcttttctggttccattagaaaaggactaatcttatcagttctgcctttttttttctgctctaataattttgtcaagataattttttcaaagcacaaggccaatgagaagggggaaagtcggtccagaaggcagccggcccgactattctgagtttgaatctactcttggtggtcctgttaaaatacagtttgaagcaaatcacttgtttttatgcttctaatgtctactctgtcgaaagcccaaatttccttgcttggcatttaaggagactccaagttcttaaaacttcttcttgactttcatgcaagtcaaacggatttatttattgtatctcaaacagtcctcttatattttcctttctgtattttttgataattttcttgtgcctggaatattctctgcttttatttaagtctcaccatctttcaagacacaaaatatgtgtgatctctgaggcctttgtgaactgcctccagcatttactaagcaattaattctgtctctgaacttttatagcacaaacccattcgttcacttgatatttaacaaatatcaacctctatcacttatctctttttttttttttttcttctgagatggagtcttgctctgtcacccaggctggactgcagtggcgcgatctccgctcactgcaacctctgcctcccgagatcaagcgattcttctgcctcagcctcccaagtggctaggattacaggcgcccgccacggggcccggctaatttttgtatttttagtagagacaaggtttcaccatcttggccaggctggtctcgaactcctaacctcgtgatccacccacctcagcctcccaaagtgctgggattacaagcgtgagccaccgtgcgcagcctatcacttatcttttcatgcttacattttctcactgcttgagattttctttcatccagggtcaagcactgagtctattagaaaccccactgtatatgatctgatgaagatgagattatctttttaaaagccacatattaaatctcttaagttaataatattggcaatcaacttaaatcaactgagtgaccactatgtttaaggaagtttcctttctggtaggctgggaagcgggagaagggaaggatataactttataaaaaaaaaaaagctgcagaagggaaggatataactttataaaaaaaggtccttgttcacaaggagctaatcacttactggccagagaagaaacgtgttccttctttgcaatggctgtgtttttgggtttagctaactcaattctttatgtcctcaatttatgagaccgcatcaaaaacgtttttgccacatctctgtgggaaagtaggtgagtcagaatgagtgcataatatataagtatatattttaatgataatgaatgtgtagattaacaaacccaaactttgtttttgtttttttgagagtcttgccctgtcgcccaggctggagtgcaatggcatgatcttggctcactgcagcctctgcctcccgggttcacaggattgtcctgcctcagcctccggagtagagtagctgggattacaggtgaccgccaccacgcccgactaatttttgtagtttttagtagagacggcgtttcccatgttggccaggttggtcttgaactcctgacctcaagtgatccacccgcctcggcctacccaaagtgatgggattacaagcgtgagccaccgcgcccagccaaacccaaacattctaaaagcgcagagtaaccgctcccctccccgccaacggtaaccagcatcttcgttctccaaccagaacagctgtatgcaccggtgtataagcctgccttaagtgctatttttaatcttttttaaaaacaggccttaaaataactcatttgggtacaactccagcggctggtggagtgggcttaatatattaaacagctgttaattttggtttctttttggtaacagcgacacggagatccgcatttgtcgcagtttccaccgcgggcgggaagtgtaaacacaagaaatacaaacatagcgcaacggctaaaggagtgtcacagcgccaaaccttgctggctccgcgccaggccgagccccaccctctcagctcgcggccaacacccccaccccgcctcacagcccgccgcgcccgcggggcgacaccccccactccatcatcccggaggtggtgcggccgagccccggacccaattggcggaagcggggccggttgtgtgcgcgcgcacaaatgcccggatgcgccgcgacgacccgcgcgctcccctcgggcggtagggggcgcgcaccgaggcaccgcggcgagcttggctgcttctggggcctgtgtggccctgtgtgtcggaaagatggagcaagaagccgagcccgaggggcggccgcgacccctctgaccgagatcctgctgctttcgcagccaggagcaccgtccctccccggattagtgcgtacgagcgcccagtgccctggcccggagagtggaatgatccccgaggcccagggcgtcgtgcttccgcgcgccccgtgaaggaaactggggagtcttgagggacccccgactccaagcgcgaaaaccccggatggtgaggagcaggtactggcccggcagcgagcggtcacttttgggtctgggctctgacggtgtcccctctatcgctggttcccagcctctgcccgttcgcagcctttgtgcggttcgtggctgggggctcggggcgcggggcgcggggcatggggcacgtggctttgcggaggttttgttggactggggctaggcagtcgccgccagggaggagggcgggatttcggacggctctcgcggcggtgggggtgggggtggttcggaggtctccgcgggagttcagggtaaaggtcacgggggccgggggctgcggggccgcttcggcgcgggaggtccggatgatcgcaggtgcctgtcgggtcactagtgtgaacgctgcgcgtagtctgggcgggattgggccggttcagtgggcaggttgactcagcttttcctcttgagctggtcaagttcagacacgttccgaaactgcagtaaaaggagttaagtcctgacttgtctccagctggggctatttaaaccatgcattttcccagctgtgttcagtggcgattggagggtagacctgtgggcacggacgcacgccactttttctctgctgatccaggtaagcaccgacttgcttgtagctttagttttaactgttgtttatgttctttatatatgatgtattttccacagatgtttcatgatttccagttttcatcgtgtcttttttttccttgtaggcaaatgtgcaataccaacatgtctgtacctactgatggtgctgtaaccacctcacagattccagcttcggaacaagagaccctggttagtatttttgtctcgtgtaacttttaagaataatttattttatgaagtgataaactaaatttcgtatacctcaattgtagcatggctctgtaaataaaattgtatgtgcatagcttaaagtgtgctacctctggcgtaactgcgtggagttaaaaactgttaagaactggtcagtatttttttagccatttgccacatttgctttaaaaattagttccattacattgttaagcgtggttgaagttacgtttgttacgtgactgatttttttttcctttttgacctcccagtatttaatttttaaaaatggtttctaaaagtcaaaaaagttattcgtgcttgttttaaagatttttgtcattagagaaattttaaagtaaaacctgaaaattccaggctttttgctccatgtttccttttagattttttgtgtgcgtacccacatatatttacatttgaatttaaatctatgttattgtcctgtttgttgtactaacaagatgaaactgtagttgttctgtgacttgcatccttgtcaataaataaagtctacagaattctttttaatggctgcatagtattccacagcatgagtataccattttaaaaattatttatgcctttactgataggtttttaaaaattgcctcctgtttttgagtattacagatagtgccgctttgtacatgcatcccgtgtgactatttctgtaagaaagattttatagaattataggctggcctcggtggctcacccctgtaatcccatcactttgggaggccaaggcggaccgatcacctgagatgaggagttcaagactagcctggccaacatggtgaaaacctgtctctactaaaaatacaaaaattagtcgggcatggtggcgcgcgcctataatcccctgctgaggaggctggggcaggagaatcgc

SEQ ID NO: 3519 - DNA, 6000 bp, Homo sapiens
ccagcctgtgcccttctcagcactgggacccacggagaagccggtaggcctgtgtctttaccacagaacacaagcgggctcttcaacagggctctcttctgccttagtactaagctaaagggtatgacttgtcaggaggcaagttaatcctgttattgtccagacaacacccaaagtcctagagggttactgggccctaagagcctgagcagcccacgagtacacacacctttcggtcagaacttttgcagacaggcaatgagctcaacagtgtgccccaagtcctggtcacagccaatttgacggattacaaattctactgtgtattctcttgggaatgtgggtggaaatattcttaactgttcaaagggtgactttgtttttcttcttaacacctaaacttagggcatcgagattggtaaagtgccacctcccatcccgggtgtaggcaagcagctgcctccaagctatgggacatacccaagtcctacacctctgggtcctgggtcgacaagctccctggaaaggaggaaggaaggcagcttgcccaggcccagtgcaggcctgccaagtcgacagaggcccaccctgctgcccgccacaggcagcaccccccagccaggctcctcacaacagattcagcagaggatttccgtaccgccaagtcccacgtacccgccagcgggaccacctgcatttccagctggggacagcaagcctgaactcccactgacagtggccattaggcctttcctggctgataaagggtcaaggccacagtctcccaggaaaggaccccagacagtgaattcaagttccatatactccatgtacctccagcaagccacaccacctaagaattaccagccggcagcacacagcgccttaaataagtcagttaaagcaggtagagtgggtttatactctccttttcttggggctaggaaattatacttttaattaagaaaatactaatgtatttctttacgtttgggccacgtgctatttaggattaaacttaattcttacataaaagtacagccttgggtgtcagtgtgagaagggaatggaagctggaatgcatggaggaggctgttttgcagatggctcacagttctctgacttcctgtctgagcagccacctccgtgtgctacttaggaaatccagctccgggaagggtgagatgtcgagaatttcctcttttccttctgtttcgtggtaacttgtgccgggagctgtccagtgcgtagagggtggccttgaccactggccctcctggtagtggctgagcccgacccctgggcatgggcagtttaaggagggcgtctgctgcgtaggagcctcccccatagcccagaggggaggaaagccttggtttgggttatggagctcagatgttctaagaaggcagctgagagaaggtagcttagttccacacctaccacagaggctgatggtgtttccgactcttacgggaggaagccgcgggtcaggtctaggctagggccttcttagacattcctgggcattggctgcagcttctagactcacagttgagggattcctggacgtgcctagtcacttcctgcacagggacctcccaggtggtggtgcagtgttcccttgtggggagggttctggctgtggtgggaaaggcttagaccattctcaagagctcctggacctccaggtaaaaccttcctgctctgaggaggcgcgtgtgtctccgtcatgtgagttagtccaagaatcagatgcatgtttagtggtttttgtctttttccttggccagaaaacaggcaggcttgtctgcggcaggaaaagtcgggttagcaccctatttttttcttttgaaaaagctccagttctggaaacccaaatgtaaaaaccgacacattagagaggcactgcacctttcagaaggagtcagtggaggctctaagagggggaggtttcctcagagatttgaaatgagaattgaataacagcagcagatgtatatgtgtgtctttgcaggagcctgtctctggtgtaatcataggtgtgtatgactagatctctgtagtgaggtcaaaattgcctgtcctttgtgtcttccccagtgtatggtaagcccgttttaccttcgggttcaacctctccatcgccgctgccgtttcttcacgggtcactgtccacgggcacaccacagcctcagccaccttcagaaagtactgagaaagagcctgagcaggatggccccgccgcccccgcagatggcagcaccgtggagagcctgccacggccactcagccccaccaagctcacgcccatcgtgcattcgccactgcgctaccagagtgatgcagacctggaggccctccgcaggaagctggccaacgcgccccggcccctgaaaaagcgcagctccatcacagagcccgagggccccggcgggcccaacatccagaagctgctgtaccagcgcttcaacaccctggccggtggcatggagggcacccctttctaccagcccagcccctcccaggacttcatgggcaccttggccgatgtggacaatggaaacaccaatgccaatggaaacctggaagagctcccccctgcccagcccacagccccactccccgctgagcctgccccgtcatcagatgccaatgataatgagttaccttcccccgaaccagaggagctcatctgtccccaaaccacccaccaaactgccgagccggcagaggacaataacaacaacgtggccacggtccccaccacggagcagatcccgagtcctgtggctgaggccccatctccaggggaagagcaggtccctccagcacctcttccccctgccagccaccctcctgccacctccacggtgggtgtcattgctagaccaaagcctggccttcctggtcattcatgcaaccaggacctctggggtccttcccttggtcaggctgtgctgggagcagtgggaaccagggatgtccctgagttacgtcttgtagggaggacggacagtcacacagacaaatggggcatgaaaaggcatgacaaatggggctcggccacacaaatgcacaatgtggccaagcctttcccagacagctggtcagggagctccagaggctttcctgaggaaggggagctgtcgctggcacctgaaggtcctgtagagagacgagggaagaagcatctagacaaaggccctgggtgggaggtcagtgttgacggagcagagagggagccaggcgccatctcagggaaccctcagtgggattctctccactaggatctggtgccatagcaggaagaaccctgtcgcatgtgggcaggaacgagctgctggctcccatcagctacttggcagtcacacgccaccctccctcccacagagtcttccgaggagtggccagaagctcaaacacagccgtgtccctctgtgcgtgagccagggactcaggcctcagacagggctctcccttgtagtgagcagagtggccctggcccttatttgaggtggtcacctgggcgctgctactgctaccactccagggctgcttcgcggagccactgtctttgggctttagctcccaccactccttcccagcaggcgtgggttcttagacttcagtggaccacctttaactggaaagcgtgcttccttcccaacagaacaagcggaccaacttgaagaagcccaactcggagcggacggggcacgggctgagagtccggtttaaccccctggcactgctcctagacgcgtctctggaaggagagttcgatctggtgcagaggatcatctatgaggtgagctgcagccggggaccagtgcacgctgctgggggcgaggggatgggcgctcacaggccgtgtgtcctaggtggaagatcccagcaagcccaacgacgaagggatcaccccactgcacaacgccgtctgcgccggccaccatcacatcgtgaagttcctgctggattttggtgtcaacgtgaatgctgctgatagtgatggatggtgaggcccgtaggagtgtggggtggacagatttactttccctgctttgcataaggaaaacaggcgtgttctagacaattaggaagcacggaagagagaattagagcaagaacacccatcatttcatccttgaaagacagctgttgccagggtttccttgcctttttttccagccttttctcttgatgattttgttaaaaacgtggctgtggttatgctctttctgtgcctcgtcattaacattgcagtctaagcattctgtgaatcattccatcttccccttctcatatgttccgtatggactcttcacactctgtgctccgtgtgaaaagcagcctcagcatccccctgggtcaggcatgtaggttgtcgcattgttcattccgtttgccttcgggagctctgctgctgggcgaggcgtgttggtctcctgtgggggttattttgaactttcagacagctgacattgtgctgcatttgaatcgtggtaaaatacacataacataaaatttcacatcttagctatttttaaatgtgtgtttcagtgtgttatgtacattcacatcaccatgcagtgtggcgtgaacatctgtggattggccatttcttaacccattccctgtgcccccttttcaaaatgtatgtatggtctgaaacaattggctcatggaaatcctgcctttaaagaaacaacactgagacttgatggcacaaaggtgaacgccttccgcgagattccttagagggaaatctctgagggccacgtcctacaggacaggcagtgccaggcctgcaccttcacccacgctctattccaggacgccgctgcactgcgctgcctcttgtaacagcgttcacctctgcaaacagctggtggagagtggtgccgccatttttgcctcaaccataagcgacattgaaactgctgcagacaagtgtgaggagatggaggaaggctacatccagtgctcccagtttctatatggtacgcaggggaggcctggggccacagtggtgctgtctgctgtggtactgccatggcaacagtcagccggtgccagagaagcttcagcacagctttctgtttgttttttttaagacaggagacaaggtctcattctgtcacccaggctggagtgcaatgtcgcaatcatggctcactgcagcctcgacctcccgggctcaattgatcctcccacttcagcctcccaagtagctgggactacaggcttgtcccaccacagccagctaattttttgtactttttttttttttttgtagagacagtgtttcgccatgttgcccagggtggtctcgaacttctgggctccagcgatctgcccactttcagcctcctaaagtgctgggatcacaggtgtgagccaccgtgcctggcagcacagcattctcgagctgttccaccttcttcaggggcagccaggatgtctcactcgagtgaaggtcacactgccccttgttttcattcctgaaaacatgtttgaaagtccatgttgttagaaggattctgtgccagattcccaagaaaacaaaatgacttggctgtgctttgcatagatgttctgtacccttgcttctggaagcagggccagctcctttcctggggtggcctggggccctggccattccccggaaacatttgatgaatgaggctcatgtcctaattaagctgctttagccagggccgcattttccaagagctggaacatcttctctattctgagtattaaacagtcacaagtcatttattccacacattacttgagaacatactatgtgccctacactggactctaggtttgaaattatccatgaaaacagccatgtgatgccctctttggcccaagctcccacaacagagccaagcaacaaactctcaggctgtgtggcagggctaggggaggcacagcagcccccaggtgagtcccgccagtgtgaggaggaggctgccgtcacagtggcac

SEQ ID NO: 3520 - DNA, 6000 bp, Homo sapiens
ttctctagaggtgatagttgctaatggttccagtcttttccctaataaagacacaaaggtacagaactttaactgaaaatgggattgcaggaattacactagtctcactgctcaccttgtctttttctaactgcagcacgggtgtctttccaggtcgttacttcattctggttgcaccatctgaaagctattccctggtcccagggcctatacccctttaccaccctctgtagtcaggcagggagtcctgagtcttgctgctgctcacagtgcattggtgagcacatgtaccactgagccgcctgcatggaggaggggcgcctgcactctgtgtctttggccggatgtggcacttgactttctcgcacctgtggcactcagtgattaggggagcagtgcctgaatgcagagctgagtgcattctgccctcgtggtaggagaatggagcacccactctcctgacccaccagcaaggactcccttcccacatctcccttctgcatatagtttggtgacagaatagtgtcctcttgttagcctctactgctctgaaagatgctctgaggaggcagcatgggcttgaaggcctttgcctagggggagtgggtgtggagggtggtagacgtagaagggagcttccagttctgtggatgtcacagtctctcatttacaaatctgcccttcttttaaaaaaacaacacagtgagtttaaagatcagtagtttatttgtacaactttatgatttcagatgttggttttcctttttctcaagattaacaacaaagaggccatgtgagagagaggctgcaagcactttccctgtgcttacatatgctcctcagtaatggcgtagtagtcagggcttcctagagaaagagaaccagtagcgtgcgcgtgcacgtgtgtgtgtgtgtgtgtgtgtgtgtgtgtgtgtgtgtgtgtgtgtgtatgtgatttaaggaattggctcacatgattgtggacgttggcaagtccagaatctgtgagggcggccggcagcgtggaggcccagggaggatgttgcagctggagtccgaaggccaactctaggcaggatcccgctttctcagggcgtctctctgtttctcttaaggcattccactgattggatggggcccacccaccttctagagggtcatctgcttcactcaaatctaccaatttgaaagttaatctcttccagattggagactattattctaagtgaagtaactcaggaatggaaaaccaaacattgtatgttctcactcataagtgggagctaagctatgaggatgcaaaggcataacaatgacacagttgactttggggactcggggaaagggtgggaagggagtgagggataaaagactacaaattgtgtgcagtgtgcactgctagagtgcactaaatctcacaaatcaccactaaataacttactcatgtaaccaaacaccacctgtttcccaaaaacctatggaaattaaaaaaaaaaagttaatctcatctggaaaataccttttcagcaacatgtcgtctggtatttggccaaatatctggttactgtgacctagtcaaggtgatgtgtaaagttatccatcacaaacagctagattcattccacctacacttcaagggatcgccttgaagaagtcagtatttttgcagagatgcgtctccacccaaaggtcctaggtacctttgagcaattgtgaaagccataacccctcaccccgaaatgacctgtcctcatgcatatagaatcttacaatcacaggggttatggatcctatttagagcctatattgaaatcttgaggacgtcagtagttctctagaatccctgttccaggcgcctctgttcctgagcagtgttatgtgaacagtgtcctctgtctgtggctctgtgtcctggctgagaaaggcagcgctgccttcagggaactgggcccattgctgggagtcagagccttacgtgctcactgtgccccacgtggcttagacagtaccggctacagcccttatcccgactccacgggtgtgagcacagaggctgagtcacctgcccgaagcagcacagcgagtaagtcacagaggggatttgaagccaggctcagagcccaggatttgaccagtgtctctgtgcccactcaagggaggaagagtatcctgagtaagagggaagctgcatgtggatcacggggaagttgctctgccctcacatcagctcctcatgtgtacagctccagatgggtgggtgttgtcggagaattgctcataggaagctacagttccttctccacagtctccccttctagatgctgatctttccagatgacaggcttcctaaaaaccaaccactgagtgagtgctttctgtccgagctggcagtctcttgcactaagcttaggacttctttgaatgtaggagaatcttgactctcatttcttcccaatttgtagctgaaccgtgtgaatggcacgtcatcaccacagtcccctctgagcacatcgggcagggtcgctgctgtggggccttatatccaggttcccagtgccggaagctttcctgtgctgggggaccctataaagccccagtctctcagtattgcctcaaatgctgctcatggaagatccaaatccggtgagtggtcctggccctcttcctgggggagagtttgtgagcagggaatggggcctgcggtggaggggcggggggtggggcaggctcctgaggctctgccccacacatcgtcagactccaggctcagtctccccgtgaggcgcttggagagctgtgttcccctgtggtaacaatcctaaaaggaaaacaagttatttttactgaactagaggtctctactgtgtggcttttcaaaacacaaatgattaattaaaactctgatccatgggccgggtgcagtggctcacgcctgtaatcccagcactttgggaggccaaggcgggtggatcacctgaggtcaggagttcaagaccagcctggccaacatggtgaaaccctgtctttactaaaactacgaaaattagccgggcgtggtggcgtgcacctgtaatcccagctactcaggaggctgaagcgggagaatcacttgaacctgggaggcggaggttgcagtgagatcgtgccactgtgcttcagcctgggcaacaagagtgaaacttcatctcaaaaaaaacaaaacaaaacaaaacaaaaaaaactgacccacgagtgtcctctcttactgcaggtttatttactctgaggacactgaggcccggcatggatgcctcaccacaactcggctacagccagccaagtggaggggctgcccctacaaacagcgctctgtcctcattgatcaaagtccacacatcgttggtttggtcttgacctcacaatggtgctgtgtgatggacttggacctctagtgtagtccatgggtggtgcccctgccaagcagagggcaagctgttcatggagagtctgtttctcaaccagtgcattaaaagtgttggggcttccttgcaataagactttctttatgactgaggttgacacatttccctgaaacacacagcatcaggaatccctgtcctgatgtattgaaacattccttcgtttatgaaaacagtactgttactctctggccatcaggcctgtgtttcgagcccctttttcgggattgtggtggatttgtgctcatctttgtttgcttcattttctcttgcctggcccccaggagggacagcgacacatctgttgcccccactggggagcttgggtcttgttatgaactccgaaagagaagagcatcaccagcacttgtgagccacaagcccccactcagatcccttacggccgtgtctcagcagccacataaagtgtggggttggcatgaacccctaactgcaggttgctctgctaagctgttatttatagtttgaaccaccctgtggtaggagtagatatttgtctgtttccagtgggaggtaattagcacagccagctacttctctgctgacttcctttgagaaactccccaaggtgagaaatgtctcctgtgtcccgtccttgttggtgtctgctgtgctgcctcaaggggttgcagcaaggagatgccttcacgaagccctggtcctagcctctgctgtggatgaaagtcatggacacggggaacctgtgctcaccttcagagtcggggcagcagctcagcccagaggtggagctgggctgtgaagcctcctggcagggactctaatcccttgctgttggctgtcctggttctgtgtcacacagatggccacagtaaacccagagtgaccagctcatggacagtgtcagacctcgacgtcgggcctaattatggctcctcgcggccctctgcaagcccatttgtaaaccgtatgttggctgacaagcttagtgggaagctgcgtcctctttaatatgtacaaaatcacctgtcacttgtttttccaaactgacaaaggtctgctcatcacatctagatttgaaaaagatgccacacaaacgtaatttgtccctttcttcaacagacaggtatggagtctgggtggggccacgtgtaccctcccatccttagaaagagtgtgacaccaagggacagatgctggcgtagcgcgggttttgttttggagggttttttgtttgtttttacaaaattaagatatttctgagtttattatgaggcttttagttttacaatcatactaaaagataattgttcctctataaaatgattttccttctgtacctcttgccttcttctgaagaaaggagaaaattgctttttagtccccactatggctgatttccataaaacttcctgttgttgctgggtggtttctgaagcacctggacagccacattccctgtgaccctgagaccacaggccctgtccttggggaggctgcaggtttctggccacacatcctccaggccacgtggagcaagatggcagttggtccaggggccttggaatgcctcgccaggacccacggggcttgactagagctgtctcagaagccgctgcctggagcctgcatcataacttcacagcccagcagtgtatgcagctggggttgcggtgcggctgcatcgggtcagtttggcttaggagcaagccgtgtgaggctgcggctgatgggccctgtgttgcccaggcgctcagagcgcagccgggaagcttcctcgtcatgtgctatgagtccggagttctggctcagacgttgttgtgaggaccactgattttcctgctgctacttagttatcccctcctgcctgtgctggcagatgggataagggaaggggatgtgctgttcctgccaggagggcctaaaagagtccctctgatttctgtctgtcccatattgctgatggcgctggaagcgttgaacactttagttcagttcagcacctgttcctgtaaaagagaaccaggagcctgtgttataatggactttcggccactgtgaggggccttgtgttacaaggggatacttctgcaccctttttcagtttggaaaatactctgtaaagaacctgtcatttcagtggctttcctgaaaacttggggttgatgaccagctttctaatcactgcaacagaatgatagcctgctcctcctgctacgcaaatcagtgggaacctgcacgggcctcctgtgatcataagttaccttagagggcagaaatttttatctcaataattaaagtactacaggtcaaacctattatgaagtcaaaagataaatcttttttattgctctatgtaattgtattcataaatagtgtttcaaaagtaagggccagtgcttattttgtttggtggtgctgatgcaatggatttgacctgtgttaaaatagggtgcagccccaggcccacaccagtggagccttggtttggcgtgagtctctggtaacacttgaggcgatttgggcgttggcagtgagctgccagcagagcccgtcccttggt

SEQ ID NO: 3521 - DNA, 6000 bp, Homo sapiens
tgttccctggattcttccagaatgtatttatgccaatatgaatatatactaatgtcctccctaaagggactttttatctgttttaagagtatttaatcatttttaatttttttaaattaaaatagagatgggggggggtcttgctatgttgcccaggttggtctcgaactcctgggctcaagcaatcctcctgtcttggcctcccaaaatgctgggattacaggcatgagccaccatgctcagccttttatttttttattttgagacagagtcttgctgtcaccaaggctggggtgcagtggggcaaactcaactactgcaacctccgcctccagggttcaagagattctcctgcctcagcgtcccgataagctggaattagaggcgcccaccatcatgctcagataacttttttttttttttgatacagagtcttactccgttgcccagactggagtgcagtggcgcgatctcagctcactgcaacctctgcctcccgggttcaagcaattctcctgcctcagcctcccgagtagctgggattataggcgtgtgccaccacgcctggctaactttgtattttactagagactggttggtcaggctggtctcgaactcctgacctcaagcaatctgcctgcctcagcctcccaaagtgctgggattacaggcgtgagccactgcacctggcctaatttttgtattttcggtacagacagggtttcagcatgttggctaggctgatctcaaactccttacctcaggtgatccgcccgccttggcctcccaagtgctgggatcacaggcttaagccaccatgcccagccatgcccagcctttaatctacagcctttaatctttatttttttttttcctgaggcagggtctatgttgcccaggctagagtgcagtggcgtgatcttggctcactgcagcttccatctcccgggctcaagtgaacctgttgcctcagcctcctgaggagccgggactacaagtgagcaccaccatgccttgcttttatttatttatttatttatttatttattttgagatggagtcttgctctgtctcccaggctggagtgcagtgccgcaatctcggctcactgcaacctctgcctcctgggttaagtgattctccagcctcagcctcccgagtagctgggattacaggcgtatgccaccacgcctagttaattttgtattttagtagagacggggtttcaccgtgttggcaaggttggtcttgaactcttgacctcaagtgatccacccaccttggcctcccaaagtgctgggatttcaagcagagccaccgtgcccagcccctttaatcatttttttttttttgagacggagtctcactctgttgccgggctggagtgcagtggcacaatctcggctcactgcaatctctgcctgccgggttcaagtgattctcctgcctcagcctcccaagtagttgggactacaggcactcgccaccacggccggttaatttttgtatttttagtagagacagggtttcaccatgttggccaggatggtcttgatctcttgacctcgtgatccacccgcctcggcctcccaaagtgctgggagtacaggtgtgagccaccgcgcccggcccctttaatcatttttaacataaaatatttcaaacatagagtataaagtacaatgcaccccaacatacccaccatccaggttcaaatgttatcaagaatttgccacgtatgtttcagttattcctaattgcttggctctctttccctctggctgaattgtttttaaacaaattgcagaccccttacatatgctaggatgcatctctaaaaaatatggacatcttcttccgtaaccttaatgcctatatcccatcattactggtgattcctttttttttttttttttttttagagatggggggatctcattgtgttgaccaggccggtctcgaactcctggcctggcctcaagcaatcctcccatcttggccccccaaagtggtagaattacaggcgtgagccactgcacattaacaacattcacggcgattcctgatgggctgctcgtgaactttggtctgtgtaatggagagacacagaagggctttacagggttgggccgtgtgtgctccaggaagatggagggcaggggcgtgttgggaatggtgggggcgtggaggctagagcagtgggcttataatgaatgagcttggtccaggtgggaggtgatgggccgatgcctggaggtggcaggctgggtggagaggaggatggggaccagcgggaaggacttgagggggagctgaccagcctgcctcaaatggacccttacctggaggatataggatgctttggtgtgaggcacggtagctgccactgtctgtgcccacaggtcctgcaggcaagaggggagcccttgtgccaatgcttcccttcctggaagagcaggctcatttggatcaccttaccccggggggcacctctctgaagagccttggcaaaacctgtcctttgtcaggcttcgtgggccagaagtaccccttcgtgactcagggacatcagctgtcaaagctggggaaaccaaggcccagagaaggagtgcaagttgcctaaggccccacaggaggtcagaagcagagcagctagaattagaacttaagtatgtctctgactttcagcctaggatcactcattatctagagcctcctcttctctccaaactctgctcccagaagaggggtgtcattagccattcatgcccaggtgtggataggtttaaaaatcccagggacgtctgtacactaagcctccttgctaatcacggcccaactacagaatgctatttatggaacagctaccacgtgccacaaattgtgctgggcgctttccatccctcgcatccgaaaaagcctcttgacacgaggcaggcactattatccctacactctcccatcacagagacaagcacactacgatgcagagaagatgcggcttgtttaggatcccaggcgagggtgtggcggaggcggtgctgaaccaagtctgtctaactggaaagtccacactcgcaaacacgagcccccgtggcctctgagggacaggggtggctccccaggaatgggctggtgggagctccctggcctcctcccttgctctgcccccactctgcagcagccagaagcctctccgagaaccagacaggctccagactgaccctgacctcgcggcggccttctccactgggccggcgcttcccagggcggcttacgccttctgtgtctggggccatccgcagaccttgccttctgatgcccgtgggagttcggtgctgccgcggggagcacctcagtccccctgtctgctctccgccgcggtccgggcgaatggcaccatgtggggggccccgagcgggtgcctacccccctggcagcctttactgagggtctgctcagggccctgcccagggctctgtcactccggcgctcaggcccgagggggcggcgcctctggagacgggactgcagggagagacccaggccctggagacgaggaccggaccctccccggggacgctggagctggacctcgagggatgctggcgcaggtgggcacaggtggcacaggtgggcgcggggttctaggcgggagatcgctcgggcgaaggccaaggctcgggagctggtgcggggggcgcggccccgagagccgcggaagacgccggtgggggagaagcaggtgccagccaagggcgtcgggccggggctggttccgagcgcgcggcctcgggtcacatgctcgctccgggggccccccgcgcccctcccactggcctctgggccgcagccccacggcgcgccggcagccgggggtcaggccgcggtcagagtgcgggcgcgcgccgtcgccgcagggacgctcccggcccacagtcggcccccgggagcccgggttcgagtcccggccctgccgtgatccgctgcgggacccgggccggcccttccctgtcgggcctcagtcctcccaccgtccgcggtcttccctagtcggggctcacgcaagggcgggggaggccaccggtgcccactgcgcgtccgcccctcccccgccgccgggagcgcggacgcgcacgcacctggccgccgctgagagcgagggtagcgggcggagccgggaagccccgcccctctccccgcccccgctcccaccgggccaatcagagggggctacgggacccgtgcggggcgtcgcgctgggggcggggcctgcgggggctgaagagcgagccgggcgggcgggccgcaggctgtcgggctggggctgaggctgaggctgaggttgaggcggcggcggcggcggccgggtgcccgggacagcgacgcagcgcgccggcggccgcgacagggccagcgagagccccgcagcccgccgcagctgccgcctcgccgcggccgggccggagagcacggcggcgggagcgcggccttaggaggcggccggagcggtgggcacagctcggcgcggagcgtcctgtcaggcggcggccgagggcgtcgcggactctccccgcgatgatgccggtgggtgagggcgggcgggaggtggcggcggcttcctccgcgggccgctggccaaacctccttcctcccgcggctcccagcccccgcgggccggtgcgaggccgggcgggcggggaaggaagtggctgggcgggcgcgcccggccgcggcgccccccaggcgggcaggtgggggcggcgccgggctgtcagcgcggggccggggccgcctgcgggcccttcctgctcggcctccgcggccgcggggagaagcagatgcatttggggccggtcatctcctcggtcctctcaggtgcgcggtcggacgctggggcacaggtctggtgggtggcgcagctgtgacccgcctgaaacgaacgttctggggtcgccctgggagtcggcggggtgggcacccgcgcccggagttcccacactctgcaggcgcattcccgtagccttcgcggttgtactgaggaaaggtgccgagtgcacggatttggagagccatcttaggaattcccttttcccgtatctgcaatgttggttcgttttgctttaactggtttgttctccgtgttctgaaggttgaacgaggttcgtttgtagtggtggtgtctttgtcctgcccttaaggatgctttcgcctagaaagacattggccattagatttgccatcgtcctaccgacccttccctttacctataatctgaataggaggggatgctgaattctgatttttaaaaattggctttttgggaggtaagcatcatgacttatgaaaaaatgtgggactggttgtacccagttggagaggtattggttttctgagcgcctatatcgtaagtaaaattctcaaacacgtttatagtaaagtaacacagtcatttttttaacctacaatactacgttgaaaatcacatttcacaggaaagtgcagtttccctgcattctctacttgaatattgccattctgctatgctgcacccaaggacatttagattagatcccccttcttcctctttgatttcctttctcttgataatctcttctccccgtttttaacggattccagcatgttttgtagccggctttcagcgttttccaagtcttaaggtttgatctacttgatccttaggtctttctttagcatcagacttgttgggtttctaaacatttggttttaaatgaataattgtcttgtaatggaaagagaattggatgagcatcagaagatctggggtgaaacgctggttcttccactttttagctatgtgaccttgaagaagtcaaggtctttgagcctggaattacctctaaagtagggataaaaatgtaccaatatctgagcgctgtcctgaggatcaaataggatgatgtatccaaaagtgatggttgaacagaatgtcatacaaatatttattattcttaatat

SEQ ID NO: 3522 - DNA, 6000 bp, Homo sapiens
cgccattgcactccagtctgggcagtgagaacaaaattctgtctcaaaaaaaaaaaaacaaaaaaacaaaacaacaacaacaaaaaaaaaaaacaaggaaagccgagactgtcacagccaagaggagtctaaggagacaaggagacatgacgactgaacgccacgtgatgtcctgaaacaaaggcactggctaaaaactaaggaaatctgggaaaagtatggacccgagttgatactaacgtatagataatggttcatttgttgtaacagatgtactgtactgatgtaagatgttaaaaaatggggaaaactggatggagaaaggggtatctgggaactctctgtatttcaaactctttgcaatttttctataaaactgttctaaaaataaagtttatttttcaaaaactaatagtgaaaagcctcactctgatttctgccccttatcaacccagttcccattcccacgtgcagtcatcactttattagtgttccctggattcttccagaatgtatttatgccaatatgaatatatactaatgtcctccctaaagggactttttatctgttttaagagtatttaatcatttttaatttttttaaattaaaatagagatgggggggggtcttgctatgttgcccaggttggtctcgaactcctgggctcaagcaatcctcctgtcttggcctcccaaaatgctgggattacaggcatgagccaccatgctcagccttttatttttttattttgagacagagtcttgctgtcaccaaggctggggtgcagtggggcaaactcaactactgcaacctccgcctccagggttcaagagattctcctgcctcagcgtcccgataagctggaattagaggcgcccaccatcatgctcagataacttttttttttttttgatacagagtcttactccgttgcccagactggagtgcagtggcgcgatctcagctcactgcaacctctgcctcccgggttcaagcaattctcctgcctcagcctcccgagtagctgggattataggcgtgtgccaccacgcctggctaactttgtattttactagagactggttggtcaggctggtctcgaactcctgacctcaagcaatctgcctgcctcagcctcccaaagtgctgggattacaggcgtgagccactgcacctggcctaatttttgtattttcggtacagacagggtttcagcatgttggctaggctgatctcaaactccttacctcaggtgatccgcccgccttggcctcccaagtgctgggatcacaggcttaagccaccatgcccagccatgcccagcctttaatctacagcctttaatctttatttttttttttcctgaggcagggtctatgttgcccaggctagagtgcagtggcgtgatcttggctcactgcagcttccatctcccgggctcaagtgaacctgttgcctcagcctcctgaggagccgggactacaagtgagcaccaccatgccttgcttttatttatttatttatttatttatttattttgagatggagtcttgctctgtctcccaggctggagtgcagtgccgcaatctcggctcactgcaacctctgcctcctgggttaagtgattctccagcctcagcctcccgagtagctgggattacaggcgtatgccaccacgcctagttaattttgtattttagtagagacggggtttcaccgtgttggcaaggttggtcttgaactcttgacctcaagtgatccacccaccttggcctcccaaagtgctgggatttcaagcagagccaccgtgcccagcccctttaatcatttttttttttttgagacggagtctcactctgttgccgggctggagtgcagtggcacaatctcggctcactgcaatctctgcctgccgggttcaagtgattctcctgcctcagcctcccaagtagttgggactacaggcactcgccaccacggccggttaatttttgtatttttagtagagacagggtttcaccatgttggccaggatggtcttgatctcttgacctcgtgatccacccgcctcggcctcccaaagtgctgggagtacaggtgtgagccaccgcgcccggcccctttaatcatttttaacataaaatatttcaaacatagagtataaagtacaatgcaccccaacatacccaccatccaggttcaaatgttatcaagaatttgccacgtatgtttcagttattcctaattgcttggctctctttccctctggctgaattgtttttaaacaaattgcagaccccttacatatgctaggatgcatctctaaaaaatatggacatcttcttccgtaaccttaatgcctatatcccatcattactggtgattcctttttttttttttttttttttagagatggggggatctcattgtgttgaccaggccggtctcgaactcctggcctggcctcaagcaatcctcccatcttggccccccaaagtggtagaattacaggcgtgagccactgcacattaacaacattcacggcgattcctgatgggctgctcgtgaactttggtctgtgtaatggagagacacagaagggctttacagggttgggccgtgtgtgctccaggaagatggagggcaggggcgtgttgggaatggtgggggcgtggaggctagagcagtgggcttataatgaatgagcttggtccaggtgggaggtgatgggccgatgcctggaggtggcaggctgggtggagaggaggatggggaccagcgggaaggacttgagggggagctgaccagcctgcctcaaatggacccttacctggaggatataggatgctttggtgtgaggcacggtagctgccactgtctgtgcccacaggtcctgcaggcaagaggggagcccttgtgccaatgcttcccttcctggaagagcaggctcatttggatcaccttaccccggggggcacctctctgaagagccttggcaaaacctgtcctttgtcaggcttcgtgggccagaagtaccccttcgtgactcagggacatcagctgtcaaagctggggaaaccaaggcccagagaaggagtgcaagttgcctaaggccccacaggaggtcagaagcagagcagctagaattagaacttaagtatgtctctgactttcagcctaggatcactcattatctagagcctcctcttctctccaaactctgctcccagaagaggggtgtcattagccattcatgcccaggtgtggataggtttaaaaatcccagggacgtctgtacactaagcctccttgctaatcacggcccaactacagaatgctatttatggaacagctaccacgtgccacaaattgtgctgggcgctttccatccctcgcatccgaaaaagcctcttgacacgaggcaggcactattatccctacactctcccatcacagagacaagcacactacgatgcagagaagatgcggcttgtttaggatcccaggcgagggtgtggcggaggcggtgctgaaccaagtctgtctaactggaaagtccacactcgcaaacacgagcccccgtggcctctgagggacaggggtggctccccaggaatgggctggtgggagctccctggcctcctcccttgctctgcccccactctgcagcagccagaagcctctccgagaaccagacaggctccagactgaccctgacctcgcggcggccttctccactgggccggcgcttcccagggcggcttacgccttctgtgtctggggccatccgcagaccttgccttctgatgcccgtgggagttcggtgctgccgcggggagcacctcagtccccctgtctgctctccgccgcggtccgggcgaatggcaccatgtggggggccccgagcgggtgcctacccccctggcagcctttactgagggtctgctcagggccctgcccagggctctgtcactccggcgctcaggcccgagggggcggcgcctctggagacgggactgcagggagagacccaggccctggagacgaggaccggaccctccccggggacgctggagctggacctcgagggatgctggcgcaggtgggcacaggtggcacaggtgggcgcggggttctaggcgggagatcgctcgggcgaaggccaaggctcgggagctggtgcggggggcgcggccccgagagccgcggaagacgccggtgggggagaagcaggtgccagccaagggcgtcgggccggggctggttccgagcgcgcggcctcgggtcacatgctcgctccgggggccccccgcgcccctcccactggcctctgggccgcagccccacggcgcgccggcagccgggggtcaggccgcggtcagagtgcgggcgcgcgccgtcgccgcagggacgctcccggcccacagtcggcccccgggagcccgggttcgagtcccggccctgccgtgatccgctgcgggacccgggccggcccttccctgtcgggcctcagtcctcccaccgtccgcggtcttccctagtcggggctcacgcaagggcgggggaggccaccggtgcccactgcgcgtccgcccctcccccgccgccgggagcgcggacgcgcacgcacctggccgccgctgagagcgagggtagcgggcggagccgggaagccccgcccctctccccgcccccgctcccaccgggccaatcagagggggctacgggacccgtgcggggcgtcgcgctgggggcggggcctgcgggggctgaagagcgagccgggcgggcgggccgcaggctgtcgggctggggctgaggctgaggctgaggttgaggcggcggcggcggcggccgggtgcccgggacagcgacgcagcgcgccggcggccgcgacagggccagcgagagccccgcagcccgccgcagctgccgcctcgccgcggccgggccggagagcacggcggcgggagcgcggccttaggaggcggccggagcggtgggcacagctcggcgcggagcgtcctgtcaggcggcggccgagggcgtcgcggactctccccgcgatgatgccggtgggtgagggcgggcgggaggtggcggcggcttcctccgcgggccgctggccaaacctccttcctcccgcggctcccagcccccgcgggccggtgcgaggccgggcgggcggggaaggaagtggctgggcgggcgcgcccggccgcggcgccccccaggcgggcaggtgggggcggcgccgggctgtcagcgcggggccggggccgcctgcgggcccttcctgctcggcctccgcggccgcggggagaagcagatgcatttggggccggtcatctcctcggtcctctcaggtgcgcggtcggacgctggggcacaggtctggtgggtggcgcagctgtgacccgcctgaaacgaacgttctggggtcgccctgggagtcggcggggtgggcacccgcgcccggagttcccacactctgcaggcgcattcccgtagccttcgcggttgtactgaggaaaggtgccgagtgcacggatttggagagccatcttaggaattcccttttcccgtatctgcaatgttggttcgttttgctttaactggtttgttctccgtgttctgaaggttgaacgaggttcgtttgtagtggtggtgtctttgtcctgcccttaaggatgctttcgcctagaaagacattggccattagatttgccatcgtcctaccgacccttccctttacctataatctgaataggaggggatgctgaattctgatttttaaaaattggctttttgggaggtaagcatcatgacttatgaaaaaatgtgggactggttgtacccagttggagaggtattggttttctgagcgcctatatcgtaagtaaaattctcaaacacgtttatagtaaagtaacacagtcatttttttaacctacaatactacgttgaaaatcacatttcacaggaaagtgcagtttccc

SEQ ID NO: 3523 - DNA, 6000 bp, Homo sapiens
atcccaccactttgggaggctgaggcaggtggatcacctgaggtcaggagttcaagaccagcctggccaaacatggggaaattccacctctactaaacatgctaaaattagccaggcatggtggcatgcccctgtaatcccagctccttgggaggctatggtgggagaattgcttgaacccgggaggcggaggttgcagtgagccaagatcgcgccactgcactccagcctgggcaacagagtgagatcttgtctgaaaacaaacaaaaaaagtatcttaagcaacattccccacatatatctcatctatgcacgaaaagttttactagctacaaaacgtccacactctttcaaaaagaaacgatgctgagctaggtgcggtggctcacgcctgtaatcccagcactttgggaagttgaggtgggcagataactggaggccaggagttcgagaccagcctggccaacatggtgaaaccctgtctctaccaaaaatttgaaaaaattagccaggcatggtggtgtgcacatgtagtcccagctactgtggaggctggggcacgagaatcacttgaatccaggaggcagaggttgcagtgagctgagatcctgccactgcactctagcctgggtgacagagcgagactctgtctcaaaaaaaaaaataaatcatgctgaatcaaggcagttttcatcctttctataatctaaattgggctttccatttttactaaaattcttacttctatcaaacttgtaaatgctttcagggccagatcttagggactaaacaaaaagtattatttaaatggtaccattttttcctgggaaaacatttttaaaatgtcatccattgataaaaaggtgagtgactaccaataacaacaacaaaaaaatactattttcataagggaaaattccaaaatataatttagtttagaagtggaaaggacggcagagcgcagtggcatacgcctgttatcccagcacgttgggaggctgaggcaggcagatcacaaggtcaagagatcaagacaatcctggccaacgtggtgaaaccccatctctactaaaaatacaaaaattagctgggcgtggcggcgcacgcctgtagtctgagctacttggtaggctgaggcagaagaatcacttgaacccaggaggcagaggttgcagtgagccgaggtcatgccactgcactccagcgtggcgacagagcaagactccgtctcaaaaaaaaaaaaaaagtggaaaggccaggtgcaggggcagaggggtggctcacacctgtaatcccagcactttgggaggctggggcgggcagatcactcaagctcagaaattcgagaccagcttgagcaacaaggtgaaaccccgtctctactaaaaatacaaaaattagccgtttgccgtggcgtgtgtctgtggtcccagctactcgggaggctgtggcatgagaatcacttgagcctaggaggcggaggtcgccgtaagctgagatcgtatcattgcactccagccttggcaacaggagtgaaaccctgtctcgaaaaataaaaaaaaaaagaaggtggaaagtcacagcactttgtacgacagcaaatagaagacttctacagagatttgattgtgtcagatgagaatttggccactcactctcatttattctcaacagctgagagactgggcactgtagtacaccatgtgattaattaaaagttaccacatggccgggcgcagtggctcatgcctgtaatcccagcactttaggaggccaaggtgggcagatcacctgaggtcatgagttcaaggtcagcctgcccaacatagtgaaaccctgtttctacaaaaatacaaaaattagccaggcaggatggagggtgcctgtaatcccagctactcaggaggctggggcaggagaatctctcgaacctgggaggtggaggttgcggtgagtcaagatcatgttgcactccagcctgggcaacagagtgagactctgtcacaaaaaaagaaaaaaagaaaaaagttaccacgacattatatactaattgccaattttcaaataaaataaaatatactctaagcctatgttgtccaatatggtagtcactaagcacatgtagctactgagcactggaaatgtgctagtctgagctgaggtgtgtgctgtaaaatgcaaactgtcaccggattcacaccagatttcagacacttagtaccagaaaaaatgtataatatctcattagtggttttttcatattgaatacgtgttaaaataatattttggatatgctaagttaataaaaggatactactaaaattagtactttttcaacttgtttcatgtagttaccacaaaatttaaaattgcatttgtggcttgctttacatttttattggacagtactgctctacacaaactgcaaaatatgacccaacgttcctttgattcatcatcatcatgatgaataccaaatatacaataaatcgagaaaaatcttatttacatttttggatagtttaaaatattaccaagtaagaatggcatttctgaaaactcctactaaatttacaaccaactccaactgtgttaatagaggaaggactcagtcctacaagtagtatttttagggatcaaaaaggaaatacaaaagtaaaagccatacatgagagtctaagagaaataccatctgtttctaaaaggcatttttaaacaaaagcggtgttttaaacaggtaatagacctgtttttttaaaaaacagtattttattgttttgagaaatccgaagaaatgccccaattcccagctaaacaaacctcttaaaaaggaaacctgtgaaggtaggaactcaaaactctactcccgtggaatagaggtaagatgtctgaatgaatcatatggaaaatgtaagccaagtttcttagcaggatatttataattaaacattatacaacgacgaagccagccaaaatttttctagatatccttcaatgccaccacagtatgaatgcatcaatcaactattacaggatttaactaaaactactttcaaaattctgaaacaccataatgcctttcatcaaaatctagctagtgagaattagggagggaagtttccaaatgccttatcttataaagttagaaattgaaaattcaaagccatattaagaataataaatatttgtatgacattctgttcaaccatcacttttggatacatcatcctatttgatcctcaggacagcgctcagatattggtacatttttatccctactttagaggtaattccaggctcaaagaccttgacttcttcaaggtcacatagctaaaaagtggaagaaccagcgtttcaccccagatcttctgatgctcatccaattctctttccattacaagacaattattcatttaaaaccaaatgtttagaaacccaacaagtctgatgctaaagaaagacctaaggatcaagtagatcaaaccttaagacttggaaaacgctgaaagccggctacaaaacatgctggaatccgttaaaaacggggagaagagattatcaagagaaaggaaatcaaagaggaagaagggggatctaatctaaatgtccttgggtgcagcatagcagaatggcaatattcaagtagagaatgcagggaaactgcactttcctgtgaaatgtgattttcaacgtagtattgtaggttaaaaaaatgactgtgttactttactataaacgtgtttgagaattttacttacgatataggcgctcagaaaaccaatacctctccaactgggtacaaccagtcccacattttttcataagtcatgatgcttacctcccaaaaagccaatttttaaaaatcagaattcagcatcccctcctattcagattataggtaaagggaagggtcggtaggacgatggcaaatctaatggccaatgtctttctaggcgaaagcatccttaagggcaggacaaagacaccaccactacaaacgaacctcgttcaaccttcagaacacggagaacaaaccagttaaagcaaaacgaaccaacattgcagatacgggaaaagggaattcctaagatggctctccaaatccgtgcactcggcacctttcctcagtacaaccgcgaaggctacgggaatgcgcctgcagagtgtgggaactccgggcgcgggtgcccaccccgccgactcccagggcgaccccagaacgttcgtttcaggcgggtcacagctgcgccacccaccagacctgtgccccagcgtccgaccgcgcacctgagaggaccgaggagatgaccggccccaaatgcatctgcttctccccgcggccgcggaggccgagcaggaagggcccgcaggcggccccggccccgcgctgacagcccggcgccgcccccacctgcccgcctggggggcgccgcggccgggcgcgcccgcccagccacttccttccccgcccgcccggcctcgcaccggcccgcgggggctgggagccgcgggaggaaggaggtttggccagcggcccgcggaggaagccgccgccacctcccgcccgccctcacccaccggcatcatcgcggggagagtccgcgacgccctcggccgccgcctgacaggacgctccgcgccgagctgtgcccaccgctccggccgcctcctaaggccgcgctcccgccgccgtgctctccggcccggccgcggcgaggcggcagctgcggcgggctgcggggctctcgctggccctgtcgcggccgccggcgcgctgcgtcgctgtcccgggcacccggccgccgccgccgccgcctcaacctcagcctcagcctcagccccagcccgacagcctgcggcccgcccgcccggctcgctcttcagcccccgcaggccccgcccccagcgcgacgccccgcacgggtcccgtagccccctctgattggcccggtgggagcgggggcggggagaggggcggggcttcccggctccgcccgctaccctcgctctcagcggcggccaggtgcgtgcgcgtccgcgctcccggcggcgggggaggggcggacgcgcagtgggcaccggtggcctcccccgcccttgcgtgagccccgactagggaagaccgcggacggtgggaggactgaggcccgacagggaagggccggcccgggtcccgcagcggatcacggcagggccgggactcgaacccgggctcccgggggccgactgtgggccgggagcgtccctgcggcgacggcgcgcgcccgcactctgaccgcggcctgacccccggctgccggcgcgccgtggggctgcggcccagaggccagtgggaggggcgcggggggcccccggagcgagcatgtgacccgaggccgcgcgctcggaaccagccccggcccgacgcccttggctggcacctgcttctcccccaccggcgtcttccgcggctctcggggccgcgccccccgcaccagctcccgagccttggccttcgcccgagcgatctcccgcctagaaccccgcgcccacctgtgccacctgtgcccacctgcgccagcatccctcgaggtccagctccagcgtccccggggagggtccggtcctcgtctccagggcctgggtctctccctgcagtcccgtctccagaggcgccgccccctcgggcctgagcgccggagtgacagagccctgggcagggccctgagcagaccctcagtaaaggctgccaggggggtaggcacccgctcggggccccccacatggtgccattcgcccggaccgcggcggagagcagacagggggactgaggtgctccccgcggcagcaccgaactcccacgggcatcagaaggcaaggtctgcggatggccccagacacagaaggcgtaagccgccctgggaagcgccggcccagtggagaaggccgccgcgaggtcagggtcagtctggagcctgtctggttctcggagaggcttctggctgctgcagagtgggggca

SEQ ID NO: 3524 - DNA, 6000 bp, Homo sapiens
gtaatgcctctggtaataaaaaatagaacatttccaagcacctcacatgcctcttaatgaattacaaccccactgttacctatacaattaaccatacattcttttattgcaatcctgttattaaaattttttatgatctaagtacacatctttaaatattaaagtttagtctcattgaaaaacttttgttactgtagtaaaatacacataacataaatgtaccattataaccatttttaagtgtatggttcagtggcattaagtacatttacattgttgtgcaaccatcaccaccatccatctccagaactttttcatcttcccaaactgaagctatgtaaatcattaaacaataaattccctttcctccctcctcctagctcctggcagccaccattctactttctctctttctgaatttgcctactctaggtacctcgtataagtggaatcacacaatatttgttcttttgtgtctggcttatttcacttagcataatgttttcaaggttcatctgtgttgagcatgttcatatcactctcgatttttattctatagtactggcttccaggaagttaggaattggaaagaaagctgagatggtagagaagagccaggatttatcgagtcacaggatgagaattttgaggagggaatggcaacagcatcagacactacagacgtcaaagataatgaggtaatttgttgttgttttttgaggcagagtctcactctgtagcccaggctggggtgcagtggtgcgatctcggctcactgcaacctctgcctcccaggttcaagtgattcttccacctcagcctcctgagtagctgggaatacaggtgcacaccaccattgtatttttaatagagacggggtttcaccatgctggccaggctagtcttgaactcctgagctcaagcaatcagcctgccttggcctcccaaagtactgggattacttgagctaccgcacctggctgataatgaggtaatttgacaagaaaattttagaatcagtcattaacatgtttagagtaactactttgtgtctggcattgtgctaggcattagatttatggaggttgaagccagactgcaaacgtagagaagtagagtggacaggagatgatacttggatgtgaagatttgattacttctatacaaagaggggagaggctgggcactatggctcatgcctgtaatcccagcactttgggaggctgaggtgggcggatcacctgaggccggagttcgagacctgcttgaccaacatggagaaactctgtctctactaaaaatacaaaattagccaggtgtgttgcacatgcctgtaatcctagctactcaggaggctgaggcaggagaatcagttgaacccaggaggcaggggttgccgtaagcggagatcacaccattgcactccagcctgggcaaaaagagtgaaactccatctcaaaaaaaaaaaaaaaaaaggaatatatgattgttttcctatcattaaatttggcacttgtcaattctcctcagtagagtactctgccactgagctccaaaactatgagttttcataagatcgtgaagcaactttaaaggttggtggaatacctgtgagggaagaataagctgggctagggttcttttgcttaagaagtctttgaggaggcttcagaaaaatactcacaaactaagtcatatagtatttagatttgttgtttgatggtttgaaatttattatataattataggaccaaatgagatgatcccaacttaatgacatctatctaggttttaaagatagcagttaaagacaatatgagaggaaatggctttaaattctataataaaggatttaggttagaagattagaagattaatattagaagaaaaatttctgacaatgaggtttgttaaactttaaagcaagttaacctaagatctgatgagccttctctgggagggctttagaggtaagttagatttctctgtctaaggtggtttaggaaaagatgttacctgtagacaggtagatgtgctgttggtcctttgcagtctaggagtcaataaaggcctttggctcatctagctgcaaccattctgcctgtagtttatttttctggataatttaatgattaatttaattgccacactgcctaacaaggaattaatagtttttcttaacagttttttttaagattcttgtttagtaatgcaaatggctcactcatttatttatctatttttagtcaggctgaggtttttaggctttttttttttttttgagacggggtctcactctgtcacccaggctggagtgcagtggcgcgatctctgctgactgcaagctccgcctcccgggttcacgccattctcctgcctcagcctcccaagtagctgggactacaggcgcctgcccgcgcacccggctaattttttgtatttttagtagagaccgtgtttcaccgtgttagccaggatggtctcgatctcctgacctcgtgatctgcccgacttggcctcccagagtgctgggattacaggcgtgagctaccgcacctggcttttgtgtgtgtgtgtgtgtgtgtgtgtgtgtgtgtgtgtgacggagtctcactctgctgcccacgctggagtgcagtggcacgatctcggctcactgtaacctacgcctccagggttcaagcaattctcctgcctcagcctcctgagtagctgggactacaggcgcccaccaccatgcccagctgattttttgtatttttagtagaggcggggtttcactatcttagccaggatggtctcgatctcctgacctcatgatccgcccgcctcgtcctcccaaagtgctgggattacaggtgtgagccactgcgcctggcggtttttaggtttttattgttgttgtttcagacagggtctcactctcttgcccaggctggagcacagtgttgcaatcttggctcattgcaacctgtgcctcctagttcaggagatgctctcacctcagcctcctgagtagctgggactacaggcacatgccaccacacccagctaatttttttcgtatattttttagagatgggcttttgccatgttgcccaggctggtctcaaattcctgggctcaagtaatccacctgcctctgcctcccaaagtgctgggattacaggtgtaagccactgcgcccagccattttatgtttcgacaaacacacttgtcaagtaatcaaacagatctgtttatttgtgcctcacttggggaggaagcagaagcaggctggagaagaaaagcaaaaaaatggtaacttttgggggatttttatgggactcaaggtcatgatttactcataacaggacctggttggttgtgccctctcaaatagagcagatgaactcactttgtccagctagtgtagttagtattgctctaacctggtctttaagtattagatttgtttagtcactggtgttctgcagctttaggagtggagtatgaaaagagtcaattataaatgattttaagattaagaagtgagatgcatctctgtgtggtccatttcattttagctccactaataaaacatactggcgaccataattatattccagttatagcagtaatagattctagatttttcaggacagtttcaaggagtcagtccttttgttcccataagtaacgtgtattcagacaacatgctttgaatttggtttggaaaataggatcactgtaatttatagcagcagtgagaagactggtaggaagctccacttcagctttgcctatatcacgtgctgaattgggcatttacagaaatggagaatcatggttgggctgtgccgaaataaatctgagcctggggtagaaagagaaaactgcctcatattgaatgcctactatgtatatgtttggcactgtgctaggtgctttccctattgacagctgctctggctagaattctatcctggatccaactgccacttaaataatatacccccacccctcaacaacaacaacaacaaaacaaacacatatgccacatggggcttagttcattaagactcgtcacagctgccacaccctctttaagaccctggcaccataattaggataatagaatctctgggtttggaagtatctttgaggtcatctagttagaaggggtggcagctgttctctttaccatggagtttgagaatgacagtgctcaattctctcaatgggaggtgcaaaatatgtctggggctgtagtctctgcaggcaatcccataaaagataaggcaacgataaacaagtgtgaagcttgaaatacgtcctaggcggaaaagggcaatgggaagaaatatggcttactggagcccttatacaatgtaaaaacaaacaaatactaaaaacgccctggcagagatgtaatgtcaggcccttggattcagggtagaggcccacaaaagggatcctgattgacacaggttaaccctgtgtcaaagaagaaagagtctcttctgttgggttcaccagctctgaagtacctagccatcctcaagccgcttcttctttgccctgttatgagaaagctgggaaactctctccttttccaggaaagagggtgagggacggggattaaggggcgtgaacgagaaaaagcaggtagaggtactgaaatgtctgagtagtggtaaatgcaatcgtcctggaagcaggggaaggtatttcacgccctctcaaggtcccttcggttcaaggataccgtcattctccggctctactaaaggggagggcctgcaacgtccatgctgccatggaaacgcgccgccgtgttcctttttcttacgtggggcagggcactctgccgcagctacctatcatccacgggatttcttgagtggcgggcggcggcagcgaatggacgatccgatattgtgtgacgtgacgggaaagggggagttcgcggccggtggcggcggtggcgacagcggcgacctagggatcgatctggagggacttggggagcgtgcagagacctctagctcgagcgcgagggacctcccgccgggatgcctggtactgtttggagagaaatgggagtgcagtgggctctgaaggcctggatttcgggtctgaagggatggctgaccggagggggcggggtggcaagcatggcggcggtgacggggaaggggttggagggccctaaggagggggtggggaaacgttagctaagaaggcttggtggtcgtgaggaaagctgaaaggctgtggggcctctggcgaacagattttagaaaacattcttttggggggaggtagaggcgccagaaggacgtggcgggggggatggaaaaaggggcggggagagaagaggttaggaaggaggggaaagggtgtctacgagaaggtgatgaaaaatagggagggatagtcaggcttattgtaaataacgaggaatggtgacttggtaggcatgataggaaagtgcttgcagcaattataaatataatattctaattggaggagtcctgaagtggtcccgtttcccagctcttgtacttccgccccattatttaggtttagactgcgtgagcaaggctagtaggttacacggaactgatcttttgttattccattccaggggagcagatggaccctactggaagtcagttggattcagatttctctcagcaagatactccttgcctgataattgaagattctcagcctgaaagccaggttctagaggatgattctggttctcacttcagtatgctatctcgacaccttcctaatctccagacgcacaaagaaaatcctgtgttggtgagtgataccttgtttgaagaagattgagcagatttttttttttaaaccgaaaaccagcaaacataagtatttagaagatcattaccttctcaataaagttgattggaaaaattgttcacaaatagtaggtttcattttgaactatttcatatataatggggatattttgtatgtgtattttct

SEQ ID NO: 3525 - DNA, 6000 bp, Homo sapiens
agaggtcatctaggtgatcaaggaaatcataaatcaggatctcagaccagatcaactctggagtactcttagctcccaggtaaacccagaactaaagatgcctgcagtatgagatttgaagtcctattcatgtccttgctttcccatttcagacagcaatgcagaccccggttccaggggttaatgagctgctgtattaattcagggtaactgttgtattggtagaagtaatagagctatcacttcctaagtccgtcagtggaaatggagagtcagaccgaaggcctccagactggtccctcagcctgtatttttatttatttatttattgagatggagtctagctctgtcgcccaggctggactgcaatgtcatgatctcagctcactgcaacctctgtctcctgggttcaagcaattctcctgcctcccgagtagctgggattacaggtgtgcaccaccaccctcggctaatttttgtatttttagtagaagagggtttcaacatgttgtccaggctggtctcaaactcctaacctcaagtgatccacccacctcggcctcccaaagtgctgggattacaggcataagccaccatgcccggccctgtgttttttagagtcttagaatattagttatgaattataagcccccttctatttcctataggtatccaatagtaaaagaatcagagagttattgaaactcagttttccactgtcctaattgtttctgaatttgtattagaatgctcggaagatccagattttttgtaggggttagaaagtcaccactggagagactacctggtgcaaaaatcacctttgaaagcttttaccagacttgaccactagaaggagctgggccactgactctttatcagagggtcccttcttttctgtgtgtgggtatgtcaatgtggagggggcagtgcctaggaataagtgcactctccttgtcactgtaggatacatttttgtctgctttctcagcattttggcccagggcttgaggataggtgataggaatggtggcccagcctgtggggtagtcaagccataaggcactagcatatccccttgagctcatcccagctgcctggtcccctttgcgtcctcactaacagaaggctggagggaggggcagtgtctgcagctgctctgggctgactgttgtttgtggggacagctgaaagaggagccagcaggggtggggctgtggctgtcttgagctgtgtgggtttttccaggaaattctctactattctcctgtgacatagacagaccatgataaaaatgtccaaacctaaaaatatgcagtatgccaaagtaagctctgatctagggtacatggccctaagctccttgaggacaccacagacaaactctttgatggaaagggcctagtaggtgtttatatatcaatgctcatttctaagaagtgcctgagaataactatgttctctctgtaagtgtcttcccaagtatcgctgcatcttaatctgaagaatggctaagtactttggtttaacttcttttcatttcttacattattccagaaagcagcctactctcaagtctctgtagccaaaaggacaaggttagagcattcagtgtgaattattaacatcagcagataatccccaaacttctgttcagtcattaatttcatcctctgtcatccctgtatctggcctttcaccaaagctcctaggagtactaagtggtaaaactgccgattttcatcattagggataaatggaggaagccatgacatgagtaattctaaacagaaacattctcaaaagagtgagtagcctgctttacaggaagccagtcacatcaggaagatgtcagcctcacatatattaatataaaattgctgtatatattcctaggctaatggagctttagtcatattagccttattttctccaacttcctagcagcatctataagtatcagtgatcaggaagtgatcaaagatttggcagttaggagcagtggaaaaggaggagagataattaaggaaaggtgactactatactgagtaattgagaattatctgtataagacatgaattcaatcattcagttgcagtggctgttgacctggatggattttatattccactaagctgatggattggtgtgtcaacattttccagtaacatgactagatgcctagctcctttttctttttttttttttcctgagatggagtttcacttttgttgcccaggctggagtgcaatggcacgatcttggctcactgcaacctctgcctcccgggttcaagcgattctcctgcctcagcctcctgagtagctgggattacaggcatgcaccaccacgcccagctagttttgtattttttagtagaggcggggtttctccgttggtcaggctggcctcgaactcccgacctcaggtgatctccccgcctcagcctcccaaagtgttgggattacaggtgtgagcactgtgcccggccttagttcttttataatagcatgtagagctttccgtagtcacctcacagacatctgtcatggaatggtagtgcctaacatcttattttctcaaatctctaacccacccattcctcccacccagcagaatgggaaactgcattatgtgagctttgatctgggccaaatctcagagtacaacttgatcttgtagcagtaaattcaggagcccctccttccactctggatttgatggtgcccatcatcatgtaagtaccaagattctgctctgccctggagatctgttggctaagccgaagcaggaaccagaaaccctgaaacctgtgcagcctaaataaaaatgctaaacaagggtcaaggaagatgaatgggggattctggggtgtctgtaaagggaagcagggagacccggggtatgcagaaaggggaacacaaatgaagagagtgaatttttgcgtgagagatgattgatcactaagaggagtccctcatttctttagtgcatgtcaacagctatccacaaacaaccctcttctcaaggagaagttatgttctccagtctccctccagtatcaaaccatgtctgcaaagtatatttggtatgtggggacagctatggaattccatgattttcctcctctataaagttcctcccttctcctccactcaaacctcccgcaaggccacttctcccagggagactggacctctgtgaccagctcttacccaaaggactgaaataaaacattagtcctaacctttgacctctgaggagaagtgagctaggtgccgggtaatgaagagtctcaactgttggttcaagtcaaaggatgacaggtcaatgttccaggagagaatccctgtgggagaaaaacaaagaaggttctggataaggttgcaggttgtagggtggtgagactgcaggaacactttcaagttcacagaacaggtaaggagagggagggtatatggatagttgccatgatcagcctcagtgatgtctcaaagaaaggtggctagtaatggtgtctttctcccagtttacagcttttctaggctttgcctgagccagagggagaaggacagagtttagactaaactcggtcattaatgagtctataggtaggaattttcttgtaaggttccccagttgtggtggaagtgacacctaagggcctattcccagatactgagggctaccttccccacatttacagctaagtaggattctaggttcgccttctgtgttcccttccttgtccccagccctccacagcttgcttccacccgcaggtggctccgcagcactgcaccacagccacaggcacagcactggggaaggaggtgaggacttaggagctggtagccacgaaggtcacttagtggttggctactggcattcagagatttgagatttgtacggggcgttcagaaagctccccgtgctggttcagggaccataaagaagatacagcaagatagggacgtggattctccagggatggtgaggactttcaggacacctggtccaaaacactgcggtggagggtgtgaccagaggggccccaggggctgcatagagctccgctgcctcagggagactgcggaacgccatggagtgtgcagtaaggatgggcaagcgagatgttagtagagcgagaggatacggacacatggcatggaagatgcaggtgacaagggcgcagatctcaggaagtgcacactagggatggagatgcagacgtatgcattggtagttgaatgcagaaggcggagaagcacagggtagagatgcctgaagcacagccagaacagtggctcaccttgttcaaggtgggcccgcacggccctcagctgactctctgtaccgatatcgccgatcacaattagcaaagagtgcttctgcaggtcccagcgtgcagccgccaccgcggctccggcctcgcacagcagctccgcggggttctgagccagcggtgcgccgggacttcggagccccagccccggagttgtctccatggcaacgccgtgaggccgcgcaggctcggcctcggtctccatggaaacacccgcggagtgttagtccggcagcttccgctgcaggcagagtgcgcgcggctcttaaaggccggcggcaggtgcagttcattggctgctgcctgtcagggggcgtggcacaggcgccgcaggggcgggccggagctggaagctcgtgctctgcggtctcgccaggctagagggtggtggccgcccccttcctcccaccacgccctccccagtaccagcgggagcttccacttagacttgagcgggggtggggtctctgggggacccattggtggggcgaggcggttgcctcggcgccggaagaagcttctagttaagatgtatccctgataagtactgtctggcaattccgcagcctcgcccgaactgaggggagccatcttgtccctctctgcctccgagtttgtatcgttgcctccatctgtgtctgtgtgtctgtattatcgttgtttggcgtgtttttttttttttttgttttttgtcactgcctgcctgggtcctgcccgaggtctccatcctcggtttccctgtccttgccccgggccctgggagtgctctggaaggctgcgcagtattggaggggacagaatgaccttccggccttgagtccctggtgagttgttattctgaagatagcagttggctggctagtttccatctctgctgagtgcaggactcgagtgcaatgagctcagactgcagcaagggggatttgagtaaaacctaggaaagaccttcccatcttcaagtgatgtgacagtgagatgggtctccctcaggagactgttgtattacttccccccctcccaccccccgggagttcttaaaacagaaggagcagtgtttgcaccaaagaaggggttgacagttctaagatcaaaaccagaggttgggaaaggactgaggaggccttgcactgttttatgactgactggaacatctttgtaaaaaagtgctgttagtctagcctcccccattcctcagtgtgtctccacctactccacactccagagtagtcttttacccaggataccgaatcattctgtacatgtatgtatgggagcgcctatctttcaccctagggctccagcagcacttgtttttttgtttttttgttttgttttgttttttgggtttttgggtttttttttgtcccgtttgcctttgctttggagatagtacaggaaagaaaggaacacagtatcagattcagcaaggctgcctgtgagccacgttctgattgggcagtgtctgcatgttaaatacttcacagcggccgggcacagtggcccacgcctgtaatcccagcagtttgggaggccaaagtgggtggttcacttgaggtcaggagttcaagaccagcctggccaacatggagaaaccctgcctctattaaaaatacaaaaattagctgggcgtggtgttgggcgcctataatcccagc

SEQ ID NO: 3526 - DNA, 6000 bp, Homo sapiens
tgaattgccagagctgccttaaatcttatggagactttaagcattgaaagaattatgatgttcttctctcctatgaacacctaattcaagatgagtgcaactaattgcaagtaaagctctgatttttcatggggacaactttaatactttaaatgccaaatatgaaattatttccagaaaaacttagagatgcccttcccactttgttaagagtgtgcttaatttacctattggataatttatcactatacattatgaaggcctgggggttgagaattccctaactggtttaaacttagccgatacttttcaaaccatttgagatttatactatcttttgccttgtgctgactccagtgcataaccaaggaaacagcctataatagtgccttcctcttgcacctcttctaacctcctctttcagtggtggatccttagacaccttcgacaattcaagggtccttcatcacagttcaaaagcattggtgtgccactatatctgccaattttgcttgacaagactgtggaagaagctacagaattggagagctcccaaaagatcatacttggtcattccagggggtcaatagttaaatgaaacaaaacaggaggctccatagccatcaaacactactacctgtgtctgacaatcatgcatatcacaggtccctaataatccccttgaggcaggagaatagtgtctggagacagggagccttcacttcagcctctgattggtgggagccaagtcttcatttgcaaagggtgtaacttcacttcagcctctaattggtcacaggccaagccaccacttcagcctccaataggtcgcaggccaagtcttcatttacataggatgtaattaataggaaacctctaaagggtacttaaacccaagaagatttgtgcaactggggcccttgagccacttactcgagcccactcccactctgtggaatgtactttcacttcaataaatctatgctttcatcttccattggtttgtttgtgcattttgtccaattctcttttttttttttgagatggagtctcactctgtcacccagcctggagtacagtggcacaatctccactcactgcaacctccacttcctgggttcaagcaattctcctgcctcagcctcccgagtagctgggattacaggcacccaccaacacgcccagctaatttttgcatttttagtagagatggggtttcaccatgttggccaggctggtctcgaactcctgacctcaggtgatccacccacctcagcctcccaaagtgttgggattacaggcgtgagccactgcgcccagctagtccaattctttgttcaatatgccaagaacctggacaactcgtagtcaagaccctccactggtaacacccttggaagggcctttgaattgcatcgttttactaccaggcttctgccatagcacacttcctaaattcaatatagatttttaaatactttataattcatatatgtatttaattttttatttagctttctaagtcttatacatatgtatcagagcattttctgtctttgcttataaaattctgggacacagatgctaatgctccacagttttcttttttcttttttttttttctgtttgagataagaggcttgctctgttgcccaagctagagcgcagtggcgagatctcggctcactgcctcctgggctcaattgatcctcccatctcagcctcctgagtagctgggactacaggcacacaccaccacacccggctaatttttgtattttttgtaaagatggggttccattatgtaccccaggctggtcttgaacttctgggctcaagcaatccacccgcctcagtctcccaaacagctgggattacagatgtgagccaccactcctgtccagttttctttatagagcactttggacaagtgctatgtgcaatttaacacttaaacatattttctgggccgggcacggtggcccatgcctgtaatttcagcactttgggaggccgaggtaggtggatcatgaggtcaggagtttgagaccagtatggccaacatggtgaaaccccgtctctactaaaactacaaaaattagctgggcatggtggcgcacgcctgtagtcccagctactcaggaggctaaggcagaagaatcgcttgaacccgggaggcagaggttgcagtgaaccaagatcacgccactgcactccaacctgggcaagagagcaagactccgtctcaaaaaaaaaatttctgggctgggaacagtggctcacgcttgtaatcccagtcctttgggaggccaaggcaagaggactgcttgaggccaggagtttgggaccaacctgtgcaacacacaaagaccctgtctctgtgagaccctgtctcaaataatcctagctactccagaggctgaggtgcaaggatcacttgagcccagagtttgaggttacagtgagctacaatcatgccactatataccagccttgctgacacagcaagactctgtctctaaatatatatacgtatattttgacaatataatcatactggaatcatcacccagtggaatggctggaatactgttaaccaaggaaagaggaggataattaacagacacctatagccaatctttctgtgacattgtcagactttggcagtgagcctgcaaaatactcatccagcacacataagcaattttagtactatcataatctacatttgcactgtaattaataaaacccaattttagcagggcctgagatcacaaggctgagtttctgcccctaccatctaatcagtgtgtgatccttccctataccattcagatctattgtctagtctctttgtgagacttgatgaaagcagaatctttggttaactactgctgacctttatactgagaccctgtgctagttagcggcctcatctctgcagttgctatggaaactgtccctttctccccacaacctattctggctctctgcctccacatggtactcttactgattgcagaagaggaggcctgtaaatctctccaagctcttttccagattcagatccacaaacggggggggggggggcagaggtacagcggaacaccgtctcatgtgtcatagtcatgagactagagggtgaggcatccccagcatctgacattctgccagtactcttattttcccctttctgtgcaaaaaggattttcagggccatgtccaaattggttgcagagtggactggctgttttcctgtaacacatgctccatggtagggaccaggattgctgtaaagttttttgttttgttttgaaacagagtctcactctgtcactcaggctggagtgcagtggtgcaatcctggcttactgcaaccttcgcctcccgggttcaagtggttctcctgcctcagcctcccgagtagctgggattataggcgcccaacaccacgcccagctaatttttgtatttttaatagaggcagggtttctccatgttggccaggctggtcttgaactcctgacctcaagtgaaccacccactttggcctcccaaactgctgggattacaggcgtgggccactgtgcccggccgctgtgaagtatttaacatgcagacactgcccaatcagaacgtggctcacaggcagccttgctgaatctgatactgtgttcctttctttcctgtactatctccaaagcaaaggcaaacgggacaaaaaaaaacccaaaaacccaaaaaacaaaacaaaacaaaaaaacaaaaaaacaagtgctgctggagccctagggtgaaagataggcgctcccatacatacatgtacagaatgattcggtatcctgggtaaaagactactctggagtgtggagtaggtggagacacactgaggaatgggggaggctagactaacagcacttttttacaaagatgttccagtcagtcataaaacagtgcaaggcctcctcagtcctttcccaacctctggttttgatcttagaactgtcaaccccttctttggtgcaaacactgctccttctgttttaagaactcccggggggtgggagggggggaagtaatacaacagtctcctgagggagacccatctcactgtcacatcacttgaagatgggaaggtctttcctaggttttactcaaatcccccttgctgcagtctgagctcattgcactcgagtcctgcactcagcagagatggaaactagccagccaactgctatcttcagaataacaactcaccagggactcaaggccggaaggtcattctgtcccctccaatactgcgcagccttccagagcactcccagggcccggggcaaggacagggaaaccgaggatggagacctcgggcaggacccaggcaggcagtgacaaaaaacaaaaaaaaaaaaaaacacgccaaacaacgataatacagacacacagacacagatggaggcaacgatacaaactcggaggcagagagggacaagatggctcccctcagttcgggcgaggctgcggaattgccagacagtacttatcagggatacatcttaactagaagcttcttccggcgccgaggcaaccgcctcgccccaccaatgggtcccccagagaccccacccccgctcaagtctaagtggaagctcccgctggtactggggagggcgtggtgggaggaagggggcggccaccaccctctagcctggcgagaccgcagagcacgagcttccagctccggcccgcccctgcggcgcctgtgccacgccccctgacaggcagcagccaatgaactgcacctgccgccggcctttaagagccgcgcgcactctgcctgcagcggaagctgccggactaacactccgcgggtgtttccatggagaccgaggccgagcctgcgcggcctcacggcgttgccatggagacaactccggggctggggctccgaagtcccggcgcaccgctggctcagaaccccgcggagctgctgtgcgaggccggagccgcggtggcggctgcacgctgggacctgcagaagcactctttgctaattgtgatcggcgatatcggtacagagagtcagctgagggccgtgcgggcccaccttgaacaaggtgagccactgttctggctgtgcttcaggcatctctaccctgtgcttctccgccttctgcattcaactaccaatgcatacgtctgcatctccatccctagtgtgcacttcctgagatctgcgcccttgtcacctgcatcttccatgccatgtgtccgtatcctctcgctctactaacatctcgcttgcccatccttactgcacactccatggcgttccgcagtctccctgaggcagcggagctctatgcagcccctggggcccctctggtcacaccctccaccgcagtgttttggaccaggtgtcctgaaagtcctcaccatccctggagaatccacgtccctatcttgctgtatcttctttatggtccctgaaccagcacggggagctttctgaacgccccgtacaaatctcaaatctctgaatgccagtagccaaccactaagtgaccttcgtggctaccagctcctaagtcctcacctccttccccagtgctgtgcctgtggctgtggtgcagtgctgcggagccacctgcgggtggaagcaagctgtggagggctggggacaaggaagggaacacagaaggcgaacctagaatcctacttagctgtaaatgtggggaaggtagccctcagtatctgggaataggcccttaggtgtcacttccaccacaactggggaaccttacaagaaaattcctacctatagactcattaatgaccgagtttagtctaaactctgtccttctccctctggctcaggcaaagcctagaaaagctgtaaactgggagaaagacaccattactagccacctttctttgagacatcactgaggctgatcatggcaactatccatataccctccctctccttacctgttctgtgaa

SEQ ID NO: 3527 - DNA, 6000 bp, Homo sapiens
ttgtgagaaatgatgaactgatacactctcttggagtttctttgtagggaatatgattatgaataaagtgttaatagctatctcaaagccttttgtaaagaagcagagtacagatgctcctccacatacgatggggttatatcccaataaacccgtcataaatcaagtcaggccaggtgcggtggctcatgcttgcgatcccagcattttgggaggctgaggcgggagaattgcttgagtccaagaattcaagaccatcctggacaacatagcagacctcatctctactaaaagtaaaaaaataaaaaaaattagctgggcgtgatggcatgtgcctgtagtcccagctatttgggaggctggggtgggaggattgcttgagcctgggtggtagaggcttcagtgaactgtgactgcaacaacaacaacaacaacaaaagtctgtctcaacaacaacaaaaaagtcaaaaatgcatttaatacaattaacctattgaacatcatagcttagcccaccctaatttgaagtgctcacaacacttacattagcctacagctggacaaaatcatctggcaaaacaggacactgtagtgttggtgattgcaagcctgactgggagctgcagcttgctgccactgcccaagactgtaggagaatatccatattgcccaggaaaagataaaaattcaaaatttgaagtacagtttctactgaatgcatattgctttcacaccatcattaaggttgaaaaatcagagaagtcagggaccatctgtataaataaaccataaatgaaaataaagtatgtgttgtcatattttggaaatgcctcttaggctctgatctgcaatattatctggatcaaaagagtggctgaagggaactattggggaccaagtacgtgaggtggaatgaattctttttctggtgtttaaacacaagctgtaagaacaaaatgtttctaattaagataccactaatttttctctccattaattccatctttattcaaagctaagggtgtatataatgactccacatcaaagactcttttctaatggtttaggagatacaatttttattagaaccaaggagaattcacagcccacaacagaacaatttgttgaagttattttggagttgatttaggaatcgctcttcatgaaatgtgatgaatcttcattatggatgcttttttttttttgagacagaatctcactctgtcacccaggctggagttcagtggtgcgatttccgctcactgcaacctctgcttcctgggttcaagcaattctccctgcctcagactcctgagtagctgggattacaggtgcccgccaccaagcctggctaatttttgtattttttaaatagagacggggttttgccatgttggccagactggtcttgaactcctgacctcaggtaatctgcccacctcagcctctcaaattgctgggattacaggcgtgagccaccgtgcctggcccattatatatgttttctaaacctcctccaaaaaggctttcagctctttttgcacttcttctggtttgcttgctccctcccactatacctttatcacttgcactctcctcatgtgatattatatcgatctattttcttccctctctcctcccattagaccataagctccttgagggcaggtgtttaagcttgttcaatagtatatttagtgccttgcacagtgcctgacttatgataggcattccacaaagacctgttaaatgaatgaatgaataatcatacctcacatttaaatagtgctacaaatatggttacaaagtactttcttatgttatttgactcccatgatactctccggcaggcagtgggttttattattacccctatttacagatgtgagactaggctcagaaagactgtgtaatggcagggcaactaggctgcaatttctggagctaccagaactcatgtccatggattcctgctctggagctcttttctgttttcagagtgatatatttcctgagccaagtgccaagggcaacacaaacttactcccagtgtctgtttacccctgctgctctgcctccacactttactgctctgctggatttcttcacttcaaacttagccctgatttttatctaggagttgcacatttcctaaatgcagatgaaagatgaaaaatatatattctactgttgattctccagttcctttgcctgggacctcccagctgtggtgtggtgctgtgaagtatgaggcatgaagtgggggtgacatacgtgaggggaggaagatgtggctgactggtatggccagggtatgctgctcagagggctatcagaccaagggcttgtgatgcttaggacttggctgtggctctgagatccctccatccactcttcccatctccaacatttttctttagggaaatctgaataaaatgaactggtagagttgggaggttaatgctgacaacaaggttccaggatatgctgatttgagtatgaaacagtgttttaagcatggtgcggtggctcacgcctgtaatcccagcactttgggaggccgaggcaggcagatcatttgaggtcaggagttcgagagcagcctgggcaacatggtgaaaccctgtctctactaaaatataaaaaaattagccgggcatggtgcagcacacctgtaatcccagctactaggaagactgaggcaggaggatcgcttgaacccgggagacagaggttgaagtgagccaagatcacgccactgcactctagcctaagcagcagagtgagactccacctcaaaaagaaaaaagaaagaaagaaaaaaacagtgttttgggaaagagtggtgtggtcaaggtgagggtggctagtagtcagggctcacttgctgacactaacagtatttgctaattgtatgcaactgaacacagttgtattcaattctcttttacacacagctctgagggtggaagctaaggagatggtaaaagagggagtctcttgattggtctttaaagtaagcagtccttttcttgaaatagaatgggcaaaaccaggctgggcacggtggctcacccctgtaatcccagcactttgggaggccaaggcggtcggatcacaaggtcaggagttcgagaccagcctggccaatatggtggaaccccatctctactaaaaatacaaaaattagccaggcatggtggcacacacctgtaatcccacctacttgggaggctgaggcaggagaatcgcttaaacctgggaggcggaggttgcagtgagccaagatggtgccattgcactctagcctgggcaacaagagcaaaactccatctcaaaaaaaagaaaaagaaaaagtgggcaaaaccagtacaattttacaaattcaagaaagacagaatatcatatttgtgagtgacgtagatgacatcaacaagttaaaaggaggagcttttgcttgttgtttttgagtatgcttcacacacaatacccagatcataaagcactagcaacaatgacatcactcctcatgtagctactcccttacatcatttaccagaaatacacattttatacatagaaacttaaaagctacacacctaagacccatcatttaatgagtacttaatatgtgccgtatgtgagctttacatatattttactcctcagaggaaccttgtgataacaagaactggcattataaattgacacataaggaactgaggttcagagaggtcaagcaacttgcccaaggtcacacacctggggtaagtgggattccagaattcccaccagtgtctgacagtgaagcacatggctcctaactcttggactaaactgcctcatgtgacacacaaacatgtatctaatttaaccatgggaaagcactccctcgtctgtctataccgtaatttcttacattagtgacacattcatggcttgtatgtttgtgtgcttctcctacgcctccaattggattgcaaacttctggaacgcagaggccaactctattttttgtccccaagtcatcggtcagtttaattgatgctcgttagaatatctggaaggaaagacaccatgaaggtggctggaaaggagtaaaaccaggtacagaaggaggaagatggagatggggtattcactcaacaatttaatgtccacttggacctatgttaggcgctggagatatggtgaggactgagccagtctgtgtccttcccctcatggggtttcacgtggaggtcgaggtcatgatcaaggatgtaagtcacccaaaggacactactgtgttcccaagcagaaaagaaaaccgaggagccaggccctggcatctgcagggttctggcagtcccataaggcgcaaagacatgaacaaggtggaagagtaggtcaagtgaaacgcttttatgtgattgaacttagccggccggagggccggggccgctgcgatgagagataaagagcgtggggcgccgggtgcgaggcggagataaaggggtgaggccctggccctgccgccggccgtaacacgtgtcccttcgcctggcggcggggtcttccctgcccaccacgaggaaaagggggcgcactgcatggccccccactcctcaccaccctttgtgaaacgcccccaattgtgcttcatctgtggagtcaggtccccgcaggcggtcggggctgcccggattccgcgacggctgaagggtgagggccgcgcggtagcaaagtgtccccagcacctagcttggctcccctcgctcccaaatccctttccccttttcgctcaacccccaactccacctcagccgccttcctctcggttcccctttcacctcccgcgctgggcctgttgggcggggcgagggctcccggctgcgcgagagttccgcccaaatctcgtgagactcgcctgacgccgccgctgctgccgccgcctcttacgtctttccctttgacaagtcgctgctgctgcagcaaaaataaaggacgcgaccgccgcagcctctgcggagccgggctcgggtcgccggagccgcgccccaccccgccagctccagagccacgtacggtaacgcatcatctaccgtcctcctggtcctgtgtgtgtgtgtgtgtgtgtgtgtgtgtgtgtgtgtgcgcgcgcgcgtgtgtgctttgccggccgcgcagggccggccggggccgtttcgggactgcagccgagcggggctgctggggtcccgggtgggcggcaggcgagctgggggagccctcctggcgcgccgcggatcccccgggtccccggctctagaggcctcctgccgcccgggcgcctcggagcagcgtagaagccgaggcgcccgcggagagggccgagagacccgcccctccagcggcttacaacgtctgtgccccggccccgctgtggtcgcgtctctttctgcttcattcctttatctgctgaccagctcctctgccccggctggggctcggtccgcgggcggcggccgactccctctcagggtccggggagtgccgcgaccccggtgtccccaggcgccggccgcctttagcggggtggaggctgggacgacgtgtcttcctcctctcctctgcctttgggtgagggcagctcatcatctgctaaacctttctccaaatctcccgccccaataaaacaacaaattataaagcctttgcaaccgggaggcgaggcggggcgcattgtttagtcttaagcgtgagatgaggatgatgatggtgatgacaggagctaccccggggaacatggtgaaatctgttctgtgatgggtggcaggttactgggagacacgaggaggacaggagcttgtaccacctctcccaggaggttatgtaaaagacatgttatcttagagagctgtgaaacacagggacagatttgtcttagtttaagaaatgtctataatacttagaatatagagataattaaatgatgggaataacaaatctgaacaaactaacccatctttgtaattccat

SEQ ID NO: 3528 - DNA, 6000 bp, Homo sapiens
tcaagctattctcctgcctcagcctcctgagtagctgggactacaggcgcacaccaccacgcccaggtaatttttgtgttttcggtagagatggggtttcactatgttggccaggatggtctcaatctcttgacctcatgatccacccaccttggcctcccacagtgctgggattaacaggcgtgaaccactgggcccagccaaaaagttaatatcttttagtttgtaagaaatagacttgatcctgcagttttattttgttttctccctcccacctttcatcctttctttctttcttctttttttcccacaaggttcttttgctctattgcttttacttttttttaaacctcttcgaacaactcagaatttttattttaaaatatctttcagattgctctattatctctgaattttggagtgcatgtgctttcatttttttagtaactagtgattttcatttataatagatttttaaaaatttatttttagttttaattcatgaataataattatatatttatggggtataatgtgacgttttgacataggtatacattgtaaaagtttaaatcaagttaatacattcatcacctcacctacttattttttatggtgagaacatttaagatctactcttttagtgattttgaaatatactttgtttgtttgtttgtttgtttgtttgttttgagacggagtctctctgtgtcccccaggctggagtgcagtggcgcaatctcggttcactgcaagctccgcctcctgggttcatgccattctcctacctcagcctctagagttgctgggactacaggcacctgccaccacgcctggctaatattttgtatttttagtagagatggggtttcaccatgttagccaggatggtcttgatctcctgaccttgtgatccgcccgcctcagcctcccaaagtgttgggattacaggtgtaagccaccgcgcccggcccgaggtatgcattattattaactacggttaccacactgtgcaatagattgctaaaacttactcctcttgtttaactggaactttttgtaccctttgatcaacacctctctattccccgttttctctgtacgaggatttgtttttggtgtggcttgtaacttttgactttaagctcctctttagtggagattgttttctgtgagtgttccatgtggcctagattatgtgagtacccagaagccttgttattcaaaaatcaatctctactcaagaacatttttcagtaattgtcacttttctccccttccatacaaatttttcctccctactggatcattctaatcagtgtgtaagcatgctgtaagatctcctaatttgtctcattttgctatttctttttatagcaaaacttcttgaatgacttgtctatatttgctgctctaattcttctcttctcgttccttattgaacttattccattcaggatttctctactcccaaccactcttataaggtcaaggtcaccagtgattttatactcctgttgctcagtcaattcttaatcctcatcttacatttgatcatggcatttgattagttgatgattctttctttcttcctttctttctttctgacagagtttcgctcttgttgcccaggctagagtgcaatggtgtgatctaggctcactgcaacctctgcctcctgggctcaagcgattatgggtttataccttttcttaaggtgccagtttgtatattacaggcgtgcacctccacgcccagctaattttgtatttttagtagagacaggttttctccatgttggttaggctggtctcgaagtgcagacctcaggtgatctgcccatgtcggcctcccaaagtgctaggattacaggcgtgaaccaccacacccagcaattccttctttctttgaacactttatgcagttggcttcccggataccactctctgttttcctgctacctcagtggctcctcagtttctttctcctttaatagatttttcttattaccctgaccctatatgttggcgtggtccagggcttggtctttatagtgcttctctttattgtcactcattgtttcatggcctaaacgtttatgggtgggcctggtggctcgcacctgtaattccagcactttgggagactgaggtgggtggatcacctgaggtcaggaatttgagaccagcctggccaacatgatgaaacttcatctctgctaaaaatacaaaaagtagctgggcacggtggcaagcatgtgtaatcccagctactcaggaggctgaggcaggagaatcacttaaacctggagtcggaggttgcagtgagctgagattctggcactacattgggcaacagagcaagattctgtctcaaacaacaacaacaacaaaaacttttgcaatttcctctgcctggaggttcccacagatacacgcaaggcttgcgtcttaattaacttccggtctggattcaagcctgttttatctgttagtccttccctgaccatcctatataacttgcactccatctctaacagtacctctcctccttaccccaatgtaattttcttcacaacacctataattaccacttgtgcacttatttattgtccagctcaccctacaaaatataagtcttgggagggctgggactttgtgtgtttagttcattcttgcatatatagctattggaagagtgctgggcacatcatctggtaaatatttattgaatgagtaagtgaataatagaaatagatgacaccttttcattatttcctaagctgaggtagatatctccctattttaaaaaatattttgattgttcagcctgtttcgaaataagtgtttatgccttttcctaaggtgccagtttataaagaaattattaaacttcaaagtgtcattttcatatcaggaaccatctaccaggattagagttctcaaactgaggtttgtgggttccaaggatgggtttcaaggctgtgttagctccctggatttgagtgcaaagtgttgtatgtagatgtgtatgtgcatttttcttgggaaaaattttaccttccatcagattcacaaaggagtcagaacccaattaatggttttgaattactgttatcttccttgggtgttgatcagctaaaagcgaacacattgaagataaaactcctataatcttcccctctaaaccaccttatctcttgactttcttagaagcagagcacattgatgttggaagcaatacccaatgaaggtgtccctctaaatgtgcctggtaaattgttagccatgctgtcctcaggaactcaaagcagcgccatcaatcacatgaatgttagaaacgtccagctaggtgccatggctcatgcctgtaatcccagcactttgggaggccaaggtgggtggatcacttgaggtcacgagttcgagaccagcctggccaacatggtgaaaccccgtctccaccaaaaatacaaaaaaaaaaaaaaaaaaaaaaaaagactagaaacttccacctatgtcaggctgaaacagtagtttcacacataggatcttgttcagaccctgggacttaagagaacatgtcgaatcccttttccgctggtcacttttcaggtacatgaagatgtaatcccatccccgcatcaagctttatttctccagaggaggatctttaattcttgtaaacatgggacaggtacaggacatgttatgataatgacaggtacaggacatgttatgataatgacaggtacaggacatgttatgataatgacaggtacaggacatgttatgataatgacaggtacaggacatgttatgataatgacaggtacaggacatgttatgataatgacagctcttctttaaatttttattttttatttattttatttccataggttattggggaacatggcagctttttttgaataccctcctctttgccagttgcccaaggtggaacacccaaactttgacatgatacttccattaatgcaacttagtatcacaagttgatgtcgtggcccagcacaggatggcctggaaaccggcaacactggacgctggggaaagggtaagaaggtcttgaccattacaaatggtgtggaactgagccgagggagggatagtgagaagggagagagggtgaggtgtctgagagacaatgaggtcaaatcagaggattcagccattgttggcgtgtgggaaagggaaggagaagggaagagtcagggatgacatttgttgagagagagagagagaagagagagagacgcaggtggaaagaggatggcaccacattggactagccccaacggaatggggagaagtgggagaggacccaggggatgcagagctgatgagagtgggagaaccaagacagaggaagaaggttggggcaaatcaagtgtctcagggaggcccagtgaggcaagaacggaaaggagaaaggcggcggttaagaatcagggataatggcagagcgttgcagctctgcgggtgggactgggcggaagggtttgggagagacaaagaaatgatctttgaaggcctcgcagtgcttggccgagtgcctggcacagaataggtgcgcaataaatgacgggtgagaagtgaaggaactcaggaacagtgattagtgagtgagtgacggaaggaacggaggatggcgttggctcgggaacctcgctgccatgtcggtggaggctcctgggctgcaacgccagagagaggcggggcgtccccgacggccaataggagcttcggtatcagctccgcccccgccccctagctccgcccggtgccgcacgtcgttcgcctgccgcctgaggcgcgcgcagccacccagctcccggaagtgcgcccggagccggcgccgcgggccgaggtgagcgcgcttgcggggcggtcccggcctccggccgctcggggtcaggccttgcgctatctgcgtccgcacctgactcagctgggcaccccggagctacggaggggccagcgggctcccttgcccatgcgtctgggagcgcgcgggggacgtggcgagtgcggggccggggcagccatggctgggagtggaccgtgggtgcggggggatgtgtgaaccccgtcccggctctgcattcctgcgcctctgcgccccgcgggaccggccgggtctctgcactgggaccgaaaacgggctcctccccgctgtcttcccctaagggctgaaaatgagtctctggaagaggaaacccgatgggatgatgcctggagtctctccctctctcatcagagtgcagtcggcatttggggggcgcatggtggagaatacatatccaatgagcagcgctgccctggcctcgagcactaaatgccagttcccctagctgcttgtgacaaccagaaaacgccccaacaaatcaccagacgttggcagttctccccaaagcaaaggctttagagcttcctgggttaatctggctgccacttgtgagcctcggaggttcctgatctgtacaccagggtaattgtgggaattggaaatacatgaaccgagcttaataatgagccgatacgtagtaggtgcttaacaaatggttacttatatatgtaaccatgtatgtaaccacttgtgtatattacacctagaatgcacttttaaaaattcattctatttgttaaaggtttaataacaggtataacagacaaccttatttttttttcataactaatgggggcagttcctcatgaggttatcggaatataaactctattaaatttttaatactatataaagtaatttaattttgaataatcgagacatttttcttacacactacctgggagtataatattactaacaaaagatttaagtattttataaaatctgtagtttttccaaaatgtcatttctcttaaatattatctaaactgctatcttaatttaggaaacagataaattgcagtaagtttacaggtcggtatcttgctatctaaaatcttgccgcttgtt

SEQ ID NO: 3529 - DNA, 6000 bp, Homo sapiens
cttggtactcagccttctgagtagccgggactataggcatgcgccaccacacccagctaatttttgtatctttagtagagacagggtttcgccatgttggccaggctggtctcaaacacctgacctcaagtaatctgtctgccttggcctcccaaagcgctgggattataggcgtgaaccaccacactcagcctgatatttgtttacaggtttttcttttgatgtaaaatttacatacaatgaaatgcacaaatctttagcatatatttgctgcattttgacaagtgcttacccttgtgtgacccaaactcttatcaaggtatagaatatgaccgttaccccagaaagttcctttttctccttcccagttaatcttcaagcttccttccctgtattttacttgtttatttctttttattattattatttcaaattatttatttattttttgagatggaatctccctttgtctcccaggctggagagcagtggcacgatcttggctcactgcaacctccgcctcctgggttcaagtgattctcctgcctcagcctcctgagtcgctgggattacaggcatgcgccaccatgctcggctaatttttgtcttcttagtagagatggggtttcgcgatgttgcccaccttggttttgaactcctgacctcaggtgatccacccaccttggcctcccaaagtgctagaattacaggcatgagccactgtgcccagtcctttttttttttgttccagtgaagttagagcaacagaatacagagtatgtggacaggttgtgggtgtagttcttgcagaatagaatcctatacttccgtaatatgtttgtatttggtcagaccatggtattcactagcataaatggtagcatggtattcaccttttgtaatgacttagagtgaggtatttccattcttttactcttataaataatgttgtcatgaacattttcttataaatctttatacatatgcatgattattaatagtcaaaatagtaatattggccaggtgcggtggctcacgtctgtaattccagcactttgggagaccaaggcgggtggaccaccagaggccaggagttcaagacaagcctgggcaacatggtgaaaccccatctctactaaaattacaaaaaattagctgggcatggtgatgtgcgcctgtagtgccatctgcttgggaggctaagccatgagaataacgtgaacctggaggtaggggttgtagtgagctgagatcatgccactgtactccagcctgggcaacagagcaagactctgtctcaaaaaaaaaaattagtaacatcttcttttatctgaaccagatgaaactttggttctttaatggcatgaactggtcaaagtttctcacaggccctgtatttccaattaaattcagtgctcgaatgacatccagaaacctgcacagcttgcagctctctgcctgaagaggcaacatccgtcactgggtggcctggtcctgagcccttggcaatttgagggtgggcgttttgctcaaagacaattgctaaggctatatggaatatctggtgactgttccatccaaatagaggtgtctgaccttgtttctttcccagaggctgaaattggggtcctaaggtgaaatccagttgtaaattactttttctttatttggaatgtgaaatgaaaaatgtattcttgaggctgggtgcagtggctcacccttgtaatcccagcattttgggaggctgaggcaggcagatcacctaaggtcgggagttcgagaccagcctgaacaatatggtgaaaccccgtctctactaaaagtaaaaaattaaccaggtgtggtggcacatgcctgtaatcccagctactcgggaggctgaggcaggagaatcacttgtgcccaggaagcggaggttgcagtgagccgagatcgcgccattgcactccagcctgggcaacaagagcgaaacaccatctcaaaaaaaaaaaaaaatgtatttttagtctaaccattgacatatgtatcataaaaaacaagcaagctagatttctcaacaaaggttctctaagcaaggaatacacagacgttactctttctctgcagcctctttcaggatgggggactttgatattgccatacattcctcttagaaatcatcttaatttgttattttcatctactctagtgggaagataaaatcactacatggcagagccaggagtttcaggcccatttggggatttcctcaaggatatcttataaatgtaaatttgctggttattcatatgtattgcttaattgccttcccgtctccccagtgattatgccagctaccaccattattactaaaaaggttaactttttttaagcaattcatttttctgaactgtgtattagtttgctaagggatgtcatagcaaaagaaccaataaacaacataaatgtattttctcacagttatggaggctggaagtccaaggtgtaggcagagttggtgtcttttgaggacacactctgtggcttgtagatgatcatcttctcctagctctgtgtgtctgcatcctaatctctttataaagacaccagtcctattggattagggcccactcgtatgacctcattttactttaaagaccctatttccaaatatagtcccattctgagatgctgggggttaggactccaacatgtaaatttggtgagggagcagaatacaatttagtccataagaaatcataaaacacaaatatgtaagagaaatgtgagcataagaaaaagttaaaaagctcatacatagcttcctcagttggaacaaatcaaagtgctttcttgtttttgccatatgcacatctaattattggctcttactagtttacaataccaacagcaatgcaagtatatgtcagttttatcacaaactcagaattaggtattcttaaaaataagattagttatatttttattgtatttctcttttaattcagtttcccaatttcccttaatgaatttgctaggttgaaggttttcctatatatatataaatataactatatatatacatattttttttaatagatggagtcttgctctgtcacccaggctggagtgcagtggcacaatctcggctcactgcaacctctgcctcccaggttcaagcgattctcctgcctcagcctccctagtagctgggattataggtacctgccaccacaccggctaatttttgtttttttctgtatttttagtagagacagggtttcaccacgttggccaggctggtcactaactcctgacctcacgtaatccacccgccttggcctcccaaagtgctgggattacaggtgtgagccaacatccccagccttctttaatatatgttatttataatattggatgtgtgtgtgtgtgtgtgtgtgtgtgtgtgtgtgtgtgtgtgtttaaattaattttctagtagttgcctaatctgtagtgctgcttctaggatttctattaaaagaatatatattaaattcttattaaaggccagttatgatggctcataattaagatgccctaggagcaacaagagctgggtgggctactgatttccagatgggaatctggccatgtttataagacctggacttgaagatattgggcagccaacgaggcccatggaggagaattctggcgggctctccactgaagtacacctacctgctctcaccttcaatttgcctttaatgcctctccacttgatgtttacggctagccacttttaggatctgagccatcaagatgatggatgaaattgggtttggaacaagaaggcagggctattttgacccaggacacatttccaacatgctgtgaagaactctcagcatcaaataacatctgggtggaagaagttttgggaaagaagtctagctgtagatcacacaatgcttctaaatgggagaaaatgtccagctccatggcttagattctttgggaagtaggataactggctattccattttaggcaaggctgcctggccagaaacccatgtcttaccatttcgagtacattatggttggcttacaaatcgtagcctcatagagaactttttcttcttttagctactgtcttcctaaaataaaagtctctgtgcaaagcaatggaagaaacctcatattgttttttggggttgtcattttatgtaacttacaataatgactacggctcgtcttatacaagatgtaaaggatttgggagagggaatccagtgtgcatttaggggaagatggtgatgtagatagcatatttcaggaggctgggaagtgtcgagtgcttaaatatatgcttctcaaatttaatgggcatacaaattacctggtggtattattaaaatgtaacctctaattcagtagttttgggatgggtccatggacagcactttggttagttccccttgggactcccctttcccctcagagaagtgtagagggttggggtattgggcttaagaggagttccagactgtaaccatagctctaggtaactcccttctggaagtgatgtgttagcgactggaggagaaagggatccctgggatccttttcagctttactattctgatttggggttctgagattccaacaaagtggacttttgggagtcacagacctccatgggaatgatgaaagctgcgtaccttctttccgcacaaatgcaggcccacctttaattctgcaaaccactttaggccccgcgggcccgcagccctggtccaagacagctgtctgcttcacaggtcgcgcacccagagccgggcggttctgcagctcagcatctggcccgggctgcgcgtcgggctctggcgggggcgtgtcaggaggcgtgtccggggcgtgtcggaggcggggccaaggcgggggtaagcctcgcccctcggccgtgcgagaggccgagcttgctgcattgcagccgccgcggcgccgctcggctcttcactcccaacaatggcggctccgagcccgagcggcggcggcggctccgggggcggcagcggcagcggcacccccggccccgtagggtccccggcgccaggccacccggccgtcagcagcatgcagggtaaggaacgcggccgcgccgagatcccagccccctagcgcggcaacccgcgtcgtcgcggcctgccccagcggacgcccccggacccggctgaggaagccacggcagccgccggcttctccctctctccctccccggcttcccgccccgctcccggccgcctccggcccggcttggatccgggctccggcccgcataggccccggccgcggcctctgcctgcgcttggcccctgggccctaccgggctctcagcaggcccgcagggcccacctggtccgggaccgcccccgcggccgtccccatcgcccccgccgcttacctggcgcccgcccggcccccgtttccgggaacgcgccggctcggggctgcggcggagcgggaggggcgtcgggcctgccccctggtccctgacgccgctcaggtaggcggcgaagacagcggccccggccggcgcccctcggccccgccgccgcagtgggccccgctcagggccatcttggctgtcgccgggcacagctggagccggaccaccgagctgacctcgggctacgggggcctcttggaacctgcgttttcaaacttttgcagggtttctgtgcgctggaagggatgggggtggggggcgggttgcccaggcctgtgccacctgtaaggtaggtaggctgcattggcctgggagaggcattttgttccaggccagggatttctgtgttagcattgcgtgcaggaagaaaaaaaaaaaaaaaaaaaaagaagacttaatttggtttaaatggagagatacaggaaatagacaggggtcaaagtgatactgtagtgtctggacatttgaggcagctctgctaattaatgactttccccactgggaatgcttattagctgtgtatggctttt

SEQ ID NO: 3530 - DNA, 6000 bp, Homo sapiens
aaaaacagataaacaaaatcaaaagcaggacatttcatatacattttatattcaaatatttttgggagaaataactacattgattttaaatctcttgactttttcttaacagatatacttcattacattttaaagtactgggcgtgttttctaaagcagaatcaagctatcatctttctacttaaactgatacataaaaatgctcagctaagggtaaatagctaaggactcgactggtcacaaagttttctgtaaatcagaactttaagagaatcagaggcacctacaacatatactttctaactatttcttgtaacaagtattttacaaatggctcaatgtttttctgaatcaattatagattctattctaaccattttaagaaaacatctattgaaaactgacatttctcagctaagcgatctttgaaatctattacattttaagtgattagtagctacagcaggcaaataatcatgtctaataacaatctgtatatacttatagatattctataattttcaaagcactttcacatgcattaagaatgtgattcttacaatggccctacaggttaggcattatccctattttaacagatgagaaatttctgaacagagagttgagaaaagttagggaatttccctaaaatctcagtgtttgtaaacagcagagcagttaccttaaccatggttttctgagtctaagtccagtgctctttacacttcaacatccttttgtttcttaaacattactacatgctatgggaacgctagctgctacagctactactggaaaaggaatcatcctgcctatgcaatttcattatagaagctgttgaattctcaactggcaagctctattaatcagaatatgctattctctaacatgccaaccatactatctagtactatttgctatacatatctaagattaattacctggtataacgggatcttctctttacaggattcacactaacccagctaaagtcacgaggctttagatttgccacaagggaaagccctagccatggctaggaaggttcttgaatgctacaagtcaattccgtactttaggttggctaaaatttcttggactaaagaataatacttttccacagaatgaggccctaatatgcaagaaattttcctattaaatctatctacattaacaaattattgatgaaacattaagaataaaaacatttctcagagtagttaatttgagtattgtttcctctctcaaatgcaaactcatcctaatgccaaatatactttcataaaaccacttacctaacttggcaaacagatctacattttgttagctttagtcatcaaagaaccaaagcctaagaactactcaacgtataaaggttgggtgtgtttgtgaatgaacatgaaaaaaaaatgagtcagaatgagtgaagacactcaaatcttttgagtaataacaaaattagcagctattccctattatctgagggacagtggcaaaaatggccagattagaagccataactgttagcataaacatgcaaccaaagctacgtctgttgattactcttataatcaaattcactataaatcccattccaaccatctacccatcccctatgaaaaaaatgagtagagcaaattgatagctagacttctgtttcatatcgttcacattgtaattcatttgagagtcctcagatccagaaaaaaacagatccggagtttgaagtagaataaaatctcatctaggatactctgaaaggactgctcaataatgaaaagtggggaaatcaacaggttagagagaacagtgggacctagtaatatgaactaaagaaattgtgtggtaaataatgagaggttagggactcatttaccaatagtaaaagggaccattaatgagaccataacaatattgtcgctactaacaatgatggctaatgtgtattgcatccttactacatgtcaggtcccaggcttacatgcattctcaaagccaccggggaggtaagcgttattcccactttccaagtgagaaactgaggcttcgaaaggccaagttcattgcccctggtcacaaaacgcatatctgaatcctggccaagagattcaaacccagaactccagagctctggttcttaagcagtatattaagaaagcaatattggccagcctggaccactcttgggccataaacatgaagccatgaaaaagtattcaaggttatccagtgcccaccacagtgcttaccacataagaggatgtccaatgtctactgcatgaaacattccttatgttccacaactgaatcctgctgtttcagagagcatggtcattaacaactcccagaaaggaagttttttgagtggcaagtataattagattgggggagaaggaatggaagtacatcaaacatcttctaaggcccactctgtgaagtctgatctaaagcaaaagaagacccttggcagatgaagtacagtatgggaggtgtgactcccatacaattggatgggaatctttctttttgggttcttataagatttcctcttcaagggcctcacaattaagatacagaacaaaacaaaccaaaaagaaggatcctaaattgctgcttaagttcaagctttataacagactgttctagacaacatcctgagaatatcaagcacttcattctgactaatgaaaaaagtttcaagaacaagatataacacattcctgaatcaatcaagactagacacaatattgataaaaaagaaaattcggcaataattcatagagaggtcttaggtcctttttccttctaaaatgggttctgcttattagaaagtttagttaactgggtatcaacatacaagggctgaggagaacggacagcatcagaaaaagtcctaaccactgccttaggagttcctagaacactccaagctcttccctgctttggaaccttcatacacacagttcctctgcctagaaccgtcttcaggtaaaagagggttagctttccagacaagccttctctgaccatcttatcaagcggactgccctctattatcttctatcacaaaacccagcttgttacctttattacttttccaactagtaatttttcatgtttagctaaatagccttccctcccccatcttcacagggggataacctccatgaggacagttagagatgttcaattctctataaactcagcatgagcgttttatgcagatgctcaataaatattttttgaaccaaaaaaacacactgtatccagctatttcaaactgtcagcctccccaccaataaaacaaacaaacaaatcaccttgtttttataagctttgtaagtcacccatctggaacaagaaatacaatcctaaattgtcattttgccatttcatttcgccccaaccaccaccacctaaattgtaaagctgtacagtcaggaagtcaatcttatacttcatcagtataatgtgctgtgcaacacagtgggcatccaataactaattcaatttgaatgaattatctgagggcctgcacagaaagtgtcctctaagctctgacatcatcctgtctatatatctatcactggtttttatgtatattaaaattatttcatggggagggtgacagggatgtaaagataaataaaatcctgtctcttctttctgaattatggcatgctctataaacatgaactattcaataaatgtctgttgaacctaactaaatgctagaagccctttaagaggaatggaatcaaaaagtaaccatggtcacactgactaccaagggtaccccaacccttattctgttaataattcaacacaagcagtttgctaaagttgtcaagagagttctgagattccctgttttaaaaatagcattactactcaaaattccccagtaaatttaaggaaatggtccctaacaggctcgggcctggcctggtattttcacaacaccccctgtcaaaagccatacacagctaataagcattcccagtggggaaagtcattaattagcagagctgcctcaaatgtccagacactacagtatcactttgacccctgtctatttcctgtatctctccatttaaaccaaattaagtcttctttttttttttttttttttttcttcctgcacgcaatgctaacacagaaatccctggcctggaacaaaatgcctctcccaggccaatgcagcctacctaccttacaggtggcacaggcctgggcaacccgccccccacccccatcccttccagcgcacagaaaccctgcaaaagtttgaaaacgcaggttccaagaggcccccgtagcccgaggtcagctcggtggtccggctccagctgtgcccggcgacagccaagatggccctgagcggggcccactgcggcggcggggccgaggggcgccggccggggccgctgtcttcgccgcctacctgagcggcgtcagggaccagggggcaggcccgacgcccctcccgctccgccgcagccccgagccggcgcgttcccggaaacgggggccgggcgggcgccaggtaagcggcgggggcgatggggacggccgcgggggcggtcccggaccaggtgggccctgcgggcctgctgagagcccggtagggcccaggggccaagcgcaggcagaggccgcggccggggcctatgcgggccggagcccggatccaagccgggccggaggcggccgggagcggggcgggaagccggggagggagagagggagaagccggcggctgccgtggcttcctcagccgggtccgggggcgtccgctggggcaggccgcgacgacgcgggttgccgcgctagggggctgggatctcggcgcggccgcgttccttaccctgcatgctgctgacggccgggtggcctggcgccggggaccctacggggccgggggtgccgctgccgctgccgcccccggagccgccgccgccgctcgggctcggagccgccattgttgggagtgaagagccgagcggcgccgcggcggctgcaatgcagcaagctcggcctctcgcacggccgaggggcgaggcttacccccgccttggccccgcctccgacacgccccggacacgcctcctgacacgcccccgccagagcccgacgcgcagcccgggccagatgctgagctgcagaaccgcccggctctgggtgcgcgacctgtgaagcagacagctgtcttggaccagggctgcgggcccgcggggcctaaagtggtttgcagaattaaaggtgggcctgcatttgtgcggaaagaaggtacgcagctttcatcattcccatggaggtctgtgactcccaaaagtccactttgttggaatctcagaaccccaaatcagaatagtaaagctgaaaaggatcccagggatccctttctcctccagtcgctaacacatcacttccagaagggagttacctagagctatggttacagtctggaactcctcttaagcccaataccccaaccctctacacttctctgaggggaaaggggagtcccaaggggaactaaccaaagtgctgtccatggacccatcccaaaactactgaattagaggttacattttaataataccaccaggtaatttgtatgcccattaaatttgagaagcatatatttaagcactcgacacttcccagcctcctgaaatatgctatctacatcaccatcttcccctaaatgcacactggattccctctcccaaatcctttacatcttgtataagacgagccgtagtcattattgtaagttacataaaatgacaaccccaaaaaacaatatgaggtttcttccattgctttgcacagagacttttattttaggaagacagtagctaaaagaagaaaaagttctctatgaggctacgatttgtaagccaaccataatgtactcgaaatggtaagacatgggtttctggccaggcagccttgcctaaaatggaatagccagttatcctacttcccaaagaa

SEQ ID NO: 3531 - DNA, 6000 bp, Homo sapiens
ctgatatactatatctctagtcctcagcattattcttcataaaaccaaatacccacttatttgctgagtggccagatctaagaggaagcttttctgcctttacagggatggccttttgaataattgagcagacgaagcattggaatatgaaatatttgtaaatcactggtcagctctagtcaacctcttggtgcttttgtttcctctggtcccagatgtgtctcctggctctggaaagggagaggccagtagtaggatcagaaaagggagcaaccaaccagaaaacacctaagttatgaggtttgtgcttttcctgacttagagaaagtccatatctcaggagataaacagttctggctgcagctctctggagtaatcccctgaaatggtgccagagggagcatgtagggtagccaagattctgactccttgaaccatggtctagcaaagccctcagatcctgcatgagagcgcttcctatttgtaaaatacccttgggatctctccagtgaggcttgggggccagatcagccccattcctagctgagacttgcagagctcctctgagagattggaacttcgcattccttgagatggacattcacattctctacctgctcagccctcagcgagccagccccactgcctctgccgcccttctcacacacacaagcctgctgccgcagttgccagagcattcggtcaaagcagggcgccacaaccacagagcaaatgagggaagtggggccgagacacaaacatcctgtcctcatgacatcaaatggctccagcttgagaatcggggtcactgcccagtgacatacacaaacgtctcatccctctagccactgccagtaagagggcattttctcctgagtccatggattgaaaaagtgctatcctttggcttgtgatgtcagtgacaggtgacagtgactggaacgcgccgctgctgaccggatgagtagggatatgttgagcagaggccaggcaggagttctgctgaggatgaagtgagtgcaggctcgcaggacgttccttctctttcaaggcaccaatttaagagagagggactgaatgaggagcacagagctggagctccctctgttcagtccgccccatctttccaggactcccccttgcccagctctgtttttctttgcaggacttgggggttctcaggccaggtctttcaccttgtgtatgatcgcttccagttaaagatctcctccaggttggaagaggaagagacttcccgcctctgcaaggctcccccacgacgacggcccccaaggaaggaagctctgtgcctgctcagccctttaatcctctcctccgttcggaagaactcagtcaaggcccggaaggactccaagatgacctcatggctccaggctggcaagggctcctggcgcaggaagccacagtggcctccgtggcgactgagcaggaggaagaagtaggggttgctgtggaagagttcagttgtcagagtgtggtctgggggtccacacacggggtcgtcagcactgcagatacacagcacaggcacggctgcctcatcgacatcccggagcgggtcgttgcggtcccagtaggtatcccagctgatggggaagcttttggtgtggcagaagagagcctcctcaaactctcgaagggaacggctcctgaacagtctgctggtgtccacagtgtcctccagggctgtggcatacctggcagcgaggtgtttagtggggaaggtgggaaagagagggaagaatgagaacatcaggtgacagcagatgagacagacagacagcccgcaggccagatctgtccacagaggctttctttggccatttagggcttcgaaaacgtttaatttcatggccatcatttaaaaccagataaggctggttgtggtggctcacgcctgtaatccaaacactctgggaggccaacgaggtgggtggatcacttaagtccaggagtttgagaacagcctgggcaacagggcgaaaacccatctctaaaaaaaaaaaaaaaaaaaattagcttggcatggtggctcagtcccagctattcaggaggctgaggtgggaggactgcttgagcctgggaggtcaaggctgcagtgagctatgattgcaccattgcattccagcctgggtgacacagagagaccatttcaaaaaataaaataaaataatataaaataataaaagtggccaggcgcggtggctcatgcctgtaatcccagaactttgggaggctgaggcaggtggatcacgaggtcaagagattgagaccatcctggccaacacggtgaaaccccatctctactaaaaatacaaaaataagctgggcgtggtggcggacacctgtagtcccagctacttgggaggctgaggcaggagaatcacttgaacccaggaggcagaggttgcagtgagccgagatcgtgccactgcgttccagcctgctgacagagcgagactccatctcaaaaaataaataaataaataaataaaataataaaattagaagatttcacataaaatgcaggtgtctggcttctctagggaagtgggaagatccagccacatgggtgggcatttctcagcacaacaatgggttcctccctccttcctgtgtgacggtgcccactaggcctgtcattcacagcatcactgcacctgtctatgtgccctaggggcagcatttgacttcacagctgctgacagttctcctaacctcaacttctggccctctgtggagaacttgctatgaactgtaacctactaaactgctcctagaagaacttgctgctcagagtatccaaaccagcaggtgacacctctgctaataattcacatttgactttaggttgcattcattgtttttatttttgctttttaaactaacatcctgtcctggtaatgtcacatgagtgtgatgttgatcaggtatacctggggcagatattcctagagagtgtgctgcctggcagaggaagcaattgagttggtcattaatttactgggtggattcctaaatgggggcctcagagcaactgctttgggtaacagggaacatctttgctgtttctagacccctggagagggcttggcatcctgacaaggaggccaggatgagcagctccgtcttttgaatagctcaatccagcctcagacagttgaaattagatgttaatctctgaccaggcatagtggctcacatctataatcccagcactttgggaggccaaggcgggtggattccctgagtctagacattcaagaccagcctggacaacatggcacaatcccatctttatgaaaaatacaaaaattaaccgggcatggtggcatgtgcctgtagtctcagctactcgggaggctgaggtgggggtctggcccccacatcccaggtctttctgctacaccacactgttgccataatgacttcgacctcattctgccatctcctaagaaagccagagtgcaggctaggaatgtcacctgagcccaggaactcaaggctgcaatgagtggtgattccaccactgcactccagcctgggcgacagagtaagatcttgcctcaaaaaacaaacaaacagctgggcacggtggctcacacctgtaatcctagcactttgaaagctggggcaggcggatcacttgacattaggggttccagaccagcctggcaaacatggagaaaccccgtctctaccaaaaaaaatattaaaaattagctgggtgtggtggtgcacgcctgtagtccccagccacttcagaggctaaggcaggagaatagcttgcacccaggaggtggaggttacagtgagccgagatcatgtcactacacttcagcctgggtgacaaagtgagactgtctaaaaaaaaaaatacttttaaaaaataataattttaataaatgcctacatatatgcgtgtgtgtgtatatatatatataacatttttttttgagacagggtgttgctctgtcacccaggctagagtgcagtggcctgaccagggctctctgcagcctcgaacttctgggcttcggtgatcctcccatctcaacctcctgagtagctgggaccacagatgcatgccaccacacccggctaattaaaaaaagaaatttttgtagagacaggttttcctatgttgcccaagttagtctcaaactcttgggctcaagtgatcctcctgccttggcctcccaaagtgctgggattacaggcgggagccactgcacctggcctcaaatgccaccatatttctgattcctgtcacctccaggctcagagactgtgagtaaacattctgggcagataatcgtttgcaattgcttccagagtgctctttgctgagctgttaagctgtgggctaagtggtaaatgtcaggtatctctgctgtcgtgggccaggtgctcagattgctaggatacagcagggggtgccgagatgaggcaaggggccgggttaggagtccctgctctagcacagcgatactagctgagtccatcgatgacctttaaacccgcttccccggttctgtctagattacagggtttggaaggctttggaagatgtgttcagagaactttgcccaaactggcccacgcctgttccaatgctatgcatagctgtttctgattcttagccagctcaggccctctattctttccatgctggtctgcggcctccgttacccacctgctgagggcgatcttctggtggagcagaaagccccgctcgtagggccagggcaggccggcctcgaaccactctcggcagcgcagcacgggcgagatgcaggcggcgcctgtcacgtagctggaggagccgcactcgcccaggtaggacaggagcagcgccgagcccgagccttcgctcaccgcgaacagcggcgccgccgggtgtcggaagcggatgtatgtgaccgcctccttgaggtcggacgggtccccgaaaggctgcagccgggggctgaccagtgggcaaccgtggtggccgcggcgatggaagatgaccgggtagtagccgcgctccagggcgagcaagcaaaggccgagcacgttgcgggtgaggcgaccccacgcattggggatcaccagaagcaccgcaggaaggcccccggcgctggtgatccggcggccccgaacacaaggtcctaccacccagtccagggccactagcccatcgtccgccaactgcaggtactcccgggccagctcaggcccaggcgctacgggcaggacgaagtggcagagggtctgcaggtggggcccggagaaccaggagcgcgggccggcctccagcgcctctgagcgccgcagggcgcgcagcaggcactgggccagggccgacggcttgcaaacaaggctgcaccctcccggcagtggctcgcgcccgtcgctgaactggtccgccgggcctccgccgtccgcctcctccccgtcgtctcggtcttgggcccccggcagggtcctctctccgacggcgcgcccccagggtccccggagccgcgggccgagcaggccgagaagggcgagcacggccaagatgagcgcgagggcggcgccccacggcggcatggcgaagctggagagccccggcgggcagcgggcggcggggccgtctactcggcgagctccgcgctttgcccgcggctccgcccgccggcggcggctgcccagggccctcccgcgcgggcgcgctctggattggccgtggccgggcagaggcagccagttcgggcccggctgccctcgcccgccccccacccccgccccggccctttgtacagcaattgcaacaagtgggagcagagggtgagaggagccggggccaccagggagggagggcgcgccggcagccggaagggagtggggagggcacgagccggggagagcggtgttggccatggagacgtggggagactggaggccgaggcttggggacccgactgtcatcagggtcttccgccagaccctggg

SEQ ID NO: 3532 - DNA, 6000 bp, Homo sapiens
ctcaagttctcccatccaggggaccagtttaaaggtactcccaggatagctggatggctcttctaccttcagggcccaggaaaggacaaagggccctgggtattggcatgtacccactcttgcctctgagtgttcctttcacccttcctctccatcaagtgccacccttcaaagctcacagcatgcctggataatcctgccagactcagaccacactctagccatatttccctgcaggtgtaacgatggctctacaggtccacaatccaagccataagcaacccccaaatgaagaccatcgatccaatctatacagtctcccaagagcatccaaatacagggcaggcaggcagcaggtgcacaatctcaggatggaaatactccatcaatcattcattattctttgattgagttgacttggtgctcagtgctgtgctagatgctgtgggagatgccaaagaactcctggactctgcttgcaaggagtgtgtgagaaactcagggaaacaactaatgcaaataaaacagcaaactaataaaacttagtgattagttgttaaattatcagagatagattcagaggaggaggggaggaataaaggctgatgccatcgggcagtgtctcagggggagctgatgccagctgggactgggaagatggctgggggagtatggcaggagggcagggagctgcactctccgagtcaggataggccaggtgtggaggagaataaacaggagcaaaggggctgtggtaagggcgaggctggcactcatttgtgtggcaaacagcccgacacaactggagaggaaccaaggatgtggagaggtcagacgaagcttacttaagtaaggcctgaaaagccaggccggagaatatggccacgataaggtgggaaataaggagccattgacagtttgtgaacagaggaatgacttcatgaaagggctgtttgaggaaaggaatctgataggtggcgtgaggcaacaactcttggcctggagctattacagagaatttttttttttttttgagacagtctcgctctgtcgccaggctggagtgcagtggcatggtctcggctcactgcaacctctgcctcctgggctcaagcaattctcctgcctcagcctcccaagtagctgggattacaggggtgtgccaccacgcccagctaatttttgtatttttagtagagacagggtttcaccatgttggccaagctggtcttgaactcctgacctcaggtgttccacccgcctcagcctcctaaagtactgggattacaggtgtgagccaccatgcctggccaatttaagttaggtatttcaggccaggcatggtggctcacacctgtaatcccagcacttgggaggctgaggcaggcagatcacttgaggtcaggagctcaagaccagcgtgggcaacatggtgaaacctcgtctctactaaaaatacaaaattagctaagctaggtggcacacgcctgtaatcccagctgctcgggaggctgtggcataagaattgcttgaacctggaggcagaggttgcagtgagtgccactgcactccagcctgggcaacagagtgagattccatttcaaataataataataataagtatttcaaaggaaaattcagaggagctggcgatgaagatggagatgctaccacgcaagctgagcccgcagtgtggagcctggcaactggaggcacactccttgcacgatgcagctctgtactgtacacggtgctggcacataccctccctcgctgctcacaggtagagacagaattaataccctctcctacagaaagctggggcccacaaagtcaggagacttcccgctgtctcctcagggagctggagcctgggttttttccagctactctcagagagagttccactcacagccacttgtccacagagccagctacccaacagcatcctgacacagcattgcagatgacaggcctatggctcactgtctttgagccatctgtcctggggctgatctgtcctgggcttggaggtggggcagagaactagaaccctgcctctgcctgagggaagtggtaaggaatggggccgatcagcagaacaggcagcgaagcctgctaggagcgcctgtctccaggcgtggacaccaagggtggtgggcccctgcttgtactcacctgccctgggctcactcgtgtgtaggtcactcttggtgacacctatacatggggaaagaacagagcttagggcagttgggggactccgtgtgtgtgtggtggggaggggacggcaggccccaagcgccaggctgggatggagaagttggctactgaggactgaggaaccggcagaggtcctcagatggtgactgtggagggtgcggcgagaacagagcgggactgggctagcctttcacatccctctctccctgggccctccagggctcctacctgcggaggcagaggccacaggctctcgggacaatgggctcccgcctcctccgccggtccagccatcacctgtgggtccaaagcgaagagttggggcgctggacgcggcgaggccctgccctctctctccccaggcccagcccgccagcggaagaactccgcgtccccctcggcgcgccactccttccaggacgaacttttggcaaagcgctttgagctcgcgggccgaggccttcccaggagcgggtcaccttacctcgctgggacccaggagcctcgcgagggctgccaggagaagcagttggggcgaaggcggaggaggcgccattccaagcggccccgggcccggcccgccgcccagccgctccgccagcgagggagcgcgcgcgccccgcccctccagccccagcgcccccgcgccgcccgcgccgcccgcgcgtccgttggccctgggctcgcgcgcgcccctccccagacagtgggcccccggtatcgccccgccccaatgcccgcccacagcagcggagtgtgcgcgcacgcgtcttaaacccgaagccggaaaagttaagtgtaggaaccgggtcagcgcgcaaggctcagtagggcaggcggggggcccctttcctcgtccggggattcgtctcagcaggtccctgcagtctgtagagcagctgcacagctgcagcgcctggatgagatcgtggagcggagtgtaaggccggaaatggaatccctgtggaccgggtggcccaggctggggagacgggtacactcccctggcaaacccgcttcagatttgtcggtgtgacctgcaatgagaagaggggcagaatcatgaagtcaggaagagctgctgaagggagagggtcccacctctggagcttcgccgtcggcccaccccgctcccgccctcgcaaatagggtccaacgcggaggagcctcgggaggtgtctccgctccccaaactctccaaacccagaagccccgggaggccggagctagccgagaggctgctgtcttccccacctccgccgtcgcccagcggtggcaggcgcgcgtctagaaagagattggtcgccgcgagatggggacgccacaggcctcacccccaggaggtgcgctggccggcccgccccgcagcggggcgctggttctggttccctctccaggatttgggggggaaacgtgggtagagagcgagggtcgagatgcctatcccaaagcttggaaacagcgagaacgtgttatttccgtggtctcccatgcaccccggtttacgaggcgttccttgtaggtcggacgggcatccctgtcgcagggcgcctgagtgtgtccttttctccgactgactctcggaggcttggggctgctgtttctggggaagccactcccgggctgaggatttccttgatgtggagccccgagctcgcggggacgggggcgaggagtccacgggacccgcactgatgcaggcggggaagcagcagcctcccgccagcggctcaagacgccgcgctcgacctctctagcccagtgccggaccccgcccagccaagttattgcggggttgcggggccgggcgggggagagcagggccgcccgagggcagagcgcgcgcgcggccgccgccccacggggtcccgggagccggcgcccggagctgcgacttactcacctctcccttctgcttcttttcatcggcctctgagggcgcagcgcccagggtctggcggaagaccctgatgacagtcgggtccccaagcctcggcctccagtctccccacgtctccatggccaacaccgctctccccggctcgtgccctccccactcccttccggctgccggcgcgccctccctccctggtggccccggctcctctcaccctctgctcccacttgttgcaattgctgtacaaagggccggggcgggggtggggggcgggcgagggcagccgggcccgaactggctgcctctgcccggccacggccaatccagagcgcgcccgcgcgggagggccctgggcagccgccgccggcgggcggagccgcgggcaaagcgcggagctcgccgagtagacggccccgccgcccgctgcccgccggggctctccagcttcgccatgccgccgtggggcgccgccctcgcgctcatcttggccgtgctcgcccttctcggcctgctcggcccgcggctccggggaccctgggggcgcgccgtcggagagaggaccctgccgggggcccaagaccgagacgacggggaggaggcggacggcggaggcccggcggaccagttcagcgacgggcgcgagccactgccgggagggtgcagccttgtttgcaagccgtcggccctggcccagtgcctgctgcgcgccctgcggcgctcagaggcgctggaggccggcccgcgctcctggttctccgggccccacctgcagaccctctgccacttcgtcctgcccgtagcgcctgggcctgagctggcccgggagtacctgcagttggcggacgatgggctagtggccctggactgggtggtaggaccttgtgttcggggccgccggatcaccagcgccgggggccttcctgcggtgcttctggtgatccccaatgcgtggggtcgcctcacccgcaacgtgctcggcctttgcttgctcgccctggagcgcggctactacccggtcatcttccatcgccgcggccaccacggttgcccactggtcagcccccggctgcagcctttcggggacccgtccgacctcaaggaggcggtcacatacatccgcttccgacacccggcggcgccgctgttcgcggtgagcgaaggctcgggctcggcgctgctcctgtcctacctgggcgagtgcggctcctccagctacgtgacaggcgccgcctgcatctcgcccgtgctgcgctgccgagagtggttcgaggccggcctgccctggccctacgagcggggctttctgctccaccagaagatcgccctcagcaggtgggtaacggaggccgcagaccagcatggaaagaatagagggcctgagctggctaagaatcagaaacagctatgcatagcattggaacaggcgtgggccagtttgggcaaagttctctgaacacatcttccaaagccttccaaaccctgtaatctagacagaaccggggaagcgggtttaaaggtcatcgatggactcagctagtatcgctgtgctagagcagggactcctaacccggccccttgcctcatctcggcaccccctgctgtatcctagcaatctgagcacctggcccacgacagcagagatacctgacatttaccacttagcccacagcttaacagctcagcaaagagcactctggaagcaattgcaaacgattatctgcccagaatgtttactcacagtctctgagcctggaggtgacaggaatcagaaatatggtggcatttgaggccaggtgcagtggctcccgcctgtaatcccagcactttgggaggccaaggcaggaggatcacttgagcccaagagtttgagactaacttgg

SEQ ID NO: 3533 - DNA, 6000 bp, Homo sapiens
cctccgcctcctcatcagccagtgggcagcccaggctggctctacccaggccatctccagcgccagcccccatgcagtcagcaccaggggctacgagaggaggtaactgttagagctacgaggaaggtggggacaaacaagaggaaacccttgaattttccattccctgcacacggggccatagccttctgccagggccaggcaagcgcctttcatcagctacatacccgatcctgcgtgaggctgaagtcaggggtgagggaagggttagccatacaagcataggccaggagggcaagctggagcttcagccagggatgggcacaggggtggtagaggaaggtgacatcctcagcctggaggaaaggcacagagacatcaaagcaggcccagagccctcccagagaatctcaagttctcccatccaggggaccagtttaaaggtactcccaggatagctggatggctcttctaccttcagggcccaggaaaggacaaagggccctgggtattggcatgtacccactcttgcctctgagtgttcctttcacccttcctctccatcaagtgccacccttcaaagctcacagcatgcctggataatcctgccagactcagaccacactctagccatatttccctgcaggtgtaacgatggctctacaggtccacaatccaagccataagcaacccccaaatgaagaccatcgatccaatctatacagtctcccaagagcatccaaatacagggcaggcaggcagcaggtgcacaatctcaggatggaaatactccatcaatcattcattattctttgattgagttgacttggtgctcagtgctgtgctagatgctgtgggagatgccaaagaactcctggactctgcttgcaaggagtgtgtgagaaactcagggaaacaactaatgcaaataaaacagcaaactaataaaacttagtgattagttgttaaattatcagagatagattcagaggaggaggggaggaataaaggctgatgccatcgggcagtgtctcagggggagctgatgccagctgggactgggaagatggctgggggagtatggcaggagggcagggagctgcactctccgagtcaggataggccaggtgtggaggagaataaacaggagcaaaggggctgtggtaagggcgaggctggcactcatttgtgtggcaaacagcccgacacaactggagaggaaccaaggatgtggagaggtcagacgaagcttacttaagtaaggcctgaaaagccaggccggagaatatggccacgataaggtgggaaataaggagccattgacagtttgtgaacagaggaatgacttcatgaaagggctgtttgaggaaaggaatctgataggtggcgtgaggcaacaactcttggcctggagctattacagagaatttttttttttttttgagacagtctcgctctgtcgccaggctggagtgcagtggcatggtctcggctcactgcaacctctgcctcctgggctcaagcaattctcctgcctcagcctcccaagtagctgggattacaggggtgtgccaccacgcccagctaatttttgtatttttagtagagacagggtttcaccatgttggccaagctggtcttgaactcctgacctcaggtgttccacccgcctcagcctcctaaagtactgggattacaggtgtgagccaccatgcctggccaatttaagttaggtatttcaggccaggcatggtggctcacacctgtaatcccagcacttgggaggctgaggcaggcagatcacttgaggtcaggagctcaagaccagcgtgggcaacatggtgaaacctcgtctctactaaaaatacaaaattagctaagctaggtggcacacgcctgtaatcccagctgctcgggaggctgtggcataagaattgcttgaacctggaggcagaggttgcagtgagtgccactgcactccagcctgggcaacagagtgagattccatttcaaataataataataataagtatttcaaaggaaaattcagaggagctggcgatgaagatggagatgctaccacgcaagctgagcccgcagtgtggagcctggcaactggaggcacactccttgcacgatgcagctctgtactgtacacggtgctggcacataccctccctcgctgctcacaggtagagacagaattaataccctctcctacagaaagctggggcccacaaagtcaggagacttcccgctgtctcctcagggagctggagcctgggttttttccagctactctcagagagagttccactcacagccacttgtccacagagccagctacccaacagcatcctgacacagcattgcagatgacaggcctatggctcactgtctttgagccatctgtcctggggctgatctgtcctgggcttggaggtggggcagagaactagaaccctgcctctgcctgagggaagtggtaaggaatggggccgatcagcagaacaggcagcgaagcctgctaggagcgcctgtctccaggcgtggacaccaagggtggtgggcccctgcttgtactcacctgccctgggctcactcgtgtgtaggtcactcttggtgacacctatacatggggaaagaacagagcttagggcagttgggggactccgtgtgtgtgtggtggggaggggacggcaggccccaagcgccaggctgggatggagaagttggctactgaggactgaggaaccggcagaggtcctcagatggtgactgtggagggtgcggcgagaacagagcgggactgggctagcctttcacatccctctctccctgggccctccagggctcctacctgcggaggcagaggccacaggctctcgggacaatgggctcccgcctcctccgccggtccagccatcacctgtgggtccaaagcgaagagttggggcgctggacgcggcgaggccctgccctctctctccccaggcccagcccgccagcggaagaactccgcgtccccctcggcgcgccactccttccaggacgaacttttggcaaagcgctttgagctcgcgggccgaggccttcccaggagcgggtcaccttacctcgctgggacccaggagcctcgcgagggctgccaggagaagcagttggggcgaaggcggaggaggcgccattccaagcggccccgggcccggcccgccgcccagccgctccgccagcgagggagcgcgcgcgccccgcccctccagccccagcgcccccgcgccgcccgcgccgcccgcgcgtccgttggccctgggctcgcgcgcgcccctccccagacagtgggcccccggtatcgccccgccccaatgcccgcccacagcagcggagtgtgcgcgcacgcgtcttaaacccgaagccggaaaagttaagtgtaggaaccgggtcagcgcgcaaggctcagtagggcaggcggggggcccctttcctcgtccggggattcgtctcagcaggtccctgcagtctgtagagcagctgcacagctgcagcgcctggatgagatcgtggagcggagtgtaaggccggaaatggaatccctgtggaccgggtggcccaggctggggagacgggtacactcccctggcaaacccgcttcagatttgtcggtgtgacctgcaatgagaagaggggcagaatcatgaagtcaggaagagctgctgaagggagagggtcccacctctggagcttcgccgtcggcccaccccgctcccgccctcgcaaatagggtccaacgcggaggagcctcgggaggtgtctccgctccccaaactctccaaacccagaagccccgggaggccggagctagccgagaggctgctgtcttccccacctccgccgtcgcccagcggtggcaggcgcgcgtctagaaagagattggtcgccgcgagatggggacgccacaggcctcacccccaggaggtgcgctggccggcccgccccgcagcggggcgctggttctggttccctctccaggatttgggggggaaacgtgggtagagagcgagggtcgagatgcctatcccaaagcttggaaacagcgagaacgtgttatttccgtggtctcccatgcaccccggtttacgaggcgttccttgtaggtcggacgggcatccctgtcgcagggcgcctgagtgtgtccttttctccgactgactctcggaggcttggggctgctgtttctggggaagccactcccgggctgaggatttccttgatgtggagccccgagctcgcggggacgggggcgaggagtccacgggacccgcactgatgcaggcggggaagcagcagcctcccgccagcggctcaagacgccgcgctcgacctctctagcccagtgccggaccccgcccagccaagttattgcggggttgcggggccgggcgggggagagcagggccgcccgagggcagagcgcgcgcgcggccgccgccccacggggtcccgggagccggcgcccggagctgcgacttactcacctctcccttctgcttcttttcatcggcctctgagggcgcagcgcccagggtctggcggaagaccctgatgacagtcgggtccccaagcctcggcctccagtctccccacgtctccatggccaacaccgctctccccggctcgtgccctccccactcccttccggctgccggcgcgccctccctccctggtggccccggctcctctcaccctctgctcccacttgttgcaattgctgtacaaagggccggggcgggggtggggggcgggcgagggcagccgggcccgaactggctgcctctgcccggccacggccaatccagagcgcgcccgcgcgggagggccctgggcagccgccgccggcgggcggagccgcgggcaaagcgcggagctcgccgagtagacggccccgccgcccgctgcccgccggggctctccagcttcgccatgccgccgtggggcgccgccctcgcgctcatcttggccgtgctcgcccttctcggcctgctcggcccgcggctccggggaccctgggggcgcgccgtcggagagaggaccctgccgggggcccaagaccgagacgacggggaggaggcggacggcggaggcccggcggaccagttcagcgacgggcgcgagccactgccgggagggtgcagccttgtttgcaagccgtcggccctggcccagtgcctgctgcgcgccctgcggcgctcagaggcgctggaggccggcccgcgctcctggttctccgggccccacctgcagaccctctgccacttcgtcctgcccgtagcgcctgggcctgagctggcccgggagtacctgcagttggcggacgatgggctagtggccctggactgggtggtaggaccttgtgttcggggccgccggatcaccagcgccgggggccttcctgcggtgcttctggtgatccccaatgcgtggggtcgcctcacccgcaacgtgctcggcctttgcttgctcgccctggagcgcggctactacccggtcatcttccatcgccgcggccaccacggttgcccactggtcagcccccggctgcagcctttcggggacccgtccgacctcaaggaggcggtcacatacatccgcttccgacacccggcggcgccgctgttcgcggtgagcgaaggctcgggctcggcgctgctcctgtcctacctgggcgagtgcggctcctccagctacgtgacaggcgccgcctgcatctcgcccgtgctgcgctgccgagagtggttcgaggccggcctgccctggccctacgagcggggctttctgctccaccagaagatcgccctcagcaggtgggtaacggaggccgcagaccagcatggaaagaatagagggcctgagctggctaagaatcagaaacagctatgcatagcattggaacaggcgtgggccagtttgggcaaagttctctgaacacatcttccaaagcct

SEQ ID NO: 3534 - DNA, 6000 bp, Homo sapiens
ttccaggactcccccttgcccagctctgtttttctttgcaggacttgggggttctcaggccaggtctttcaccttgtgtatgatcgcttccagttaaagatctcctccaggttggaagaggaagagacttcccgcctctgcaaggctcccccacgacgacggcccccaaggaaggaagctctgtgcctgctcagccctttaatcctctcctccgttcggaagaactcagtcaaggcccggaaggactccaagatgacctcatggctccaggctggcaagggctcctggcgcaggaagccacagtggcctccgtggcgactgagcaggaggaagaagtaggggttgctgtggaagagttcagttgtcagagtgtggtctgggggtccacacacggggtcgtcagcactgcagatacacagcacaggcacggctgcctcatcgacatcccggagcgggtcgttgcggtcccagtaggtatcccagctgatggggaagcttttggtgtggcagaagagagcctcctcaaactctcgaagggaacggctcctgaacagtctgctggtgtccacagtgtcctccagggctgtggcatacctggcagcgaggtgtttagtggggaaggtgggaaagagagggaagaatgagaacatcaggtgacagcagatgagacagacagacagcccgcaggccagatctgtccacagaggctttctttggccatttagggcttcgaaaacgtttaatttcatggccatcatttaaaaccagataaggctggttgtggtggctcacgcctgtaatccaaacactctgggaggccaacgaggtgggtggatcacttaagtccaggagtttgagaacagcctgggcaacagggcgaaaacccatctctaaaaaaaaaaaaaaaaaaaattagcttggcatggtggctcagtcccagctattcaggaggctgaggtgggaggactgcttgagcctgggaggtcaaggctgcagtgagctatgattgcaccattgcattccagcctgggtgacacagagagaccatttcaaaaaataaaataaaataatataaaataataaaagtggccaggcgcggtggctcatgcctgtaatcccagaactttgggaggctgaggcaggtggatcacgaggtcaagagattgagaccatcctggccaacacggtgaaaccccatctctactaaaaatacaaaaataagctgggcgtggtggcggacacctgtagtcccagctacttgggaggctgaggcaggagaatcacttgaacccaggaggcagaggttgcagtgagccgagatcgtgccactgcgttccagcctgctgacagagcgagactccatctcaaaaaataaataaataaataaataaaataataaaattagaagatttcacataaaatgcaggtgtctggcttctctagggaagtgggaagatccagccacatgggtgggcatttctcagcacaacaatgggttcctccctccttcctgtgtgacggtgcccactaggcctgtcattcacagcatcactgcacctgtctatgtgccctaggggcagcatttgacttcacagctgctgacagttctcctaacctcaacttctggccctctgtggagaacttgctatgaactgtaacctactaaactgctcctagaagaacttgctgctcagagtatccaaaccagcaggtgacacctctgctaataattcacatttgactttaggttgcattcattgtttttatttttgctttttaaactaacatcctgtcctggtaatgtcacatgagtgtgatgttgatcaggtatacctggggcagatattcctagagagtgtgctgcctggcagaggaagcaattgagttggtcattaatttactgggtggattcctaaatgggggcctcagagcaactgctttgggtaacagggaacatctttgctgtttctagacccctggagagggcttggcatcctgacaaggaggccaggatgagcagctccgtcttttgaatagctcaatccagcctcagacagttgaaattagatgttaatctctgaccaggcatagtggctcacatctataatcccagcactttgggaggccaaggcgggtggattccctgagtctagacattcaagaccagcctggacaacatggcacaatcccatctttatgaaaaatacaaaaattaaccgggcatggtggcatgtgcctgtagtctcagctactcgggaggctgaggtgggggtctggcccccacatcccaggtctttctgctacaccacactgttgccataatgacttcgacctcattctgccatctcctaagaaagccagagtgcaggctaggaatgtcacctgagcccaggaactcaaggctgcaatgagtggtgattccaccactgcactccagcctgggcgacagagtaagatcttgcctcaaaaaacaaacaaacagctgggcacggtggctcacacctgtaatcctagcactttgaaagctggggcaggcggatcacttgacattaggggttccagaccagcctggcaaacatggagaaaccccgtctctaccaaaaaaaatattaaaaattagctgggtgtggtggtgcacgcctgtagtccccagccacttcagaggctaaggcaggagaatagcttgcacccaggaggtggaggttacagtgagccgagatcatgtcactacacttcagcctgggtgacaaagtgagactgtctaaaaaaaaaaatacttttaaaaaataataattttaataaatgcctacatatatgcgtgtgtgtgtatatatatatataacatttttttttgagacagggtgttgctctgtcacccaggctagagtgcagtggcctgaccagggctctctgcagcctcgaacttctgggcttcggtgatcctcccatctcaacctcctgagtagctgggaccacagatgcatgccaccacacccggctaattaaaaaaagaaatttttgtagagacaggttttcctatgttgcccaagttagtctcaaactcttgggctcaagtgatcctcctgccttggcctcccaaagtgctgggattacaggcgggagccactgcacctggcctcaaatgccaccatatttctgattcctgtcacctccaggctcagagactgtgagtaaacattctgggcagataatcgtttgcaattgcttccagagtgctctttgctgagctgttaagctgtgggctaagtggtaaatgtcaggtatctctgctgtcgtgggccaggtgctcagattgctaggatacagcagggggtgccgagatgaggcaaggggccgggttaggagtccctgctctagcacagcgatactagctgagtccatcgatgacctttaaacccgcttccccggttctgtctagattacagggtttggaaggctttggaagatgtgttcagagaactttgcccaaactggcccacgcctgttccaatgctatgcatagctgtttctgattcttagccagctcaggccctctattctttccatgctggtctgcggcctccgttacccacctgctgagggcgatcttctggtggagcagaaagccccgctcgtagggccagggcaggccggcctcgaaccactctcggcagcgcagcacgggcgagatgcaggcggcgcctgtcacgtagctggaggagccgcactcgcccaggtaggacaggagcagcgccgagcccgagccttcgctcaccgcgaacagcggcgccgccgggtgtcggaagcggatgtatgtgaccgcctccttgaggtcggacgggtccccgaaaggctgcagccgggggctgaccagtgggcaaccgtggtggccgcggcgatggaagatgaccgggtagtagccgcgctccagggcgagcaagcaaaggccgagcacgttgcgggtgaggcgaccccacgcattggggatcaccagaagcaccgcaggaaggcccccggcgctggtgatccggcggccccgaacacaaggtcctaccacccagtccagggccactagcccatcgtccgccaactgcaggtactcccgggccagctcaggcccaggcgctacgggcaggacgaagtggcagagggtctgcaggtggggcccggagaaccaggagcgcgggccggcctccagcgcctctgagcgccgcagggcgcgcagcaggcactgggccagggccgacggcttgcaaacaaggctgcaccctcccggcagtggctcgcgcccgtcgctgaactggtccgccgggcctccgccgtccgcctcctccccgtcgtctcggtcttgggcccccggcagggtcctctctccgacggcgcgcccccagggtccccggagccgcgggccgagcaggccgagaagggcgagcacggccaagatgagcgcgagggcggcgccccacggcggcatggcgaagctggagagccccggcgggcagcgggcggcggggccgtctactcggcgagctccgcgctttgcccgcggctccgcccgccggcggcggctgcccagggccctcccgcgcgggcgcgctctggattggccgtggccgggcagaggcagccagttcgggcccggctgccctcgcccgccccccacccccgccccggccctttgtacagcaattgcaacaagtgggagcagagggtgagaggagccggggccaccagggagggagggcgcgccggcagccggaagggagtggggagggcacgagccggggagagcggtgttggccatggagacgtggggagactggaggccgaggcttggggacccgactgtcatcagggtcttccgccagaccctgggcgctgcgccctcagaggccgatgaaaagaagcagaagggagaggtgagtaagtcgcagctccgggcgccggctcccgggaccccgtggggcggcggccgcgcgcgcgctctgccctcgggcggccctgctctcccccgcccggccccgcaaccccgcaataacttggctgggcggggtccggcactgggctagagaggtcgagcgcggcgtcttgagccgctggcgggaggctgctgcttccccgcctgcatcagtgcgggtcccgtggactcctcgcccccgtccccgcgagctcggggctccacatcaaggaaatcctcagcccgggagtggcttccccagaaacagcagccccaagcctccgagagtcagtcggagaaaaggacacactcaggcgccctgcgacagggatgcccgtccgacctacaaggaacgcctcgtaaaccggggtgcatgggagaccacggaaataacacgttctcgctgtttccaagctttgggataggcatctcgaccctcgctctctacccacgtttcccccccaaatcctggagagggaaccagaaccagcgccccgctgcggggcgggccggccagcgcacctcctgggggtgaggcctgtggcgtccccatctcgcggcgaccaatctctttctagacgcgcgcctgccaccgctgggcgacggcggaggtggggaagacagcagcctctcggctagctccggcctcccggggcttctgggtttggagagtttggggagcggagacacctcccgaggctcctccgcgttggaccctatttgcgagggcgggagcggggtgggccgacggcgaagctccagaggtgggaccctctcccttcagcagctcttcctgacttcatgattctgcccctcttctcattgcaggtcacaccgacaaatctgaagcgggtttgccaggggagtgtacccgtctccccagcctgggccacccggtccacagggattccatttccggccttacactccgctccacgatctcatccaggcgctgcagctgtgcagctgctctacagactgcagggacctgctgagacgaatccccggacgaggaaaggggccccccgcctgccctactgagc

SEQ ID NO: 3535 - DNA, 6000 bp, Homo sapiens
aggtgggaaagagagggaagaatgagaacatcaggtgacagcagatgagacagacagacagcccgcaggccagatctgtccacagaggctttctttggccatttagggcttcgaaaacgtttaatttcatggccatcatttaaaaccagataaggctggttgtggtggctcacgcctgtaatccaaacactctgggaggccaacgaggtgggtggatcacttaagtccaggagtttgagaacagcctgggcaacagggcgaaaacccatctctaaaaaaaaaaaaaaaaaaaattagcttggcatggtggctcagtcccagctattcaggaggctgaggtgggaggactgcttgagcctgggaggtcaaggctgcagtgagctatgattgcaccattgcattccagcctgggtgacacagagagaccatttcaaaaaataaaataaaataatataaaataataaaagtggccaggcgcggtggctcatgcctgtaatcccagaactttgggaggctgaggcaggtggatcacgaggtcaagagattgagaccatcctggccaacacggtgaaaccccatctctactaaaaatacaaaaataagctgggcgtggtggcggacacctgtagtcccagctacttgggaggctgaggcaggagaatcacttgaacccaggaggcagaggttgcagtgagccgagatcgtgccactgcgttccagcctgctgacagagcgagactccatctcaaaaaataaataaataaataaataaaataataaaattagaagatttcacataaaatgcaggtgtctggcttctctagggaagtgggaagatccagccacatgggtgggcatttctcagcacaacaatgggttcctccctccttcctgtgtgacggtgcccactaggcctgtcattcacagcatcactgcacctgtctatgtgccctaggggcagcatttgacttcacagctgctgacagttctcctaacctcaacttctggccctctgtggagaacttgctatgaactgtaacctactaaactgctcctagaagaacttgctgctcagagtatccaaaccagcaggtgacacctctgctaataattcacatttgactttaggttgcattcattgtttttatttttgctttttaaactaacatcctgtcctggtaatgtcacatgagtgtgatgttgatcaggtatacctggggcagatattcctagagagtgtgctgcctggcagaggaagcaattgagttggtcattaatttactgggtggattcctaaatgggggcctcagagcaactgctttgggtaacagggaacatctttgctgtttctagacccctggagagggcttggcatcctgacaaggaggccaggatgagcagctccgtcttttgaatagctcaatccagcctcagacagttgaaattagatgttaatctctgaccaggcatagtggctcacatctataatcccagcactttgggaggccaaggcgggtggattccctgagtctagacattcaagaccagcctggacaacatggcacaatcccatctttatgaaaaatacaaaaattaaccgggcatggtggcatgtgcctgtagtctcagctactcgggaggctgaggtgggggtctggcccccacatcccaggtctttctgctacaccacactgttgccataatgacttcgacctcattctgccatctcctaagaaagccagagtgcaggctaggaatgtcacctgagcccaggaactcaaggctgcaatgagtggtgattccaccactgcactccagcctgggcgacagagtaagatcttgcctcaaaaaacaaacaaacagctgggcacggtggctcacacctgtaatcctagcactttgaaagctggggcaggcggatcacttgacattaggggttccagaccagcctggcaaacatggagaaaccccgtctctaccaaaaaaaatattaaaaattagctgggtgtggtggtgcacgcctgtagtccccagccacttcagaggctaaggcaggagaatagcttgcacccaggaggtggaggttacagtgagccgagatcatgtcactacacttcagcctgggtgacaaagtgagactgtctaaaaaaaaaaatacttttaaaaaataataattttaataaatgcctacatatatgcgtgtgtgtgtatatatatatataacatttttttttgagacagggtgttgctctgtcacccaggctagagtgcagtggcctgaccagggctctctgcagcctcgaacttctgggcttcggtgatcctcccatctcaacctcctgagtagctgggaccacagatgcatgccaccacacccggctaattaaaaaaagaaatttttgtagagacaggttttcctatgttgcccaagttagtctcaaactcttgggctcaagtgatcctcctgccttggcctcccaaagtgctgggattacaggcgggagccactgcacctggcctcaaatgccaccatatttctgattcctgtcacctccaggctcagagactgtgagtaaacattctgggcagataatcgtttgcaattgcttccagagtgctctttgctgagctgttaagctgtgggctaagtggtaaatgtcaggtatctctgctgtcgtgggccaggtgctcagattgctaggatacagcagggggtgccgagatgaggcaaggggccgggttaggagtccctgctctagcacagcgatactagctgagtccatcgatgacctttaaacccgcttccccggttctgtctagattacagggtttggaaggctttggaagatgtgttcagagaactttgcccaaactggcccacgcctgttccaatgctatgcatagctgtttctgattcttagccagctcaggccctctattctttccatgctggtctgcggcctccgttacccacctgctgagggcgatcttctggtggagcagaaagccccgctcgtagggccagggcaggccggcctcgaaccactctcggcagcgcagcacgggcgagatgcaggcggcgcctgtcacgtagctggaggagccgcactcgcccaggtaggacaggagcagcgccgagcccgagccttcgctcaccgcgaacagcggcgccgccgggtgtcggaagcggatgtatgtgaccgcctccttgaggtcggacgggtccccgaaaggctgcagccgggggctgaccagtgggcaaccgtggtggccgcggcgatggaagatgaccgggtagtagccgcgctccagggcgagcaagcaaaggccgagcacgttgcgggtgaggcgaccccacgcattggggatcaccagaagcaccgcaggaaggcccccggcgctggtgatccggcggccccgaacacaaggtcctaccacccagtccagggccactagcccatcgtccgccaactgcaggtactcccgggccagctcaggcccaggcgctacgggcaggacgaagtggcagagggtctgcaggtggggcccggagaaccaggagcgcgggccggcctccagcgcctctgagcgccgcagggcgcgcagcaggcactgggccagggccgacggcttgcaaacaaggctgcaccctcccggcagtggctcgcgcccgtcgctgaactggtccgccgggcctccgccgtccgcctcctccccgtcgtctcggtcttgggcccccggcagggtcctctctccgacggcgcgcccccagggtccccggagccgcgggccgagcaggccgagaagggcgagcacggccaagatgagcgcgagggcggcgccccacggcggcatggcgaagctggagagccccggcgggcagcgggcggcggggccgtctactcggcgagctccgcgctttgcccgcggctccgcccgccggcggcggctgcccagggccctcccgcgcgggcgcgctctggattggccgtggccgggcagaggcagccagttcgggcccggctgccctcgcccgccccccacccccgccccggccctttgtacagcaattgcaacaagtgggagcagagggtgagaggagccggggccaccagggagggagggcgcgccggcagccggaagggagtggggagggcacgagccggggagagcggtgttggccatggagacgtggggagactggaggccgaggcttggggacccgactgtcatcagggtcttccgccagaccctgggcgctgcgccctcagaggccgatgaaaagaagcagaagggagaggtgagtaagtcgcagctccgggcgccggctcccgggaccccgtggggcggcggccgcgcgcgcgctctgccctcgggcggccctgctctcccccgcccggccccgcaaccccgcaataacttggctgggcggggtccggcactgggctagagaggtcgagcgcggcgtcttgagccgctggcgggaggctgctgcttccccgcctgcatcagtgcgggtcccgtggactcctcgcccccgtccccgcgagctcggggctccacatcaaggaaatcctcagcccgggagtggcttccccagaaacagcagccccaagcctccgagagtcagtcggagaaaaggacacactcaggcgccctgcgacagggatgcccgtccgacctacaaggaacgcctcgtaaaccggggtgcatgggagaccacggaaataacacgttctcgctgtttccaagctttgggataggcatctcgaccctcgctctctacccacgtttcccccccaaatcctggagagggaaccagaaccagcgccccgctgcggggcgggccggccagcgcacctcctgggggtgaggcctgtggcgtccccatctcgcggcgaccaatctctttctagacgcgcgcctgccaccgctgggcgacggcggaggtggggaagacagcagcctctcggctagctccggcctcccggggcttctgggtttggagagtttggggagcggagacacctcccgaggctcctccgcgttggaccctatttgcgagggcgggagcggggtgggccgacggcgaagctccagaggtgggaccctctcccttcagcagctcttcctgacttcatgattctgcccctcttctcattgcaggtcacaccgacaaatctgaagcgggtttgccaggggagtgtacccgtctccccagcctgggccacccggtccacagggattccatttccggccttacactccgctccacgatctcatccaggcgctgcagctgtgcagctgctctacagactgcagggacctgctgagacgaatccccggacgaggaaaggggccccccgcctgccctactgagccttgcgcgctgacccggttcctacacttaacttttccggcttcgggtttaagacgcgtgcgcgcacactccgctgctgtgggcgggcattggggcggggcgataccgggggcccactgtctggggaggggcgcgcgcgagcccagggccaacggacgcgcgggcggcgcgggcggcgcgggggcgctggggctggaggggcggggcgcgcgcgctccctcgctggcggagcggctgggcggcgggccgggcccggggccgcttggaatggcgcctcctccgccttcgccccaactgcttctcctggcagccctcgcgaggctcctgggtcccagcgaggtaaggtgacccgctcctgggaaggcctcggcccgcgagctcaaagcgctttgccaaaagttcgtcctggaaggagtggcgcgccgagggggacgcggagttcttccgctggcgggctgggcctggggagagagagggcagggcctcgccgcgtccagcgccccaactcttcgctttggacccacaggtgatggctggaccggcggaggaggcgggagcccattgtcccgagagcctgtggcctctgcctccgcaggtaggagccctggagggcccaggga

SEQ ID NO: 3536 - DNA, 6000 bp, Homo sapiens
agaagtgaccatgagctgtttctgatgcttagagaatgggggctggagggaggtggcagacatgaagggtgactgcaagtgccccaggacccccgccctagggaagcccctgtgctgggaacgtctgtctagtggaagagttagtttgcgaataacaaagctaacatgtatgacgataacgccaccctcccacgagcacattcctaaagccccatgtccagggacaggttggccagcgggggcgggctgcctcaaacaccacctccatggcctaggacgagggtccgggtgggagtctctgtgcggcagatgcacaagctcaactccagagtctactaaaaataatttaattagaaacggagttttggcaagggaggcagaagcggctccttttctccccttggccgcccactcagcaaccaacaaggaggaaagcccccgcagtgctcggccagtgccgcgccatcgccaccagggagcgccccgcgcgcggtccacgtggcagaggtcgcggcctcgcggcgcggggaggagccgcacgccacagtggcaggtcccaggccgtcactccgagctctcgccttccgggccgctgtccggcgtgggcgggaggaggggtctccggcgcgagcgcttgacccggcgcgagggctgcagcagcctccgcttcagcacagctgtgggccgggcgccgagcagtcaagggcgggagggcagggaagctacggggggcggcgggcgacgcgaggtggggcgggggcctcgggtagggtagggagggaactcctcaccagccactgtgtcctggctgtccgctgtgggcccccagtagatgctctccccgcgtcggaagtttctgtgcagccgtgtgcagagcgtggccagggtgagcagcaccagcaggaaggtcagggccatggcagcccaggcggcctcttcagtgcgtggggtggggccccgggctgcccgtggaggcgctgctgcgcgaggggccggggaagcctgacttgaacagacacagccccctgggctgccttgcccgttgggcacctgagcctctgtcctggagctggcattgcctccaggcgcccccggcagcagggagacagtgggcacagatggggcattactctccctaccagggattcccgccatggactgcttggccttcaagctccctggggaagcagagggaaacctcagggctgagcgagtgggctggggaccaagggcagcccgcagcctccgcctcttggcaccactagaagagggctgcctgggcccttgagatgtcacctctgtgccagggggccgccagctccgcagagcaaaggccagagccagggcctaaggagaggagagagagcaatcaccctgctgcccctctcagagaacccgagggccaacaagcctgggcccagcgtctctcacctgcacacaccctcttcggcacagcctccctctaccgggagttggctcggagggagcaggccctgaaaggctttcacagtagatccatgccttcttcttcctctgcttcctcctccgcctcctcatcagccagtgggcagcccaggctggctctacccaggccatctccagcgccagcccccatgcagtcagcaccaggggctacgagaggaggtaactgttagagctacgaggaaggtggggacaaacaagaggaaacccttgaattttccattccctgcacacggggccatagccttctgccagggccaggcaagcgcctttcatcagctacatacccgatcctgcgtgaggctgaagtcaggggtgagggaagggttagccatacaagcataggccaggagggcaagctggagcttcagccagggatgggcacaggggtggtagaggaaggtgacatcctcagcctggaggaaaggcacagagacatcaaagcaggcccagagccctcccagagaatctcaagttctcccatccaggggaccagtttaaaggtactcccaggatagctggatggctcttctaccttcagggcccaggaaaggacaaagggccctgggtattggcatgtacccactcttgcctctgagtgttcctttcacccttcctctccatcaagtgccacccttcaaagctcacagcatgcctggataatcctgccagactcagaccacactctagccatatttccctgcaggtgtaacgatggctctacaggtccacaatccaagccataagcaacccccaaatgaagaccatcgatccaatctatacagtctcccaagagcatccaaatacagggcaggcaggcagcaggtgcacaatctcaggatggaaatactccatcaatcattcattattctttgattgagttgacttggtgctcagtgctgtgctagatgctgtgggagatgccaaagaactcctggactctgcttgcaaggagtgtgtgagaaactcagggaaacaactaatgcaaataaaacagcaaactaataaaacttagtgattagttgttaaattatcagagatagattcagaggaggaggggaggaataaaggctgatgccatcgggcagtgtctcagggggagctgatgccagctgggactgggaagatggctgggggagtatggcaggagggcagggagctgcactctccgagtcaggataggccaggtgtggaggagaataaacaggagcaaaggggctgtggtaagggcgaggctggcactcatttgtgtggcaaacagcccgacacaactggagaggaaccaaggatgtggagaggtcagacgaagcttacttaagtaaggcctgaaaagccaggccggagaatatggccacgataaggtgggaaataaggagccattgacagtttgtgaacagaggaatgacttcatgaaagggctgtttgaggaaaggaatctgataggtggcgtgaggcaacaactcttggcctggagctattacagagaatttttttttttttttgagacagtctcgctctgtcgccaggctggagtgcagtggcatggtctcggctcactgcaacctctgcctcctgggctcaagcaattctcctgcctcagcctcccaagtagctgggattacaggggtgtgccaccacgcccagctaatttttgtatttttagtagagacagggtttcaccatgttggccaagctggtcttgaactcctgacctcaggtgttccacccgcctcagcctcctaaagtactgggattacaggtgtgagccaccatgcctggccaatttaagttaggtatttcaggccaggcatggtggctcacacctgtaatcccagcacttgggaggctgaggcaggcagatcacttgaggtcaggagctcaagaccagcgtgggcaacatggtgaaacctcgtctctactaaaaatacaaaattagctaagctaggtggcacacgcctgtaatcccagctgctcgggaggctgtggcataagaattgcttgaacctggaggcagaggttgcagtgagtgccactgcactccagcctgggcaacagagtgagattccatttcaaataataataataataagtatttcaaaggaaaattcagaggagctggcgatgaagatggagatgctaccacgcaagctgagcccgcagtgtggagcctggcaactggaggcacactccttgcacgatgcagctctgtactgtacacggtgctggcacataccctccctcgctgctcacaggtagagacagaattaataccctctcctacagaaagctggggcccacaaagtcaggagacttcccgctgtctcctcagggagctggagcctgggttttttccagctactctcagagagagttccactcacagccacttgtccacagagccagctacccaacagcatcctgacacagcattgcagatgacaggcctatggctcactgtctttgagccatctgtcctggggctgatctgtcctgggcttggaggtggggcagagaactagaaccctgcctctgcctgagggaagtggtaaggaatggggccgatcagcagaacaggcagcgaagcctgctaggagcgcctgtctccaggcgtggacaccaagggtggtgggcccctgcttgtactcacctgccctgggctcactcgtgtgtaggtcactcttggtgacacctatacatggggaaagaacagagcttagggcagttgggggactccgtgtgtgtgtggtggggaggggacggcaggccccaagcgccaggctgggatggagaagttggctactgaggactgaggaaccggcagaggtcctcagatggtgactgtggagggtgcggcgagaacagagcgggactgggctagcctttcacatccctctctccctgggccctccagggctcctacctgcggaggcagaggccacaggctctcgggacaatgggctcccgcctcctccgccggtccagccatcacctgtgggtccaaagcgaagagttggggcgctggacgcggcgaggccctgccctctctctccccaggcccagcccgccagcggaagaactccgcgtccccctcggcgcgccactccttccaggacgaacttttggcaaagcgctttgagctcgcgggccgaggccttcccaggagcgggtcaccttacctcgctgggacccaggagcctcgcgagggctgccaggagaagcagttggggcgaaggcggaggaggcgccattccaagcggccccgggcccggcccgccgcccagccgctccgccagcgagggagcgcgcgcgccccgcccctccagccccagcgcccccgcgccgcccgcgccgcccgcgcgtccgttggccctgggctcgcgcgcgcccctccccagacagtgggcccccggtatcgccccgccccaatgcccgcccacagcagcggagtgtgcgcgcacgcgtcttaaacccgaagccggaaaagttaagtgtaggaaccgggtcagcgcgcaaggctcagtagggcaggcggggggcccctttcctcgtccggggattcgtctcagcaggtccctgcagtctgtagagcagctgcacagctgcagcgcctggatgagatcgtggagcggagtgtaaggccggaaatggaatccctgtggaccgggtggcccaggctggggagacgggtacactcccctggcaaacccgcttcagatttgtcggtgtgacctgcaatgagaagaggggcagaatcatgaagtcaggaagagctgctgaagggagagggtcccacctctggagcttcgccgtcggcccaccccgctcccgccctcgcaaatagggtccaacgcggaggagcctcgggaggtgtctccgctccccaaactctccaaacccagaagccccgggaggccggagctagccgagaggctgctgtcttccccacctccgccgtcgcccagcggtggcaggcgcgcgtctagaaagagattggtcgccgcgagatggggacgccacaggcctcacccccaggaggtgcgctggccggcccgccccgcagcggggcgctggttctggttccctctccaggatttgggggggaaacgtgggtagagagcgagggtcgagatgcctatcccaaagcttggaaacagcgagaacgtgttatttccgtggtctcccatgcaccccggtttacgaggcgttccttgtaggtcggacgggcatccctgtcgcagggcgcctgagtgtgtccttttctccgactgactctcggaggcttggggctgctgtttctggggaagccactcccgggctgaggatttccttgatgtggagccccgagctcgcggggacgggggcgaggagtccacgggacccgcactgatgcaggcggggaagcagcagcctcccgccagcggctcaagacgccgcgctcgacctctctagcccagtgccggaccccgcccagccaagttattgcggggttgcggggccgggcgggggagagcagggccg

SEQ ID NO: 3537 - DNA, 6000 bp, Homo sapiens
ggctgaggcaggagaatcacttgaacccaggaggcagaggttgcagtgagccgagatcgtgccactgcgttccagcctgctgacagagcgagactccatctcaaaaaataaataaataaataaataaaataataaaattagaagatttcacataaaatgcaggtgtctggcttctctagggaagtgggaagatccagccacatgggtgggcatttctcagcacaacaatgggttcctccctccttcctgtgtgacggtgcccactaggcctgtcattcacagcatcactgcacctgtctatgtgccctaggggcagcatttgacttcacagctgctgacagttctcctaacctcaacttctggccctctgtggagaacttgctatgaactgtaacctactaaactgctcctagaagaacttgctgctcagagtatccaaaccagcaggtgacacctctgctaataattcacatttgactttaggttgcattcattgtttttatttttgctttttaaactaacatcctgtcctggtaatgtcacatgagtgtgatgttgatcaggtatacctggggcagatattcctagagagtgtgctgcctggcagaggaagcaattgagttggtcattaatttactgggtggattcctaaatgggggcctcagagcaactgctttgggtaacagggaacatctttgctgtttctagacccctggagagggcttggcatcctgacaaggaggccaggatgagcagctccgtcttttgaatagctcaatccagcctcagacagttgaaattagatgttaatctctgaccaggcatagtggctcacatctataatcccagcactttgggaggccaaggcgggtggattccctgagtctagacattcaagaccagcctggacaacatggcacaatcccatctttatgaaaaatacaaaaattaaccgggcatggtggcatgtgcctgtagtctcagctactcgggaggctgaggtgggggtctggcccccacatcccaggtctttctgctacaccacactgttgccataatgacttcgacctcattctgccatctcctaagaaagccagagtgcaggctaggaatgtcacctgagcccaggaactcaaggctgcaatgagtggtgattccaccactgcactccagcctgggcgacagagtaagatcttgcctcaaaaaacaaacaaacagctgggcacggtggctcacacctgtaatcctagcactttgaaagctggggcaggcggatcacttgacattaggggttccagaccagcctggcaaacatggagaaaccccgtctctaccaaaaaaaatattaaaaattagctgggtgtggtggtgcacgcctgtagtccccagccacttcagaggctaaggcaggagaatagcttgcacccaggaggtggaggttacagtgagccgagatcatgtcactacacttcagcctgggtgacaaagtgagactgtctaaaaaaaaaaatacttttaaaaaataataattttaataaatgcctacatatatgcgtgtgtgtgtatatatatatataacatttttttttgagacagggtgttgctctgtcacccaggctagagtgcagtggcctgaccagggctctctgcagcctcgaacttctgggcttcggtgatcctcccatctcaacctcctgagtagctgggaccacagatgcatgccaccacacccggctaattaaaaaaagaaatttttgtagagacaggttttcctatgttgcccaagttagtctcaaactcttgggctcaagtgatcctcctgccttggcctcccaaagtgctgggattacaggcgggagccactgcacctggcctcaaatgccaccatatttctgattcctgtcacctccaggctcagagactgtgagtaaacattctgggcagataatcgtttgcaattgcttccagagtgctctttgctgagctgttaagctgtgggctaagtggtaaatgtcaggtatctctgctgtcgtgggccaggtgctcagattgctaggatacagcagggggtgccgagatgaggcaaggggccgggttaggagtccctgctctagcacagcgatactagctgagtccatcgatgacctttaaacccgcttccccggttctgtctagattacagggtttggaaggctttggaagatgtgttcagagaactttgcccaaactggcccacgcctgttccaatgctatgcatagctgtttctgattcttagccagctcaggccctctattctttccatgctggtctgcggcctccgttacccacctgctgagggcgatcttctggtggagcagaaagccccgctcgtagggccagggcaggccggcctcgaaccactctcggcagcgcagcacgggcgagatgcaggcggcgcctgtcacgtagctggaggagccgcactcgcccaggtaggacaggagcagcgccgagcccgagccttcgctcaccgcgaacagcggcgccgccgggtgtcggaagcggatgtatgtgaccgcctccttgaggtcggacgggtccccgaaaggctgcagccgggggctgaccagtgggcaaccgtggtggccgcggcgatggaagatgaccgggtagtagccgcgctccagggcgagcaagcaaaggccgagcacgttgcgggtgaggcgaccccacgcattggggatcaccagaagcaccgcaggaaggcccccggcgctggtgatccggcggccccgaacacaaggtcctaccacccagtccagggccactagcccatcgtccgccaactgcaggtactcccgggccagctcaggcccaggcgctacgggcaggacgaagtggcagagggtctgcaggtggggcccggagaaccaggagcgcgggccggcctccagcgcctctgagcgccgcagggcgcgcagcaggcactgggccagggccgacggcttgcaaacaaggctgcaccctcccggcagtggctcgcgcccgtcgctgaactggtccgccgggcctccgccgtccgcctcctccccgtcgtctcggtcttgggcccccggcagggtcctctctccgacggcgcgcccccagggtccccggagccgcgggccgagcaggccgagaagggcgagcacggccaagatgagcgcgagggcggcgccccacggcggcatggcgaagctggagagccccggcgggcagcgggcggcggggccgtctactcggcgagctccgcgctttgcccgcggctccgcccgccggcggcggctgcccagggccctcccgcgcgggcgcgctctggattggccgtggccgggcagaggcagccagttcgggcccggctgccctcgcccgccccccacccccgccccggccctttgtacagcaattgcaacaagtgggagcagagggtgagaggagccggggccaccagggagggagggcgcgccggcagccggaagggagtggggagggcacgagccggggagagcggtgttggccatggagacgtggggagactggaggccgaggcttggggacccgactgtcatcagggtcttccgccagaccctgggcgctgcgccctcagaggccgatgaaaagaagcagaagggagaggtgagtaagtcgcagctccgggcgccggctcccgggaccccgtggggcggcggccgcgcgcgcgctctgccctcgggcggccctgctctcccccgcccggccccgcaaccccgcaataacttggctgggcggggtccggcactgggctagagaggtcgagcgcggcgtcttgagccgctggcgggaggctgctgcttccccgcctgcatcagtgcgggtcccgtggactcctcgcccccgtccccgcgagctcggggctccacatcaaggaaatcctcagcccgggagtggcttccccagaaacagcagccccaagcctccgagagtcagtcggagaaaaggacacactcaggcgccctgcgacagggatgcccgtccgacctacaaggaacgcctcgtaaaccggggtgcatgggagaccacggaaataacacgttctcgctgtttccaagctttgggataggcatctcgaccctcgctctctacccacgtttcccccccaaatcctggagagggaaccagaaccagcgccccgctgcggggcgggccggccagcgcacctcctgggggtgaggcctgtggcgtccccatctcgcggcgaccaatctctttctagacgcgcgcctgccaccgctgggcgacggcggaggtggggaagacagcagcctctcggctagctccggcctcccggggcttctgggtttggagagtttggggagcggagacacctcccgaggctcctccgcgttggaccctatttgcgagggcgggagcggggtgggccgacggcgaagctccagaggtgggaccctctcccttcagcagctcttcctgacttcatgattctgcccctcttctcattgcaggtcacaccgacaaatctgaagcgggtttgccaggggagtgtacccgtctccccagcctgggccacccggtccacagggattccatttccggccttacactccgctccacgatctcatccaggcgctgcagctgtgcagctgctctacagactgcagggacctgctgagacgaatccccggacgaggaaaggggccccccgcctgccctactgagccttgcgcgctgacccggttcctacacttaacttttccggcttcgggtttaagacgcgtgcgcgcacactccgctgctgtgggcgggcattggggcggggcgataccgggggcccactgtctggggaggggcgcgcgcgagcccagggccaacggacgcgcgggcggcgcgggcggcgcgggggcgctggggctggaggggcggggcgcgcgcgctccctcgctggcggagcggctgggcggcgggccgggcccggggccgcttggaatggcgcctcctccgccttcgccccaactgcttctcctggcagccctcgcgaggctcctgggtcccagcgaggtaaggtgacccgctcctgggaaggcctcggcccgcgagctcaaagcgctttgccaaaagttcgtcctggaaggagtggcgcgccgagggggacgcggagttcttccgctggcgggctgggcctggggagagagagggcagggcctcgccgcgtccagcgccccaactcttcgctttggacccacaggtgatggctggaccggcggaggaggcgggagcccattgtcccgagagcctgtggcctctgcctccgcaggtaggagccctggagggcccagggagagagggatgtgaaaggctagcccagtcccgctctgttctcgccgcaccctccacagtcaccatctgaggacctctgccggttcctcagtcctcagtagccaacttctccatcccagcctggcgcttggggcctgccgtcccctccccaccacacacacacggagtcccccaactgccctaagctctgttctttccccatgtataggtgtcaccaagagtgacctacacacgagtgagcccagggcaggtgagtacaagcaggggcccaccacccttggtgtccacgcctggagacaggcgctcctagcaggcttcgctgcctgttctgctgatcggccccattccttaccacttccctcaggcagaggcagggttctagttctctgccccacctccaagcccaggacagatcagccccaggacagatggctcaaagacagtgagccataggcctgtcatctgcaatgctgtgtcaggatgctgttgggtagctggctctgtggacaagtggctgtgagtggaactctctctgagagtagctggaaaaaacccaggctccagctccctgaggagacagcgggaagtctcctgactttgtgggccccagctttctgtaggagagggtattaattctgtctctacct

SEQ ID NO: 3538 - DNA, 6000 bp, Homo sapiens
ctgggcagataatcgtttgcaattgcttccagagtgctctttgctgagctgttaagctgtgggctaagtggtaaatgtcaggtatctctgctgtcgtgggccaggtgctcagattgctaggatacagcagggggtgccgagatgaggcaaggggccgggttaggagtccctgctctagcacagcgatactagctgagtccatcgatgacctttaaacccgcttccccggttctgtctagattacagggtttggaaggctttggaagatgtgttcagagaactttgcccaaactggcccacgcctgttccaatgctatgcatagctgtttctgattcttagccagctcaggccctctattctttccatgctggtctgcggcctccgttacccacctgctgagggcgatcttctggtggagcagaaagccccgctcgtagggccagggcaggccggcctcgaaccactctcggcagcgcagcacgggcgagatgcaggcggcgcctgtcacgtagctggaggagccgcactcgcccaggtaggacaggagcagcgccgagcccgagccttcgctcaccgcgaacagcggcgccgccgggtgtcggaagcggatgtatgtgaccgcctccttgaggtcggacgggtccccgaaaggctgcagccgggggctgaccagtgggcaaccgtggtggccgcggcgatggaagatgaccgggtagtagccgcgctccagggcgagcaagcaaaggccgagcacgttgcgggtgaggcgaccccacgcattggggatcaccagaagcaccgcaggaaggcccccggcgctggtgatccggcggccccgaacacaaggtcctaccacccagtccagggccactagcccatcgtccgccaactgcaggtactcccgggccagctcaggcccaggcgctacgggcaggacgaagtggcagagggtctgcaggtggggcccggagaaccaggagcgcgggccggcctccagcgcctctgagcgccgcagggcgcgcagcaggcactgggccagggccgacggcttgcaaacaaggctgcaccctcccggcagtggctcgcgcccgtcgctgaactggtccgccgggcctccgccgtccgcctcctccccgtcgtctcggtcttgggcccccggcagggtcctctctccgacggcgcgcccccagggtccccggagccgcgggccgagcaggccgagaagggcgagcacggccaagatgagcgcgagggcggcgccccacggcggcatggcgaagctggagagccccggcgggcagcgggcggcggggccgtctactcggcgagctccgcgctttgcccgcggctccgcccgccggcggcggctgcccagggccctcccgcgcgggcgcgctctggattggccgtggccgggcagaggcagccagttcgggcccggctgccctcgcccgccccccacccccgccccggccctttgtacagcaattgcaacaagtgggagcagagggtgagaggagccggggccaccagggagggagggcgcgccggcagccggaagggagtggggagggcacgagccggggagagcggtgttggccatggagacgtggggagactggaggccgaggcttggggacccgactgtcatcagggtcttccgccagaccctgggcgctgcgccctcagaggccgatgaaaagaagcagaagggagaggtgagtaagtcgcagctccgggcgccggctcccgggaccccgtggggcggcggccgcgcgcgcgctctgccctcgggcggccctgctctcccccgcccggccccgcaaccccgcaataacttggctgggcggggtccggcactgggctagagaggtcgagcgcggcgtcttgagccgctggcgggaggctgctgcttccccgcctgcatcagtgcgggtcccgtggactcctcgcccccgtccccgcgagctcggggctccacatcaaggaaatcctcagcccgggagtggcttccccagaaacagcagccccaagcctccgagagtcagtcggagaaaaggacacactcaggcgccctgcgacagggatgcccgtccgacctacaaggaacgcctcgtaaaccggggtgcatgggagaccacggaaataacacgttctcgctgtttccaagctttgggataggcatctcgaccctcgctctctacccacgtttcccccccaaatcctggagagggaaccagaaccagcgccccgctgcggggcgggccggccagcgcacctcctgggggtgaggcctgtggcgtccccatctcgcggcgaccaatctctttctagacgcgcgcctgccaccgctgggcgacggcggaggtggggaagacagcagcctctcggctagctccggcctcccggggcttctgggtttggagagtttggggagcggagacacctcccgaggctcctccgcgttggaccctatttgcgagggcgggagcggggtgggccgacggcgaagctccagaggtgggaccctctcccttcagcagctcttcctgacttcatgattctgcccctcttctcattgcaggtcacaccgacaaatctgaagcgggtttgccaggggagtgtacccgtctccccagcctgggccacccggtccacagggattccatttccggccttacactccgctccacgatctcatccaggcgctgcagctgtgcagctgctctacagactgcagggacctgctgagacgaatccccggacgaggaaaggggccccccgcctgccctactgagccttgcgcgctgacccggttcctacacttaacttttccggcttcgggtttaagacgcgtgcgcgcacactccgctgctgtgggcgggcattggggcggggcgataccgggggcccactgtctggggaggggcgcgcgcgagcccagggccaacggacgcgcgggcggcgcgggcggcgcgggggcgctggggctggaggggcggggcgcgcgcgctccctcgctggcggagcggctgggcggcgggccgggcccggggccgcttggaatggcgcctcctccgccttcgccccaactgcttctcctggcagccctcgcgaggctcctgggtcccagcgaggtaaggtgacccgctcctgggaaggcctcggcccgcgagctcaaagcgctttgccaaaagttcgtcctggaaggagtggcgcgccgagggggacgcggagttcttccgctggcgggctgggcctggggagagagagggcagggcctcgccgcgtccagcgccccaactcttcgctttggacccacaggtgatggctggaccggcggaggaggcgggagcccattgtcccgagagcctgtggcctctgcctccgcaggtaggagccctggagggcccagggagagagggatgtgaaaggctagcccagtcccgctctgttctcgccgcaccctccacagtcaccatctgaggacctctgccggttcctcagtcctcagtagccaacttctccatcccagcctggcgcttggggcctgccgtcccctccccaccacacacacacggagtcccccaactgccctaagctctgttctttccccatgtataggtgtcaccaagagtgacctacacacgagtgagcccagggcaggtgagtacaagcaggggcccaccacccttggtgtccacgcctggagacaggcgctcctagcaggcttcgctgcctgttctgctgatcggccccattccttaccacttccctcaggcagaggcagggttctagttctctgccccacctccaagcccaggacagatcagccccaggacagatggctcaaagacagtgagccataggcctgtcatctgcaatgctgtgtcaggatgctgttgggtagctggctctgtggacaagtggctgtgagtggaactctctctgagagtagctggaaaaaacccaggctccagctccctgaggagacagcgggaagtctcctgactttgtgggccccagctttctgtaggagagggtattaattctgtctctacctgtgagcagcgagggagggtatgtgccagcaccgtgtacagtacagagctgcatcgtgcaaggagtgtgcctccagttgccaggctccacactgcgggctcagcttgcgtggtagcatctccatcttcatcgccagctcctctgaattttcctttgaaatacttattattattattatttgaaatggaatctcactctgttgcccaggctggagtgcagtggcactcactgcaacctctgcctccaggttcaagcaattcttatgccacagcctcccgagcagctgggattacaggcgtgtgccacctagcttagctaattttgtatttttagtagagacgaggtttcaccatgttgcccacgctggtcttgagctcctgacctcaagtgatctgcctgcctcagcctcccaagtgctgggattacaggtgtgagccaccatgcctggcctgaaatacctaacttaaattggccaggcatggtggctcacacctgtaatcccagtactttaggaggctgaggcgggtggaacacctgaggtcaggagttcaagaccagcttggccaacatggtgaaaccctgtctctactaaaaatacaaaaattagctgggcgtggtggcacacccctgtaatcccagctacttgggaggctgaggcaggagaattgcttgagcccaggaggcagaggttgcagtgagccgagaccatgccactgcactccagcctggcgacagagcgagactgtctcaaaaaaaaaaaaaaattctctgtaatagctccaggccaagagttgttgcctcacgccacctatcagattcctttcctcaaacagccctttcatgaagtcattcctctgttcacaaactgtcaatggctccttatttcccaccttatcgtggccatattctccggcctggcttttcaggccttacttaagtaagcttcgtctgacctctccacatccttggttcctctccagttgtgtcgggctgtttgccacacaaatgagtgccagcctcgcccttaccacagcccctttgctcctgtttattctcctccacacctggcctatcctgactcggagagtgcagctccctgccctcctgccatactcccccagccatcttcccagtcccagctggcatcagctccccctgagacactgcccgatggcatcagcctttattcctcccctcctcctctgaatctatctctgataatttaacaactaatcactaagttttattagtttgctgttttatttgcattagttgtttccctgagtttctcacacactccttgcaagcagagtccaggagttctttggcatctcccacagcatctagcacagcactgagcaccaagtcaactcaatcaaagaataatgaatgattgatggagtatttccatcctgagattgtgcacctgctgcctgcctgccctgtatttggatgctcttgggagactgtatagattggatcgatggtcttcatttgggggttgcttatggcttggattgtggacctgtagagccatcgttacacctgcagggaaatatggctagagtgtggtctgagtctggcaggattatccaggcatgctgtgagctttgaagggtggcacttgatggagaggaagggtgaaaggaacactcagaggcaagagtgggtacatgccaatacccagggccctttgtcctttcctgggccctgaaggtagaagagccatccagctatcctgggagtacctttaaactggtcccctggatgggagaacttgagattctctgggagggctctgggcctgctttgatgtctctgtgcctttcctccaggctgaggatgtcaccttcctctaccacccctgtgcccatccctggctgaagctccagcttgccctcctggcctatgcttgtatggctaacccttccctcacc

SEQ ID NO: 3539 - DNA, 6000 bp, Homo sapiens
tcccagtctttcagaccttggctatttcttgtttcccagctgtaactcacaatacatttcattcatgttactggtttttataaagaacaagctgggactacaggcaaccaccaccacacccagctaatttttgcatttttagtagagatggggtttcatcatgctggccaggctggccttgaactcctgacctcaagtgatccacccctctcagcctcccaaagtgctgggattataggtatgagccacagcacccagcccatttctcaactttcataattggatacatttctactaaatataatctatttccccatatctgggaaaccacactgtttctacactcacacagaacacttcgtttctgacactagatatgcaggttttattcccacatcaatcaattctctgacataggctgggtgttccacaattcaattctgacactctctacctggagttagtgtcagatcccacagattaagggctcagtcccgcaaggttgcccccattaaagatgccaactgcaaatccaagcctcctacacttctgaccaactggctgtataaatcagggattctcatgactccctccttggatttgataatttgctagaatccttcataaaactcagggaaacacttacgtttactagtttatgataaagaatattataggccgggcgcggtggctcacgcctgtaatcgcaacactttgggaggccgaagcaggtggatctcttgagcccaaaagttcaagaccagcctggccaacatggcgaaaccctgtctctactaaatatgcaaaaattagccgggcttggtggtgcatgcctgtaatcccagctacttgggaggctgaggcaggagaatcacgtaaacccaggagacagagattgcagtgagccgagatcaccccactgcattccagcctaggcgacagagccagactctgcctcaaaaaaagatatatatatataataaagggatgaacagccaggtgaagaggtatgtagaatgaggtccagaaggatcccaagtgcaggagtctctgtccccatggagttggggtacaccacaccatcttcccatggtggatgtgttcaccagctgggaagctcaccacatttctttgttcaagagtttttagggccaggcgcagtggctcacacctctaatcccagcacttttggaggcctaggcaaatggataacctgaggtaaggagttcaagaccagcctggccaacatggagaaatcccatttctactaaaaccacaaaaatgggccggacccagtggctcacgcctgtaatcccagcactttggaaggccgaggcaggtggattgcctaagctcaggagtttgcgaccagcctggactgttgcaaaaccctgggctggtgaaaccctgtctctactaaaatacaaaaaattagctgggcgtggcagcgtgcatctatagtcccagctacttgagaggattgcagggagccgagatcgcctgggtgacagagtgagactctgtctcaaaaaaaaaaaaaaaaaaaaaattaccctggtgtggtggctcacacctgtagtcccagctactcgggaggctgaggcaggagaatcgcttgaacctaggaggtggaggttgcagtgaactgaggtcaggccactgcactccagcctgggcaacagagtgagactcagtttcaacaacaacaacaaaaaagaattcttatagcgtgtaatctccagtccctgcttccccttcccagggtctttctggtgaccagctcatcctgaagctatctagggcccccaccctaagtcatattagcataaactcgagtgtgcttataagggtttgttattaatataaaaagtcacttctatcacatacgaaattccaagggttttaggagctctgcaggagaacaaaatataataaaagatacttattggccaggcagagtggctcatgcctataattccagtactttacaggctgaggtgggagaattgcttgagtccaggagttcatgatcagcctgggcaacgtagcaagaccgtatatctagttaaaaacaaaagaaagaaagagatgtttattcagcaaataacaaaggttttaggagtgctattgtaggaacccaggacaaagaccaaaaatatatatttcttattacacactgcaagattacatcgaccaagggctcactaagataaaatcttaggcactttcaactactagttttactgggatactttagtatacttagtggttggtattattagattttttttaaagttactccttgcatcttaaaagttcttatttagcacttacattacacattcctcatctatcttaatccattccattttcttaatccaatcagttttagtgtcgatttttgcaaagtttgttatttacaactatttcctttccatctgtctctgttctaggatatttatttggttcaaacctttcctcgattttggacagatgtgtatccggatgatgtgtctctgaatccttatacatcctcagacatgttttttgccctaacaagtgaattatatcttaatggggtatattgagttacagtgcttttcttctagtcaatagacgctagtctactctcttctagcttccagattgcagatagaaacttgctgggcacagtggctcatacttgtaatcctagcactttgggaggctgaggcaggaggattgcttgagtccaggagtttgagaccagcctgggcaacataatgagacccctacactacaaaaaagagagagagagaaagagggggtggggaaggagggaaggaaggaaggagggagggagggagagaaggaagccattttttttaaccaattgtgagtaacttattctttccacacttgttagaacctgaaattttataaaatataggcatgcatttttgttcttatgaatccatcctttagtgaatgttttcaatccgtataatctggtagaatttaggaaaactgtattcttttatttggttaactattgaatcttcttcatccattcctcttcctccttctaaaattccttttttttttttttttttgagacggagtctcactctgtcgtccaggctggagtgcagtggtgcgatctcggctcactgcaagctccccctcccgggttcacgccattctcctgcctcagcctcccgaatagctgggactacaggcgcccgccaccacgcccggctaattttttgtatttttagtagagacggggtttcaccgtgttagccaggatggtctcgatctcctgacctcgtgatccgcccgccttggcctcccaaagttctgggattacaggcgtgagccaccgcgcccggcctaaaattcctgttattctcatagcagggtctcctgaatttttccttaagtcccatcattttattatttccatctctataggcttttgctctgttgtgttaaagaaataattattcaatgatacttgttaaagcacattaaggaagactttatttagcaccatcgctacaggtttagggaccactgcaatgagttcttgcagtggaggagacaggttgggatcaactctgaatgcatcacggacaagtgggaatgtatagccaaggagcagtgtagggggtcagtggatggaaaattggtaagaggcatcaggggtaagggggattctatctaaactgacctaacaggattctcactgaagacaggccagggtggtcggatatcacttgggggatggtggaggatgagatattgagggtgatcagatgtcaaggatgggaggttcttactaaaacaggaatttacaaggagtgctacggatatgtagtggggggaggccagggatgctgctaaacatcctacgatgcacaggacgatctcctacaataacgaactagctagtccaaaatgtcaatagcgccgagattgagaaaccttcatgtagcttacggatacagcttttacccaatcgccagcatccttctcctggggctgaacctctcccccaggactgtcaggaggaggcgagtgataaggatcccaggactgcgttttgccttccttccccacccccactcccaacggctcctttctcttctcttagcagcacccagcttgcccacccatgctcaagatgggcgggatgccagcctgttacataaatgtgccaaaagcctggccatgcctggaaaatggaccaatccgcccgccaagaggttgggtctcgttccctagagagaaggaagtttcctctccttgaagtgagagctagaatcgcactttctgtcaagctgagagaaagactcttttccagaggctaaaaggacaagaaaatctgatttgcttgcttctaactttgcgttttaaagggggaaggaggaaaggaaagagggggagggtggttctgcttagccccacccctccggctaccccaggtccagccgtccattccggtggaggcagaggcagtcctggggctctggggctcgggctttgtcaccgggacccgcaggagccagaaccactcggcgccgcctggtgcatgggaggggagccgggccaggagtaagtaactcatacgggcgccggggacccgggtcgggctgggggcttccaactcagagggagtgtgatttgcctgatcctcttcggcgttgtcctgctctgccgcatccagccctgtaccgccatcccacttcccgccgttcccatctgtgttccgggtgggatcggtctggaggcggccgaggacttcccaggcaggagctcggggcggaggccgggtccgcggcagaccagggcagcgaggcgctggccggcagggggcgctgcggtgccagcctgaggctgggctgctccgcgaggatacagcggcccctgccctgtcctgtcctgccctgccctgtcctgtcctgccctgccctgccctgtcctgtcctgccctgccctgccctgtgtcctcagacaatatgttagccgtgcactttgacaagccgggaggaccggaaaacctctacgtgaaggaggtggccaagccgagcccgggggagggtgaagtcctcctgaaggtggcggccagcgccctgaaccgggcggacttaatgcaggtacccagggctcagccgcgccggggcgggcgggactccagagcctccctctcaacagcactcagtggacattgaccagacgtgaaggcgtgcaccgctccacacccagcaggcagctgcgctggggcttcccagacctaaacccagggcgccctctttgttcatgcaaaacaagggggagtacttgtaaagcagaatccaccccgagctaatccatagccactcaggcctccagatgagggcggaactaacattgttgtggggtgtgggcacacttactccccaggctaccctgttcgccatcttaattctacagataaggaaactgaagttcagtgaggttaagcagtacgcccaaggccgtgacactagcaatcagaagagctgggattcaagctgaggtctttgtggctccaaagacctcttaactctttccactctgagagtcccggagctgacagcgggcagtactcttaagaattttcttctgtctgatgctgatttactgacctgggccagctgcattggttggggtcattcagaaatgtgcatcagaatcccccggggcacaaaagaaacgtgatgggggcccaggcacgtgtactttgaaatactcctcaggtggttctgccacacactcctggttaagtccctctgctctacagcttctgaggactggggtgagtgagcacagagcctagcgcttgatgcatgggaaccatcgtcaaggttcctaatcccactactattatttcccgtctgggactcagtttctccatctgtaaagcaaggggttcagatgaggtaaatagctaaggactctaccagttataacatccactgatcatgtgacctccagttt

SEQ ID NO: 3540 - DNA, 6000 bp, Homo sapiens
tatccccaaatcttaacagcttacaacaacaacagcttacaaaaacaaatgtttatttcttcctcggttgtgactctgctaggctggtcccaagacaataggttggattcagggctaccctgagtatttctcactcagggacaagctgaaatagaggctatctgtgggtggcaggaaggtaaggggactgatggaaactgaccatgcctttctcactcatcattgaccaaagtaagagacagggccaaacccaacatcaacagaatgaggcgaaaatactctacccattgggtagaatggagtaattttgctaaaaaaatcttcctttttttttctagattttactacttgttgctgtagaatttcacataatttaatttatttttgttttaatcactcctatatctgtggttgtatctcctttctcattcccagtctttcagaccttggctatttcttgtttcccagctgtaactcacaatacatttcattcatgttactggtttttataaagaacaagctgggactacaggcaaccaccaccacacccagctaatttttgcatttttagtagagatggggtttcatcatgctggccaggctggccttgaactcctgacctcaagtgatccacccctctcagcctcccaaagtgctgggattataggtatgagccacagcacccagcccatttctcaactttcataattggatacatttctactaaatataatctatttccccatatctgggaaaccacactgtttctacactcacacagaacacttcgtttctgacactagatatgcaggttttattcccacatcaatcaattctctgacataggctgggtgttccacaattcaattctgacactctctacctggagttagtgtcagatcccacagattaagggctcagtcccgcaaggttgcccccattaaagatgccaactgcaaatccaagcctcctacacttctgaccaactggctgtataaatcagggattctcatgactccctccttggatttgataatttgctagaatccttcataaaactcagggaaacacttacgtttactagtttatgataaagaatattataggccgggcgcggtggctcacgcctgtaatcgcaacactttgggaggccgaagcaggtggatctcttgagcccaaaagttcaagaccagcctggccaacatggcgaaaccctgtctctactaaatatgcaaaaattagccgggcttggtggtgcatgcctgtaatcccagctacttgggaggctgaggcaggagaatcacgtaaacccaggagacagagattgcagtgagccgagatcaccccactgcattccagcctaggcgacagagccagactctgcctcaaaaaaagatatatatatataataaagggatgaacagccaggtgaagaggtatgtagaatgaggtccagaaggatcccaagtgcaggagtctctgtccccatggagttggggtacaccacaccatcttcccatggtggatgtgttcaccagctgggaagctcaccacatttctttgttcaagagtttttagggccaggcgcagtggctcacacctctaatcccagcacttttggaggcctaggcaaatggataacctgaggtaaggagttcaagaccagcctggccaacatggagaaatcccatttctactaaaaccacaaaaatgggccggacccagtggctcacgcctgtaatcccagcactttggaaggccgaggcaggtggattgcctaagctcaggagtttgcgaccagcctggactgttgcaaaaccctgggctggtgaaaccctgtctctactaaaatacaaaaaattagctgggcgtggcagcgtgcatctatagtcccagctacttgagaggattgcagggagccgagatcgcctgggtgacagagtgagactctgtctcaaaaaaaaaaaaaaaaaaaaaattaccctggtgtggtggctcacacctgtagtcccagctactcgggaggctgaggcaggagaatcgcttgaacctaggaggtggaggttgcagtgaactgaggtcaggccactgcactccagcctgggcaacagagtgagactcagtttcaacaacaacaacaaaaaagaattcttatagcgtgtaatctccagtccctgcttccccttcccagggtctttctggtgaccagctcatcctgaagctatctagggcccccaccctaagtcatattagcataaactcgagtgtgcttataagggtttgttattaatataaaaagtcacttctatcacatacgaaattccaagggttttaggagctctgcaggagaacaaaatataataaaagatacttattggccaggcagagtggctcatgcctataattccagtactttacaggctgaggtgggagaattgcttgagtccaggagttcatgatcagcctgggcaacgtagcaagaccgtatatctagttaaaaacaaaagaaagaaagagatgtttattcagcaaataacaaaggttttaggagtgctattgtaggaacccaggacaaagaccaaaaatatatatttcttattacacactgcaagattacatcgaccaagggctcactaagataaaatcttaggcactttcaactactagttttactgggatactttagtatacttagtggttggtattattagattttttttaaagttactccttgcatcttaaaagttcttatttagcacttacattacacattcctcatctatcttaatccattccattttcttaatccaatcagttttagtgtcgatttttgcaaagtttgttatttacaactatttcctttccatctgtctctgttctaggatatttatttggttcaaacctttcctcgattttggacagatgtgtatccggatgatgtgtctctgaatccttatacatcctcagacatgttttttgccctaacaagtgaattatatcttaatggggtatattgagttacagtgcttttcttctagtcaatagacgctagtctactctcttctagcttccagattgcagatagaaacttgctgggcacagtggctcatacttgtaatcctagcactttgggaggctgaggcaggaggattgcttgagtccaggagtttgagaccagcctgggcaacataatgagacccctacactacaaaaaagagagagagagaaagagggggtggggaaggagggaaggaaggaaggagggagggagggagagaaggaagccattttttttaaccaattgtgagtaacttattctttccacacttgttagaacctgaaattttataaaatataggcatgcatttttgttcttatgaatccatcctttagtgaatgttttcaatccgtataatctggtagaatttaggaaaactgtattcttttatttggttaactattgaatcttcttcatccattcctcttcctccttctaaaattccttttttttttttttttttgagacggagtctcactctgtcgtccaggctggagtgcagtggtgcgatctcggctcactgcaagctccccctcccgggttcacgccattctcctgcctcagcctcccgaatagctgggactacaggcgcccgccaccacgcccggctaattttttgtatttttagtagagacggggtttcaccgtgttagccaggatggtctcgatctcctgacctcgtgatccgcccgccttggcctcccaaagttctgggattacaggcgtgagccaccgcgcccggcctaaaattcctgttattctcatagcagggtctcctgaatttttccttaagtcccatcattttattatttccatctctataggcttttgctctgttgtgttaaagaaataattattcaatgatacttgttaaagcacattaaggaagactttatttagcaccatcgctacaggtttagggaccactgcaatgagttcttgcagtggaggagacaggttgggatcaactctgaatgcatcacggacaagtgggaatgtatagccaaggagcagtgtagggggtcagtggatggaaaattggtaagaggcatcaggggtaagggggattctatctaaactgacctaacaggattctcactgaagacaggccagggtggtcggatatcacttgggggatggtggaggatgagatattgagggtgatcagatgtcaaggatgggaggttcttactaaaacaggaatttacaaggagtgctacggatatgtagtggggggaggccagggatgctgctaaacatcctacgatgcacaggacgatctcctacaataacgaactagctagtccaaaatgtcaatagcgccgagattgagaaaccttcatgtagcttacggatacagcttttacccaatcgccagcatccttctcctggggctgaacctctcccccaggactgtcaggaggaggcgagtgataaggatcccaggactgcgttttgccttccttccccacccccactcccaacggctcctttctcttctcttagcagcacccagcttgcccacccatgctcaagatgggcgggatgccagcctgttacataaatgtgccaaaagcctggccatgcctggaaaatggaccaatccgcccgccaagaggttgggtctcgttccctagagagaaggaagtttcctctccttgaagtgagagctagaatcgcactttctgtcaagctgagagaaagactcttttccagaggctaaaaggacaagaaaatctgatttgcttgcttctaactttgcgttttaaagggggaaggaggaaaggaaagagggggagggtggttctgcttagccccacccctccggctaccccaggtccagccgtccattccggtggaggcagaggcagtcctggggctctggggctcgggctttgtcaccgggacccgcaggagccagaaccactcggcgccgcctggtgcatgggaggggagccgggccaggagtaagtaactcatacgggcgccggggacccgggtcgggctgggggcttccaactcagagggagtgtgatttgcctgatcctcttcggcgttgtcctgctctgccgcatccagccctgtaccgccatcccacttcccgccgttcccatctgtgttccgggtgggatcggtctggaggcggccgaggacttcccaggcaggagctcggggcggaggccgggtccgcggcagaccagggcagcgaggcgctggccggcagggggcgctgcggtgccagcctgaggctgggctgctccgcgaggatacagcggcccctgccctgtcctgtcctgccctgccctgtcctgtcctgccctgccctgccctgtcctgtcctgccctgccctgccctgtgtcctcagacaatatgttagccgtgcactttgacaagccgggaggaccggaaaacctctacgtgaaggaggtggccaagccgagcccgggggagggtgaagtcctcctgaaggtggcggccagcgccctgaaccgggcggacttaatgcaggtacccagggctcagccgcgccggggcgggcgggactccagagcctccctctcaacagcactcagtggacattgaccagacgtgaaggcgtgcaccgctccacacccagcaggcagctgcgctggggcttcccagacctaaacccagggcgccctctttgttcatgcaaaacaagggggagtacttgtaaagcagaatccaccccgagctaatccatagccactcaggcctccagatgagggcggaactaacattgttgtggggtgtgggcacacttactccccaggctaccctgttcgccatcttaattctacagataaggaaactgaagttcagtgaggttaagcagtacgcccaaggccgtgacactagcaatcagaagagctgggattcaagctgaggtctttgtggctccaaagacctcttaactctt

SEQ ID NO: 3541 - DNA, 6000 bp, Homo sapiens
cccatctgttgggggaatttggggattatgcctgctctagctggctttaccaattaaatgttttcccctctctgtctcagttttttcaccggtaagataggaagaatttattatctatgtcagagggattcctctcagcctcactctctatctcaggtcggggggcaggggagggtggggaaggaaaggagtggtgggccagtcctccagctaagcacacagactggcccatacctgcaagtacacacaaggtcccttgagcgacacacccaggctgacacatcactttaagggggcacggaggggggcaggcagtgggagtggcaagccagtggggagcccccaggtgagggcaagcccgaggaatagaagggtggcctctttttttttatttttgtttttgagatggagtcttgctctgttgcacaggctggagttcagtggcgtgatctctgctcactggcaacctctgccgcccggattcaagcaattctcctgcctcagcctcccaagtagctgggaccacaagtgcatgccaccacgcctggctagttttttggtattttttagtagagacagggtttcactatgttggccaggctggtctcgaactcctgacctcaggtgatctgcctggctcggcctcccaaagtgctgggattataggcgtgagccactgcgcccggcctgaagggtggcctcttgacctccagtcctgcagcccatgaaattgggcaggtactcacacctgggcatgggttagatgggcgtgggtccctagtaactctgagtatgagctcatgtgcatgtgtgtatatgtttatatatggatgccttcattgtatgcacagatacccatgattatccatgtgtgtgcataggaatggcaccctctgtctgattggaaatgagactccagagttaccccagcatgatgttcactgccttttttttttttttttttttttttttttgagacagtgtctccctatgttgcctaggctgaagtgcaaccacccaggctcaattgatcctcccacctcagcctcctgagtagctgggtcttcaggtgcaggccaccacacctagctaatttttgtatttttaatagagacaggattttgccatgttggccaggctggtatcgaactcctgggcttaagcaatcctcctgccttggcctcccaaagtgctatgattactggcctgcactgccgcgcccagctctgctgcctctttttacagcctgccggcccagaccagagtctcagaatactaagcccactttctggggccagggtcagtagatagctttgctgctgtatgattctaagcaagtatcttgacctgcatgtgtctcagtgcacctcagtttcctcacctataaaatgaggggtttggatgagttgaggtctgaagcctcctccagcccaggtaataaatctttgtagtggacaggaggaataggtcctaggggtttcaggaggggacttccatgggtacctctgactctacagagaaatggaagactgagatctgacttagcagcctagaaagacttagcagcctagaaatggggttcagctaattctgggaacagagtccggtcacttaaggtaccagagtgtagccaagagcccccttttctgggcttggggaaccagaaccatgtgttcaacagaccattgcctgtacacagggtagagagtgcaggtgtatactcctgaaccagccacccttcttttttttttttttttttttttgagatggagtctcactctgtcgcccaggctggagtgcagtggcacgatctctgctcactgcaagctccgcctccccggttcacgccattctcctgcctcagcctcccgagtagctgggactacaggcgcccgccaccacgcctggctaattttttgtatttttagtagaggcggggtttcaccgtgttagccagaatggtttcaatctcctgacctcgtgatccgcccgcctcagcctcccaaagtgctgggattacaggcgtgagccaccgtgcccagcccccagccacccttcttaagcttcaagctataactactgagcctgtgatgaaagtctactctatgccagacccccacaagctgggtgcgggcagtatagggacaaagactctgcccttgggatgccaaccatccacttgagaagacacatacacatacaatgagtcatcatcacttactgtttatggacaaataaacgtccatcaaggtagccatcaactcgtgggtagggacaaggaaggctacctagaggaagaaagggtgagtagaatctctccctctctctctcttttttaagagacagggtctggctctgtcatccaagctggaatgcagtggcttgatcatagctcattgtaacctaaacccaagtgatcttcttatttcagcctccctaagcagctgggactacaggtgcatggcatctggctaattttctcattttttgcagataagtggtctcgctatattggccaggctggtctcaaactcctggccccaagcaatcctcctgccttggcctcccaaagtgctgggattatggctgtgagccaccacacctggccaagtagaatcttgaagacaggaaagatctggatttcagaaagttctgaagaaggcattccaggcaggggaaacagcttgagcaaaagggtggaggtgggagagtgctgtagagtcaacaaggagtttgactttagcacaagatgcgtgtaggagaaggggaggtgaagctggagagaactggggccggagcatggggggcatgagttctgtgttaggagtgtggggctttaggagccacatcaggttttagaacaaacaagtggcttgacaggagagacgtgttagggattatttaattaaagtcagcaagtaggtctgaaagggtatgaggttagcaggaagtggctgtgatgggcagaggctcagagttgcatggaatgaggacactttgggtataacactccaagggccacaatgccactcccctctccacccctcagccttgggttatttttttctggcttcttcccctgtcgctagggttaaggagtcccttgggggtttcagatgaggctgggatagagttttatcactagagtgccgggcacggtggctcacgcctgtaatcccagcactttgggaggccgaggcaggcagatcacaaggtcaggagaccgagaccatcctggctaacactaaacatacaaaaatacaaaaaatacaaaaaattagccgggcgtggtagcgggcgcctgtagtcccagctactcgggaggctgaggcaggagaatggcgtgaacccggaaggcggagcttgcagtgagccgagatcgtgccactgcactgcagcctgggcaacaagagcgagactccgtctcaaaaaaaaaaaaaaagttttatcactagatcattaacctctggcctaggtcacctccggcctccttttgggctaggtgggcagttctcggaccctcccccaccagccctgctctgctgacctagaacctctggccctggagattctgatatgtgtatttgtggtctcttctcgggcatctcccaggccactgggagagctggggcctagagcgtggggtgggtggaatcctgagggcagagagtgtggaagaatcttacaatggcagctctagagggaagcctggatatgtttgtttgacaaactgagacccagagaggtaacatgacttgaggtcacacagcaagtctagggcacagtcaggactgaaagccaggactctggggaggctaaagcgccctgaggtttagaccatctggttcatgtagagaatggagagggtcagggctgggagctatgggttcaaatcctggctctgccattgactgtacttttgtgacctaagaaagtcacttgagctctctgagtctgtttcctcaactgttaaacgggacaatatctaccttttgggttgttgtgaagataaaaaaacacacccatagcacaggtcgtggcacacagtaagtgtgccaatacatgtcagctagtggtatggtggtgcaatagtaggtgcctaataaatgttgaatgcattgttgaacatgagttcacacgctaacagtgagattgtgagactcagctttcccacgtgtaaatcaggactcataatcagtccctgtcctgccacttctttacagccccggtagcaacatagattaaataaggtatgtaaacgttcaagcgcggagccgtctcaggtcaatgtttactcagcccagggcaattcctctccaagtcctactctgcgaaatttcacgtcagcttcactaacttctctacattcccagatgctccccgggaaccgggggttggggatgtccctcttttctcaagcccgccgagctgaggaaaaacggggtgggaaagcagagtgtgtaaggctgaggaggtgagccagaggggggagggagagcaggaataagggcagtggggagaatgcaggtgcacggacgtggtgtgggtcgagaacagggtccgcatcgggggacttggatataggatgcagtgaaaggatttggggagcagtgggagaggtgagggcgctgcgatccgggaagaatcaggaaaataaggagccggtaggagggagtggagatcctcctcgcggagagctcgccgcggcgcagggctcccagctccccgcagctgcctccccgaacactcaccctcccggttccgagaacgtttcccggcccgagcgcccggcccgcaaaccgggaggggaggggaggggaggggcagggggggatccgcagcccgggattggccgccgccccgccagccggtgacgcgaggcgggcgggcccctttgtgacgtcacaatcagctgtttgaacgttccaatttgtgccgtgagccccgccgcagcggccgcacagactcaaagccccgcgggcgagctcagcagcccggagcgaccgcggccccgccgcctcccccgcgagtcccggcgatgcggcccggcctgtgagcggccggcgaccctgggacgccccgccgcacaactacctcaacgccgtgccgcccccctcccgcccccaggtgagtcccgacccgggtgggcctgggggctcccctgccacggacacgccctgcgccccccgcgcccgggcctttgtctgtctccgccggcggccgccggggccgcgttcccggctcccgattggttgccgcacgcccggtagaccatgacgtcgttctatttgcatatgacattgagacgtcaccaaggccggtaccgcccccacaggctcgggtcgcttgtcctcccgtgacccggtagccgctgtgtcggggctgggccctgggtgagacgctgcaatccaaagggggctgcagggggatcggcgatttcctaggcttatccaggggctggggtcaggcctctgatcccctactttctctttgcaacctgagaaggagtcagacggcgctgctgggcctaggttgagggggtcgtcaggagttcagggctgcatgggactccaggtggttgggacagcaccagatggtggtgggatcccctccctccggctccagactccgcccccagggactaacagaataacatcctcctaatccctgatttgtgtgcagcgccttagctgatgtcactcctagacccaaaatgaagggtcttagaccccagtgcatggaaggggcaacaggcccagagaggaggattagctctctcgaggtcacataaccaattagagtcatgctcactgagtgacagatggattattagccaggggcaaagacataataggggctcagtacaagtggtaagatacacatcctccttccactggggacccgatcttgggctcagccttatcacggtttgataggctcctaggtgtccttactcctggacccttttccagggaatctctggagattggttcacctttt

SEQ ID NO: 3542 - DNA, 6000 bp, Homo sapiens
cccgaggaatagaagggtggcctctttttttttatttttgtttttgagatggagtcttgctctgttgcacaggctggagttcagtggcgtgatctctgctcactggcaacctctgccgcccggattcaagcaattctcctgcctcagcctcccaagtagctgggaccacaagtgcatgccaccacgcctggctagttttttggtattttttagtagagacagggtttcactatgttggccaggctggtctcgaactcctgacctcaggtgatctgcctggctcggcctcccaaagtgctgggattataggcgtgagccactgcgcccggcctgaagggtggcctcttgacctccagtcctgcagcccatgaaattgggcaggtactcacacctgggcatgggttagatgggcgtgggtccctagtaactctgagtatgagctcatgtgcatgtgtgtatatgtttatatatggatgccttcattgtatgcacagatacccatgattatccatgtgtgtgcataggaatggcaccctctgtctgattggaaatgagactccagagttaccccagcatgatgttcactgccttttttttttttttttttttttttttttgagacagtgtctccctatgttgcctaggctgaagtgcaaccacccaggctcaattgatcctcccacctcagcctcctgagtagctgggtcttcaggtgcaggccaccacacctagctaatttttgtatttttaatagagacaggattttgccatgttggccaggctggtatcgaactcctgggcttaagcaatcctcctgccttggcctcccaaagtgctatgattactggcctgcactgccgcgcccagctctgctgcctctttttacagcctgccggcccagaccagagtctcagaatactaagcccactttctggggccagggtcagtagatagctttgctgctgtatgattctaagcaagtatcttgacctgcatgtgtctcagtgcacctcagtttcctcacctataaaatgaggggtttggatgagttgaggtctgaagcctcctccagcccaggtaataaatctttgtagtggacaggaggaataggtcctaggggtttcaggaggggacttccatgggtacctctgactctacagagaaatggaagactgagatctgacttagcagcctagaaagacttagcagcctagaaatggggttcagctaattctgggaacagagtccggtcacttaaggtaccagagtgtagccaagagcccccttttctgggcttggggaaccagaaccatgtgttcaacagaccattgcctgtacacagggtagagagtgcaggtgtatactcctgaaccagccacccttcttttttttttttttttttttttgagatggagtctcactctgtcgcccaggctggagtgcagtggcacgatctctgctcactgcaagctccgcctccccggttcacgccattctcctgcctcagcctcccgagtagctgggactacaggcgcccgccaccacgcctggctaattttttgtatttttagtagaggcggggtttcaccgtgttagccagaatggtttcaatctcctgacctcgtgatccgcccgcctcagcctcccaaagtgctgggattacaggcgtgagccaccgtgcccagcccccagccacccttcttaagcttcaagctataactactgagcctgtgatgaaagtctactctatgccagacccccacaagctgggtgcgggcagtatagggacaaagactctgcccttgggatgccaaccatccacttgagaagacacatacacatacaatgagtcatcatcacttactgtttatggacaaataaacgtccatcaaggtagccatcaactcgtgggtagggacaaggaaggctacctagaggaagaaagggtgagtagaatctctccctctctctctcttttttaagagacagggtctggctctgtcatccaagctggaatgcagtggcttgatcatagctcattgtaacctaaacccaagtgatcttcttatttcagcctccctaagcagctgggactacaggtgcatggcatctggctaattttctcattttttgcagataagtggtctcgctatattggccaggctggtctcaaactcctggccccaagcaatcctcctgccttggcctcccaaagtgctgggattatggctgtgagccaccacacctggccaagtagaatcttgaagacaggaaagatctggatttcagaaagttctgaagaaggcattccaggcaggggaaacagcttgagcaaaagggtggaggtgggagagtgctgtagagtcaacaaggagtttgactttagcacaagatgcgtgtaggagaaggggaggtgaagctggagagaactggggccggagcatggggggcatgagttctgtgttaggagtgtggggctttaggagccacatcaggttttagaacaaacaagtggcttgacaggagagacgtgttagggattatttaattaaagtcagcaagtaggtctgaaagggtatgaggttagcaggaagtggctgtgatgggcagaggctcagagttgcatggaatgaggacactttgggtataacactccaagggccacaatgccactcccctctccacccctcagccttgggttatttttttctggcttcttcccctgtcgctagggttaaggagtcccttgggggtttcagatgaggctgggatagagttttatcactagagtgccgggcacggtggctcacgcctgtaatcccagcactttgggaggccgaggcaggcagatcacaaggtcaggagaccgagaccatcctggctaacactaaacatacaaaaatacaaaaaatacaaaaaattagccgggcgtggtagcgggcgcctgtagtcccagctactcgggaggctgaggcaggagaatggcgtgaacccggaaggcggagcttgcagtgagccgagatcgtgccactgcactgcagcctgggcaacaagagcgagactccgtctcaaaaaaaaaaaaaaagttttatcactagatcattaacctctggcctaggtcacctccggcctccttttgggctaggtgggcagttctcggaccctcccccaccagccctgctctgctgacctagaacctctggccctggagattctgatatgtgtatttgtggtctcttctcgggcatctcccaggccactgggagagctggggcctagagcgtggggtgggtggaatcctgagggcagagagtgtggaagaatcttacaatggcagctctagagggaagcctggatatgtttgtttgacaaactgagacccagagaggtaacatgacttgaggtcacacagcaagtctagggcacagtcaggactgaaagccaggactctggggaggctaaagcgccctgaggtttagaccatctggttcatgtagagaatggagagggtcagggctgggagctatgggttcaaatcctggctctgccattgactgtacttttgtgacctaagaaagtcacttgagctctctgagtctgtttcctcaactgttaaacgggacaatatctaccttttgggttgttgtgaagataaaaaaacacacccatagcacaggtcgtggcacacagtaagtgtgccaatacatgtcagctagtggtatggtggtgcaatagtaggtgcctaataaatgttgaatgcattgttgaacatgagttcacacgctaacagtgagattgtgagactcagctttcccacgtgtaaatcaggactcataatcagtccctgtcctgccacttctttacagccccggtagcaacatagattaaataaggtatgtaaacgttcaagcgcggagccgtctcaggtcaatgtttactcagcccagggcaattcctctccaagtcctactctgcgaaatttcacgtcagcttcactaacttctctacattcccagatgctccccgggaaccgggggttggggatgtccctcttttctcaagcccgccgagctgaggaaaaacggggtgggaaagcagagtgtgtaaggctgaggaggtgagccagaggggggagggagagcaggaataagggcagtggggagaatgcaggtgcacggacgtggtgtgggtcgagaacagggtccgcatcgggggacttggatataggatgcagtgaaaggatttggggagcagtgggagaggtgagggcgctgcgatccgggaagaatcaggaaaataaggagccggtaggagggagtggagatcctcctcgcggagagctcgccgcggcgcagggctcccagctccccgcagctgcctccccgaacactcaccctcccggttccgagaacgtttcccggcccgagcgcccggcccgcaaaccgggaggggaggggaggggaggggcagggggggatccgcagcccgggattggccgccgccccgccagccggtgacgcgaggcgggcgggcccctttgtgacgtcacaatcagctgtttgaacgttccaatttgtgccgtgagccccgccgcagcggccgcacagactcaaagccccgcgggcgagctcagcagcccggagcgaccgcggccccgccgcctcccccgcgagtcccggcgatgcggcccggcctgtgagcggccggcgaccctgggacgccccgccgcacaactacctcaacgccgtgccgcccccctcccgcccccaggtgagtcccgacccgggtgggcctgggggctcccctgccacggacacgccctgcgccccccgcgcccgggcctttgtctgtctccgccggcggccgccggggccgcgttcccggctcccgattggttgccgcacgcccggtagaccatgacgtcgttctatttgcatatgacattgagacgtcaccaaggccggtaccgcccccacaggctcgggtcgcttgtcctcccgtgacccggtagccgctgtgtcggggctgggccctgggtgagacgctgcaatccaaagggggctgcagggggatcggcgatttcctaggcttatccaggggctggggtcaggcctctgatcccctactttctctttgcaacctgagaaggagtcagacggcgctgctgggcctaggttgagggggtcgtcaggagttcagggctgcatgggactccaggtggttgggacagcaccagatggtggtgggatcccctccctccggctccagactccgcccccagggactaacagaataacatcctcctaatccctgatttgtgtgcagcgccttagctgatgtcactcctagacccaaaatgaagggtcttagaccccagtgcatggaaggggcaacaggcccagagaggaggattagctctctcgaggtcacataaccaattagagtcatgctcactgagtgacagatggattattagccaggggcaaagacataataggggctcagtacaagtggtaagatacacatcctccttccactggggacccgatcttgggctcagccttatcacggtttgataggctcctaggtgtccttactcctggacccttttccagggaatctctggagattggttcaccttttgtggtcctgaccccttctgtcctcactgtaccttgaagtcctagagtccaataaaatcgctgcctcccagctgtttggatcacagagaggtgagtcattggctgcctcggggtgtctccagggctgatgttggggtggagggtggggtgagggttccctctattggccctttaccttcccaacttcctaggtcgtcagctaggaagggcctgacctggcctagtgcagacaattgcaggtgttttgctgctccctcgtcacctctgcccacagagagtataggagaagggataggataaggagagtttctgacttaacaagtggatgggcctagaggctgaaccaggaactccattc

SEQ ID NO: 3543 - DNA, 6000 bp, Homo sapiens
ctgggacgccccgccgcacaactacctcaacgccgtgccgcccccctcccgcccccaggtgagtcccgacccgggtgggcctgggggctcccctgccacggacacgccctgcgccccccgcgcccgggcctttgtctgtctccgccggcggccgccggggccgcgttcccggctcccgattggttgccgcacgcccggtagaccatgacgtcgttctatttgcatatgacattgagacgtcaccaaggccggtaccgcccccacaggctcgggtcgcttgtcctcccgtgacccggtagccgctgtgtcggggctgggccctgggtgagacgctgcaatccaaagggggctgcagggggatcggcgatttcctaggcttatccaggggctggggtcaggcctctgatcccctactttctctttgcaacctgagaaggagtcagacggcgctgctgggcctaggttgagggggtcgtcaggagttcagggctgcatgggactccaggtggttgggacagcaccagatggtggtgggatcccctccctccggctccagactccgcccccagggactaacagaataacatcctcctaatccctgatttgtgtgcagcgccttagctgatgtcactcctagacccaaaatgaagggtcttagaccccagtgcatggaaggggcaacaggcccagagaggaggattagctctctcgaggtcacataaccaattagagtcatgctcactgagtgacagatggattattagccaggggcaaagacataataggggctcagtacaagtggtaagatacacatcctccttccactggggacccgatcttgggctcagccttatcacggtttgataggctcctaggtgtccttactcctggacccttttccagggaatctctggagattggttcaccttttgtggtcctgaccccttctgtcctcactgtaccttgaagtcctagagtccaataaaatcgctgcctcccagctgtttggatcacagagaggtgagtcattggctgcctcggggtgtctccagggctgatgttggggtggagggtggggtgagggttccctctattggccctttaccttcccaacttcctaggtcgtcagctaggaagggcctgacctggcctagtgcagacaattgcaggtgttttgctgctccctcgtcacctctgcccacagagagtataggagaagggataggataaggagagtttctgacttaacaagtggatgggcctagaggctgaaccaggaactccattcctgctgggagtttgctcaaggatgggctgggggtaggggtggcttagggcacaaatgctattctgggcagagctgctgtagttattaaagggaatggttctccctggagcagaactgggaatgtgagaaccaggaagctggcagggctgggaaaggaaatctgggaggctccccaagtggtcaggagagggggcaggcactggctggctggtgactgctttcactcctggctgtcactgacttgctgtgtgacctcaggcagggagcttttcccctgagcctccctcccctaaacctatctgaaatttggggaggcacagtgcaggctctggtacacagtgggtcttcagtaaatgcatgctaaatcttggtgccagtaaccccagacccttttgtagctaggcgaggggtggtgtggctaggtcaaggtctttttcacctccctgtacccctgcatcattgtattcttggggattgtttgctgagtctttcctgactgtgtacactctggactggatgcacagtaacgtgggactaggtctgccctgccactatctagccatgtatttttggatagatttatgtcttctttctgatcatcagattttaaaatgggctgggtgaatatgatggtccctgaaacagctcttaacttctctttcatattccatgaattagtaggttcttggaaggaggatgtgcctcatcaaggcctcgatattcccttccttcaagaggggccaaactttctgggcttttggtaatggagtcactagctccctgtggctacatatgggttgggatacatgaattgtgctgggtggacactagttgggggtggccccaccttcttaatccctgtagatctcccacccccatcccaccagagaagccagcatcttaagcctactgtgagtctgcagatgtggaaatattctcagggtatggaagtgaggtgattctgcagcaagtgtgaaaacatttctagggaatgggggaggtagcaataagcatggcaatactgcaggtggattagcagaaagaggagaaatgccttcagggaagtctggacatgcccccaggaagttctacaggaagtgtggaaacacccttagagaatggtgacaagtgtctcagcagcaaaaccgttgagcatctttagggaacaggtgtggagagtcagtcaggcttcaggtactgggggagtatggccagcagcccccagccaagctctagtcctgaggtaggctggcatggggagggggtagatctagagctaccaccttggtgtttccatttctgcagtagggggcctccctcttcatcttcacccagggaaggattggttaagggcttacctcggtctgggtccaaccctcagtgctcatccttaagggctcctgggaactgacagctccctcccttcatcatcacctcccactgacctgctgtctcactgagcccaagcaacctgatcttcctcctacccctggatgctgcccttgaacaggagcctgggaaaagggggtcagaggggggagggcctgccggcatgccatctttacacttcatatgacagacacaaccgaggtgtgccaaatcacatggtaagatggtagcagttctatgggatttctgctggccagtgcttttcaaaccacacaggctccaggagtggttcttaatctctggggtcaaagattgctgtttaggaaatcatgatgaaaaccaaggtcctttttcccagaaaaatacacatggaccatgacccctggccaccaaattgaaaatatcaaattcagacagacacccagaaaaggcaatagaatatagtgattctgggtgctgcctctggaatctgattgtgtggattcaatcccacctttgtctcctactagctctgagactttgggacagttaacttctctgagcctcaatttcttaactgtaaagtaaggacagtaattatccacttcctgtagttgttgtgaggattacatgaggtaatataggtaaagctgcttagcatagtgcctggaacataaatgttagctatatcattattattattttgagaccaagtttcgctctgtcacccaggctggagtgcagtggcacctcgcaggttccagtgattctcctgcctcagcctgggattacaggcacctgccaccacgcccagctaatttttgtattattagtagagatggggttcaccacgttggccaggctggtcttgaactcctggcctcaagtgattcacccacttctgcctcccaaagtgctgggattacaggcgtgagccactgtgcccggcctagctatattataatgataacaagcagacaatatgggcaatttcctccctgcctggagaactcctatttactcctcagagtgcagcttggatgtccaattctctggagaccttccctggcagagctgtgtcatgtgtcactctatgttcctaaagcaccctgtaataataactaatttattagtttgttgagtgcttaccatatgcccagacagttctaagcactttataagtgtttagctcatttaattcttcctcctccatctttttttctcattcaataactttggtatagctcatttaattcttattagagcctggaggaggatactattattagcttatttaattcttataagagcccggaggaaggtactattatcattgtcttttgacagatgagaaaactaaggcacagataagttaaataactttctaaaatcatacagaagataaaaaaaaaaccctggatttgaatgcagaaagcacatcttcccaaagcgtccgcacacatccccgttgtgtgtacccttctccctgctctgggggtgatatcttctggcctcttccccaggccaggagtggggtgaacctcaatcagtggtggctctcacgtccttctgattcccaggtttttgcactgccatagggcgcccccgtgaggcgcttcgccccccaccatgttccagcgcctctccagcctcttcttcagcaccccctcgccccccgaagaccccgactgcccccgcgccttcgtgtcggaggaggatgaagtggacggctggctcatcattgacctgccgggtgaggcctgggtctgtctcctgggcctgtgaagtcattctaagggcagatggcctagcagcggaggggaagggcgctgctgggggacgggggagtcccccaagcctactggaggtggggtcacggggccccttcccatgaaagccggggctctctcctggcggcccaggagaggcccgcacgtcaggtcccctagggcagcagggcgagacgcctggcccgtgggtgccccggggcgctgcggacgggctgcgggtctgactaacgatgccctttctctccccgcccccttgtccggtgtgtgtgtgtgtgtgtgtgtgtgcctcctcgctgctcccctcctctgcacggctcccatcccgcgccccgtagacagctacgcggctccacccagccccggggccgcccctgcccccgcgggccgccctccgcccgcgccctccttgatggacgagagctggtttgttacccctcccgcctgttttacggcagaggggcctggactcggtcccgcccgcctccagagcagtcccctggaggacctcctcatcgagcaccccagcatgtccgtttacgtcaccggcagcaccatagtgctagagcccgggtccccttccccgctcccggacgcggccctgcctgacggcgacctcagcgaagggtgagcgggccgggggcggagcctggaggcccagggagacggatcttggaggccagggtccaggctaggaggctggggtagtggggccaggagcccgccccgcgctcgagggggtagcggccttgggagggttgcctttgagacaaagtggggggccggtgggcctccgggcgaggctagaagcgggcctgaggacggaggggcggggcttgagagggaggggcgtggccaagaggctggggccggggttggaggcttgaggagcgtggctggagcgcctagggagtgggacttaaacagaaaggcaagggtggaatagggggtgggggtccagtctcccccgaggtccagtttacctgttaagggctagaaccgaggaggcacctccgggttggtacccacaagaagggcgtcgggcaccccaatctgaacagacacagaactgagccgaagcaagggtgggagatggcagcgccctctagaccccccgcccagcttacccggcttgaccgagcctggctctgtcctcacagggaattgacgcccgcccgccgcgagccgcgggccgcgcgccacgccgctcctctcccagcgcgggcggcgctgctggagaaggcgggccaggtgcggcggctgcagcgggcccggcagcgggcagagcgccacgcgctgagcgccaaggcggtgcagcggcagaaccgagcccgcgagagccgtccgcgccggtccaagaaccagagcagcttcatctaccagccgtgccagcgccagttcaactactgagcgtccaccggccgcgccacgaaccccttgccgatcccgatccctgtcgggctcctccgactcctcgggctggacaccgaaacctcccttcttaaagcgtgtgaggttgggtgatagccgttccttccccgacaccctcaatttccc

SEQ ID NO: 3544 - DNA, 6000 bp, Homo sapiens
ggctggctggtgactgctttcactcctggctgtcactgacttgctgtgtgacctcaggcagggagcttttcccctgagcctccctcccctaaacctatctgaaatttggggaggcacagtgcaggctctggtacacagtgggtcttcagtaaatgcatgctaaatcttggtgccagtaaccccagacccttttgtagctaggcgaggggtggtgtggctaggtcaaggtctttttcacctccctgtacccctgcatcattgtattcttggggattgtttgctgagtctttcctgactgtgtacactctggactggatgcacagtaacgtgggactaggtctgccctgccactatctagccatgtatttttggatagatttatgtcttctttctgatcatcagattttaaaatgggctgggtgaatatgatggtccctgaaacagctcttaacttctctttcatattccatgaattagtaggttcttggaaggaggatgtgcctcatcaaggcctcgatattcccttccttcaagaggggccaaactttctgggcttttggtaatggagtcactagctccctgtggctacatatgggttgggatacatgaattgtgctgggtggacactagttgggggtggccccaccttcttaatccctgtagatctcccacccccatcccaccagagaagccagcatcttaagcctactgtgagtctgcagatgtggaaatattctcagggtatggaagtgaggtgattctgcagcaagtgtgaaaacatttctagggaatgggggaggtagcaataagcatggcaatactgcaggtggattagcagaaagaggagaaatgccttcagggaagtctggacatgcccccaggaagttctacaggaagtgtggaaacacccttagagaatggtgacaagtgtctcagcagcaaaaccgttgagcatctttagggaacaggtgtggagagtcagtcaggcttcaggtactgggggagtatggccagcagcccccagccaagctctagtcctgaggtaggctggcatggggagggggtagatctagagctaccaccttggtgtttccatttctgcagtagggggcctccctcttcatcttcacccagggaaggattggttaagggcttacctcggtctgggtccaaccctcagtgctcatccttaagggctcctgggaactgacagctccctcccttcatcatcacctcccactgacctgctgtctcactgagcccaagcaacctgatcttcctcctacccctggatgctgcccttgaacaggagcctgggaaaagggggtcagaggggggagggcctgccggcatgccatctttacacttcatatgacagacacaaccgaggtgtgccaaatcacatggtaagatggtagcagttctatgggatttctgctggccagtgcttttcaaaccacacaggctccaggagtggttcttaatctctggggtcaaagattgctgtttaggaaatcatgatgaaaaccaaggtcctttttcccagaaaaatacacatggaccatgacccctggccaccaaattgaaaatatcaaattcagacagacacccagaaaaggcaatagaatatagtgattctgggtgctgcctctggaatctgattgtgtggattcaatcccacctttgtctcctactagctctgagactttgggacagttaacttctctgagcctcaatttcttaactgtaaagtaaggacagtaattatccacttcctgtagttgttgtgaggattacatgaggtaatataggtaaagctgcttagcatagtgcctggaacataaatgttagctatatcattattattattttgagaccaagtttcgctctgtcacccaggctggagtgcagtggcacctcgcaggttccagtgattctcctgcctcagcctgggattacaggcacctgccaccacgcccagctaatttttgtattattagtagagatggggttcaccacgttggccaggctggtcttgaactcctggcctcaagtgattcacccacttctgcctcccaaagtgctgggattacaggcgtgagccactgtgcccggcctagctatattataatgataacaagcagacaatatgggcaatttcctccctgcctggagaactcctatttactcctcagagtgcagcttggatgtccaattctctggagaccttccctggcagagctgtgtcatgtgtcactctatgttcctaaagcaccctgtaataataactaatttattagtttgttgagtgcttaccatatgcccagacagttctaagcactttataagtgtttagctcatttaattcttcctcctccatctttttttctcattcaataactttggtatagctcatttaattcttattagagcctggaggaggatactattattagcttatttaattcttataagagcccggaggaaggtactattatcattgtcttttgacagatgagaaaactaaggcacagataagttaaataactttctaaaatcatacagaagataaaaaaaaaaccctggatttgaatgcagaaagcacatcttcccaaagcgtccgcacacatccccgttgtgtgtacccttctccctgctctgggggtgatatcttctggcctcttccccaggccaggagtggggtgaacctcaatcagtggtggctctcacgtccttctgattcccaggtttttgcactgccatagggcgcccccgtgaggcgcttcgccccccaccatgttccagcgcctctccagcctcttcttcagcaccccctcgccccccgaagaccccgactgcccccgcgccttcgtgtcggaggaggatgaagtggacggctggctcatcattgacctgccgggtgaggcctgggtctgtctcctgggcctgtgaagtcattctaagggcagatggcctagcagcggaggggaagggcgctgctgggggacgggggagtcccccaagcctactggaggtggggtcacggggccccttcccatgaaagccggggctctctcctggcggcccaggagaggcccgcacgtcaggtcccctagggcagcagggcgagacgcctggcccgtgggtgccccggggcgctgcggacgggctgcgggtctgactaacgatgccctttctctccccgcccccttgtccggtgtgtgtgtgtgtgtgtgtgtgtgcctcctcgctgctcccctcctctgcacggctcccatcccgcgccccgtagacagctacgcggctccacccagccccggggccgcccctgcccccgcgggccgccctccgcccgcgccctccttgatggacgagagctggtttgttacccctcccgcctgttttacggcagaggggcctggactcggtcccgcccgcctccagagcagtcccctggaggacctcctcatcgagcaccccagcatgtccgtttacgtcaccggcagcaccatagtgctagagcccgggtccccttccccgctcccggacgcggccctgcctgacggcgacctcagcgaagggtgagcgggccgggggcggagcctggaggcccagggagacggatcttggaggccagggtccaggctaggaggctggggtagtggggccaggagcccgccccgcgctcgagggggtagcggccttgggagggttgcctttgagacaaagtggggggccggtgggcctccgggcgaggctagaagcgggcctgaggacggaggggcggggcttgagagggaggggcgtggccaagaggctggggccggggttggaggcttgaggagcgtggctggagcgcctagggagtgggacttaaacagaaaggcaagggtggaatagggggtgggggtccagtctcccccgaggtccagtttacctgttaagggctagaaccgaggaggcacctccgggttggtacccacaagaagggcgtcgggcaccccaatctgaacagacacagaactgagccgaagcaagggtgggagatggcagcgccctctagaccccccgcccagcttacccggcttgaccgagcctggctctgtcctcacagggaattgacgcccgcccgccgcgagccgcgggccgcgcgccacgccgctcctctcccagcgcgggcggcgctgctggagaaggcgggccaggtgcggcggctgcagcgggcccggcagcgggcagagcgccacgcgctgagcgccaaggcggtgcagcggcagaaccgagcccgcgagagccgtccgcgccggtccaagaaccagagcagcttcatctaccagccgtgccagcgccagttcaactactgagcgtccaccggccgcgccacgaaccccttgccgatcccgatccctgtcgggctcctccgactcctcgggctggacaccgaaacctcccttcttaaagcgtgtgaggttgggtgatagccgttccttccccgacaccctcaatttccccatctctgatcctctaatctgcctctgaacccattcacccttcaccctcactcctggtccccatacccagcatctaatcatccatgccccctactcctggcccctccatcctttcttctctggtccccatccctgtctctccctttcacccttgccctccagtcctctacctctggcctgcccctatttctgaaagcttcttccagtccctgatctggctcattccccaccttcaactcccaccttacatgtctcacactatcccatggttggcattacactcactcctgttcccttattcttcattcccagtaattccctaccaaatggtggggaccctgagcccagctctgaccaggtagagcctgtgcagcctgggctgctgtcattgccctccagtaagggctcagggttttgcttttagtctccccttccttctgccttgggggcggtactctgtggagctgcttaggcctggaaaggtacagtatgtagaagaggactgtgagacgtgagttagagggagaagatggagggaatctagggaacgaggcagcctattggagatgcggacaggacagacacgttgagaagctgcagggagcagggcaccaagggagtgtgcactgtgcttgctcagagaggccaaaccctgctcccaggctgaagcctggagtctgcccccacttcccttttctataatccacccttctgcaggccctgaaatctgaagggcttagttagtaccttgccactctacccccaacacgtcacccgagtagaagctgggcaaggccctaccatcctggccgtctgttcacaagcccaaggtgctagaactagcttaggagacatgcaggccacagggcttctaggcagggaaagggcacacaccctaggtcagcgtgcagagcagtgatgctggaggacacaccatggggtgaagccatcccaaggctgacagctcagtcttcaccttgcctctggccttgtatttcacaccctgctcagtatggctagccagcagtcctgagtaggagtccaggactcccactgtctcaatctgcaaattgttcctatccaggttcagggccttcagggggcctcttttcattttctcccacaggcctctctttctttctaggttgctggggagaaatgggtaccctatgatccccctccccttctcctccagtaaatacctggaagagggaacctgaatccctgggggagacagaaggggcaggggccaccagcctccccttcttgtggtgagactgaattttgggctcagacaccagcaacagcctcttgggatgccctgagttgcttcccatttcctctttctagccgtccttttctagtgtgtgctcactcttcctaggaacttttaagacttcttggtacctatgaacataggtcctcccctcaccccaactctaggtttccaggcctcacagccaagctgaagcttggagaaaactctgca

SEQ ID NO: 3545 - DNA, 6000 bp, Homo sapiens
tctgcagcaagtgtgaaaacatttctagggaatgggggaggtagcaataagcatggcaatactgcaggtggattagcagaaagaggagaaatgccttcagggaagtctggacatgcccccaggaagttctacaggaagtgtggaaacacccttagagaatggtgacaagtgtctcagcagcaaaaccgttgagcatctttagggaacaggtgtggagagtcagtcaggcttcaggtactgggggagtatggccagcagcccccagccaagctctagtcctgaggtaggctggcatggggagggggtagatctagagctaccaccttggtgtttccatttctgcagtagggggcctccctcttcatcttcacccagggaaggattggttaagggcttacctcggtctgggtccaaccctcagtgctcatccttaagggctcctgggaactgacagctccctcccttcatcatcacctcccactgacctgctgtctcactgagcccaagcaacctgatcttcctcctacccctggatgctgcccttgaacaggagcctgggaaaagggggtcagaggggggagggcctgccggcatgccatctttacacttcatatgacagacacaaccgaggtgtgccaaatcacatggtaagatggtagcagttctatgggatttctgctggccagtgcttttcaaaccacacaggctccaggagtggttcttaatctctggggtcaaagattgctgtttaggaaatcatgatgaaaaccaaggtcctttttcccagaaaaatacacatggaccatgacccctggccaccaaattgaaaatatcaaattcagacagacacccagaaaaggcaatagaatatagtgattctgggtgctgcctctggaatctgattgtgtggattcaatcccacctttgtctcctactagctctgagactttgggacagttaacttctctgagcctcaatttcttaactgtaaagtaaggacagtaattatccacttcctgtagttgttgtgaggattacatgaggtaatataggtaaagctgcttagcatagtgcctggaacataaatgttagctatatcattattattattttgagaccaagtttcgctctgtcacccaggctggagtgcagtggcacctcgcaggttccagtgattctcctgcctcagcctgggattacaggcacctgccaccacgcccagctaatttttgtattattagtagagatggggttcaccacgttggccaggctggtcttgaactcctggcctcaagtgattcacccacttctgcctcccaaagtgctgggattacaggcgtgagccactgtgcccggcctagctatattataatgataacaagcagacaatatgggcaatttcctccctgcctggagaactcctatttactcctcagagtgcagcttggatgtccaattctctggagaccttccctggcagagctgtgtcatgtgtcactctatgttcctaaagcaccctgtaataataactaatttattagtttgttgagtgcttaccatatgcccagacagttctaagcactttataagtgtttagctcatttaattcttcctcctccatctttttttctcattcaataactttggtatagctcatttaattcttattagagcctggaggaggatactattattagcttatttaattcttataagagcccggaggaaggtactattatcattgtcttttgacagatgagaaaactaaggcacagataagttaaataactttctaaaatcatacagaagataaaaaaaaaaccctggatttgaatgcagaaagcacatcttcccaaagcgtccgcacacatccccgttgtgtgtacccttctccctgctctgggggtgatatcttctggcctcttccccaggccaggagtggggtgaacctcaatcagtggtggctctcacgtccttctgattcccaggtttttgcactgccatagggcgcccccgtgaggcgcttcgccccccaccatgttccagcgcctctccagcctcttcttcagcaccccctcgccccccgaagaccccgactgcccccgcgccttcgtgtcggaggaggatgaagtggacggctggctcatcattgacctgccgggtgaggcctgggtctgtctcctgggcctgtgaagtcattctaagggcagatggcctagcagcggaggggaagggcgctgctgggggacgggggagtcccccaagcctactggaggtggggtcacggggccccttcccatgaaagccggggctctctcctggcggcccaggagaggcccgcacgtcaggtcccctagggcagcagggcgagacgcctggcccgtgggtgccccggggcgctgcggacgggctgcgggtctgactaacgatgccctttctctccccgcccccttgtccggtgtgtgtgtgtgtgtgtgtgtgtgcctcctcgctgctcccctcctctgcacggctcccatcccgcgccccgtagacagctacgcggctccacccagccccggggccgcccctgcccccgcgggccgccctccgcccgcgccctccttgatggacgagagctggtttgttacccctcccgcctgttttacggcagaggggcctggactcggtcccgcccgcctccagagcagtcccctggaggacctcctcatcgagcaccccagcatgtccgtttacgtcaccggcagcaccatagtgctagagcccgggtccccttccccgctcccggacgcggccctgcctgacggcgacctcagcgaagggtgagcgggccgggggcggagcctggaggcccagggagacggatcttggaggccagggtccaggctaggaggctggggtagtggggccaggagcccgccccgcgctcgagggggtagcggccttgggagggttgcctttgagacaaagtggggggccggtgggcctccgggcgaggctagaagcgggcctgaggacggaggggcggggcttgagagggaggggcgtggccaagaggctggggccggggttggaggcttgaggagcgtggctggagcgcctagggagtgggacttaaacagaaaggcaagggtggaatagggggtgggggtccagtctcccccgaggtccagtttacctgttaagggctagaaccgaggaggcacctccgggttggtacccacaagaagggcgtcgggcaccccaatctgaacagacacagaactgagccgaagcaagggtgggagatggcagcgccctctagaccccccgcccagcttacccggcttgaccgagcctggctctgtcctcacagggaattgacgcccgcccgccgcgagccgcgggccgcgcgccacgccgctcctctcccagcgcgggcggcgctgctggagaaggcgggccaggtgcggcggctgcagcgggcccggcagcgggcagagcgccacgcgctgagcgccaaggcggtgcagcggcagaaccgagcccgcgagagccgtccgcgccggtccaagaaccagagcagcttcatctaccagccgtgccagcgccagttcaactactgagcgtccaccggccgcgccacgaaccccttgccgatcccgatccctgtcgggctcctccgactcctcgggctggacaccgaaacctcccttcttaaagcgtgtgaggttgggtgatagccgttccttccccgacaccctcaatttccccatctctgatcctctaatctgcctctgaacccattcacccttcaccctcactcctggtccccatacccagcatctaatcatccatgccccctactcctggcccctccatcctttcttctctggtccccatccctgtctctccctttcacccttgccctccagtcctctacctctggcctgcccctatttctgaaagcttcttccagtccctgatctggctcattccccaccttcaactcccaccttacatgtctcacactatcccatggttggcattacactcactcctgttcccttattcttcattcccagtaattccctaccaaatggtggggaccctgagcccagctctgaccaggtagagcctgtgcagcctgggctgctgtcattgccctccagtaagggctcagggttttgcttttagtctccccttccttctgccttgggggcggtactctgtggagctgcttaggcctggaaaggtacagtatgtagaagaggactgtgagacgtgagttagagggagaagatggagggaatctagggaacgaggcagcctattggagatgcggacaggacagacacgttgagaagctgcagggagcagggcaccaagggagtgtgcactgtgcttgctcagagaggccaaaccctgctcccaggctgaagcctggagtctgcccccacttcccttttctataatccacccttctgcaggccctgaaatctgaagggcttagttagtaccttgccactctacccccaacacgtcacccgagtagaagctgggcaaggccctaccatcctggccgtctgttcacaagcccaaggtgctagaactagcttaggagacatgcaggccacagggcttctaggcagggaaagggcacacaccctaggtcagcgtgcagagcagtgatgctggaggacacaccatggggtgaagccatcccaaggctgacagctcagtcttcaccttgcctctggccttgtatttcacaccctgctcagtatggctagccagcagtcctgagtaggagtccaggactcccactgtctcaatctgcaaattgttcctatccaggttcagggccttcagggggcctcttttcattttctcccacaggcctctctttctttctaggttgctggggagaaatgggtaccctatgatccccctccccttctcctccagtaaatacctggaagagggaacctgaatccctgggggagacagaaggggcaggggccaccagcctccccttcttgtggtgagactgaattttgggctcagacaccagcaacagcctcttgggatgccctgagttgcttcccatttcctctttctagccgtccttttctagtgtgtgctcactcttcctaggaacttttaagacttcttggtacctatgaacataggtcctcccctcaccccaactctaggtttccaggcctcacagccaagctgaagcttggagaaaactctgcattcccatgagggcaaaggcagctgccctccctgaccctatagccccaggcctcatggggggtatgtggggaagggatggggtatccccatggatgctgggatgaggacagaggaagacctgatggggtctcctattccagggaataagccaaattaacactaaaaacggatcaaagctcccacgccagtccactagggccccagtagttgacagccttgctcctctcccaagttctccttcagaacctagttgcttttattcttccagctaccacttgggcacttcacagccagcctagggtcttcggcacctccaagagctgaatctccctccaacccttcttgcctactcctcactgccagctgggacctaggctcagtcctgtgtggtgcccatgatccttctggtgggggaagagtttaagttatagggcatttggctcaaattttaaaaggccttttgtttacctatatttctggaggctcctgtattctagaacccaatctctcacctgcttggttgcaaggctcatatttttttgtacctttcctatagattctgtagcatttgagtgtggcaatattttaattgtgtatagatttctaagaaccaacactactcagtctcctgctagtctgactcctgaagcatcagcccttgtcatactgtattgactgtgtacgtgcctttcaccttgagcatgcttcaggatttttttttaaaccacagaacttgaatacatgagggaaccagagttc

SEQ ID NO: 3546 - DNA, 6000 bp, Homo sapiens
cttgtatagtctactcaggaacacactctcagttagctctgaggtctgtgtttccagggttattagtcctcaaacttggcccagaaactaactttaattttctttaagctacagtgcctgttatataaccattccatccacaagtcctgtcaaaactcccctcttacccattgcacgaatccactcttagaagcgcaaagctcctctcagtttcagttactgttctcaaattggctctctgaactttccagtgagtcccatcagctacagctgtccctcagtatgtgggggattggtttcaggaccctccagacccagcatacccaaatctgcagctgccttgatataaaatgtcatagtatttgtatataacatatgtatatcctccagtaaactttaaatcatctctagattgctataatagctaatacaaagtaaatgctctgtagatcattgttatattattttcaaattttttaaaaaatatttttgatccatagttgtggttgcagaacccagtggatatggagagctgagagcaccttggttttcttctgtcagttgccctgttgtttctctctactttctcctgttgatgccacacaggtctcgtagctattggtggtttgtccccactccctcctatattttgttatagttggctataggcctttggttttgctatctattttgtgcgcccccccttttgttttcagaatacacattcttctcaaggtccatttttaaaattaggggaattcagggaaaaaaaatttgcgactgctgttgccatgtttccactatttcttcatattttatttttaggctaaaaaatgttagaatattattaaaatgcacgagagcctattttgctggatttgagatttttgtattgctttactctgattgtaaggaaggattgtgttgaaaagccgaggttattatgagagacaatgaatgttggaggcattctctgatgatttaaagaaagaagtcggtctggaagacattatgtgttatgaaagaaaaggtatgtggagtctcaaaggatgacacaaactcccatacaagagaggatctgacctgacgaattgtatcagtccctggagagggatgtgtgtttttctcctgattgtgagtacatcatgtagctttctggacagattcccaaaacctaaagccatgccaccaaaagttaagtgtgttaggaccatctccttggtaaataaatacaaatgtagattttctcaatatacggtctagcataatgaaaaataattatccttattttaatatgagagttcctttctgataaattcagagagtttcccacataatagttacattaaaaaaggaaacattgcagtgaagtacataggcaggcactataatgcctattacagaatgcagaaaataaattcctcattcattcatacatttatgcaatcaactatggtcatccaaatgtactggttatactatatcaggtcatgaaagtcagtgtataaaaacgttgcttttaaaaaagtaattaaaattagtctcaatgttgagatcctgttctttttcaagagagaaacaaattagtcaattctacatgtatttctattacccacaaatctctcctgtctccaagtcatttctggctaatatctattcacttcaaaatgatctgcttccccttatttttctgaggataaccctaaaatttggggtggggttgggtgaagtggggaggcaggtggcaagaggaagtagacatcagtgcaaacacgccttggctttgacctcaataggcgatgtctattttttctctgctatcagatcagtgctctgttcattcagttctatccttcccctttccgacctgtaggctcatcagccccctacagctgtcagctcccttgaatagtctctaatgccataaatactaaaaaaaaaaaaaaaaaaagtttaggggcattcctctggctgaaacagttcaggctaacatcctactctcttttgacttattgaggcaaaaccctagaccttgattgcttttctgatccccactgggaatagagctcagatgcccccaatctctagatcttcacacatgtgggaattgtattatttctagctccacagtttctttcaaaggaatcccaacgactgggtgtgtgtggctggtgggtgggtggggatttataggcctttctttgggacatacaccaatatctctggggagagaaaattggttcccccatctttgtggcagattgcattattgtttacaattaaccacacaacccccactccaaaaaaattacaatccatgcccattgccatgtgatttgcctatgaaagaagtagacttctccacttacttggggtttggccatatgaaagaccttggccaatgggatttgagtagacatgtcatgagacattagagaagcagctttaagaggcttcacaagtttctaacagctttctggctcttcccatctcccttgagaattgccaagttctacataggggcagcttcttcagcttgggcactggattgaggagacccatggagcagaacctcagctgacccagcatgtaatacaaataagaaataaacctttgtggccatcagccatttttttttttttcaaccgcaaaagtgatgaatatattgtttgtggctttttttcctttcacctcatgtgctgaaactcatgaagtccagccaattctaaactacaaactctgacttatgagactactgtcactgccatgagcttcaaatatctattacacaagcatcagatttgccttttctttctccccgaggcagggaaggaaatgccctagctgtctgagaagagtatgtgagcagagaacatggaattgttcagattttcatcctgatggacaagaacacatcaaactatcaaacataaaacttgaaaactccaagacatttatccttcctggactcaaggtatttacagggcagaggaaatatctcttaagtaattataatgtgggacaacaaatagtgtgtcatcaaggtgtgcggagaaaagtgctgtgggacctcatgaaagaagaggcctggaaggacaggtaggatttgacaattcaaggggaggggagagaaagcattttgtattcaagatgcagacagagctaaattacagaggcaggaaatgaaggggcatggatgggggtgtgagtgaaatgatgaggggagactggtggaaggtcagatcggaaaggctccgcaaggcctacttgtggtcctagataaggagtgtggactgtgaagttctaagactggctaaagaccatatagaaaaggggctggagagtggattttagcagcatttattattttagaaacaatatagccctttaaaatagtgacacataaagtaaatgtacctatacagctggaaaaacaattcaggtgatggattactctccccaaatggctggtgtacactgtgtgtatatgtttgtacttcatattcattgtacttatgaagtcttttatggtttgttgttgttggtattggattggtgcatttttcagccaaagaaacagccttgatttcctgcagttgtttccctactaatagggcacatcttactatacttagatctccttggcattttaattcgtgttttaaaaaataaccacacaataatgcaaatgtacttaatgccactgaactgtactttttttttttttttttttgagacggagtctcgctctgtcacccaggctggagtgcagcggcgcgatctcggctcactgcaagctccgcctcccgggttcacgccattctcctgcctcagcctcccgagtagctgggactacaggcgcccaccaccacgcctggctaatatttttgtatttttagtagagattgggtttcaccgtgttagccaggatggtctcgatctcctgaccccgtgatccacccgcctcggcctcccaaagtgttgggattacaggcgtgagccaccgcgcccggcctgtactcttaaagtagtatatttgttatcgtttgccacacacaaaaataataccccagcagatcttcatacgagttaatttacgctataagtttagagccggaatttcctcagctcatcactcagtgttaacattgaagatgtccaggttggttatgaaggatgtgacatcctagcgttggccactcttttcctggtccttcctgtcttgcaggtgagcctctgggggtcaggagaaagtctcctctatctcctgctcactttcgtgtaggggagggaaggtgtgtgtgtgggtgggtgggggcgttttgtgtgagggaggccgatactgggcaggcagccacgctcttcttcctccatcctggggcggaagtggggagagcagcagtttaaaggttctgttgcagcagtttaaaggatccactcagccgccttaaccgccaaccagcaggctaagggaggaacagaatgaacaatgtttggatcccaatgactggagatgaaagttgcaaaagctctgcccaggcttctaccaaggattaactttccagggcatctgctgaactgctcttcggggctgtctgctgagattggcggcgggaccctcccgcctctcactcgtgcctttgttccccacgccggcctaaccccgcgcccctgcgctcgcggccagggcacctgacccacgcgccgcccgccggggatgcgggagccgccactgctaccgctgccaccgctgccgggcctgctccgccaagcacatgcgcagtggcgacgccgagccggcgccctcagtctcctcctccaccgcctcccggttccgcagtcacttcctgcagctgtttccctgtgggtcgggttggactgacttttgacagtcagccttcggctgcggagggggctcggcggcggccggcggagaaagttgctccgagaagaggctgggtcgagctgggccgagccgggcgcgcagggcgggcgtcgcgggcgtcccgggcggacgcggcgcggagactgccggcgcgtcccgggggttccggtaagtgcgggcgattgggagccgcggagctttcaggacgagcccctggagcgccggggactagcggttcctttccgatgctctttccatctgccctccacgtgacagggcttgcgctgcttctatttatcagtttgcttgtttcaggcatttcacgtggaccaggtggatcatctgtgcgtgcagctgccttggccctctcagttgcccccgccccgtgggagtcgggggattccatccttcgtgatggcatccataccgggttgaggtgcgtgtgtgggttcgtgtgtatgcatgcacatcttaggaatgtaaggtggatgtgggcgacgctgaactgtctgtagctttgattcaaatctgtaaacagttctctaggattaggaaccgtcacagcggagactgaaaaacattcgccaattcaccaaggcctcttccccagttttctgcgttcttttgagccttctttataggatacaccttgcctcaagtgattattattattattttttttaacttttctccctctcattccttcttgctgcgttctgatgacctctgagtaatgctcgctgcctttccctcatttccagaattcccaattacagacttacctagtttgctgaggtgctcctaacctgttcctttattctattctctttcctctgtagatttctccaaatgagacaagagattgtctttaacacagtatgtgaagagtaggccccagtccaatcattaaaactaagtatgctatgacaattaattttctttaaacagggtaccttgtgaagctttgattttctttaatgtcgtcttagctcctttccaaaccaggacattaaccagcataaatccttcatttatgccatcgcaagcatcaaagtgactggtttttaagatttgaagaatatttatgccagtcttcaaattagtcccttttaaac

SEQ ID NO: 3547 - DNA, 6000 bp, Homo sapiens
tttagtagagataaggtttcaccatgttggccaggctggacttgaacgcctgacctcaaatgattcacctgccttagcctcccaaagtgctaggattacaggcgtgagccattggccaggctggtcttgaactcctgacctcaaatgattcacctgccttggcctcccaaagtgctaggattacaggcacaatctctggtgaacaatttgtaatatgtcattgctcagaaagttaaaaaatatttttgtagattgtagtgtctggattttacatttcagtttgaaatatgaaatgttacatttacttatttttttaaaaaatatatgtatttatttatttatttgagacagggtctcactctgttgcgcaggcttggagtgcagtggtgtgatcacagctcacagcagcctcgacctcctgggctcaagtgatcctcctgcctcagcctcctgggtagctgggactacaggtatgtgctgctatgtcttgttaatgtatttcttattgtttgtagagacagggtctcactatcacaggtgctcaggctaatcttgaatgcctgggcttaggccatgcgattttcccaaagtgctaggattacaggcgtgagccactgtgcctggcctacctttatttttgtagtataaaataagcaattttttcttagacttgtttgagggctccttttttttacctaccctttaaatactgatgttcttttgggttctctttttttaaccctttcttttccttcccctttccctttcttagataaataacactgactgagttcctaatgtgtatcaggccaggaccatggtgtacagctgagcaggttgtgcagtacacaattccaggagctgccagtcactgcctccaccccaaccaccaccctggcccatcaagatttgtatcgtgcaggcatctccgtgtatcaggcactttggtagctacttaaaaaaaccacttttaccctcacaacagcctatgagatgaatgtcatcattcttattttatagatgagaaaactgagtttcgggtatattaaataacttcattaaggttacataataatgagtgggtagtggagtttgccaaggtccaaatcctctgcttccctctatagcatgtgggttgtcttagcttttggtaatctcatctatggccaccacctaaatgatggcaattcccaaatgactctccaccctagatctctctctgttgatagcctactggtcagtttttccagtatgccccagaggcacttctgattctatagatcttaatttgaattatcatggtttccttaccatcacttctcttttattccccctcttagtggtgccagcagttggggctattctttttctcttatccccctgcatctgatatagttttgatgtgtgtccctgcccaaatctcatattgaaatgtaatcctcattgttggaggtggggcctggtaggaggtgattgcatcgtgggggcaaatttctcacgaatggtttagcaccatctccctaggtactgtcctggggatagtgagttcttgtgagagctggtcgtttaaaggtgtgtagcaccgcctccctcccccctccccccgaaacgctctcttgcacctactttgaccatgtgacaggcctctccagagggccaaacagatgccagcatcatgcttaaagcctataaagcctgcagtactgtgagccaattaaatctcttttctttataagttacccagtttcaggtatttctttatagcaatgtgagaatggactaatataacatccaatcagataccaagttccatcacttctgtttctgaaatctctctccattggttcccttcctttgcatggcagttgtcactgcattagctcagaccctcattcatttattctggatgtatcagctctgtctgaattatgaaaaatttcacctagagtctcatgtctaaccctttgttttagctgtttgctcagcctggtttacccttctctaccacacctattgggctacttgaagacatagatttaaatcactgatatggtttggatctgtgtccccagccaaatctcgtggtcgaattgtaatccccgatgttggaggtggggcctggtgggaggtaattggaccatagggacagagttctcataaatggtttagcactatctcctggtgctgttttttgtgacaataagttcttgagagacctagttgtttaaacatgtgtggcatttccctgccccaccccgccttgcttctgttccagtcacgtaagacatgcgtgcctgcttccccttcaccttctaccatgattgtaacctccctgagggctccccagccatgcttcctgtgcagctgcagaaccatgagccaattgaacttcttttctttataaattacccagtttcagttatttctttatagcaatgtgagaacagattaatataatcaccttctcagagaagacttgattcttttcatcaactcctttcctttaaattcttcttctctgtgctcccaatagcacatcatgcttaagtctatcatatcacacattatgtatcactcacacattgggtacaactatcagtaccctgataattgatttgcttgtcttactccttccctggattgagaggtctttgaggacagggagaccatgtctaatatcattatcttaatacaacctagcagattgtctgggaggaaatcaataaatgctccagagaatgaatatccattcacactgtagactccttaggaagatctgagagagtttgttcacataatattatagcattcaacgtgtttatttagtcttattaaattttgactgcaatttaaaaaaaatttgcatagttgcatggttgaaaataatcagtggtgatgttactcagttgtgcaaaatatttgggataataggcagcactattcgtgcttatgttctcattcatattggcagcagcttcttcccttatcctgttaacaagagattataatttatgaatggtaatttgaaaagtggactctgtgttgaactttggtttaaggctcaggagatttgcatcaacaccaatgaataaactaacctcttagaggttgctttttatctttcctagttcctgtccaccaaaatggtcactataccaagaaaattccttgaaatagattatctcagaacctaagccattgctaaatctgaaggttggacttcctttgggatggttttcatttacattcaccttcctcatgtaactcagatttaggtctcattctagcttggcctgtgtctggtttgggccaatctcttaaatcttcctggacatcagtttccttattttttttttttttttgagacagagtttcgctcttgttacccaggctggagtgcaatggcgcaatctcggctcactgcagcctctgcctcccaggttcaagcgattcacctgcctcagcctctcgagtagctgagattataggcacccaccaccacgcccagctaattttttgtatttttagtagagacggggtttcaccatgttggccaggctggtcttgaactcctgaccccagatgatctgcccgccttggcctctcaaagtgttgggattacagatgtgagccaccgcacccagcccagtttccttatttttaaaatcaggttatttgctaaaatagctaggaagacttttcaagctcaaatatcctaccgtgggttcttttatcatcttattgcccctgtcctttttctcttcctccctgactggtgagctggtcctcctacctgccctagcatggcacatgtagatacactgtgttattcagcactttgctttgacctagaggttttcttcaacttggagggctgagaagcaatgtttgcttgtgtcgtttggaatggtgcctgttggcgtgcacagatcctttccacaaagggcctgtgagtcccttccttttaggaagcacattcctgacagtggttgcaaaagtagagagggattgcagagtgaacacagattcttgtgtcagagcgacattcctaaatggcaatgttcagcagacttaggtgattgtgatctatgggggatatggggaatgagtaggtatgcgattcattatgaatgtcacacaaatgaagtgtccaagggtttggagcaaggaagcacttcataatacctcacagcttctggattattttgttacatttttgtttaattgagggtacaaccagttaagttacaaagcacttcaagtgaaatcattgtttcatcaagaagtgtctgtattttatgaggtaaactaagattattcccgatttgattcacaggtattctaatttcatcattagatgcaaaaggacaagtgaggtacaagctgttttttgatgagatgtgcatgggaagtgtttctataaaacagttgtctgccacgtgggaaggcaggtctgggctgttagaagtagaagaaagagatttaaagagctgggaaggagggagaaaataaagaaaggtggcctgtgaggatatgtacagacagagaggtagcaggcgcttaaggccaagaggtgagctgtccctgtctgggcagaagaagtgcgctaggggcagctgcctgcaccccctgctctgaattcctgcaacagcggtcccaggagaacaagagacaggtcctgacaagcagtagagtcggtgcagcgcgcccgggttcggatagggttaaggccaacacctgcagctgaagtacgacccacatgggaagtaggaagtgcggcgcctgagcttcctgtataaataaacgcgctgctaccgctgctggcgagctgtgccccacgctcccgctgcaacagtcccgggcatcgcagctgccagtcaaggctaggaggcggtcggggactccgcctcctcccgacccgtaggtctgggagcgcaagtcctgttgcagtcttgcaaagtgtaaagctgtcagccgcagagcacggaggaaagacggagagaatggaagagctcctgtccggtgtgccagcagcccggactggcggtgagcgcgagggaggctactgagaagcccggcgacggaggaacgcaggtctgctgccaggtaggtttagcgagctttttaaaggctacaggcgttgcaagaccggaatggtgttgctggactaaggaaaaaggacaggaaactcactgtgacaccacaatttttcgattttctgtctctagtgctcaaaccatacagaactgaattcattctgaatgccttaaacacctgttaacttagaagaaaaatgcctttgttaaaggaaagtagtttcatttctaataaaacagtttctataatagaatgtattgtagaatccgagattagaccagacctctccctaggtcttaaggggagaccaaaagttggcataatctcggattatgcattatagtgcttattttatcaggtaattgctaatgaaacagtgaaactctgatactacgagagccattctcaaatttaagttaaaatcgaactgattgtcgtttgtgcagggaaaaggtaggtatcttttgcttattctttctaaaacaccttttgtttttctcatgagtttcaaggatcctgctgtaagtctactcctcatgcatatacactattcacataaagatttcccagaaattaattcccttctctgggaaatgttcttttttcatgttctcataacagactgtcagtttcatattgctttctgccacatgtatcttatcaaaacattagctctgaggttcttaacaggactatctctgctcttccgatttggcatttctggacgtttatttgaacattgagaggtataaattaaatggcaatgtatctaacatttctgaggaagcagattagggggtgtctgtgcccagaagcaaaataaatgaactttgggatgactcagtttttagggtgtgggtaagaggcaaaaggaacctagccagtcctaactgagttgctggc

SEQ ID NO: 3548 - DNA, 6000 bp, Homo sapiens
ctagtgaatcggagtctgtttttttttttttttttgagacggagtctcgctctctgtcgcccaggctggagtgcagtggcaccatctcggctcactgcaagctctgcctcccgggttcacgctattctcctgcctcagcctcccgagtagctgggactacaggtgcccgccaccacacctggctaatttttttgtatttttagtagagacggggtttcaccttgttagccaggatggtctcgatctcctgacctcgtgatccgcccacctcggcctctcaaagtgctgggattacaggcctgagccaccgcacccggcccagagtctgtgttttaacaagattcccatataatgcacgttaacatttgagaagtgcttgtttgaaagatgaatttgttagctgtgcattaagaaggagagagaggccgggtgcggtggctcacgtctgtaatcccagcgctttgggaggccgaggggggcagatcacgaggtcaggagattgagatcatcctggctaacacggtgaaactccatctctactaaaaattcaaaaaattagccgggcttgatggcaggcatctgtagtcccagctactcgggaggctgaggcaggagaatggcatgagcccaggaggcggagcttgcagtgagccaagatcgcgccactgcaccccagcctgggtgacagagtgagactccatctcaaaaaaaaaaaaaaaaaggagggagaatgagaacaaataaaaaataagatgttagagctcctaaaaggggagtatctgagttttctgagagtaggtcagtcataatctttgtttttcccaagatttaggacttagagaattcagtagatagacaattgaataaatagtacaatgtgataggatacaattaaagattgatgctgttgtgttcaagaaaaaataggcttttcttagttgatgatggagctgaggaatagtcgtgtctagcttctgacctgggaaatggcaagagggctctgggggcctggaattcctagggacggaatgggagttatcagtggggaccagtgccgagctgacacatgtctgtgtttgccagtgacgctgcccgccaccatcatgacgtcatccgtgcccacaactgtgggtggccacatgatgtaccctagcccgcatgcggtgatgtatgcccccacctcgggcctgggtgatggcagcctcaccgtgctgaatgccttctcccaggcaccatccaccatgcaggtgtcacacagccaggtccaggagccaggtgagtagaggagcagggctaaggaaaggaggaccgtttccttctttatacacacacacacacacacatacacacacatatgcactgatgcctacaaatatttctacccaaatacaacacagacttggatgctcacacacacatttggacaccccacttggacactcacacccgcatgcaccctcagacacactggcaccctttcccttgggctcttacatctgagactgccccagtcacttgtgcatttgacaccactcctccaatatctggaagtttcaacaaacaatttgagtatctcctgtggttttccaatgtaggtggcgtcccccaggtgttcctgacagcatcatctgggacagtgcagatccctgtttcagcagttcagctccaccaggtaggtagggatatctttcaccccatcccagatagccacttctttgtcttgaccttaggggatcctgttaccagttcatcaaagccaaaatccctagcctggaagcccatctgcttttctgctcaggcctgtggttggcaggcagggaagccaggggagcctgaactggctggccagtccctgcccctcctcatacatccccttccctccagatggctgtgatagggcagcaggccgggagcagcagcaacctcaccgagctacaggtggtgaacctggacaccgcccacagcaccaagagtgaatgatccgcccgccgccctggacagatggcccaagggatggcaccacttatttattgttgccttttcacgttttctttacacacacgttgacgggccgcaggagggaggcggggaggaggaacgggcagccacaggactgagccctctcactccagccaaagaaatgggcctgcctgcctccacccgtcctccctcagcctccccttcttcccgccccacctcccatttctgttgctggaggggctgtcctccttcctgggaccccctcgccagcttggctcgatgtttgccatgagtattagcttacccaatgggaccgtgccccacctccccacacacaggccttctgtggggctgggcaccgtgtcctcctctgaggaagcagttggggccctcttgccagcctccttgctgaccccaggtcagccctgtgtctgtcacaggctgggtcaaaagagccctggctctgcccctcagggggccagctggggagatgggggcttcttcctcacactgctgtcctctcccccttcagctcctgagtagctgggcctgtgcactgggcaggttcctggggccgcctgccctgccttgccgctccccttggacctccaggggctcctgggttggagggaaccaccagcgttcccttctcccccttgtcttcccccctctcctcccagctgctttacttaaagttgattttgaactttttatttgaggagacgaagtgaaaacaaatctataaatatatatttttaaaatatttaacttttttttatggcgtttttctcgtccccctccctgcccaaactccccttccctggggagccctcaggctccccagaactggctgggcccctggggacagagccaccccatgagctcggggtccaccagtgtgtgggggagattctgggtttgcccagtcctgggttgtttccaggagaaagccgggggaggggccctcaggccattccccaacggggtggggagggtgacccacagctctgggcctctttttgccctttagggctgttgctagggagagggaagagggagaccaaatgtcggggttggggtgggagggcgtcaggcagaggcaactgacttcatttgtgccacacgcatgggcattgcagccttgcgctgtcccaggcatgcagctgcctggggcccaagttgcagtgagcagggtggggtctgggagggggtgagaggcaggaatgggggtcagaagaagtgggagcagcttcttgggctgagtgcagccaaaggggagccagaaatgggcagttctcccagggagtgagcagctactgtaacttttttaaattaagacaaaaagccttgaagaaaatgactttatttttctaagtgtaacctcagtatttatgtaatttgtacaggggccatgccccacccccctcctccccctttggggtagaccttgagggtgggccagcataggggggagggtcttttaccctgtgtcagagcctaccttcaccacctatatccagaaggggagctttttcagaaacagggcagcagtggggtgaaattttcttaacccctaagactgccttcagtaggaacaagctggcttctgtgattaggtgaagggatgggggaagattttatgcacagcctagttatcaaggggatgatttgccgacatgtttgagaaccccctaacctctaaccctcattgctgtcttgccccagtttggggtgccaagatggaagtcacctttctgggctttctcctggagatagctggggcttatgggtggctttcaaggctggggcatggcaaatcaggggccagagagcaggggagcttgggactcaggtctgtaactgcccagccccttttctctgctcttgtttcactccaccatcactcactcactccccactcccccacccatggggaggagacctttgatgaattcttcctctccttcccacaaaagacagacccagtgagtgaatcaggcaaagtgcttataatgtgtgttgtgtgagcgtggccttgggaggacatgcgtgtgtcagggatgagttgaggtgatatttttatgtgcagcgacccttggtgtttcccttcctcggtggctctggggtatgtgtgtgtgggtgtgtgcgcctgagtgagtgtgtgtgcttgaatgtgagtgtgtatgtcagtggtttctacttcccctgggatgctgacccaggaatagtggacatggtcacagtcctatgtacagagctttcttttgtattaaaaaaaaatactctttcaataaatgtatcatttttgtgcacagactgtggggtctttggttctgtttttctacttagggagggatgggggtatgaacgcgaggcaaactcctaaaattgctgctctgagtagcgatccgggctgcttgatgagaacggtaatgctaaggtgtgctttgggctgtttaattctatacgatttaatttaaggaaagttttgcggggccgaggaccttctccctgtgcgtggcttcgctaggtgttaaggccaacgcagaggagcaaattttaattaacaggaaaagtgacacaactaatccaaagcattgctgaagggtttgggaaactcatgggcacctgacctactgaaaagtcaaaaagggcagccttaaggtgggaatgtgggttaccatgtttcgtcagcatgatcgctgtgatgggagagggaggattaggagggccgacccagtgaagaggagggggcttcacagttgactggatggaaacggcttcttcctgctgctgagagaggagcaacgtgacctcgatcccaggctcctccggtagcgcgcccccacgcccctcttccagtgcagccgcccgcggtagcacgcatgctccactcgcgcgctgttccgccacgctcggcgtgggccgcggtgggacccgtaggtgcccggccgtgcgtgcactcgccgtgtgacccggaagggagctctgaggaggcggggccaggacggcgggaccggccgctgggtcccagcgagggctgagccgggcggtgggaggtgagaggagagttctgcgccgacccaatccctccccttctcctgtcccctccccggtcctttagccactgtccatggggctgacgaagggaaccaggtcttgctctctgagattcactggatcttttcagcttttttggaccgcgcccccaaccatccttccccctccccccaaacccgttccctctgcggtgctggcctcctccacctccccacggctctgcaagcttgggcttgaccttgctatctgctggtctcatccatgcgtccagagctcacccccacacctcagtttattgttgctcttctaggccgacgttacacctcctacctcctcctatccgattcttttacttccccctgctgctaatcagttgcccgctggcacatcgctggctaccatccaggcttgccccccatcctaagtggacccctacctccattgaggtccacatccatctttctccctcctcttcacctctactctcatcttctgtccctgtaccccaacatgacccctgccctgaccactatatcttcatctgggtttaccttcttccattcttattctcactattccctgttgcccctgcactgcttcatatcacgcatatctttcctgattattccactcccatttataatcggtcttaataactttgcatttatttgatgactcccctaccttctccatctaagaataataacagattatgtttactgaacactctttatgtgctagatgctgttccaagtgctttacatacatgatcctactaaattcatgaagtaactatgaatattactaccatcttgcagaagaggaaacaagctcagaggttaagtaacttgttccaaactatgcagacagtgagacagaaagccagaattcagagtcacatttatctgatactgaagtctctgaatattgcttctctcctgacctcatttcctaccttta

SEQ ID NO: 3549 - DNA, 6000 bp, Homo sapiens
gcagcatctggggcaccaactccttgtgaggctctggagggcacagcagagcctttctgaatggatcttggggcactgggatgggtgtaggaggaggaagggtaatgtaatctaagaatctccagaactggaatctttgaagtataaaccttttagatgattttagatttggagtttagattctggactaaggagaagcccacattcaccaatccagacagctgtcctcccttccgggtttgtgcattggagagcaaggctcaggcaccagggttaacatagcttggcctgggcaggaagcagcctggaaagctgtgcccaagctctgttctgccaactcactctggagtcccagcactcctctattttactccaccctgaatttggtactcttgtttccctgggcgttggcatgtctccacaatctcagccacgacacttcctttactgaaccctctcctcaatccttacatgtcctacctcttgtttcctgtaaattaatctatgtggctctgggctcagattgttcaggagctgacctgcttcctacatcgcctggcctcgatgcataaggactatgctgtggtgctctgctgcctgggagcaaaagagatcctctccaaagtcctggacaagcactcagctcagctgctgctgggctgtgagcttcgggacctggtgacagagtgtgagaagtacgcacagctctatagcaacctcacctccagcatcctggccggctgcattcaggtgaggagcggctgtgggtatgcagctgagagaatgcaagtcagaagcaggagaaggggattcactgtgttcctctttggtatccctgtttggcacaggttgtagcaaatctggggcacttgtttcctaaccttgactccacatggttctgtcaaaatgtggggagagaggagttgagtataccgttgacccttgactttttctctctacctgtttctgggcatttctctgtgttcctccctctcctcttcctcattctccctgatgttccggctgcagatggtgctgggccagatcgaagaccacagacgaacccaccaacccatcaatatccccttctttgatgtgttcctcaggcatctctgccagggttagtgccctcatctgctttctcctggctcccatccagtgtctgttctccccttcccttcctgctccttagaccttttcctttttcctctcaactaacctagctgtgactgccaccccttcccacttgcccccaggctccagtgtggaagtgaaggaggacaagtgctgggagaaggtggaggtgtcctccaacccgcaccgagccagcaagctgacggaccacaaccccaagacctactgggagtccaacggcagcaccggctcccactacatcaccctgcacatgcaccgtggtgttcttgttaggtgtgaacacacatatatgaatgttctgctgtgccccaggatacttccccaaagcacccagatacacacaaccccagctataaccccaatgcctgagggacacactcaaacctattttgtgcagtgaacacatagacacattgacctgcctttgctgagtatagacatcccctcactcccagagtctggtgatctgtactccaacaggtacagatggcactgccctgtgcttagtgttgagggagataaacagctcacttatccatttctcctttgggcatttgcttaatgccaggcatttgtgtcaggcactgtgcaagggtctcgaaatagaaggacaataagatatggtacctacattccagctggggagctacactagaaaatcaagtaagagcacagagtaagaaaaagcattgtggtccacatgtggacctgagactgacaggcatgagagcagacttccttctggaaggagggggtgactgagctgggttttgacattgaaattaggtagataaagagggggcaatattctaggcataaggacagcatatgtgcaaaatggaagtaagaaagtatatttggagggactttaagtcatcatatttggttacaattgaaagctgtgtatatctttatttttatttttttatattttttgagatggagtctcgctctgccgcccaggctggagtacagtggtgtgatctcagctcactgcaacttctgcctcccgggttcaccccattctcctgtctcagcctcccgagtagctgggactacaggcgcctgccaccacgcctggctaattttttgtatttttagtagagacggggtttcaccgtgttagtcaggatggtctcgatctcctgacctcgtgatccgcccgccttggcctcccaaagtgctgggattacaggcgtgaaccactgcgcccggccgaaagctgtgtatgtctaagtggcggaagatacaggccagaaaagtaggcaaaggcagatcacaaaatgttttgtgagctaagcagtttgaactttattccaaaagttgggagagccattggaagattttaagaagggaggagagaaaactagattttttattgagaaagctcactctggcaactatgggagtttgcgctggaggtagaagaaggaggtggaaggtgtatgcagtgctctagtagagaaaggatccatgtgttcagttagacagcaggagtgggaactgactgggaaatcctcagagatggagtccacaagacttgcctttgggtgagggaagccatgagaaggtgaaggcctcagtgacagtattctagttgagtactgagtgcacggaagttttatttcccaggagagaaacaggaagcgggacaggtttatgtggacagatgatcatttcatttgggcatgatgactctgaggtgcctgtgggacatgacatggaaatacctgttggggacacagcatgaaagctcaggagagtggtctgggatagagatgtgtatttggagtcctctgtgtattaattttcagttgaaactgtgggtttaaattaagtcactttgggtgaatatagagggaagagcagagggtctagtggggacagctgcctcaggagccagcagaggaacaggagcctgagaaagaagtggtggcttgaaatagttttgaactgaaaccagggctctggcctttttatttccttcttttgatttttatttcgtagaggtggggtcttgcagtgttgcccaggttgatcttaaactagcctcaagcgatcctcccacctcagcctcccaaagtgttgggattacagatgtgagccaccacgtccagaggcccagctttgactgtttcctttcttctttcccaggcagctcactttgctggtggccagtgaggactcaagctacatgccagccagggtggtggtgtttgggggtgacagcaccagctgcatcggcactgagctcaacacggtggggacccttgtgcccaccttcaccttgctccacatccttctttttgtcccagtgcctgtgggaaggacctagtccctggggaatggtgacatcccttccccttgggaaggtgttgccttgtaagcagtgagagtgggattagggatgcagagccacgtccatccctaggctctgcgggagaagtgaagggcacacaccatgaccgacttggttactgtcaacaatttttccaaccttgtttctggaggtgacagttctctccctcttctcccctgccctaccaggtgaatgtgatgccctctgccagccgggtgatcctcttggagaacctgaaccgcttctggcccatcatccagatccgcataaagcgctgccagcaggtggtgttagggtgtcagccagggctgaggaggaggaggtggcacacaagtttctccttgatctgcttgggagatggcccaggacctgttgagtcccagagatgtggggatgtcctgagcagttctagggagctcagggcaggaggcttggctttggtagtacttagtggctcaagcggcttgggtgacagataagtctgtgcatgttccagggcggcattgacacccgggttcggggtgtggaggtcctgggccctaagcccacattctggccactgttccgggagcagctgtgtcgccgaacatgtctcttctacacaattcgggcacaagcctggagccgggacatagcagaggaccaccggcgcctcctccagctctgtcccaggtgggtggggcctgaggagggaagatgggtaagggaacaggacactgtgagaagtaggagggatgctcctgtgggagtccggaagggaaagctgcagccaggacatgagggggaaggtgaacgtaggtgagaagtttgtgttaattgggaaaagttgggtcagggaccgaacaggggtgattgggagctgatctgcacttgaatggaggcctctgggaaatcggtgccattaatcctccgccatgcactgtttgttcccagactgaacagggttttgcgccacgagcagaattttgctgaccgcttcctccctgatgatgaggccgcccaggcactgggcaagacctgctgggaggccctggtcagccccctggtgcagaacatcacctctcccggtaaccatgctgacacctggccccactaaccagttccttgtccttattcccagggatcacctgagttaatgctcttggttcttttggttcctgtctttatccctgaaggcctgtcacctcagtgttcctctctccttcctgccccaggcactgctccctgagactctggtatttgaatctttcccactaccccatccccaccctgttaacatttcccctgactccagctgaaacaaaccttggtgaggggaggactagggccccactacccctcaagcctttttgtacaattgatctttctccctcctctgccctgagctgtctgttctcccatctcccatggagacctgttcctgacctgtcttctttcagatgcggaaggcgtgagtgccctgggatggctgctggatcagtacttagaacagagagagacctctcggaaccccttgagtcgagcagcgtcctttgcttctcgagttcgtcgcctttgccacttgctggtgcatgtggaacctcctcctgggccttctcctgagccatccactcggccctgtaagtcccagctgtggccagtggagctgactctgcggacagtggtgtatctggctccctcctccctgggtcttactcttgctgctttgctaccggcctttccaggcccctgagacctactggcctttccaggagatcactacccaagaccggtgtactcacccagaggctgagatgaaaccccttccttctccctctgtctctacagtcagcaagaacagcaagggtcgggaccggagcccggcgccttcgccagtgcttccaagcagcagcctgaggaacataacccagtgctggctgagcgtggtgcaggagcaggtgggcagaagcaagcagaagtctgcagaggggaggggctgctccttttatgtcatttcttgcctttctcctcaggtcagcagattcctggctgcagcttggagggccccagactttgtgcctcgttactgtaaactctatgagcacttgcagagagcaggctccgagctgtttgggcctcgggcagccttcatgctggctctgcgcagtggcttctctggcgccttgctgcagcagtccttcctcactgctgctcacgtgagtcccaccagctccccacagggctataagcttgtgttccaagttcatctctttctgctctgccctttcacctcctttcgctccccagtctcctactccactccctcattcatggtttgctcatgccctttcccctgcccccagatgagtgagcagtttgccaggtacattgaccaacagatccagggtggcctgattggtggagcccctggagtggaaatgctggggcagcttcagcggcacctggaacccattatggtcctttctggtctggaactggccacaact

SEQ ID NO: 3550 - DNA, 6000 bp, Homo sapiens
cctgacctcaagtgatccgcccaccttgacctcccaaagttctgggattacagtcatgagccattgtgctcggccagaatgcactgaattttatgtgaatcctttttgtacacaggaaactcctgtaaattattagttttaaaatagtaactataatttttttaacatccttattttgggatttgaaattcttttttttttatttttgagacggagtctcgctccttcgcccaggctggagtgcagtggcgctatctcggctcactgcaagctccgcctcctgggttcatgccgttctcctgcctcagcctcccgagtagctgggactacaggcgcccgccaccgcacccagctaattttttgtatttttagtagagacggggtttcactgttttagccaggatggtcttgatctcctgacctcacgatccgcccgcctcagcctcccaaagtgctgggattacaggcgtgagccaccgtgcccggcagggatttgaaattcttataaggaagtcttgctaaatcaaggtggaaatcaggtgttaccaaaattaggctagctttgtagtaaatatctgttttcttagcaggaaatgaatcatatgtctttcagaagtcagattgcttccattgtgtctatcattggggatattaccataaagcacagaaaattgaggtgctttgtaattacagtgggcttcagggtatacatttcattgcattttagcctttataagtattgtttttgaaggttttacatgttatcttaagcacatgtacgtgcctttaatggcacatagtaaaccagttttaataaaagttgaccacgtcctaatagtaaagttacaatagcattttaaatcttactagtgatttaatagttcaccatttaacatttgtagggccaggaaaagctgcttataagactcacgggcacagagtaagtatattcactttgagactgtgtgatatatgtatgcatagggaggcaaaggacccaaatgctgaccttttaaaaatgactttctttctttttttgagatggagtctcactctgtcactcaggctggagtgcaatggtgtgatattggctcacagcagcctccaccccccagattcaagtgattctcttgtttcagcctcccaagtagctgggattacaggcttgcatcaccacacctggctaatttttgtatttttagtagagatggggtttcaccatgttggccaggctggtcttgaactctattaaggtgatccacctgcctcagcctcccaaagtgttgggattacaagagcgagccacagcgcctggcctaaaaataattttctttatattaacttttttctattagtttcttattgtggcctcttaaaattctactttaaaaaaattttatgtgtgtgtgtgtgtgtgtgtgtaataaatatgtgtgtttcctcaagtgattttaggcagaatgtgtcactgcccttcctgtgtaaaataactcttaaaaatcatacagctcttcatgttacgtgttgacatagtttacagcaatcctacttgattagcttttttatatggaaaacataatcatactgtgtgtagccaattttaagattgtgttattcaagagtcttatattgccatgtaaataccatctcaaaatgtgccctgttgtgagataaagaaaaacttaagagatttattctattaagctatagctttttatctagaaaaatggcaaatgagtagaatttccatatgcaaatttctattaaataaagatttaaagcatgtttcctggaacattttacttatagacaggaaatgtcttgtgaaggtattgtgagcacactgctttctgatcagtaaaatttgggaattaaaatattttccttttaagattatggtgagaattaaaatatatatttgcaaaagaattggcaaatgcagatattcaataaatgttagctcccctcccagacaagcttatataaatgtgtgtgctccgtaaatgaaattcaaagtttaaagtgtatttttagaaaacagtctacttagtgagccatctggggcttatatggcatctttctagtaacagttggctctcctttccaccactatcagtcagtggggtcacagaataataaacttgtctgtcagccatgaaacacaagctctcattcagccataaacaaattagcgtggcaaattgaattgctaagtaacttttccagttttgttaataacatactctgttatttaatacatccccacttttttctgtttcagagtggaagctcaaaatgaaatggggcagcatattcattgttatgttgcagctcttgctgctcatacaacttttctggaacaacccaagagctttcgcccttcccagtggataaaagaacacagtgaaagacagcctcttaacagaaatagccttcgtcgccaaaatcttaccagggattgccaccctcggcaagtcaagcacaatggctgggttgttcatcagccctgcccgcgtcagtacaattactaatagtttcaagttttgttggttggtttctcttggtttgtgcttacatgtatggatgtgtgtatatgtacagtgaaaatgttgtctctttacaaccaattgataaccaatcacatagttttatcagtgtatttagacactatcttgaaaatcagatttatatgctgtgtatcacataatgccttgcctttaacatttactttttttgtacactttttcagattatttctggaaacatatcaatataattacagtgtttgggggtgtctttaaatatattaggttatacattagtcagcattttaaagacatttcttcccaagtacgagaataggcatctttcattttcattttattttgtattacttaatcttttaagcaagcaaaaatttattctcagggtcagctgtacactttattgaccagtacttgataatctctctgtatatgatgaatacatttttacacactaacattagcattaacaggtgatagttgccatggatataatggaattatggctggactttcttttgaaagaaaacttgatgtattctgtgtgtatggtttttccccagattagtcatacagttcatttggaattcaggtacattaagctttagtgaagagtgcatgcagtaattccaatgtgactgcatgacgtggtacagacattacaggtgttgtagacagaggcacttgtctcgtgcagagggattaaattagacctgtgagattatatttggaaaaattcatgtctgtaactaacccattagtgcagtatttaatttgttactattccttcccgccaattctgtccactcctcacctcgcatcagctataaatttggaagtacttgtccaggcactcaagtgacttcatatttctctctgcccatgggaaaagagataggctttatatttccacagagtgaaaaatcctctgtcatggagcctgtcctgccaagtggcaagagtgtggggactgtctggtgatgatgtctttcatggcatctgagtgaagagtgacaggttggctcaacttttttctttttttttttttaattgccttgtattgtaagtattcttccctgcagtccaagtgacttttcattttttgttttaacttcaggcaaaatctttaaccactctggcctctgtttcccccaccaacggggagcagtgacatttacctccctcacagagtcactgtgaggattctatactgatttgaagtggagctgttcagaactgaaccttgtaggaaattccaagggcctttctactgaatctggtgatggggtggggccgtggcactttctctgccacagctgttcttcacagtgttggtgctaatgaggccagggtgcagggttcgattcacacgtaggccagttaacttagagaaaatctatttccttacctctagccagtcacttcctttttccgcagttgtgatgggttttgctgagccatccactctgactgatttcctctgaagtaaacatatttacaatccaaagcaattctactgacagaagtgttgccttcataatcaaacagcttgtttttccatctcctctgcaaccctaattaaatgagtacaggtctacaaaatgttttcaaggagaaaagcagcatatccttaagtgaagtattatatttttcaataaccctgtagtggcttgatgcagggaaccctgggggactttcagcgaagagctgtgctcttttctgactagattagagcgtttggagtggaagacgtcaaatgtgtagtgagatggaggttttacattgttcttctactggctgtgatgaagtgccagaatgtctctttagaacaagagttagattccccctttctccttattgccccttccgttttgacttcccctttatttatttgttgtctaattaggggccaagtctgtaaagttttgtcaaagtgagttagaagttgttttctcttactatttgtgtttaccagagttgggagataagatagtttccatgaaggtgtgtatgttttatacgatgtttgttatagggccatgcattggtaacttgaaaatagaccagcttaatgtcttcaggatgtaaaactctgaatacacggcgtctctttttcatacattgcatgtaagttgttagtacctcacaagctacagaagttcagccatgagattttgtttggcaacatgaacagatttgtgtataactgcaatggcctttttttccagatttccttattgactttttgtttgccttacctggggctagttttttatgctttgtacctagaaaacaaaaaattacattcgttgggctttttttcaaggttgggattaccacaccacctggaatatcatactgtggtttctgcctaaaattggcacatgtaagtattgaagaaaatggttatataattcagttgaaactcttggttattagatgttaggcatctcctgtatgtaagacacaaggccaaccacaacacagaacgatgttgacctgttaagtattctctgaaacatggccaaaatgcattttatgagcttttttttttgctattgtaaatattagtggtttacaatgcgctttagacatatttctttaaaatgcaagcagtgagaaataagacctctctgaattagtagctctaaactgttaacatagaatgttacttggaaaaagtctggaatatgtggtgtacacaagcagtgcttcgtgaatgagtttcttagcttttatagtgcgccatgtttctcaaagtttgtttttgttgacaaaacattttataatatatatcttatgtttattttttttctcaactaattgtgtactgcactgtaaggtgaaaattagccatccattatttatcttctgtggcaatgcatttatatggttgattgggtggggaattttttgcagaaagatgcaaagtgattgggttttcgacttcctatcgcagggagcttttaagaaatattaatttcctatacatttttccaatccccatgcaaactgttcctgtttacataccttctctgttgtatcagtactttgagtgagaagacagtttatttaaaacttgagcaggctgttcagcattgtttctgcttctgaaatctgtatagtacactggtttgtaatcattatgtcttcattgaaatccttgctacttctcttcctcctcaatgaaatacattatatattatctttatgtactcttaagaaaaacgagcaaggaagagtatcttcattattctcattttctctgagttggaaacaaaaacatgaaggactccaactagaagacagatatttacatttaaatagattagtgggaaaactttaagagtttccacatattagttttcattttttgagtcaagagactgctccttgtactgggagacactagtagtatatgtttgtaatgttactttaaaattatctttttatttta

SEQ ID NO: 3551 - DNA, 6000 bp, Homo sapiens
taattgctttagagttgcttcagattcatttcttgaaaattcttcccttctgattatgattttacctctgaggaatgccactcaagaatttataattaggccaggtgcagtggcttacacctgtaatccaagcactttgggaggctggggtgggtggatcacgaggtcaggagttcaagaccagcctggacaacatggcaaaaccccatcttaaaaatacaaaaattagccaggcttgctggtgggcgcctgtactcccagctactagggaggctgaggcaggagaattgcttgaacccgggaggcagaggttgcagtgagctgagatcacgccattgcactccagcctgggtgacaaagcaaggctctgtctcaaaaaaaaaaaaaatagaatttataattaatagtcactttaaacttactggcatttatatgtttactttgcagtgttgtgtgtgtgtgtagtcagcagctttgcaaaagaatttactacagaaacagtacaaatgcaatgtaaaaaaattagaaaatacaaatatgcaaaaattggaaatgacattttcatgacccagagatgaatacttttaacatcctagagtatatccttccagattgtgtttttttttttctgtgcctgtacgtacacataaacttttaacctaaatggcaacatgccatatatacttctttttttttttttgagacagagtttcactcttgttgcccaggctggagtacaatgttgcaatcttggctcactgcaacctctgcctcccgggttcaagcaattctcctgcctcagcctcccaagtagctgggattacaggcatgtgccaccgccactacgcccagctaatttttgcatttttagtagagacggggcttcaccatgttggccaggctggtcttgaactcctgacctcgtgatcctccccccccccccacaaagtgctgggattacaggcatgagccaccatgcccagatgtatagttggtttttttgggggttttttttgagagagtcttgctctgtcacccaggctggagtgcagtggcgcgatctcagctcactgcaacctctgcctcccagattcaagcaattctcatgcctcagcctcccgattagctgggactacaggcgtgcactaccacacctggctaattgttgtgtttttagtagagacagggtttcaccatgttgattaagctggtctcaaactcctgacttcaggtgagccacctgccttggccttccaaagtgctgggattacaggtatgagccactgtgcccggcccagatatactattttataaactacttatttaggcaatgatctccaccattttgtttcagtagatttcttcttctttcttccttcttcttccttccttctttttcaaggttgttatggttttctagttttggtacagtgagaatgttgtttttatatcttgtttgtttttgcattcatatatgatagttatatagggatagtaaaacaaatacatacttttccatatataaagggtcaaaggaaggcactgaattttatttatgtattttaacacggagtctcactgttgcccaggctggattgcagcggcgcaatctcggctcactgcaacctccgcactgggttcaagtgattctcctgccttatcctgccgattaactgggattactggcacatgccaccatctccagctaattttttgtattttaagtaaagatggggtttcaccatattggccaggctggtctcaaactcctgacctcaagtgatccgcccaccttgacctcccaaagttctgggattacagtcatgagccattgtgctcggccagaatgcactgaattttatgtgaatcctttttgtacacaggaaactcctgtaaattattagttttaaaatagtaactataatttttttaacatccttattttgggatttgaaattcttttttttttatttttgagacggagtctcgctccttcgcccaggctggagtgcagtggcgctatctcggctcactgcaagctccgcctcctgggttcatgccgttctcctgcctcagcctcccgagtagctgggactacaggcgcccgccaccgcacccagctaattttttgtatttttagtagagacggggtttcactgttttagccaggatggtcttgatctcctgacctcacgatccgcccgcctcagcctcccaaagtgctgggattacaggcgtgagccaccgtgcccggcagggatttgaaattcttataaggaagtcttgctaaatcaaggtggaaatcaggtgttaccaaaattaggctagctttgtagtaaatatctgttttcttagcaggaaatgaatcatatgtctttcagaagtcagattgcttccattgtgtctatcattggggatattaccataaagcacagaaaattgaggtgctttgtaattacagtgggcttcagggtatacatttcattgcattttagcctttataagtattgtttttgaaggttttacatgttatcttaagcacatgtacgtgcctttaatggcacatagtaaaccagttttaataaaagttgaccacgtcctaatagtaaagttacaatagcattttaaatcttactagtgatttaatagttcaccatttaacatttgtagggccaggaaaagctgcttataagactcacgggcacagagtaagtatattcactttgagactgtgtgatatatgtatgcatagggaggcaaaggacccaaatgctgaccttttaaaaatgactttctttctttttttgagatggagtctcactctgtcactcaggctggagtgcaatggtgtgatattggctcacagcagcctccaccccccagattcaagtgattctcttgtttcagcctcccaagtagctgggattacaggcttgcatcaccacacctggctaatttttgtatttttagtagagatggggtttcaccatgttggccaggctggtcttgaactctattaaggtgatccacctgcctcagcctcccaaagtgttgggattacaagagcgagccacagcgcctggcctaaaaataattttctttatattaacttttttctattagtttcttattgtggcctcttaaaattctactttaaaaaaattttatgtgtgtgtgtgtgtgtgtgtgtaataaatatgtgtgtttcctcaagtgattttaggcagaatgtgtcactgcccttcctgtgtaaaataactcttaaaaatcatacagctcttcatgttacgtgttgacatagtttacagcaatcctacttgattagcttttttatatggaaaacataatcatactgtgtgtagccaattttaagattgtgttattcaagagtcttatattgccatgtaaataccatctcaaaatgtgccctgttgtgagataaagaaaaacttaagagatttattctattaagctatagctttttatctagaaaaatggcaaatgagtagaatttccatatgcaaatttctattaaataaagatttaaagcatgtttcctggaacattttacttatagacaggaaatgtcttgtgaaggtattgtgagcacactgctttctgatcagtaaaatttgggaattaaaatattttccttttaagattatggtgagaattaaaatatatatttgcaaaagaattggcaaatgcagatattcaataaatgttagctcccctcccagacaagcttatataaatgtgtgtgctccgtaaatgaaattcaaagtttaaagtgtatttttagaaaacagtctacttagtgagccatctggggcttatatggcatctttctagtaacagttggctctcctttccaccactatcagtcagtggggtcacagaataataaacttgtctgtcagccatgaaacacaagctctcattcagccataaacaaattagcgtggcaaattgaattgctaagtaacttttccagttttgttaataacatactctgttatttaatacatccccacttttttctgtttcagagtggaagctcaaaatgaaatggggcagcatattcattgttatgttgcagctcttgctgctcatacaacttttctggaacaacccaagagctttcgcccttcccagtggataaaagaacacagtgaaagacagcctcttaacagaaatagccttcgtcgccaaaatcttaccagggattgccaccctcggcaagtcaagcacaatggctgggttgttcatcagccctgcccgcgtcagtacaattactaatagtttcaagttttgttggttggtttctcttggtttgtgcttacatgtatggatgtgtgtatatgtacagtgaaaatgttgtctctttacaaccaattgataaccaatcacatagttttatcagtgtatttagacactatcttgaaaatcagatttatatgctgtgtatcacataatgccttgcctttaacatttactttttttgtacactttttcagattatttctggaaacatatcaatataattacagtgtttgggggtgtctttaaatatattaggttatacattagtcagcattttaaagacatttcttcccaagtacgagaataggcatctttcattttcattttattttgtattacttaatcttttaagcaagcaaaaatttattctcagggtcagctgtacactttattgaccagtacttgataatctctctgtatatgatgaatacatttttacacactaacattagcattaacaggtgatagttgccatggatataatggaattatggctggactttcttttgaaagaaaacttgatgtattctgtgtgtatggtttttccccagattagtcatacagttcatttggaattcaggtacattaagctttagtgaagagtgcatgcagtaattccaatgtgactgcatgacgtggtacagacattacaggtgttgtagacagaggcacttgtctcgtgcagagggattaaattagacctgtgagattatatttggaaaaattcatgtctgtaactaacccattagtgcagtatttaatttgttactattccttcccgccaattctgtccactcctcacctcgcatcagctataaatttggaagtacttgtccaggcactcaagtgacttcatatttctctctgcccatgggaaaagagataggctttatatttccacagagtgaaaaatcctctgtcatggagcctgtcctgccaagtggcaagagtgtggggactgtctggtgatgatgtctttcatggcatctgagtgaagagtgacaggttggctcaacttttttctttttttttttttaattgccttgtattgtaagtattcttccctgcagtccaagtgacttttcattttttgttttaacttcaggcaaaatctttaaccactctggcctctgtttcccccaccaacggggagcagtgacatttacctccctcacagagtcactgtgaggattctatactgatttgaagtggagctgttcagaactgaaccttgtaggaaattccaagggcctttctactgaatctggtgatggggtggggccgtggcactttctctgccacagctgttcttcacagtgttggtgctaatgaggccagggtgcagggttcgattcacacgtaggccagttaacttagagaaaatctatttccttacctctagccagtcacttcctttttccgcagttgtgatgggttttgctgagccatccactctgactgatttcctctgaagtaaacatatttacaatccaaagcaattctactgacagaagtgttgccttcataatcaaacagcttgtttttccatctcctctgcaaccctaattaaatgagtacaggtctacaaaatgttttcaaggagaaaagcagcatatccttaagtgaagtattatatttttcaataaccctgtagtggcttgatgcagggaaccctgg

SEQ ID NO: 3552 - DNA, 6000 bp, Homo sapiens
aagctgccttcttgaaatgctagggcccagacactttgtttcttttctgtattgaggggttcttttctcttgtcggggaaactgctggactgacgctggttaaagctgttcaaagaacaacagcgctacttcacctaaccttctttgcttcacctctttgctgaattccagaactgtatttgtaagtttgtcctcttaggacacatgctttctctggaatttttattttcgttctatgattgccctagcattgtgaatattagtggtgatctggggaggagaggagtctaaagctctacttttccatttacctccatgtagaaccagcccagttgagagcctccatccctgggcaggagccaaggtcaacagtagcagtgactgggcagggacagtctctgggtcatcagtaggagggtaggcctttaagactttttctagaacagtcctgttcaacagaaatagataatgtgagccacatgtatgtttgaattttctagtagccatatttaaaaaggaaaaagaaactggtgaagttaattttattaatgtatttaatatactaaaattattttttcaacatgtaatcaatataaaaactgttttgcattttggggggtactaagtctttgaaatacactctagtgtgtactttacatatacagcacatctcaattcagatacaaagttttcatttgaagtacttgatctatatttagacttcgtaaaatttataggtgaaaaagtagattcataccctaactgttccaaacatacttgaaagttttcaaaaaactaaattatcagcttttaagtttaactggattaaacttagtaaatggattaaatagtaaaatgaaaaatgcagtttctcgatgatactagtcacatttcaagtgttcatgtgcacagtgtgcctggtggctacctcagtggacagttttagcaatggggggagggtctctccaatagctccttgccttttgtgacacctgcagaaagcagggccaaaggaatttggctttgctagttaaaccagcctcacttttttgtgctagaagtttgtggggaaagagagtgacgaggtgattcagcgcagtctccccattttcccaacagtgagactgaagctcagaagggccaatttagctccagccacctgtagtagagccacagccagaactgctgctgtggatggccaggcccctttaaccctccccaggaactccattctgtgttcttcccacgggtgtcagcagatgtgccatgtaaacaccagcagtggcttgagtgagatgaaggatgagctcctccctcacttggctgggcttctgagcactctgtcgcccaaggttggttgtccttgcagagatatgggacatctggaggcagcctctgactttgggaaaccaaaagagcactgacttgtactgctccctagaaagctcctccagagaagcctttcctgtatcttacttgctacttgcatatattccaggcagaagctgccttcctgggtttggacctgtggccagagggggcaatttgcatgtgggaacccagcagctgtcacaactgcagtggccccagcaatgttttttggccttacagctgccagttatctgacctgggccccagtgccttactctcatgcagcatcacaggttggggacaaggcattcgttcaggacaagcaaaggttcccctgtgtggttctcccctcccagtggctttagctgattcagggctagagtccagcaccatgctctgcagaattgggcttattctctcaactggttcagcagacacagaattgtacgtggggccaatatctgcctccacaatttaaaataaatggaggaaggattttgaaaatatgtttttccctctaagcatgtatcctcaaaaatctttatttacatcagaccttatgataacttattttggaatataactatcacaccacagcaggtcaaacaaactacacttttcttctgattgttcttacatagagcataaagctgactttgaattctgctacagctccagccttcatgatttggccgtgctgctttccagaaggtttcaggaagactggttatgcaagtgacacttcctgtttacctatttttaataattagtggctgaagaagatgaattgtgaccacaaagtgttctaatgttatttatttgaaatgtttaacttgtgtagtagtgtgccaaacaactgtagcagttcagtttacacacaaggaactgaaccaggaatctcattagctacagatcccaactacttttacagctaaagattattttgaaagtgaactgtcaggagcctgaagttgtagattcaaggctgatgcttgtgataaaaagaggtggtgattagtgaggtgcatttcttcagccctggatgatctcatacatatatataacttttttttgagacaaggtctcgctgtgtcactcacactggagtacagtggcacaatcatagcttactgcatccttgaacctggactcaagagatcctcccacgtcagcctcccaagtagctaggactacaggtgcacaccactgtacctggctaattttttaaaatttttttgtagaaacaggttattttgttgcctaggctggtctccaactcctaggctcaagcattcctgtggcctcagcctcccaaaatgctaggattgcagacatgagcctccacacctagcctcatccattcctatgctttttatcactgtctttgtgtcatcagctcccaaatctatgcccctagctgagaccacactcctgagctccaaagctctatatcctgctgcctgctggacatctccaactgcattattttgcatatccccccaatttaccatattcgaaatgcctaacctgtactttctgcaggattcattcctgtttccctaaatggttccaccatcctctcagttggccaagccagaaacctgggtctttgacttttcccttccccttttccaggcttacaaggccctgcaggacctggttcctgctcagctcccctagcctgctattgtgaccctccctctggaccttgagcggtactgaaggtgccacattctcactcatccacaggcttccatagtgttcctttgcccccttcctccattactgacctcagccactcaagagtaaagtcattgcaggagtccacccaggtagcctggagaacaccaaatacttcttccatggcattcatcacactggattgttaaacttgtgggagggccctgttcacagccatctcccctgtgcccagcactgcacctgatgcataacaggtgctcagtaaatacatgtagaataatagttgacctggactgaggactttattcgaagtattttgctaagtccattgcctttaacaagagtaggatcagggagactgtctagtagacagttttggcaaagtctcagagacaacagtttggcttaaactaggatgagagtggtggatggaagcaggcagattcgagctgcctgtgctcctggggttgacgggacttggtggttgggatgaggggtgagtaggagggagcaaaaggcatgcgggtgcggcagctcacgcctgtaatcctagcactttgggaggctgaggtgggcggatcatgaggtcaggagatcgagaccatcctggctaacatggtgaaaccctgtctccactaaataaaaaaaaaagaaattagccggatgtggtggtgggcgcctgtagtcccagctacttgggaggctgaggcaggagaatggcgtgaacccgggaggcagagcttggaatgagccaagatcgcctcactgcatgcactccagcctgggcaacagacaaagactccgtctcaaaaaaaaaaaagcgtgaagggtgactgctagggtgttggcctgaataactgccagctgctgctgcttcctgagaaagggatgaagggcagtgtatatgaataagtttgtgggggaaaaaaacctatctttggtatgtgtttggtttgatacgcccatcaggtagccaggtagaaatggataaatattccaagatcaagcaagcctggagttcttcatttagaactcaccagaactccctaaggtaggagctgttgccagctgaagtcacataacttcctaactcacacagcaagtgagcagctagccagggtttgaatgcaggtggctgacccagcacccacctgctgagctgctacacaggaagggtgtttccagttctaggtttggccaagctcagtttcctacagtgtaaatttcttcatgccagctgtaggaattgtttagaaggtcaaagtatgcttgctgggcttacagattttaagtgtaatcaggtgtgcttacagttatagacaagaagtacagagtagaagagaaaatgagccagaggaggatgagggcctggcataatggtggtcaccaggcactgttgctgggacttctgagcagttgaataacatatagcaagactgttactatctagaatttgctcatctgcttgcagaaaagtttgaaggatattattcaaattcaccttattataaaagcataaatatgaaaaagaaccaactctttcccttttatttcacattttaagatatttataggttgaatttgagtaagagtatttacaaaacattatgttgcatttcttgtgtttgactcctgcagaaagggaatagctgtagaatgtaggccaaggcatatgctttcttctaagggtatgtgtgtatgtgtatgtacttatgtatatatgtgcatgctgatttgaaataacttcctttttctgttttattttaggtacaatgactcttcttgcttttcacctaagttgaataagcaccctgtgcactttaatctcctgtcggtaccattgggccaactaaagacaaggttttgaaatctcagctataaaagacatccagccaaactctcagtcttgccttaacaatgttccagaggctgaataaaatgtttgtgggtgaagtcagttcttcctccaaccaagaaccagaattcaatgagaaagaagatgatgaatggattcttgttgacttcataggtaaggtacacttggttacttggtggttcatcttcacagtaaaaatggaaacttgcatctcagtttttgcataaggaaaccaataactgaggggttttcagccttaaaagtaagcaggagtttgtctttaaaaaattgcaggaaaccatctgtgctagataatgtcagtgaaattgactgacatcagactttttagttttgcaactctcacagattgattagatcaagggcacttcattagaagccccttttattagacaagtagtaaccaatatgtctcattacatagttatccagcagaatagaaacagtcttaaaatcactcctgcaaagccaacataaatctatcccatatagtgacacacacacacacacacacacacagaatttctgtgctcagaaataaatttatagtcatatagatgaatataaatggttttctgaactaaataaaagaagatacgtgagcatcagctaatagtatcatctcttctttttctgtgctgtgaatttgatgggtgactttataatgactgcccaatgtgataatcatcctcctgtgggactcttcaacaacacatgtggactgcaatgtggactacgatctagatacttgcactggtttctcagcagaagaagaagaagaagaggaggacatcagtgaagagtcacctactgagcacccttcagtcttttcctgtttaccggcatctcttgagtgcttggctgatacaagtgattcctgctttctccagtttgagtcatgtccaatggaggagagctggtttatcaccccacccccatgttttactgcaggtggattaaccactatcaaggtggaaacaagtcctatggaaaaccttctcattgaacatcccagcatgtctgtctatgctgtg

SEQ ID NO: 3553 - DNA, 6000 bp, Homo sapiens
catggtgaaaccctgtctctactaaaaacacgaaaattagctgggcttggtggcacacgcctgtagtcccagctacttgggaggctgaggcaggagaatctcttgaacccggggggcggaggttgtaatgagtggagatcacgccactgcactccagcctggcgacgaagcgagattccatctcaaacaaaaaacaaaacaaaaaaattcatcttgcaaaatgtaatggatatttaagagaaataaatgcctactcctatcaaagaggaataaagcaggaaaagaggccccgaaaggatactatagaaataaaaaaccttgccttggatgatcaaaacgtttaggcctggctttgccaaagccatgagaaacatggacatttaaaagcataaattcatcttgcaaaatgaaatggatatttaaggtagttcattcatgcaaaaagaaaaaaaaaagaatccaataaacgagttttccttaaataggtagattatttaggcagtgtgtggcttatgtaagtagtaaccatatcatctgcatccttttgagaagagcagaaaggcacttgcactcatgctgtcaccctaacaaagcaattcatgattacagacccacctcaggttgcctctggcatatgcggactgttgggcagtgcccagaagtatcagtgtgagtgaagaagtcgctttggcagcgggagttacaaaagccctttgctcacacacttcaactaatctctgacaaccgccccaagaacgagtcacatctgccccacacagtgcgcctcttcaagcttcatggctccttggagctagggtggtgtatgaagggccattctgtatcatgtctctagaccatatccagtaagggatgaccttgctttctgctcaaaggttttttttttgtttttttttttcttgagatggagtttccgtcttgttgcccaggctggagtgcaatggtgcgatctcggctcatgcaacctccgcctccccggttcaagcgattctcctgcctcagcttcccgagtagctgggattacaggaatgcaccaccatgaccagctaattttgtatttttagtagagacggggtttctccatgttggtcaggctggtcttgaactcccgacctcaggtgatccacctgcctcggcctcccaaagtgctgggattacaggcgtaagccaccgtgcccagcctctgctctaagttttaacataaataattgggttacctgtacattcagccagaaactaagaagccttgaaagtactttccagaaactagagaaaatactctaggcctgaagcgatcattagttacaatccagcgcaggctatcccacctcttggggactcccccctagcactggttactgaatgaagggggcccgcctcctttttcctttctgctgcctcagccagcacacagaccctttttattttaaggattttatttctaatcaccacgtggaaatagggttaaacaaaaagacaaacatacaaaagtcacaaaggttgcagggtcttgaaaagctattacacttatggccctggaataattcttgactcctttctgagatggtaactggcagcccagttaaacgcctgttttctgtttttatttcagaaagcagaaatcacagaatctcttgcttctttgttccaggctttctggagacccagtcagatcctttcttcccttaagacaatagatgtcactggaatgctaagtgattgtttatctaaaatgcaatttaaaaaaattcttgtctttcccagacacttggcaacatgctgtgtccatggtagaagcccagcagatcctaactgttgatgggtagatagaaaacgacctaagtggacttcactttgccattctcctcagtacagacagaacaacttgttgctttgtgttctgaggctgccccaagtagccatcctatgggttggtaggaaacaacattctttagcagcctcgatgcaactggcagggttatggccacagcctgctttcataagcaggaggcagaggcattagttgcattgtatctgtttgttggtgtgaatgtggtcctgcactgtgagtcttccaaacaaaacttgaggttgaatcccttttgttagggtagataagggagcgtattgagctccatggaaaacagacaggagaactctgacagatggggaaagggtcacccccacagcagggggtcagcctggaagtgggtactatagcaacacgctaagaattattctgtgaattaaaggatggttggattcactggatctgcccaggcagggaacctggctgggtctttgtcagtgaacagatgaaaagcttgcttgcatttgtgtaatttgacagtttggttgtgttcagacagctctacgctatggagatgacattactcctgagtttcactgcatgcatttatgtaaaccagtggcataccaggaagggaggcagtgggagtgatccaccccagatacaggcagtacacagtaaatttgtgtgtctgcaaagaattttaaaataaaattgactaaaagtcagtttgctttttattattatgctccaacagttccaaacaatgtcgtggtaaagtactcctccctcctagggacagacttcacctatgctgccctgaggcacgccctccttggtgcaccactgggaataaacaagcaccaggtgggaagattataaatcagcaagagagtaaacagaaagcaagtgactcctgagacaagatgttttcatcacaaacactatttggtagagtttagagtcactgatctgtgatgggcatttctgttagctttgtgttttggttatcgctgctttaaaaactaccccaacatttagtgccttaaaacaatgatcatttatttgttcacaatgccgtcattttggcagtgctccgtggggatggcttatctctcctctgttcagtatggtgtctgctggagctggaacttcctaagggcttttccactcatgtgtctggtagctcagctgggatgagctgaagagctagagctggccaggcatctctttcttttcacatagcctctccctgtggctagcagggtggtctctcctcatgggtggctggcattttccagagtacaaagcagaagctgtggggtttgcttaatgcttttgcttaatgacgaggcttggaagtcctagaacattctttctgccacattctattggtcagagcaatcacagggtcagcccagattcaaagggaagaaaaatacacccacttcatgatggagatactgttgtggtcatctttggaaaaatgatctacttcatattgaatttttctatcataacaagatgatgatttcacatgttgctttaaccatgataaaccttatcaaactggaaaaaggtaggcctttttctttttaaaaattagccccttgtaattgtcatcataccttggttctgaatgtggagatggcctcttcaatggattcctagggagaaacaagagatcatggggctcctaccatagcatgtgggagaaaatattagaacaagcctgatttgcaaaaacctaaaatccaaagcatgttcaagtctgtgagactatctagaacacagttttagctctttctcccaagataaggtccaatgaccatcatattttgatcattactccttggtgtctgacaactccctgcactgcaatttacatcctttaaaaccagcattgttggaaatggactgactacattgtgagggtcagaatgtgagtgtctttcagatactgtaatgtgtgataggcatccctccagggttgctatacagctcaccccaggtcaaagaactacatcccagtccaaacagtatccacatgagagctgataggcatcaacgttactcacctgcctttgccagacagttaatccacctatatgtgggacagagccttggtctggaaaacactttcaagcccactgtctcactctcttgtcactataaataacctggtgagttggcagtcccggcgtgaatgcccacaatttgcaggtatgcaaacagaacagaggggctaagttccgtgggtcacatgagagctaggctgcagcgcctggggaggcggccgttcccgcccggtgcgcttgttgtccgctggagcagaggcccccgagcctgctgacctctctgccttcaggcctggtctcgcagtcccttgtgcctcgcctataggcaggcggaatccagagcgtgcagcaagcccggccggctctcggtggcggtttctacagcaggtggggcctggctccgtgattgagcggcctctacccctctatctggggcccagcagcggccccctcccagcaccctggctacacgtctaaccctaggctgaccaggtggggctctcggaggcgttagccccagccctcccaggagtcttaatgttcctctcacaggaaaaaacgttctgcgccctttgtgccccaaaccctcgacccttcactcggcgagaggggtcgctgagggagagatccacctctgcccttcccgttgcccgccggttcttcctcgcccgcctcttacgcaccccgctcccgccggctcctggaaagccggccccggccccagcgcttccctccccggcctagcccctctctcccacccttccgctcgcccaggccttcacgctcagctcccggtttttgttgcccgggcttgtttcggagctgagcgcgccgccggccgggcgccaggtcacgtgcgttggtgacaacctctcgcagggcggccccggggcccccgcaccgccgattggtggggcccggcctggcgcggcccggggcggggcagcggggcccgacggcgagcggagcggccgatcagctgttgcgagcgctgcacaacaacaaaaggacttggactggccggcctgggcgcagcgacccgagggctggagccggccccgcgcctgccgtctgggtacctgaacgaggtgcagcgcagcccggccccaccgcagctacctcagcagtcccgccccgcccgcgtccttccccgccgagccggcggccgctcccttccccgcgcagccccgcacggcccgggcccacgtaagtgccgggggggggcgggcgggcgtccgtccagggccgcctcgctgccggttggggccgcagcgctgcccgctcctgagcccggcggggccggccgcgcgccctgccttcggggcgccggttgcgcgttcaccgagccccctcgctgcctcccctcgccgccgccgggcccggccgcccacccagtgggtcggtcctcggcggcccccggggcccagggcgcggacagaggctgacagaggcggcggcggcgcggacaagggcccggcctggccccggcgctgggcggcggttgggagtttggtctctgcctcctcccccgagcgtggcttgttttcttggccgcggcgggacctcctcctctcacccctcctcactcccctccactcctcctcctccgcctgctctcggccgttggatggggccgccccttcgggactcggcgtcggggctcccgcggccacccccgggacgcatctccgaagacagcggcgcttgggcttgtggcccggcgctctgtccccgccctgcgatcccgtcccctgcgcctgccctccgagttccggaggccctgcggctatggggaacctgctccgtgacccggccaccggcccccgcctgtccgcggcctgtcccttgcttgacctggcttgaactcagtcttcgctacctgactttgcacctgtggaaagagcgctctccttggcccttaacatttagatcctttggatcgctcacgcttactgagcgctgagtatgtgccatatactatgctgggggctttgctttatcgccccagttgattctcataataaccttatatgaaataggcccggctatcttacacataggaaacccgaggcacagagagattaagttgctcaa

SEQ ID NO: 3554 - DNA, 6000 bp, Homo sapiens
agagtgctcagaagcccagccaagtgagggaggagctcatccttcatctcactcaagccactgctggtgtttacatggcacatctgctgacacccgtgggaagaacacagaatggagttcctggggagggttaaaggggcctggccatccacagcagcagttctggctgtggctctactacaggtggctggagctaaattggcccttctgagcttcagtctcactgttgggaaaatggggagactgcgctgaatcacctcgtcactctctttccccacaaacttctagcacaaaaaagtgaggctggtttaactagcaaagccaaattcctttggccctgctttctgcaggtgtcacaaaaggcaaggagctattggagagaccctccccccattgctaaaactgtccactgaggtagccaccaggcacactgtgcacatgaacacttgaaatgtgactagtatcatcgagaaactgcatttttcattttactatttaatccatttactaagtttaatccagttaaacttaaaagctgataatttagttttttgaaaactttcaagtatgtttggaacagttagggtatgaatctactttttcacctataaattttacgaagtctaaatatagatcaagtacttcaaatgaaaactttgtatctgaattgagatgtgctgtatatgtaaagtacacactagagtgtatttcaaagacttagtaccccccaaaatgcaaaacagtttttatattgattacatgttgaaaaaataattttagtatattaaatacattaataaaattaacttcaccagtttctttttcctttttaaatatggctactagaaaattcaaacatacatgtggctcacattatctatttctgttgaacaggactgttctagaaaaagtcttaaaggcctaccctcctactgatgacccagagactgtccctgcccagtcactgctactgttgaccttggctcctgcccagggatggaggctctcaactgggctggttctacatggaggtaaatggaaaagtagagctttagactcctctcctccccagatcaccactaatattcacaatgctagggcaatcatagaacgaaaataaaaattccagagaaagcatgtgtcctaagaggacaaacttacaaatacagttctggaattcagcaaagaggtgaagcaaagaaggttaggtgaagtagcgctgttgttctttgaacagctttaaccagcgtcagtccagcagtttccccgacaagagaaaagaacccctcaatacagaaaagaaacaaagtgtctgggccctagcatttcaagaaggcagctttgtccttgttctgcttggctcaaaagacctccatccctccctttaaaaaataaattatgtcttttcaattataaactgaacaaaaccacattataaaaagtctagaaaataagaaaaataagtattattccattgccttgttcccaccacttaacacattggtgccttttcttctgtttttttttttcttctacacataaggcttctttttatcatagttatagtcttgtgaatgcactgttttgtatctcactgttacttaacattttatcatcaatggttttcatattattacatgagtagagatgctttgtaggcagagaaaggtggctgactgagtctaatactcacggggaagagcattctagtttgaccacttagaaaaggaactgctaatttggaagatcttgttagcataatttattttgtcacttttaagacagcccaccaagaggcagtatattgtggtacttaaagactggctctgaggctgggcgcagtggctcatgtctataatcccagtgctttgggatgccaaggcaggaggatcactttaagccaggagttcaagaccagcctgggcaacaaagcaagaccccatctctacaaaaaataaattagctgggtgtggtggtatgtgcatgtagtcccagctaccagggaggctgaggtaggaggatcgcttgagcccatgagtttgaagctgcagtgagttgtgatcccaccactacactccagcctggtcaacagagtaagaccctgtctcaaaaaaaaaaaaaaaaaaaaaaaagacaggccctggagtttgaaatcttggctctgctacttgcaacctatgtgaattcaggatatttactaacatcttggtgtctctgttttctcatccttaacatgggaatgatagttataatacctacttcacagtgccagtgtaaggattaagtgtatactacttagaatagcagacctcggttcattcaaagccagttgtgagactgtcaacaagtcatttagcatcgctgcatttgagtttctttatccataaaatgtctacttaataattagagctacaatttacagaatgcttattgtatgtaacggggccttgaagtacttatttgtcccattttactgatgaggaaaccgaggctgaggaattaactaacttgttcaaaagtgacagagttggttggggtggagtcagcattagggcaaaaatccatctgattccaattccttgttttccctatacatgctcttttaggctcccagtctcaactatgggtctacgaacttcagaaaacagcccttttcagttagtttcagctgccagtaggcggctccaaaaaatattaaaaaaaaaaaaaaaacccgcaagtttgatgatctaacttctaaatctgtgtacagttgtggctccttcacagtttcaggaaatcaggtggctaaacgtaccgtcattgaaaagcagcttcagaattatccttctttttatcccaccctcttccactactttaaaaacgtgcagattctagtaatttaaaatgggttttgaactggagaaaaaccaagccaagaaagttatctctgcttgttccacttatatgaagactagattcaagtaatttaaaatggattttgaactgcagaaaaaaccaagccaaaaaagttgtctttgcttgttccacttatgtgaagactgttcaactagtgtgcaagggaggttattcccccagggatccacccctgtctgcccctaaggctgaaagacagtggacaaagacaagagtaagtggtaattcatagcctgataatcttgaattttgaaagcagacatcagaggaagcaatggcaggaaagaacaaaagataggatgagaaaacaagaccttggtcacagaaattagtaaggtcctggttccaggcaggggccttttaaaattatgctgccagttcagaattacactgattgcgacttaaaagcttcccagtgcttttcacatctgcaaatgaaaatgtatttcaattaccaggctggtgatttcagtatcgtgggggaactcattatgacttctgttcagtgaccccaagggtcacattgttcccccttttcccaaaactattgtgcattgagaaaaggcttttttagcaatagatgcccaagtccttgggagtcacagttgtaaagaggctcttccttaatccactctgtattggaattaacctactgagcagatataatcagaaaatacaagcaaaacagactctccaggtaaaattcagctgccactttgaaatacaaacaccatttccttttattaattggctgtgtggccttgagcaacttaatctctctgtgcctcgggtttcctatgtgtaagatagccgggcctatttcatataaggttattatgagaatcaactggggcgataaagcaaagcccccagcatagtatatggcacatactcagcgctcagtaagcgtgagcgatccaaaggatctaaatgttaagggccaaggagagcgctctttccacaggtgcaaagtcaggtagcgaagactgagttcaagccaggtcaagcaagggacaggccgcggacaggcgggggccggtggccgggtcacggagcaggttccccatagccgcagggcctccggaactcggagggcaggcgcaggggacgggatcgcagggcggggacagagcgccgggccacaagcccaagcgccgctgtcttcggagatgcgtcccgggggtggccgcgggagccccgacgccgagtcccgaaggggcggccccatccaacggccgagagcaggcggaggaggaggagtggaggggagtgaggaggggtgagaggaggaggtcccgccgcggccaagaaaacaagccacgctcgggggaggaggcagagaccaaactcccaaccgccgcccagcgccggggccaggccgggcccttgtccgcgccgccgccgcctctgtcagcctctgtccgcgccctgggccccgggggccgccgaggaccgacccactgggtgggcggccgggcccggcggcggcgaggggaggcagcgagggggctcggtgaacgcgcaaccggcgccccgaaggcagggcgcgcggccggccccgccgggctcaggagcgggcagcgctgcggccccaaccggcagcgaggcggccctggacggacgcccgcccgcccccccccggcacttacgtgggcccgggccgtgcggggctgcgcggggaagggagcggccgccggctcggcggggaaggacgcgggcggggcgggactgctgaggtagctgcggtggggccgggctgcgctgcacctcgttcaggtacccagacggcaggcgcggggccggctccagccctcgggtcgctgcgcccaggccggccagtccaagtccttttgttgttgtgcagcgctcgcaacagctgatcggccgctccgctcgccgtcgggccccgctgccccgccccgggccgcgccaggccgggccccaccaatcggcggtgcgggggccccggggccgccctgcgagaggttgtcaccaacgcacgtgacctggcgcccggccggcggcgcgctcagctccgaaacaagcccgggcaacaaaaaccgggagctgagcgtgaaggcctgggcgagcggaagggtgggagagaggggctaggccggggagggaagcgctggggccggggccggctttccaggagccggcgggagcggggtgcgtaagaggcgggcgaggaagaaccggcgggcaacgggaagggcagaggtggatctctccctcagcgacccctctcgccgagtgaagggtcgagggtttggggcacaaagggcgcagaacgttttttcctgtgagaggaacattaagactcctgggagggctggggctaacgcctccgagagccccacctggtcagcctagggttagacgtgtagccagggtgctgggagggggccgctgctgggccccagatagaggggtagaggccgctcaatcacggagccaggccccacctgctgtagaaaccgccaccgagagccggccgggcttgctgcacgctctggattccgcctgcctataggcgaggcacaagggactgcgagaccaggcctgaaggcagagaggtcagcaggctcgggggcctctgctccagcggacaacaagcgcaccgggcgggaacggccgcctccccaggcgctgcagcctagctctcatgtgacccacggaacttagcccctctgttctgtttgcatacctgcaaattgtgggcattcacgccgggactgccaactcaccaggttatttatagtgacaagagagtgagacagtgggcttgaaagtgttttccagaccaaggctctgtcccacatataggtggattaactgtctggcaaaggcaggtgagtaacgttgatgcctatcagctctcatgtggatactgtttggactgggatgtagttctttgacctggggtgagctgtatagcaaccctggagggatgcctatcacacattacagtatctgaaagacactcacattctgaccctcacaatgtagtcagtccatttccaacaatgctggttttaaaggatgtaaattgcagtgcagggagttgtcagacaccaagga

SEQ ID NO: 3555 - DNA, 6000 bp, Homo sapiens
ttgctcttccaataactttgaacatcctgggggaaactcacactgcctacactattctgagtactgtgatgtttttgctgtgtcatttaagaatattcaattctgccacagaaattgagagaaactaagtatgggagcaaatggcttgttagacataatgaaatttgtaagatgtattaagtataaataataaataattacactgtgaggcatgttaaaaataggatgaatggaacatatatgtattgaacatacacaaaaataatggaacacatgagagttccacttttagattaaaagggctagaaggaccaagtaaatttttttttttgagacggagtttcgctcttgttgcccaggctggagggcagtggcacaatctcagctcaccacaacttccgcctcccaggttcaagcgattgttctgcctcagcctcccgagtagctgggattacacgcttgcaccaccacgcctggctaattttttatttttagtagagacagggtttctccacgttggtcaggctggtctcgcactcccgacctcaggtgatctgcccacctcggcctcccaaagtgctgggattacaggcgtgggacacggtgcccagccccaaataaatcttaaatattcataaggtaatgatcatgttactgccagactgacaactatgttatccctaaaccagccactcactggtgagatccactctggccccacacgtgctctgtccaagaaacacagataccatccatagctgctcagtaggttaattataactggttataaatgcagttatagctggagtcaggttccagcagttctccaaaagaaaagtgtgtgctggctccaccttctacctgctgagcagtcttgctcatcctcactatggtcctcataactacaccaccagcaaggaagtctgatgcatcaaacagtacacgaacagtaacattaagattcagatggtataatccttccactctctcccctccccacatcctaaccaaaatatgttagtccactcaatctctttccccttgctgttatgttttaaaatgatttaatagggtacagcttgtgtgcttgtttggcacagaactggcacctgttttgtgaagtggcagctaagaagactctggctgacagaaagcccaaagaaggaggcaagattgagaacaacaatcctattaatttgaaggtggcagggcagaatgggtctgtggtgcagtttaagattaaaaggcatattccagccgggcgcagtggctcacacttgtaatcccagcactttaggaggccaaggtgggcggatcacctgaggtcaggagctcgagaccagcctggccaacatggtgaaaccccgtctccactaaaaaaaaatacaagaattagccaggtgtggtggcaggtgcttgtaatcccagttactcgggaagctgaggcaggagaatcacttgaacctgggagacagaggctgcagtgagccgagatcccgccactgcactccagcctgggtgacagaatgagactccgtcttaaaaaaaaaaaaaaaaaggtgtataccacttagtaaattaatgaaagcctattgtgaacagggttaggcaatgaggttgatcagattctagacttcatgtgcaaccaatcaatgaaatagacacacctgtaaagttgaagatggaggctaaagatacaattaatgtgttccaaggacaggaggttttgactaaaaatggagcctgctactttattacagaactctgttcttacggaccaagaatgcattttcaattagaaaactgcgatttggttccatcacaccctgactactacagtatagttttctctatcattttcctcttccccattactttattatatgtatatattagttacaatgtaactatgtaaacaattaaatgtgtaactgcaagatctctaggagtaacagaattctacatcttcatatagtctttatggcatattgtatatgccatagttataatgcataaaagcgtattgcattttttaaccaaatggtcaattttttttttttttttttgagacggggtgttgctcttgttgcccaggctggagtgcagtggcgcgatcttggctcaccacaacctccgtctcccgggttcaagtgattctcctgcctcagccttccgagtagctgggattacaggcatgcgccaccgtgcccggctaattttgtatttttttagtagagatggggtttctccatgttggtcaggctggtctcgaactcccgacctcaggtgacccacccgccttggcctcccaaagtgctgggattacaggcgtgagccactgcgcctggccccaatgttatcttttgatccgcatcaaatgaagataggatgggcggagaaatatggttttgtgaagactcccttctccattaatgccatgctcattcaggtcttatctttatattccagttcgttattttgctctgttttaaccaaaaaaaccccacacacaaaacaaaacaccataacagtttttgcatatcttcttcagttgaagaattgtaatgtattttgtttatgattgtaaagccaaggacaattctttttttttttttgagactgagttttgctcttgtcatcaaggcaggagtgcaatggcacaatctcagctcactgtaacctctgcctccaggattcaagctattctcctgcctcagcctctcaagtagctagaattataggcatgcgccaacacgcccggctaatttttgtatttttagtagagacgggttttgccatgttggttaggctggtctcgaactcctggcctcaggtgatccacccgccttggcctcccaaagtgctgggattacaggcgtgagccaccgtgccggcctagccaagacaattttataactctttgtacgtggctattacatgtaaggcaatctttcagtaatgacacattactcttaaaaaaaaatcctagttttcctttcaagtcaaatgtcttgtttgaataaacttatttaaaatgaaaataaattgatttaataaactgtgtgactcaggcatctcaatttgatctgagccttttgaactcagccatctgagttccatgaccctctgggatggcctgactcgtacgtggaagctaccattgcatcaaggtaatttcccaccccaataagtgttttacaagtaatatattattaaattcacacaacaaccttatgaggaagggattattattcttatcctgtagatgagaaagctgagtctcagagaggttaattgacccaaggtagcatagctaataagtgagggaactagaattcatgcccatgatgatatgactttttcaccaaactcattcatgtttgtatcttgaatacctaaacgtgatgcccgacacacaattattgtttgatgactttaattgaatctgattatttgccacgtggcctatagtaaattgagactcagttgcctagcagaatgtatgtggctattatttaaagttcacagatgaaaaaaatttcactcagcatttgacccctagtagttgctttaagaaagactgtctacccctacgctatggcaggtttgagaaagggctttcagcattttcaacgcttaaagtgagatcttgatcctatttaccatccttcagccagccacaaaacaggtgcatgctgttcaggtcatggcaagatcccgtcaatctttcagcttcaaactacttaaacaaatctctcttccattttatttttgttagaccaaactatttttttcaaaatatatttttttcaaaatatttgcctgactttagtaacgtgtccctctccccctcactcacccgcattcacacacacacacacacactttcccccagacacttccccttttcggttgtttacgcacgaaaccagccagccctttccctagcgaagtgtttggcggtgtagctgtcccgtccccggcgcttcccacagcaacagcgcgttctcttcgcctcccgcagtctctcaggacaggccaggctagcgcaaagtaccgtgttcctggaacaccacgagggcgagctcgggaatctcgagccggcctgcaggacacctgccgcaccaagtggctagagcccggggagggcgaggcgaggtgggacgaggcggggtggtgagcgggccgggaaggcgaggccgcgcggactctgggatagctcctcaggagtgggcgcccggagtgggcgagcggaggaggcggggccgatgaggtgaggtggggccagctggagtaggctaagcagtccagagcagggggcgtccctcagtggaaagccgggcgactgggcggtgcaacagagtaaggcggggccagcggaagcagggagatttccttaggccgcaggcggggaaatggggctggccggggtaggcggagccccgaggcaggggaggcgtggctggcagaggtaggcggtgccccaaggcaggcggggcttgccgagacagggataatcccttaggccacaggctgggaggcagggcaggccgaggcggggaggatcccttaggccgcagtaggggaggcgggtcggccgaggcggggagaaacccttaggccgcaggcggggaggcggggctggccgaagttaggcggagccccgaggcgggggaggcggggccgggccggcgcagggagagtcactcaatggacaggcgagaaagcaggaccggcgcggcggggcggggccggccgagtccctagagctgggggcggggcggacccagcggaccagcggaccacctgggtgctgtcgtagttggaggtggcctgaggagctcagttccctcagcgcccgtagcttcggcggagtctgcgcgatgggcgacccggaaaggccggaagcggccgggctggatcaggatgaggtaaatgttgctgttgcgtcttccccctcaccgcagtcacgccagcccgttagattgcaagttgcaggaccgctgtaggaaatgttattcgccgcggtcaggacaggcctgtccgcccgccctcgccgcagcctggcttcgtcgttgcgagcgccggggaggccgtccccggggagggcggaggaaggagctgactttgggtttgcgtcccgctcgctgctctgccccggggccagccaaggacgacgcttggaggcctcaggccggggtgagacttacccctgcgtttatccgcctcacgctctcccaccctccttccctgttttggagccctggccagggaaaccgaggcaaggaaagaggactgtggcggctctgctggagaggtgcataccatttgggatggtgacaaggagttggagaacgcgtgtggaaattgacacaggtggctggggtgaagatgacaggtagaaggggacacgaaatcctcatgacctcctcccagtgaaaaaatcagggtaggaggccagttttgctcaggcccggctccttaactaactgaatcttcggggtgtcactttcttcctttatacaatggaagtgatacttcagagagaattaagtaaaatgctttatgcaaagtgccacgaaaattgtaggtgcttaataagcccaagttgttcatccaagttgtttatgctgataaaagtacctaaaataaataaaccagaatttgttagactgtaggattgtatggtagtttaaactgttgctgtataattttcaaacactgtcattttgcaaatacttctaagccctttgtggacaagagaaatgctttttgtactactggaacctgttgctgtggtatctttgatttaatactgtgaagatttgggggaaacaaacgtttccaccccaagagattcatgcttggccctacatttctttagaaagttgtagattccaggtttgagattttattttatttaacttgatttttgtaagcatttagtaactaactgtaaatatccctcaagctttttcttcctgttttgaaacaaatgcg

SEQ ID NO: 3556 - DNA, 6000 bp, Homo sapiens
ccttctgtctgttctttgtcattgccatttaaatacacacaagtgtttctcaaagtatttcttttttaaaaaaaggggtccctttaaattcatcttcacttcactttcttagctcttcctcaaagataaacttctgaaggtactgtccacacctgactgtctccatttcctcatcaacttttccacttccttccaaatgcatttcaatctgttttttgtctccaatatgccactgaaagaacactcaccaaagtcaccaataactgacttgttactaaatctagcggtttttagttctgttgttatttgacctctcagcataagagaagaatcaaagatgacacattttactactttctctttaaaacacttggcttctgtggcacccatccttctggctgctccttattctttttaaaaactggtgttcagttcttctaaatactgggattcagtttgaggctttctgttctccctactatccgtaagcaatcccatcctttctcatgccttcacctgacatctgtacattggttctataatttgtattaattggtgcaaaaataattgggtttttttgccattatttttgcaccaacctaatatctccagccctctcctacatcttgagttcccgacacaaatatccaacttttataaaacatttttactttatttttacattttattttagtaaacatgtaaaacatttttacatttttacttcttactttgcatcttacaggcaactattaacaggttccaaactgaacacgtcatattccctccaaatctggttctttctcactaaatgccaccatcatgccattacccacaccagaaacctaatgtcatccttgattcttttctcatcctttccttcttctacatcataccaattcaacgctaaggtaggtgaattctacccccataatttccttcagatctatccactttcctccaccctggctgcctctcccattcctcatttggtcttctacagaatcccccagtacagaaatagctatacttttctctaatccatctactatactgcagggagaatacctcaaaagcacagatctgatcatgtctcctccttaattaaagcttttaatggctgctgattaccattaggaaaaaatccaaacaccctgacactatttacaaaatcctctaaatagccatgcctacctctccacccttatcccaattataatcatattgtactttccgtccctcaaacttgccatattactgaaatcaataatcctagtatggcaggaaattcagcgcaggcagtttccatttgcatggttctgatatgcacaaattccagttactgtagcttaaacaacaccagttccccaacaacctggttcaaatttcagttaccatggtatattcactaactataactgcatagtttaagacttcattgcaagcttctcagtctacaaaaccactgtatacataaaagatgtgtgtcatgatcagtaaccaatcatgttactacttttaaagtacgtcattgattggtcactgtgcaagtgccattcagttcacacacaggtagcaaaggatgtaattgtgttgccttctggtttcccagtgtaaacccatgtgatattttataaaaatggataaatggatgagggaattttttaaaaagagagagataaagaaacaccaaagaaacaaaaagtgctaacactgaaagcaatcttcaaagctaatgtaaatagagttctaaaaatagctgctgtgacaaacaccttttgatcaaaaaggtgaagatgtcccagagaaaatgaggctagcaaaaaccttaatattaaaggaactcagagatatttcacaacattgaaagtccaggtcgggcacagtggctcacatctgtaatcccggcactttgggaggccaaaacaggtggattacttgagcccaggtgttcaagaccagcctgggcaacataatgaaaccctgtctctacaaaaagttaaaaaattagccaggtgtggtggctcatgcctatagtccctgctactcaggaggctaaggtaggaggatagtgacacttgagccggggaggttgaggctgcagtgaagcatgattgagccactggactccagcctgagcaacaaagtgggaccctgtctcaaaaaaagaaaaaaaaaatcgaagaataaaacattggaagttgatacaactggaatatgataattcgccaataaaagatgttcattctgtatcataagttacgtgatgatgtgaaggtggcaagcactgctcaaactactcttggtaaggtttttacaaagaaataaaacactttaattctcaatgtacctaaggttttaaaattacagggtacaaaataaattttatttttactatttttttatttccataaaattttataacagtaagagaatttttaatgttttgacaaaagatattaaaggtcatgggacaattctaatttttctcattgattatattaggattgctttgcacaatcaattataaagaacaacactatcatacaaaacaaggaccgtgtgtataagaaaccctaaacacgcaagggggaagtaaaatttatcatgagaacccctggaatactcccaagagctcttttacatatacatttgaggtacaaatcaaagaaaatctttcctgcaataatagtggtattgactaaaattataccaacttgaaaattaatgagtattactaggccttggaaaacaagctagagtagcatacacatattagaaatcattccccaatggtgttatttgacaccgagagacaagaggttctctaatgaaagaagagaaaggtgcagattgtacagtcacgggaactacaaaattatcaaaaggagcagacccttccttgcatggaaagaaacttccttcagtttttaggtattggtctgttttggcatctccattttcagaacgtttaaaggacattctccagtaaaggacaagaagcaggaataaaagaaaagataactatcaaagtcagtaaatgcatttgtataatgccagtagaagctaaaggaggaaagatttttacaaagtacggttggtcaaaaaagcgaaatacttcaaaaagtcaaagcagataagaactgagaaaagctcatcgtgtttagtaattattaagtacttttaagagaatcagaacagaaataggtaattaagaacagaaataaataaataaataaatggtaaggaaatccgtgtgggagctttacatatttttactcatgataaaatcatcctcataaagccacactccccttagttatacagaactaagataggcaagaaaatttcataaaaggagcaaaattcaagctgagaacctagaataattttcataactttactatattcaagcatctagaagaaaggggtaatttatttttcagttttgtactcccttagttatctctgtaactcagtgccttgtacacagtcaagaagtatttccttgtactccttagggtccaaattaattaagttaatttccagtacaaatgctgtgccagagaaaagaggagtttattatacttaccagggaaagtactatcttctggattaattgaagcactaatgcttcttttcaagaggtgataaacatttgctgctgtgaagtctgaaaaagaaaagatagactaactcaaagggctctagatttacataatctaacttagtccaatttcaccatcagagactctcaagaccagtaggttgtacataaaagtactaaacgctgctcaagatctgttcaagttttgatacagaaaatctaaagcaatcagagaaaatagaaaaggctcccgatctgtacatgccagtcagttagcacgaatgcaaaattcccctcaaaagaataattttaaagagaagggaaattctgtgacaataccttatacacaaccacatacatttactcctcaaaatgcctgtttgatcgaaacaaatgaacacataaaatgcaatattgaatctagacgggtgcaccaaaaagcagtgcaatcgcaaacaattaaaatcatttaaaattcatcatttgtttttaaaacttaggttatatgtgggatgtctcctcccattagatgtaaattgtaggacagcaagatctttgtccatcttgctcctttccgtattatttgcatgtgaaacacaggagcagaaataataaatgcatatatttccaaaaagcaggaaattccattactaaggcatagaaaatttattaagttaaacatttactatgccaagaacttctaagggctggaatcttgcatccacaaatttgtccctgtttttccatgaagatgctatttttgcagccctcattaactctatcccagatagagtcccagcttcgtgggacaactacatattgatccctcttcagcagaacttgatcacaaaactcaaacttcttcccctctccacaagccgttcccgctctttctcatcccagcgcttacccggctgattctcagtaccctcacccgacgacacctctggcccatgttctgcctccctactggccgccgacgggaattttccttccccccagatcaccagcagcaggtaccgatccatctcctcagagatcaccccccaactttaggtctcggcttccacatccaaacagacgcgcgctatgacgcatttccggttcccttcgtttaggtcggctggaaattatgtcctccgtcggttttccgcagtttttccaccaagcgagatatttttgggagttattccctaaataactgcattatatgctcctttcatgacgaaattgctgccgtggagaagactggaggaaactcgaggaagagggagaagccgacaagtgctcgacgggctaggaactgtcctgcttgggtgttagcgtttcccgccgggccagtaaggctgagtgacccggcgtggctactaggagaaggacgtacggtcctgctagtagaggaatatgtcgagtttctctagggcgccccaggtgagctcggactcttatggcttgatggggttcattatactggcagaaggagagcgttggttccggcagattaagtagtgaagctggggcggcagggaagccgagaccctcggccaagaggtgacttgggaaagcacaagagggtcgtcagtctggcaagcacttaatgtcgttcgtctgttactcgtcccctcttcttttcaatctgcccttttcatgtctttcttgggggggcggggggaagaggattagagcagatcggagaggtaataaggtggatcacatagggcattgtaggcccttgcaataatttgttttttgactgagtaaaatggggaccttttggagggttttgatccacggagtaacaggatctgacctggtgtcaaaaggagcactctggctgctgggtcgagaatagactgttcagaaataggggttagtagaggacagaagcaaagaatatgtttggagggtgttacagtaatccaggcgagacgtgatggtgcagaggccacgctagaaatactatggagtgtgttgaaagtggtcaggttttgtttgaaggtggagccagtaggacttcctgaatattgagtataggccaacagcaaaagaagaaacaaggattaccccaaggttttttggtttgtccaactggagggtgtgtcatcaactgagatagggaaggctgagattgaaccaggtttcaggtggaagaataggagttagtttgggttatatcggtctaagatgactctcaactcagtgccgctccaagtatggttccttccttgggctgtttgttgcctgtctgtgatgagataaatacaggaagtaaaataaaaattttaaaacctttttcagcaatctgacatcgcccagcatttgtatttttttcattaaaaattttttttttctaagtatcaaactattagtctacaatggatggggacaaaaac

SEQ ID NO: 3557 - DNA, 6000 bp, Homo sapiens
actaaaaatacaaacttagtcaggtgtggtggcatatgcctgtaatcccggcttctcgggaggctaaagcaggagaaatgcttgaacccaggaggcggaggttgcagtgagccaagattgggccactgcactctagcctgggcaacaaagtgagactctctctctctcaaaaaaaaaaaaaaggcataaggcaaaaatgtgctcggcaggcaagttaatggaacagtataggtctgagtggattgacagaaacaattaatagtaaaaaaataaataaaataataataaataaataaataaaggaaagaaagtcagaaaggtaacagggaccatattatttaggttcttgtaggacacacagaaatttcatttggaaaagataactgtagttgatctacggagaaagaattacgtggaggcaatggcagaagaaaacagatcacagtgaggcagtttttggaataaaacaggatggagtacagcagcttaaaatcagagtagagggagagatgatgagacgtgccagagttcagatatacttttttctaatatatttttaaatatgtgtgtgtgtgtgtgtgagtgtatatatatatgtactttttttatttttttggttgaacaaagaggagtcacagataaggcaaagccttcaaaccagagcaacaaaaagaacagtgatgctattaattgagacagggaaaactgggaaggaacaggttggtttgggtgaagtagataagaagcaagacatctccaaatggacttattcattggagatgtctactagacaacagatgaatttgcttaatagaaatgtgtatatgtgagtctagaatacagggaagcagtcaaaactggagatttaaatttgggaggcattagcatatagatgatttttagatacatgagacaaaatgcaatcatctaaggcatgagaagaggttcaaggactgggccctgacgcacttccaatttttggtgagaagagcatttgagagtttagaaggctgaggatagccaagggtactaagaaagggagaagaaacagggaaacaagtgaatccagggaaacaagtgaagaatgtgtttcaagaagaaagttctccagatgaaaattagcctggactcctcaaaaggttaatgagaagaaaataaaagaaggattattctagattaagagattaaaggaacataacaactaaagacaatacataaacctaggttgcatcctggttcaaaaaaataatagctgtaagaaacatacttgggaaaaccaaagaaatttaaaaatgcactgaacatgagaccatctaaataaagtactgtttcttttcttacgtgtgtcaatggcattctggttacatagagagtatctttatttttaggagatgcatgctgaagtactttgggggaattataatggcatctgcagcttattttcaaatggttgaataaaaaatatatgataaaatgttaactgtatttaggtggagagtataaagaaattcattgtactattctttgaccttttctgatagtttgaaaccttttgtaataaaagtaagaaaaaagcaaaggacaaacaactcagtgaagaattgacaaaagacatgcacagacatttcacaggacaggaagctgtaaaggccaataagtggtaagatactcagccagccatatttgtcatcgagaaaatgcaaattgaaatcacaaagcaagcattttatttctaccagaatagtcaaaactaaaaagaacgaacatatcaagtgttattgaagatgaggagtaatggaaactcttgcatgctactggcatgataaagactcaatagttgctatgcaccttaaaacccagtaattcctgtcttttgggcataccttggaaaaattcttccatgtgtgctaagaaaatggcacaagaatattgatagcaacattaatgtaatataacataatgccaaaaaaattggaaacaaaccaatgctgagtatattcatttcaccattataattgttatggttaattttctttaaaatatcacatatttttatatatacatatttgtatgtttaatatattgcacaataaaagctaaataaaaatgtgatcaattgcagcaaatgctgttgacaagtcaaccagtatgaggactaaaaactgacatctggatctggccatgaagtgctggggtaaatgaagtctatcaaaaactatctgtaagcagaaatcttctagaacgaaaacaactttttaattttattttggaaaaaggatacagaaaagcaagtctattagtcttattagtgaaaataagcttcccatacctagctagcaccatatatttttctaggggaaaagattttttagaagagagggcaaaattatttcccttaaaaactctttatatggatgtcatcacgtgaaaagacatatataaaagtgaaagtttaagtcatggggcaaatcaggttatttctgagtgtgaaaagaagggctactaataatttcgctgggcagtggcataaaataggcttgttccgggtaaactgatccatacggttttccagtgaataagccaaattcagttttgggcgctagtatggtttcagcaagaatggaatacaggatcctcaggaaaaataaaaagggcccttaaactcagccctgttaaacttcatcaagattctattctggcatgaaaactacagtggttaatgacaggtctaaaataatacttactcagtgcatggtacacaggtttatgtaatccctgaagtcttatagatgccatagcagcaagtttgccaggtggctgcattttcccatctaagagataccatattctagcaaaagtggcccattgcttgggggggaaaaaaaaaaaaaagaagaggaaaaaataaagataattatcattaaaatggaaatacagtaattaaatttattatcatatatcatcacgtttctacaattaatgtcaacaatttctttgaaaaataactctattgctaaagaatttttgttttcatttctatttctggaaaagggttgttttttctaatcattctgcaaagacaaacacagtaattattccttcctggtttcctgttagcaatatgacttacgttttgttataaatatcccaaagatatatttccctttacggtatgacttttttttttttttttgtataacacataatagaatctggaggggcaatgagaagcttgtaagaaagtagaagctgtttatgaaggtcttcaaaaacatttagagattattaggtacattatattgaaagctgagtggccaactggaaactgaagacgattcaggagttcaattcctggggagagttaaatagaacaatgtagttgggaaagtacagatgggtgatgtggaataaatttcaactttaaaaagttgcctgaaataggtatctttaggttgcctcaggaatagagcattgtttttacagtcgtcatcaatgtattcaaattcttagaaaattctaggccagaaagatctccaccagatgctttctctatgcatatacacaagaggctaaacaatgctggaaaaatagaacgaggctagctggtcttattttaaatttacttatcacaacctcaaactagtctacatataagaaaaaggccagtttttgtccccatccattgtagactaatagtttgatacttagaaaaaaaaaatttttaatgaaaaaaatacaaatgctgggcgatgtcagattgctgaaaaaggttttaaaatttttattttacttcctgtatttatctcatcacagacaggcaacaaacagcccaaggaaggaaccatacttggagcggcactgagttgagagtcatcttagaccgatataacccaaactaactcctattcttccacctgaaacctggttcaatctcagccttccctatctcagttgatgacacaccctccagttggacaaaccaaaaaaccttggggtaatccttgtttcttcttttgctgttggcctatactcaatattcaggaagtcctactggctccaccttcaaacaaaacctgaccactttcaacacactccatagtatttctagcgtggcctctgcaccatcacgtctcgcctggattactgtaacaccctccaaacatattctttgcttctgtcctctactaacccctatttctgaacagtctattctcgacccagcagccagagtgctccttttgacaccaggtcagatcctgttactccgtggatcaaaaccctccaaaaggtccccattttactcagtcaaaaaacaaattattgcaagggcctacaatgccctatgtgatccaccttattacctctccgatctgctctaatcctcttccccccgcccccccaagaaagacatgaaaagggcagattgaaaagaagaggggacgagtaacagacgaacgacattaagtgcttgccagactgacgaccctcttgtgctttcccaagtcacctcttggccgagggtctcggcttccctgccgccccagcttcactacttaatctgccggaaccaacgctctccttctgccagtataatgaaccccatcaagccataagagtccgagctcacctggggcgccctagagaaactcgacatattcctctactagcaggaccgtacgtccttctcctagtagccacgccgggtcactcagccttactggcccggcgggaaacgctaacacccaagcaggacagttcctagcccgtcgagcacttgtcggcttctccctcttcctcgagtttcctccagtcttctccacggcagcaatttcgtcatgaaaggagcatataatgcagttatttagggaataactcccaaaaatatctcgcttggtggaaaaactgcggaaaaccgacggaggacataatttccagccgacctaaacgaagggaaccggaaatgcgtcatagcgcgcgtctgtttggatgtggaagccgagacctaaagttggggggtgatctctgaggagatggatcggtacctgctgctggtgatctggggggaaggaaaattcccgtcggcggccagtagggaggcagaacatgggccagaggtgtcgtcgggtgagggtactgagaatcagccgggtaagcgctgggatgagaaagagcgggaacggcttgtggagaggggaagaagtttgagttttgtgatcaagttctgctgaagagggatcaatatgtagttgtcccacgaagctgggactctatctgggatagagttaatgagggctgcaaaaatagcatcttcatggaaaaacagggacaaatttgtggatgcaagattccagcccttagaagttcttggcatagtaaatgtttaacttaataaattttctatgccttagtaatggaatttcctgctttttggaaatatatgcatttattatttctgctcctgtgtttcacatgcaaataatacggaaaggagcaagatggacaaagatcttgctgtcctacaatttacatctaatgggaggagacatcccacatataacctaagttttaaaaacaaatgatgaattttaaatgattttaattgtttgcgattgcactgctttttggtgcacccgtctagattcaatattgcattttatgtgttcatttgtttcgatcaaacaggcattttgaggagtaaatgtatgtggttgtgtataaggtattgtcacagaatttcccttctctttaaaattattcttttgaggggaattttgcattcgtgctaactgactggcatgtacagatcgggagccttttctattttctctgattgctttagattttctgtatcaaaacttgaacagatcttgagcagcgtttagtacttttatgtacaacctactggtcttgagagtctctgatggtgaaattggactaagttagattatgtaaatctagagccctttgagttagtctatcttttctttttcagacttcaca

SEQ ID NO: 3558 - DNA, 6000 bp, Homo sapiens
ctgccataggtgtccagggggacagtcaccttggaaaccacagtttctgcttgagccaactttctgtccaccctgggccccggccgtcccactcctgcgcacttaagagtcctgggatctgaatgagaatgaccacagcgacttcatgtaacgtggccccacagtggagaaacccaggcatccgccagcagcgtggatgcgcgagtgctggcgtgttcagatgagctcccagctcctcggcccacaccacaggtgtccacagacgctcccaaggccctggggccgtccccggccgtgcgggaatcttctcaagctggtgtctgggagtggggtatccttcgagcagcacagagcctgctcccgagcgccagtcacgcccgaggccacagctcgggaacaaggcgggagcagccctgcaggcttcccgcagggaagacaccccgggcgtctaagcgacatctgtgtccctcgggaggcggaggtgcctgttcgcctccatggtgtcaggggctgaagagaaacactcccgagggctaagacgtctcactgcacttgttttttctttctttttttttttttgccggagtcttgctgtgtcacccaggctggagtgcagtggtgtgatctcagctcaccaacctctgcctcccgggttcacgccattctcctgcctcagcctcccaagtagctgggactacaggcgcccagcaccacacccggctaatttttgtattttattagagacagggtttcaccatgttggctaagctggtcttgaactcctgacctcaggtgatccacctgcctcggtgccctggagtactgcgattccaggtgtgagccaccacgcctggccctcactgcactcatgagcaagaaacacacagccgaggccggtcacggtggctcacgcctagaatcctagcactttgggaggctgaggccagacgatcgtctgagctcaggagtttgagacccgcctgggtaacatggcaagacccttttctatgaaaaatagaaaaaatcagccgggtgtggtggtgcatgcctgtggtcccggctacttgggaggccgaggtgggaggatcacttgagcccaagagatggaggctgcagtgagacgtgactggaaaaaaaaaaagaaatttaaaaaaattacttaagaagaaacacatgaagcctcatggaaggttttgctgagggcctggcacagcctggacactccggctaccgtggctggtgtggcccagccccgcagctgcacccgctgccccacacagcgtccctgggccagccttccctctccctgcgtcctccaacagcgcacgctgcccacggctgtccaggcctcctgtgcctggcggatggctcccccctgccggtgtcgtggaagtggggaaccggccccgggggtgcacagtgggagcgccacgcgccactcacaacagcccaaggtgccgggaccacaggtggctgtaaggaagacgcccatctctggcctcgggctgccctggacccctcctgcctctgcagctggttttctcccctgggtctctctctcctcaaacctctgtcttccacccactctctgctaaccacaagcctccccccccgcagcatagggaagtcagaggccgtcctgtcccccatccagcaccttcaccgagttccccgggttcctgcacacggttcagcctgcaggccctgcacagggttggggccgcgcctctgagagccccccgccccccgccccgtggggcaggcgaggccagacctccaggcaggatggcgggtgggtgggggaaggggtcaggtggccgggactggagcggccagatcctgtggggcccgcaggtcgacggctatgggaaaggggcctcctccccaaacctggcgcccatacccatcgcttcctgtctcctcccctctgggcacagcaccccccaggccccgtgggacttattccccagcaggaccccttgccgcacccccagatggacacggggccacctcctcttggtctccatgctcaccctccccgccccctcgcctgacgccatctctgctggcaactcctgtgccatctgtgccgaaggccctgcctgaactctggctcagtgcccatctgcaccctccccgtggggcctcacagctgcccttctggacgtacgcaagggctgtccctcgcccggcccgtgggctgctctgctgtgtgaatgccccgtcatttgtgtcaccggtgagctgctcaataagatgaacaagtcacctccagcctcgcagcccaaggataggagtcacggggagccggggaggggccttctgcggcgagagggatgggagggtggacgtcacacccctgcagcccctccggggaccaccctgtgtggcaagctgctctccggctgttcaaagtgtcagctgcgccacggggcgggggggaggggctcctctgcccgctggccgcctcccacttggccccataaactgctcgctcctctaactctgtccctgcctctagatggatgactcacaccgtgtggtctgatgagcattctttattttttgtgatggagtctcgctctgtcacccaggctggagtgcaatggtgccatcttggttcgccgcaacctctgcctcccaggttcaagcaattctcctgcctcagcctcccgagtagctgggattacaggcgtgcgccaccacgcctggctaattttttttgtatttttagtagagacgggctttctccatgtgggtcaggctggtctcgaacccctgacctcaggtgatccgaggcccacctcggcctcccaaaatgctgggattacgggcgtgagccactgatggcgcctctttctatccaggggcccagaccccctcccagcctcggggctgaagatctccaggcctctcaaaggcccccaggcccagctggccccacccctttccttccgagcgtcggggcggcctggagctgcagagaccccttccttctctgcagtgtctgagggctgcctctccaaggcaggctcctacatcttggatttgagaactccggggtgtcacaaacagctaattcctgtcatttaccttggaaaaggaggaaccgccttacggggtgaggcggtggctgcaggtctcaaaagggtgttgaaccacatccacgctcacgttcccgagagcccccacccccagcattcatgggggtctccacctgtgctggacggcgcagaagcagggctgggcaatccagggaggcttcctggtggaggcagggtcccagaacccctcggtgcccacaggggaaactgaggctcagaaagacataggacagtctcccaagagctctgcgaggggctcctcctcaactccctccgggacctggatctgtctggtgtgacggatgaaggtggctctgagagaccgggccctgggtgcccgcgggggcggctgacactgtcccgaggaggcgccagcaccctctcgtctccccaccagctcctcctggtgcccctcccaagccccggggaacttcccaggttggcctgaggggggtcctggagagctgcaagcaagggggaggggagcccacaggcctgcagcccatggtgagtttcacacctgaagccagccaggtggggtgtgctgagccgaggggtccctgtccccattctgtggggttccccagcacggggctccatggttgaggctctctgggggtggccagaatttgtggagacctctcggggactcgcagataccacccggaggcagtgggatggaggagtgattggctgacccccgccctccaaggggcccccatgggacaaggtgctataaacgccgccccctgcactggggacaccaatgtggccgcagactttgcatagaaaacctttctgatccccgccagcctggtttccccgcccctgccggcgacctgcgggggaccgggctgtgtccgcagtgtctacaccccctcctcacacgcacttcacctgggtcgggattctcaggtcatgaacggtcccagccacctccgggcagggcgggtgaggacggggacggggcgtgtccaactggctgtgggctcttgaaacccgagcatggcacagcacggggcgatgggcgcgtttcgggccctgtgcggcctggcgctgctgtgcgcgctcagcctgggtcagcgccccaccgggggtcccgggtgcggccctgggcgcctcctgcttgggacgggaacggacgcgcgctgctgccgggttcacacgacgcgctgctgccgcgattacccgggtaagtaaaccgcgtttacttaacgcggaccggccaaggcgtcccgcggaagccgggatgggtgggcgccccccttcccgtgctcagaccggcgttgctgaggtctaaggagggtgggcacagagccgccagcagcgggagccttccggagggaggcaggatcccagagggaggcggaggtgtgccagctccagccagtggccccggccgggagcaggggtgagccaggtgggagcgccctcaagaggggtctggggtctggaggtggaggacggctgttccaggtcctgctgggcgggtcgtgagcccttggccatcgcccagccccctcctgcccagttgagggcccccctgcaccaccgtctggcctgctgcctgcctctgacctgcacctggggatgagggttcagctgacacggctggtctggagaggaagctggcagggaagtcaccccagagcttcttcctccagggcctgtgggttgggaagggaggctctgtccggaggcccagtgtggctggtggtggggacagcagcgcccagacaccaggcaggcggcctctgaggtgtcgacgggcctccaggggactgtgcactgttgggggccacccctgggtcctgcaggggcagctcctggttgcatatggagttagcacctgggcaggggcagctgtggggcgcaaagggggagtagccaggccacatggccccaggagaaagagacagctggataaacccagggtccagactcccagccaggagccctctgctccctggagccaactgtgggtggagaacggacaacctcactcccctggagggccgaggggaggcctggggaggagggggcctcagcccagctgctggggggctggcctgtctcctgcccaggcgaggagtgctgttccgagtgggactgcatgtgtgtccagcctgaattccactgcggagacccttgctgcacgacctgccggcaccacccttgtcccccaggccagggggtacagtcccagggtaagtcctggaggtgcctctgggagtccacacaggccaggggttccactagggcccgaggcagagctcgtgggcacaggtgtccggcgaggacatgtggtgtgtggggtccggagtcctgtgaggccgggcaggccaggccatgctcaggcaccacaggccatgaagctctgggggtgtcctgtccctgctttctcagcctgggcttctccatccagcacgagggctgtgagaaccctgcggggaggtgggggcgggttccaggagctgtctggctctcaggcccgggacacccatcctgtctgtcctcaccacatactgaaagagcctgccctgtgccccccggagtcctgtctggggcctggggctgcaccctgttctggaaggagcagctcaagtcctcttagcggcttgtttacctgacaggagaggtcaggctgggcacatgagagctgggagaaggtacaactggggaggttgtgtcaggttggacggggcagggtctggggtcaactgggacccagcctcactctctctgggaccctcactgttctccaccctctgttctactgggtcctgcctggcttctgcccaccctcagcccccaatgggcaggcctttcccctccctggcaggcccactgcactctgcgcacctcccccaggtgccctcactgggccccaccccag

SEQ ID NO: 3559 - DNA, 6000 bp, Homo sapiens
ctgctgggcgagcagggcaggtgcaggccgcctgccccgccacgctcctgggccaactctgcaccgttctaggtgccgatggctgcctccggctctctgcttacgtatgccatgcatacctcctgccccgcgggaccacaataaaaaccttggcagacgggagtctccgaccggcactgtgggctgcacacctgtggcatggaggcttgggccgtgcccgcctctgactggagaggggtcttgggaggcttgggccgtgcccgcctctggctggacaggggtcttgggaggcttgggccgtgcccgcctctggctggagaggggtcttgggagacttgggccgtgccaacctgtggctggaaaggggtcttgggagacttgggccgtgccaacctgtggctggagaggggtcttgggagacttgggctgtgccaacctgtggctggagaggggtcttgggccagggtggaggtgagggtagcggggtcaagtgggaccctggaggttggtccctgggtgcgagttccagattgagtggggagcggggggagagactgggaaagctcaggcccaaggctgcctggggtggaggttcctggccaggcgctgacaagggcagctggcccctgagccccgggttgcccaaggagcttgggagtggctgacccccggggctctgtgtccttggaggaggagtgtagagacctgcccctcttcccctccacacctacgcccaccccttgctgcacctggaagggggtcccagggcccctgagcaccccgaggagtccctgcaaagggcccacacggcccctatgtccctgccataggtgtccagggggacagtcaccttggaaaccacagtttctgcttgagccaactttctgtccaccctgggccccggccgtcccactcctgcgcacttaagagtcctgggatctgaatgagaatgaccacagcgacttcatgtaacgtggccccacagtggagaaacccaggcatccgccagcagcgtggatgcgcgagtgctggcgtgttcagatgagctcccagctcctcggcccacaccacaggtgtccacagacgctcccaaggccctggggccgtccccggccgtgcgggaatcttctcaagctggtgtctgggagtggggtatccttcgagcagcacagagcctgctcccgagcgccagtcacgcccgaggccacagctcgggaacaaggcgggagcagccctgcaggcttcccgcagggaagacaccccgggcgtctaagcgacatctgtgtccctcgggaggcggaggtgcctgttcgcctccatggtgtcaggggctgaagagaaacactcccgagggctaagacgtctcactgcacttgttttttctttctttttttttttttgccggagtcttgctgtgtcacccaggctggagtgcagtggtgtgatctcagctcaccaacctctgcctcccgggttcacgccattctcctgcctcagcctcccaagtagctgggactacaggcgcccagcaccacacccggctaatttttgtattttattagagacagggtttcaccatgttggctaagctggtcttgaactcctgacctcaggtgatccacctgcctcggtgccctggagtactgcgattccaggtgtgagccaccacgcctggccctcactgcactcatgagcaagaaacacacagccgaggccggtcacggtggctcacgcctagaatcctagcactttgggaggctgaggccagacgatcgtctgagctcaggagtttgagacccgcctgggtaacatggcaagacccttttctatgaaaaatagaaaaaatcagccgggtgtggtggtgcatgcctgtggtcccggctacttgggaggccgaggtgggaggatcacttgagcccaagagatggaggctgcagtgagacgtgactggaaaaaaaaaaagaaatttaaaaaaattacttaagaagaaacacatgaagcctcatggaaggttttgctgagggcctggcacagcctggacactccggctaccgtggctggtgtggcccagccccgcagctgcacccgctgccccacacagcgtccctgggccagccttccctctccctgcgtcctccaacagcgcacgctgcccacggctgtccaggcctcctgtgcctggcggatggctcccccctgccggtgtcgtggaagtggggaaccggccccgggggtgcacagtgggagcgccacgcgccactcacaacagcccaaggtgccgggaccacaggtggctgtaaggaagacgcccatctctggcctcgggctgccctggacccctcctgcctctgcagctggttttctcccctgggtctctctctcctcaaacctctgtcttccacccactctctgctaaccacaagcctccccccccgcagcatagggaagtcagaggccgtcctgtcccccatccagcaccttcaccgagttccccgggttcctgcacacggttcagcctgcaggccctgcacagggttggggccgcgcctctgagagccccccgccccccgccccgtggggcaggcgaggccagacctccaggcaggatggcgggtgggtgggggaaggggtcaggtggccgggactggagcggccagatcctgtggggcccgcaggtcgacggctatgggaaaggggcctcctccccaaacctggcgcccatacccatcgcttcctgtctcctcccctctgggcacagcaccccccaggccccgtgggacttattccccagcaggaccccttgccgcacccccagatggacacggggccacctcctcttggtctccatgctcaccctccccgccccctcgcctgacgccatctctgctggcaactcctgtgccatctgtgccgaaggccctgcctgaactctggctcagtgcccatctgcaccctccccgtggggcctcacagctgcccttctggacgtacgcaagggctgtccctcgcccggcccgtgggctgctctgctgtgtgaatgccccgtcatttgtgtcaccggtgagctgctcaataagatgaacaagtcacctccagcctcgcagcccaaggataggagtcacggggagccggggaggggccttctgcggcgagagggatgggagggtggacgtcacacccctgcagcccctccggggaccaccctgtgtggcaagctgctctccggctgttcaaagtgtcagctgcgccacggggcgggggggaggggctcctctgcccgctggccgcctcccacttggccccataaactgctcgctcctctaactctgtccctgcctctagatggatgactcacaccgtgtggtctgatgagcattctttattttttgtgatggagtctcgctctgtcacccaggctggagtgcaatggtgccatcttggttcgccgcaacctctgcctcccaggttcaagcaattctcctgcctcagcctcccgagtagctgggattacaggcgtgcgccaccacgcctggctaattttttttgtatttttagtagagacgggctttctccatgtgggtcaggctggtctcgaacccctgacctcaggtgatccgaggcccacctcggcctcccaaaatgctgggattacgggcgtgagccactgatggcgcctctttctatccaggggcccagaccccctcccagcctcggggctgaagatctccaggcctctcaaaggcccccaggcccagctggccccacccctttccttccgagcgtcggggcggcctggagctgcagagaccccttccttctctgcagtgtctgagggctgcctctccaaggcaggctcctacatcttggatttgagaactccggggtgtcacaaacagctaattcctgtcatttaccttggaaaaggaggaaccgccttacggggtgaggcggtggctgcaggtctcaaaagggtgttgaaccacatccacgctcacgttcccgagagcccccacccccagcattcatgggggtctccacctgtgctggacggcgcagaagcagggctgggcaatccagggaggcttcctggtggaggcagggtcccagaacccctcggtgcccacaggggaaactgaggctcagaaagacataggacagtctcccaagagctctgcgaggggctcctcctcaactccctccgggacctggatctgtctggtgtgacggatgaaggtggctctgagagaccgggccctgggtgcccgcgggggcggctgacactgtcccgaggaggcgccagcaccctctcgtctccccaccagctcctcctggtgcccctcccaagccccggggaacttcccaggttggcctgaggggggtcctggagagctgcaagcaagggggaggggagcccacaggcctgcagcccatggtgagtttcacacctgaagccagccaggtggggtgtgctgagccgaggggtccctgtccccattctgtggggttccccagcacggggctccatggttgaggctctctgggggtggccagaatttgtggagacctctcggggactcgcagataccacccggaggcagtgggatggaggagtgattggctgacccccgccctccaaggggcccccatgggacaaggtgctataaacgccgccccctgcactggggacaccaatgtggccgcagactttgcatagaaaacctttctgatccccgccagcctggtttccccgcccctgccggcgacctgcgggggaccgggctgtgtccgcagtgtctacaccccctcctcacacgcacttcacctgggtcgggattctcaggtcatgaacggtcccagccacctccgggcagggcgggtgaggacggggacggggcgtgtccaactggctgtgggctcttgaaacccgagcatggcacagcacggggcgatgggcgcgtttcgggccctgtgcggcctggcgctgctgtgcgcgctcagcctgggtcagcgccccaccgggggtcccgggtgcggccctgggcgcctcctgcttgggacgggaacggacgcgcgctgctgccgggttcacacgacgcgctgctgccgcgattacccgggtaagtaaaccgcgtttacttaacgcggaccggccaaggcgtcccgcggaagccgggatgggtgggcgccccccttcccgtgctcagaccggcgttgctgaggtctaaggagggtgggcacagagccgccagcagcgggagccttccggagggaggcaggatcccagagggaggcggaggtgtgccagctccagccagtggccccggccgggagcaggggtgagccaggtgggagcgccctcaagaggggtctggggtctggaggtggaggacggctgttccaggtcctgctgggcgggtcgtgagcccttggccatcgcccagccccctcctgcccagttgagggcccccctgcaccaccgtctggcctgctgcctgcctctgacctgcacctggggatgagggttcagctgacacggctggtctggagaggaagctggcagggaagtcaccccagagcttcttcctccagggcctgtgggttgggaagggaggctctgtccggaggcccagtgtggctggtggtggggacagcagcgcccagacaccaggcaggcggcctctgaggtgtcgacgggcctccaggggactgtgcactgttgggggccacccctgggtcctgcaggggcagctcctggttgcatatggagttagcacctgggcaggggcagctgtggggcgcaaagggggagtagccaggccacatggccccaggagaaagagacagctggataaacccagggtccagactcccagccaggagccctctgctccctggagccaactgtgggtggagaacggacaacctcactcccctggagggccgaggggaggcctggggaggagggggcctcagcccagctgctggggggctggcctgtct

SEQ ID NO: 3560 - DNA, 6000 bp, Homo sapiens
ggttatgtcttggcgggggtccaggctgtgtcttaggggctgggccatgttctggggacgtgtgaatcctggagggtggggccccggtctcgcgggtggctgtgtccctcgagttcaggcagcacctctcggaactttctggatttgcgtgctggcgtctgtcggcctcgatacccacaggctgcgcccctctcagcacaggaagtcctggagaacctgaaggaccgctggtaccaggcggacagcccccctgcagacctgctgctgacggaggaggagttcctgtcgttcctccaccccgagcacagccggggaatgctcaggttcatggtgaaggagatcgtccgggacctgggtgaggctgggtccagcctggccggcacgccaggacccaggaccgactggcaggggccgggcatcgtcgggaggtcggggcaggtcctgcgggagccccagcctgggtgtgggctgacccattcccgtctcgcagaccaggacggtgacaagcagctctctgtgcccgagttcatctccctgcccgtgggcaccgtggagaaccagcagggccaggacattgacgacaactgggtgaaagacagaaaaaaggagtttgaggagctcattgactccaaccacgacggcatcgtgaccgccgaggagctggaggtgagccctggcgcagccgtgtcccggagccggccctgcgaggtgctgtggcgggaggggctggtggatctgggcctgaggcaggaagctgtgctggtgtctggcctgagactccatctgggctggtcactggggcgtttgctcagcggtgtccaccaggctgcatggccgttgttggcgtttaggttcagacggatcagagacaggcgagcctggccgggctccatcctcagccccttgcggaggcgtcagggttctcacagcccctttttaacgggaccacaaggggaagctcatgctgggcccagcatggaggcaggtccaaggcccagcaggtgcaggtgggcggggcggcctgtgccacatggctggaatttaccaccttcctctgaagcgttttcactggtatcatgtgtaggcttgtttttctcccactgctgagtgagtcatcttgtttttatgtagaatcctgtgattcctggcgacagccagtgggcccggcccaggttagggatccttcagaactggggtccaggcctgtgtagcccctgtgccccgttacccctgctggccccgggcaggccttccggggcccccggcttctccctgccctgtgttttcatttgtgccgcctcccttcgggaaccttccagaacgtgcccacactcccgctgcagccaataggcaccttaaatagccacttcgtgcggctggccgcggagctcggagggggaaaggcgacgctgacctgtgccccgctcgcccgcagagctacatggaccccatgaacgagtacaacgcgctgaacgaggccaagcagatgatcgccgtcgccgacgagaaccagaaccaccacctggagcccgaggaggtgctcaagtacagcgagttcttcacgggcagcaagctggtggactacgcgcgcagcgtgcacgaggagttttgagcgcccggccgcgccccgcgccgccccccacgcaccaccggggcggcctcgcgggtgactccgggctccgtggctgtcccggaccccacctcttccctgccgcccgccaccggccgaccgaccgcggctgccccagttgatgagcggcgtgtcccctctgcagcgcgcaccccggcggggctttggctgtgacgcggtcggggcgcggggctgggctgtggccccgcggcgccgcctcctccctggtccctcgaaatcgtggcatctcacttctgagaacgaaatctcgcttcagtcactctgccgaaggcgctgacggcatcgcggccggaacctctgggcccggcccctcccagggccgccgctccgtgggaaaaaacagctcctccatttccttgaaaactgaacgattattaaaaatagattaaacttcgctggaaatgagtagccaggaagttcaggggagggtgccgggtccttcccgggcctggcgtgtcggagccacccaggtcccgcagctgccgctgagaaaatgcaaatatttgttgtgacaagaatcacatacatttactttaaatatagttgccttttttggtcagcttcattctttgggcgtgaaacaaaacacaacagcagcgtgctaggtttgtggttacagtttccactggagcgctggaggctggtgctgggtcacgtggagggttggaggtcatggccggttcgaggtgattctcctggcaggtggcaacgggcaggggctctgggaggacggagggcagcgctgcgtttgtgagtaggggtcagggggcagcagacgtgcccactgagtttggggtttggacatttaaggcaggagacagagccgcctgggggttttgggtggaggatggcaaggtctttgggtgcagtggggcaggcctagccccagatggggcagagaatggggtgtgttaggacggctggtgggggtcctgctctgtggcgtgtgggggcccaggctgtgtcctggctctcccagtgggagctcagggaagccgggagtgtgtcctcttcagtctgccctgtggtgcccatgtgaccggcctctgccctgagcccacctgcccaggggcccctgtggggccgagagggcgggttggcacctgggctggttcccaggcaaacgagattcacagagccacggccagcgcaggtggtgggaggatggtcccacgccctgctctaaggggctgtaattccctggagccaaccttcggtggcctggactctgtctttccccatccgtggccccaggccacagccagggaccatcatagctgcagcagcattcgacgccctgtgctgagggccgtgcacccagaggtgggaggtgtgagctgaggccatgctgtgctggacatgaaggcggggggacagctgggtatgtggtggcacctggcccttcagaggccccagccagctccagtctggtactggaggagcagtggccactcatgggctgccctgtgccgcccgcgacactactgtgtggagcggggagcccagctcctggggatgtggttcgagctgcaggctgccttacagaccttgggggtcctgagctctgggtcagtgtccagcctcctgtggccacgccacacccggttccatggacacagcagggctttcttggacctgtgaccttaagcccaggacaaggagacctgagcttcctgggcagcttcaagcaggaggggccgtgccccatcctggggccattgcagttgccagcaatatgctgggggtgccctctccatggtgcacgggccccactcactgcacctgtgggcagatgtggccacttaggccccaggagagcagtgttgcccaccaagacccccagttcacctgaacctccaaggaaccaattgcaaatgtaagctttttctcactgtcagtgggaaacccttgtgaacgctgggtggaaccttccacaaaatgccagaactttcctcctctgcccacctgggttggggtgtgcacatgcaggtacacacactgtctgggatgctctgagcccttccagggtcctctctacttgtggggacgtggggagggtgaccaacttagggaccctcagtccgagggcgggtggcctctccctccactccctccctctccagggccagcgggctccacggctgggaatttccccacgggtgggccgaggacaggcagctgtttcctgtgctcctgggaggaggggatttccagccccttccctgctgctctgttcctagaggcccctctccacttgcaacttcaaaaatgaacttttggataatcacaggctggtcacagttatttgaaaggtgcagaaagggcccagggagcccccagccccgcacctgctccccagctctccgggcagttcgcatcctctgggcaaacctggaacctgagaactgtttgcatagaaggtggaaacctgcctgcgtgcccgtgtgcgccaggccatccaggacccaccctcaccacctcctcagaggcctgtctccaaacactgccacatgggggttagggcttccacgcaggaatttaaggggcacagttcagccatagacacctgccgtgctcaggcacactcagcgtgggctgtggtcacgggtgtctttttttttttttttgagatgagtctcgccctgtcgcccaggctggagtgcagtggcgccacctctgctttgcaacttctgtctcctgggttcgagtgattctgctacctcagcctcctgactagctgggattaccggcgcccgccaccacgcccgaataatttttgtagttttagtagagacgggatttcgccatgttagccagactggtcttgaactcctgacctcaggtgatccacccgccttggcctcccaaagtgctgggattacaggcgggagccaccgtgcctggccatgggtgtctgtcttaccatggctgtggtcactgctgctcagagctagtcttgggcatacaagggggaccatgcttcagcagtgccacagccctgaaggtccagactgaggagttgcctctcctgactcagtgctgcctcagtttacccacgtgctccatggacctttttgctgagggtcgagccgcaggccaggccctactgtgccctggggtctgaacacggtggtcttgggcagaagaggtcagaaggcagaataagccaatgctgggggtgcccagaccccgcctttgtgcccagcccacagccagggtccccggcctgccaccttcctcctcccgcctcctctgccctcctcccctctcccctcccctcctccacagtccttatagccacaccccgcaaggaaaacccagactctggcgacagcagagacgaggatgtgcgtgggggctcggcggctgggccgcgggccgtgtgcggctctgctcctcctgggcctggggctgagcaccgtgacggggctccactgtgtcggggacacctaccccagcaacgaccggtgctgccacgagtgcaggccaggtgaggcctcaggaggggtcgccacgcacgggcactccagggactgggggctggggcagggatgggccagccaggaggctggtcctggggagggggcgggtgaggggccggccaagcctggcagaggagccgcctgggggggtccacgggcgcaagcctggggcctgaccgctgcctgacgccggcctctgctgcaggcaacgggatggtgagccgctgcagccgctcccagaacacggtgtgccgtccgtgcgggccgggcttctacaacgacgtggtcagctccaagccgtgcaagccctgcacgtggtgtaacctcagtgagctcccacctggccccacagccccacccagcacagggggcggcagcctggcacccacattcccacgcagcagcatggggctcccacagccgcagaaacgaacctcaaaccacagcggggtctgctccgccacaggggtccttcgaggagctgaggcgtctcccaggggcaccccctctccctccgggggcccagactcggcccaggccacgtggagtcggggagaccacgctggccatgtggcctggccttgctggcctgagcagtgaggctggggggttgggccatggagaccctgccgcaggcggggctggcggctggaggcggtggaggggtagggaagggtggctggggctgccacggaaccagccccaggttgtggccaggaagggagggcccaggagcctcgggggctgcaggggctccaagtctcaggggaggccgcagacccctgcccacggccctctgtgtggtggggaggccaacctgtcctccagtgcccacgcttcctgaggaccctgtccacagcccccacc

SEQ ID NO: 3561 - DNA, 6000 bp, Homo sapiens
gggaggccagctgacacctgggctctggccacagcagaaagcccacctgccccagcctgcagtggctgccctgggaggagccgcggatcctggaaaagctctggggccacctcccaggcttggggtgacagagctccaagaggtgacggctggggacatgagccctgatggggccgccgtgtgctcaccccttggctttcttcttttcacacatatgattaggccaactgtggagcaaacaatgacgatgacgaggctccctgagagaaaccaccatacccagtgggagctgctggtcccagctccggccttcgtcaccagccagctgcacctgcgggagtggggccgaggacgtgggagaggcaggtgcagcgcccagtgttcactcagcctcagggagcctccctggctcccagggccccaggcagtgaagacaggtcccagggaggctgggctggtggcagctccaggatgagacctcagaggtctgtctgacttttccaagctcggctatggggaggtggagagaaggaaggaggagaagagaaacaaggagagactgggcaaaggagacaggacggcagagggagaggggagagaagcgggaggcagccagcagtgcagagaccccagagcacgggagaccagtggcagacaaggacagaaggtagagggagagccagtgtcgggacaaaaatggttagagctggagatggacaggactgagctggggccagaggacgaggagggcagagcaggatggaaggccccaccgccccctccctggggcagccatccctgctccatcccaggctccgctgggggaccccagctcctcccaagaagctctgaagtctcaggtcagttaggggcccagggtcagcatttgaaggtgtcctcccgaaggtggacaaagagcagagtgttcactttccccaacccctgaagcccaggggccctcccatggccctgacattcagggacacccacagccccaggggacaggggatctggaggcagcctccctctgggcctgcttctgggaaggcccatcctgagcctccaggaagctcagatctgatgaggctttgtctgggcccatggaaggggttatctggggcacacaggcttcagccctgcagctctcctggacgcaggcatgtgaccagggtgccgctcagggtgggaccttcaagcctttctgctggagaagacggtcatctcccagggaagcaacgtggagccccctccccagggcacagagctgggcctcccccgggttcacttacttggtctggtgctgacattcctccagggtcccattgggagagaaggtccccggggggcagttctgacacagggtgtcctgactctcggtgcctgagaagagagggacggacagagggggctgagggcaccaggccaggagggggctggcggctagggactgcttgtctgtgagcttctagacctgggtgctctacgggtgatgggaggaccagcggggaggggcaggctccctgtccagagtcttggaggtggggcctggggtggtggctctggctgtcccggccttgagtagctgggatctcatgagtccgggagtccctctgtgtccacatcctgcagtgctgcgggggctgcccggccagatgcaggccagggctggacacttactcctcctagacttagcttgaacagtggcattaaccatggtcactcccataaacccaggctccagaccaggggcccgagagcgaggcctggggactgggaagtcccagaaccccgaggtggagcaacctggggtggcccttccttgccccttcccctgcctccatcacctgttccccactgggctgcttccaggacagggctgaagtgggtgggcctggggctggccaaggttctgtctcaccagggcccctgggcaggccatgccgtcgaggaaacctggggctccagacagcggggcactggggaccagggtggaaatgggaggggtgtccgccacccaccgcttacctcccttctgcaccctctggcccgggctggaggtggcgtaagcgcggcacgcggcgcagtggtccccgtcctggacgatgcagaagtggcctgggctgcagccacacacggcgttctctgtcctggagcagttccggctcgcgcgcaggcccatggctggagtccaagaggaggggctgagaggggtacgtggaggccgggacaccatccacgggccaggacagcatccacaggccaaggactgctgccagggcgccctgccaggctgaacccctggctcagccaaacgaggtgcccagaggtacccagcatggaggacctgaggccgggagggacaccaagggacggcagagctgcgtgtgggacgagggcttgcaggaaggtcctgggagggcttcgttgatgggagaaaccagccttctgcccagatgggcaggacgccgagcttgcactgtcagttccagggcagggtcccgcaggcaggtcctcgccccacgtgcccacccagacacccaccccgcaaacgggtttcccatctgtgcaaaccaggccattccaatggcagaggcaggtagggtgagagccccacttcttcaggtactggtggaggtggggtacaagctgggcctgggcccctcctgagggcagcctcacctgccacctgtgcccccacatcctcagcccaagtagacaggtgctttcacaagaggggaggggcatggaactgggcatgcaggttgaggtgtgagccccaaatcccagcctacatgcatgaacccccaaagcactccagcttcctcttctgttcatggctagcccacctgccctgtgcctccctgtaggctcaggccctgcccccaggtgtgccgtcagccctgtcccgcaggtgcagtcctgcctggccgcagggagcactggccatgctgagcctggcatgaggctccaaggggacagagccgttggccgcatggacaggctctgcgctcagtgactcaaaggccacctctgggtctggttcccctttctgtctgcctggactcaggtgggcaccagcctccaggtgacctcttcccctgaggtcacagggggaaccaatatctggaggagaaagggacaagaagccctgtggggaagcagcaggcccgagtgccggccggagagtcccagcaccatcccattccactttgcagctagggacgtgggcacaggagaggtctgggcacccaccccgggcaccagaggagccaaggacgagggataagggtcagtcgccaagctcaggatggcccacctggcggtgacaaagtgagaggtgagacagaggtggacgggggccggaggctgacctcaaggcgtcccctgcagggtgcatccatggagatggggttgggacctggcctggggcagccggggccttcctggggcactgtggccatggagagagggtgcagggtgcgggggcatccaggctgcccaagcggaggctgggccggctgtgctggcctcttacctgggtcacacatttggcactgcagacacttgcttaggccattgaggtgggcaatgtaggtgcctggagggcagggttcacacactgtgcccgtcagctccccgcaggcctccttcacacgataacctgccgcccagagagtgggaacttcgcaagtctgcgggaggccccttcgggagcccacccatcactccacccgcgcccagagcccaagcagggagacaccagctaaggggactcaaatggcccatgagccccacgggacacagcagccccatcagccatgagcagagctgctctggggaaaatcggaaagttctggaagcacatggggcctcctgggacacctggcccggctctggtatgtgcccccgagcccatgtctctggccacggtgggccagccacgtctctcagacccaccccctgtgcagtgtgactgtgagggtcccccagggtgaagagtccaagctgctggcctgggggttctgccctcactgtctgcacacctagccccagggcttcatcacacccatggctgtgggggcagagaacacaggggtgtctggggcagaagggggcaagagtgtctgccctcggcccacagagctggcccgccaaagggctgcacctacctggactgcacttggggcagcactcggagcccactgggtactcgtcctccttgcaggacggcagagctggggcgtagcagggggctcccaggaaggtgagatacagcacctaagggggtcaggacaggcattgggagatgccctggctgccctgtgggctctgccaggcttggccccacagcctgaatctccctctgtgcaatggggaggagcggcagtgcctggtagagaggacagaagcgggccccaggccaggctcatggaacaaccttgccgaccgctggagcccgggatagggtggggaccgcccctcctccagccctgatgacgctgcctggcagcgcggagccctgggaactggaactctgccctcgccagggaccccacaccccacacctgggagcattgagcccactgggcagacaacctgccggcccccctgctggcctaggttggacctgctgacccctgaagagccagcaggggcagccagggatgggccccagaggctcacaagccagacagtgggtgacaggctgatcagggccacatcggggagggtggctctgccgtggcctcgttcctgggctggctgatgggcagtcgggggcccctgatggggatagtggctggacaggcaggagtgccacatgagcatggagagtatccccaccccacccacctgggtccagccccctgctgcacactgatcttatcacctgtcaccaaggtcagggctgccggggagttgggtcacctgctcgagggccccgcccagagacgcccagagacacccagcccccagaagtgcccacatccggccaaatgggggctcaccagctgcccgtggacggagtggtgagtgggggacacacgcaggaggaggtctgctgggtagggctgtggctctgctgctcaccccactgtggtgagcccagtgctgggggtctgggttgacccgagagccccaggcagcaggggacgggctggacgccggagccagcaacggccaggacaggggcatggggaagagatctgtgggaggccctggggtcagaactgggatctgcgagcagacggagaggaggctcgggggctcaccagcctcaagacgtcggttttgggggtggatctccagggaggaggcccccagtctccaggaggctccatgcctcaggctcagaccggcagctcgggaacccagctagcaggatgaactccagcagaggaactcagcgccattgctgcggctgtgggccagaagagaaagagaaagagaaagagaatccgcctcggtgtgacaagctgtgcctcagaacccgagcagcaggagagtgggcagcagggggtgtctggcagcagagaggggctcaggcctgctgggtggagcggcgctgggggacacaggtgggccctgcgggaggcaggagctgtccaggcaaagccgaggggaagggccggtatgaaggaggcgcccgatgggaggggcgagttctccccctgcaccattccagtccactccgggtttcctgtagaagggggagccccccaaagtccatctgtgtttccccacctcactcacacactcagggaccctcggctgctccccggggcgctgactgacatttttgccgaataaaggggccctgtgggtttcctgttcccatctcagcttctgctgaacagggtaaacttcccttccgaataaaaccaccagaatgcggtctggccaatttcagtcatagacccaccaggcctgtgtccctgcgtgagggggtgggaaaagcccagagtgcccctacccgtcccctgggaggggtggaagggcagc

SEQ ID NO: 3562 - DNA, 6000 bp, Homo sapiens
cagctccttgctcttcactttggtcttcgtgtggctggttctgaagcctcttagagcaggtccagcccagcctttcctgcaggaagagtccagccccactcccaggacgggccctgctgggtggctgccgacagcccaggatcctccaggactctccccctggcggtcggaactcctgtctcccacctgtgagtcccaggggccgggggtccacagccccctagggtcccacccatgctgaaagtccaccttccacatgcatggcgcccgactccggaggcctcagagaccctcaggcagccttctggagctttctgtctgtgcagttccctcctttccggagctctgcctgccaggtccctctgcggatgcctccctgagccctgacctccttctcctcagcccgccaggactgctggacctgcctggatgcccgcccctgctcggccatcctcaatgggcctccaccccagggctggggtgacccgggctgaaaacagttcatcctgagtttcagtctcgagctttcgtggcaggagggaaactgctggctgtgttactccacggcggctggaacggacgggaccagctcccttcagaggggcacttcggttggttctagaattctcctttgctgtgaaagctgccaggcacattctacactggccaccctccacctcaaatgtgcgtttatcaatgaaacgccctaataggacctcctggatcaaaacactgagtattgtcctgcaacctgcctctcagaaggccgtgccctcccgcctgggatcctgctgcttctccgccggccaccccgcacacgctccgctgcctctctgggccggctcagccatttcacgttcctgtgtgtgcactgagacatccaccctggcacgcttcttcccctcagcacgtggtccccacgctgtgcctgcccagctcggagcccagaggcccccgcagctccccacaacttcatggtgcagtgacctgaggcctcccctggctcagtccctttcccagggtcaggggtccatgtattgaaccaagacgggaggtgccttccccctgagctctgtccctgctgaacctggaaggcagcgcccagtggcggctcagacccccagagcctcttctgaggtccgacactcctctgctccccccagggagaccccctggcctggcccccagctctcggtgcctcggtttcctcacctggaaggtggggatgttgaaggtgcctggcctgtggctgtgcactaagctagggtgactgtgagcttccagagctcgaatgtctggaaggaagggcgcgagctgggtgcgtgtgagtgtcctgatcatggacacagagcgtggggccccttggagggctggaacccaggtgggggatgcccgggtggtgggacagagtggggctggaggagagggtctgaggaatgttccggccacagacaccccaagcccatgggaggtcaggagttggtcacaaggaaggtgaggtggggaacagagctggggcccagggtcctgatttggggtgagaggtgacgccatccccgaggcagaaagacggccaggggaggggaggaggtggggaaagcagacggacggggaggcggggggagcccagggccaggagtgtcaggggcaggcacttgagacagaggcaccctgaggtttcccagcaggcaattgataccctggcctgcagcggggaggaaccggggctgggctggaggcctggggacgcctggggctgccccaattcccagcagacacctcaccctctgggaagccccagctgccccagatccctcccacaatgctctgaccacccccaacccccaagtcctctcccttctgtccccaagcccgaggccttggagctgcccccgccctgggccatgagagctggacacagagccctccaagttccacgggcctcctgcaccgccgcctgctccgccctcctgccctccccctcggcctcccctgtgagggctgcccacctaggtgaccccggagccgcctcctcacgcctccatctgctctgcacaccgtccactagcctgacagctgcccaaagcctccagagcacagaacgggcctggtgtctgcgcctccgtctcggggtgggccacggccggttctgtgtcccgtcccctccccgctcaccagcggtggaccccagcttccctctgcagcagcactcaactcacacactttctcagagacgcgcagcccacctcgcccccgcagtttcctcttcatccctcagagccccccatggcctgggcagtccatcctgagtgtccgcaccacacgactgtagacgtttggcttctggactcaaatccttcaccagatcgtgaccaggatggcaatgaccaggcctcggcctcagccccctgcctggcctgcactggcacagcattgggtctggggagtccccgcgacaggaggcgtggggctcggggtgctcacctgcctccctctccctgctggtaatggtgggccccgggatgggggcagtgatatcctgcgggcagccgtgtcaatgcagatggctgggtgctgggtagggccccgtctcccgcctccttgggctgcctcatttccttcctgatgaccctggggtcctgcacagggcctggcggtgctggtgccgggagagcccacgctgaatggatgaaggagtgagtgctgtacttagcggggggcgctgagcgctgggtggggagcccaggacatttcctcctgctgcccgggaggtaacaccctggacccctggagtctgcattctgtgagagcgggcaggccacagagaagggagaaaagggacggagggccgaggcgggcggatacggggagcagggagcggggacagggcttactcagcaatcagagaaggcctcaaggaagaggtgacatttcagcaaagacctggcactgtctgtgccctcggtggggcagatgggctcccttcagcccccttgaggcctggcacctggggccctatgtcaggcttggggccttggtgtgggagctgaagtcggggtaggaggggcatggaggaaggggcaggaggggctgagtctcactgatgcctgtgttagtcttgtctcttgccatgcctcagtttccctcctccccagggtggggtggatgagacgactctggaggacgtatctgagagagtggggttggagccccgtaccggcaggtgtaggcgctgtgtctgctcttggaggttgggcgttcttggggagttggtgagggaacgtgctgtccctgcaccctggagcccccatgccctcctggggcccccgggagtggaggatgcaaggggcccccttcttcttccttgcaagacccacatggctctgcatgtgggggacattcctggcagggggcgctgagggccaggatgtgagtgcaccagggaaacagcagatggggctcctctcccaggctccagctgtggggtgggagtccatgctcctgcgtgtctcttgggggcttttcctccactgggtgccacctggtcccccaccctgcctcagagtattggggtctgggctcgtccaccctggatgctggccaggagtgcacctgcctctggagctcgggacgcttggccccacaggacggtgtcgcacaccacagccggcctaacttcacccctgcctgctccctctccagggccggcctgcagggctgcacactttctagttggggtgcaggtccccgggctcctgccacagattcctgtggctggccaccctgccaactctcctgcaggtgagggtgggcgcaatccccaaggtcctttccaccagatgccactgagtcccccaggggccagggctggaccctggagggggtcacctggctgaagtcaggaccaggaggggcagggggcagtcgaggggcagggggcggtcctgggccaggcgtctggcagatgggcttgctggaggtgggggttcctggtgtgcagcaggcggtgccagagggggtgactgggacctgctctgggcaagcacaggcggtgcgtgacagacctgggcttccattgactgcatcacgtccagcagcaggaaggggccacgggggcactggcgtcgtcacgtgggtcacgaggttccatgtgatgcagggagcgaggccgtcacgagggactcactggtgcctgccttggggctccgggactgtgggctgtctccatccggaggtctccctaccaccaggctctgtggggcagggaagcccagtggggtgcagggagccaggaagctggggtggggtcagggcagggtccacagggagaccgggcgaggctggcagccttcccagtccgcgcagcgtctctgcagggggagcaagagctgcccttccacccctcccaggggacgggtaggggcactctgggcttttcccaccccctcacgcagggacacaggcctggtgggtctatgactgaaattggccagaccgcattctggtggttttattcggaagggaagtttaccctgttcagcagaagctgagatgggaacaggaaacccacagggcccctttattcggcaaaaatgtcagtcagcgccccggggagcagccgagggtccctgagtgtgtgagtgaggtggggaaacacagatggactttggggggctcccccttctacaggaaacccggagtggactggaatggtgcagggggagaactcgcccctcccatcgggcgcctccttcataccggcccttcccctcggctttgcctggacagctcctgcctcccgcagggcccacctgtgtcccccagcgccgctccacccagcaggcctgagcccctctctgctgccagacaccccctgctgcccactctcctgctgctcgggttctgaggcacagcttgtcacaccgaggcggattctctttctctttctctttctcttctggcccacagccgcagcaatggcgctgagttcctctgctggagttcatcctgctagctgggttcccgagctgccggtctgagcctgaggcatggagcctcctggagactgggggcctcctccctggagatccacccccaaaaccgacgtcttgaggctggtgagcccccgagcctcctctccgtctgctcgcagatcccagttctgaccccagggcctcccacagatctcttccccatgcccctgtcctggccgttgctggctccggcgtccagcccgtcccctgctgcctggggctctcgggtcaacccagacccccagcactgggctcaccacagtggggtgagcagcagagccacagccctacccagcagacctcctcctgcgtgtgtcccccactcaccactccgtccacgggcagctggtgagcccccatttggccggatgtgggcacttctgggggctgggtgtctctgggcgtctctgggcggggccctcgagcaggtgacccaactccccggcagccctgaccttggtgacaggtgataagatcagtgtgcagcagggggctggacccaggtgggtggggtggggatactctccatgctcatgtggcactcctgcctgtccagccactatccccatcaggggcccccgactgcccatcagccagcccaggaacgaggccacggcagagccaccctccccgatgtggccctgatcagcctgtcacccactgtctggcttgtgagcctctggggcccatccctggctgcccctgctggctcttcaggggtcagcaggtccaacctaggccagcaggggggccggcaggttgtctgcccagtgggctcaatgctcccaggtgtggggtgtggggtccctggcgagggcagagttccagttcccagggctccgcgctgccaggcagcgtcatcagggctggaggaggggcggtccccaccctatcccgggctccagcggtcggcaaggttgttccatgagcctggcctggggcccgcttctgtcctctctaccaggca

SEQ ID NO: 3563 - DNA, 6000 bp, Homo sapiens
ggttgttctgccccgggccagttcggctcgctcttcaagccctacatccgctactgcatggaggaggagggctgcatggagtacatgcgcggcctgctgcgcgacaacgacctcttccgggcctacatcacggtgagggcgcgcgtgccgtgggcgggggcgcaggaggacgggaccctggacggggccgggtggggcggggcctgccctgagcccgcccccactcccccaccgcagtgggcggagaagcacccacagtgccagaggctgaagctgagcgacatgctggccaaaccccaccagcggctcaccaagtacccgctgctgctcaagtcggtgctgaggaagaccgaggagccgcgcgccaaggaggccgtcgtcgccatggtaaccctgatggccagcgggagccgtcccccctgcgcggctctctgctccgtcatgaccctggacctgaagctccctcacctgcccctagatcggctccgtggagcgcttcatccaccacgtgaacgcgtgcatgcggcagcggcaggagcggcagcggctggcggccgtggtgagccgcatcgacgcctacgaggtggtggaaagcagcagcgacgaagtggacaaggtgggcgtgtgtgtctgcgggggttgccggctgggagagaggaaggcccagctggcaggcaggggctgtgctgggcatctcactgaggatgcctagctgagatgggagtcagtctctggcctcccctacgttcacgccatccgtccccagctcctgaaggaatttctgcacctggacttgacagcgcccatccctggcgcctccccggaggagacgcggcagctgctgctggaggggagcctgaggatgaaggaggggaaggacagcaaggtgattccagggccaccccacccctgtgccctgcccttcctagggacctcctgggccccagtcactggttctcagctctgcagtcccttcggtggttactcaagaaccagtgaccttgtcatagtgaatgacagttctctgcctgccattcacaaatccagcagtagggtcctagcccttgaaggcaccagttgtgcccatttgttggtgccacatgggttcctggtgggagggcagccatattccacaagtgggccaggaaccccagagccttgctactgtgccatggccccttcaggcatggggcaggctgagagcttgcacacggtgacttcaaagtcaccagtcttctttttaatgtaaacttgtattgagataagtcatcaacgtacatctcagtgaaagagaatcatcttcctcttcattttaattttacttgaaggttcatggtgggaggagtgtttgacaaaaaccgagtgctcccaggggaggctggtgccacagtccctggccctgaccctgctggcctctctggccaccccccctcctgccactgcagatggatgtgtactgcttcctcttcacggatctgctgttggtgaccaaagcagtgaagaaggcagagaggaccagggtcatcaggccacccctgctcgtggacaagattgtgtgccgggagctacgggaccctggtaaggagccctggtcccctgttcctggtcaggggctgtgatgggtgggggccatcgtctctgctgacactgacttgggccttccctaaccagggtccttcctccttatctacctgaatgagtttcacagtgctgtaggggcctacacgttccaggccagtggccaggccttgtgccgtggctgggtggacaccatttacaatgcccaggtgagtgcagagtagtgagtgggtgggcaaggcagattagggagatgctggtcacaacccattctgtcccatgtaccccaaccttgcctgcagaaccagctgcaacagctgcgtgcacaggagcccccaggcagtcagcagcccctgcagagcctggaagaggaggaggatgagcaggaggaggaagaggaggaggaggaggaggaggaggaaggcgaggacagtggcacttcagctgccagctcccctaccatcatgcggaaaagcagcggcagccccgactctcagcactggtacgtctgctcatgaccacccagcaggtcaaaccaggacaagtactctagcccaggactcctgaaggcccagccacgctcccttcctcccaatggcctcttgtcatgaacactgtgggagcggggctctgtctcccccagagtccgggtggggagggcagacacctttccatgtgctgccagccctgatccattcgtggtagctgcctggggtgctgtgctgaggatccttagggcagatccagccttggcagggaagagtgctgggctcgctactgaggtctgttgtgggcactggagctggaagatctgccacacctgccacatgctgccatctctgagcctccagccccaggagggcagagggtataaaccaccgtgcattgcccagcctggggctgcctcaggccatctaggtttcatggcctgggctgactctgctcctggccccacagtgcctcagatggctccacggagaccctggccatggttgtggtagagcctggggacacgctgtcctcccccgagttcgacagcggtcctttcagctcccagtctgatgagacctctctcagcaccactgcctcatctgccacgcccaccagtgagctgctgcccctgggtccggtggacggccgctcctgctccatggactctgcctacggcaccctctccccaacctccttacaagactttgtggccccaggcccaatggcagagctagtgcctcgggccccagagtccccacgagttccttcccctccaccctcgccccgtctccgccgccgcacccctgtccagctgttgagctgcccgccccacctgctcaagtctaagtccgaggccagcctcctccagctgctggcaggggctggcacccatgggacaccctctgcccccagccgcagcctgtcagagctctgcctggctgttccagccccaggtattaggactcagggctcccctcaggaagctgggcccagctgggattgccgaggggcccctagccctggcagcggtcctgggctagtcggctgcctggccggggaacctgcaggctcccacaggaagaggtgtggagacctgccctcgggggcctctcccagggtccagcctgagcccccaccaggggtctctgcccagcacaggaagctgaccctggcccagctctaccgaatcaggaccaccctgctgcttaactccacgctcactgcctcgtgagtggcctggactggggtagggcaggtggctcagggcactggcatgggggcccactcatgcctgggagcatcgcatttggggagggtcatggcggagggagcctgaaccctgcccagtgtctgggcgcagggggctgtggtgggcagcagtgaaggggcctgaggagtgccgtggggaagagagggtgaccagagccactctgaatggcgtcagccaaagaaggactctgtcccctccccaccctgtagggaggtctgagcagagggaggcccccaagagtgccattgaccaagagacagcagacagcctgcctcctggggcgtgccggcacctgcttcagctactgcctcctgtatgcatgagccggatgctgggcaggatccctgcctacgcccgggcccgatttgcgctttgccggactggatggagtggaggaggcccaggccacagtaccaccccacctgcccaggcagcccctcgtcacctactccccgaagttaccagctcagctcgagtcttcagggctgggctcctaggctgcccatcctacttctaccctcactggcctccagtgggattcactcctgccctgcccccaccttcccagtcccacaggccacccctggcttgggctgggttctgtgaagttacgtatttattgagcttttggttcttttataaagacttgtctagactccactgggaagagtcctttgctttggggcccagtgactcggggcacttgagttcagggcggcctccttgtgttcctgtgctcctccacttgccacggatgggccacggatggagcttgccatgggaagcactgggaagtaatggggtgtggggtgccaccagaccaacacccccagacttccccaccttcagccaccatcagagcctctccccaggtgccccccggggattcagggctgaatctgcccagttcccacactcaggccagccctcttgggaaggtgggtcctccatgggggtcccttcaggaactttttttttttttttaatacagagtctcactctgtcacctaggttggagtgcagtggtgtgatgtcggctcactgcaacctctgcctcccgggttcaaacgattctcctgccccagccactctagtagctggaactgcaggtgtgcaccaccacgccgggctagtttttgtattttaagtagagacggcatttcaccatattggtcaggctggtctcgaactcctgaccccaagtgttccgcccgcctctgcctcccatagtgctagaattacaggcctgagctactgcgcttggccccttgcggtacttttggcccaacctcctccatggctggggacgcggaggccgagagagaagtcacttgccctggctctaccttgaagtggttctcagggttggggcgagagtcggggtggggaccgagatgcagctctatcctgtgcccctggtcgcagcaggcagcccagcgcttcgcgtgttctacttggcctgtccgctgccgcctaatgagctcaggtctaggccgagcagagggggcacctggtcggactcggttgggctcgggcggccccgcctccccccgcccgccaggcgggcccttctcgacggcgcggggcgggccctgcgggcgcggggctgaaggcggaaccacgacgggcagagagcacggagccgggaagcccctgggcgcccgtcggagggctatggagcagcggccgcggggctgcgcggcggtggcggcggtgagttgagacgcaggaggctaggggcagctttgagccctgtcccaagagcctcggtgaaggaaggggccccgggcgcgtctccactccaagcctcactgggggctgggttggccgccctttccgatctcgttaaaggctcctccagggcgtagcccttccactgagaggaaacccctcccaggagggtctgggggccccaggcagagcattatcagtgtccctcccccaacagaaagcatgggtgggggtgggggcgctgctggattcctgctctggtggaggggaaacttgtgaggggctggtaagcgccccctccgaagcctggtgtgtgcgcggggggaaggaagttagtttcctctccacccatgggcaccccttctgcccggggcctgggaagtgggctgctctgtgggcaaatgctggggcctctgaaatggaggagacgcagcagggagaggccccacgtgggcagctgcgctgagagtcagcagcacctgtcccccaggcgctcctcctggtgctgctgggggcccgggcccagggcggcactcgtagccccaggtgtgactgtgccggtgacttccacaagaagattggtctgttttgttgcagaggctgcccagcgggtaagtggccacaggggtgggagaggcatggggcaggcagggctggagaggtggcgggcaggcccgggaggtaagaggaggctggcaggggaggtaggggtaggctgacagagaagtagggagctggagagaaagagggagggagggcagggtgggaagcaggtcgggggttgctgggcagcccctctgcctgcctgacccctgcctggttccacagggcactacctgaaggccccttgcacggagccctgcggcaactccacctgccttgtgtgtccccaagacaccttcttggcctgggagaaccaccataattct

SEQ ID NO: 3564 - DNA, 6000 bp, Homo sapiens
tactcgggaggctgaggcagaagaatcccttgaaccctggaggcagaagctgcagtgagccaagattgcaccactgcactacagcctgggtgacagagtgagaccctgtctcaaaaaaaaaaaaaaaaaggatacttgggactgtagggaaataccactgtctgtgatattcttgcataataatagattatacaagaatctgttacacccttggtatctgagatggatttgacaaatctacttgccttttgtctgcctggtacttctatggctcacaccctccctgccgttcttggaggcaacagcacagctcacaactctcacagcacggtgtcaccctcaaatggagtttcaaggacatggatccagggatgtgggggagtcttcacccaggcctggcagtgtgggtccagagagcagatggagccgagttaatgcatccctatgccagcaccgtgcgccagacacccagtcacagacgcagctctgtgttcattgtgtttgtgtgtttgtgtctctgctctggacagaacatacttaacagcgtatttggattgatgaacaatttctaaatatttggacacatggtaagcaggcctctgtttgtactcttgtcctggggactgcacagtgttgggggtggtctgaagttggagacaactattgataagccttagcatatgagtggatgccacctggagaaagggcagaacaaggaggaaaggtgagcaaagtcgatggctgctgacacccgcctctccttatgattcgtacttccttctccttactctgcctccttcctctttgatttcctgctcattttctttgttccaagtttaaaaacaatttactccttcccaggcctcagaacacctactgacatcacaagcaccaggtatgtctaatagtgactactagtttgggtgtttggagtaggggtggcgacactgaatcttgaaagaatagatctttcaggcagaaaacaagtgtaaacagtgaatatcccacggaagagattccctctaagatgcgccctggaagggcggaagaatattttataggaagcttattttgagggctttctctttctaaatgtctcctttatcctgtttagaattgttgggccttcatgctatttagcctcaaagtatttagctgcttgagatattcaagattagacctatagtcaatcaaaatgaaataaaatctatttcttggtttatttatttatttattttttttttattttatttatttatttatttttttgagatggagtctcgccctgtcgcccaggctggagtgcagtggcacgatctgggctcactgcaagctccgtgtcccgggttcacgccattctcctgcctcagcctccagagtagctgggactacaggcacctgccacaacgccttgctaatttttttttgtatttttagtagagatggggtttcaccatgttagccaggatggtctcgatctcctgaccttgtgatcctcccacctcagcctcccaaagtgctgggattataggcatgagccactgcacccggcctatttcttggtttagaatgagatgcttaggatgtgatgaaacagattattaatactgcttaggatggatgaaacatattattaatattattaatactgctaaagtgttgctgtcttgtcggggtcatctctgatttagtttgagatggttttatggaatagaaaaagcttttgttgcatttgaaagattacagggctacaatggataaagcaatatgatacatgttataaagcaaatgaaaattataccaaaagagtattacacctttggctagcttagatagtatgtatatctggttaactatataatttgacttagcttactacgatgattttataccacacaaaaatgcatgcagtaacatgaattctttttttttttttttttgagacagtctagttttgttgctcaggctggagtgcacaggtgcaaacatggctgactgcaacctcgacctcccaggctcaagcaatcctcccatcccagcctcccaagtagttagaaccacaggcacatgccaccacacccagctaatttttgtattttttgtagagacagggtctgggcatcttgtccaggtcatcttgaactcttgggctcaagcgatcctcctgcctcagcctccctaagtgctgagattacaggtgtgagccactgttcccagccatgaattttttaaacgcctgagtaaagttgagcatagccttcagtagcagaattctgaagtggttgactttgtttaactgtgggctggcaaaactaatgttgagactcttttagctcagtaaagactcttatgttactggcataaaagcctgaaatagtgagctaattactgtgctgggaaactaaatatgtcactttcagaggaagtaatgtctctgcctacagaatgtccaaaacgtagactagtgagtagcatttagttaaatgaaatatggcccagttaaatgtcacactgcaatgttaaacagagtaccacatgtaaacaaggagattacttggttagatggtgactttcaaagtgttaggaggggatcagcagtccgatttttatggtgtgacactctcacattcagccaatttctgccaaagtggggcaaggagggatcccacagatgtcacaggtaagataactctcagatgaccgtcagtatttgggaacacattttgcaggcagctcatgcgtttttctccttttctgtcatgacttgccctgtggtggctctactgatggtcagtgtgggaggcagggaaggaacatttcaaaccagtaagtctgatcatagcaattcctactttcttgagaactatgtgccaagcattgagctaagtatttcatgctcatcgtctcatttaatcctcactcacgaggaagatgtatggtgtcactgcacctgtaagatgtgcttgcaaaaacagagttagggaggttgagaaatttgctcaagattacacaactgaggcaggagaatggggaacatgaggcgtgagagagcaaagggaataaaaatcactgggaaccggtaacccccctcacccccgagagtggccagggagagagaggctgcctgagggaaggaagctcggcaggacccgctgcagacccagggccaagggaagtcccgcgggaggaaacgcgggcgcggtggggctggctccaggcacgcgggccaagggcgggagggtcggacacgaagccacaaggctcctttccttcctcctccttcccgtctgccttcttctgcttctgcggcctgatctccgagtccctctgcctgcaggcggcggcagaacgtccgcatctgtccgcatctcagcgctgtcccccaaccgagtcgcgccgcgttttcctcttctgtcgggagagctcgtgctgggaaccgcggggcaggaggacggcccaagctactctcgatgtccttccccagcccacgcctgccccagccacagttcccctggttttcctgaggttctccagctgctcaatgatgggcaggttcatctacagcctggagcagccgcctcctcctcctcctcctcctcctcctcctcctccagaaacacccctttttccttctcctcattcttccttctcattctttctcctcctcactcttccttctcctcattcttccgtctcattctttctcctcctcattcttccttctcctcttcctcttccccttctctttctgttcttttcttcttcctcctcctcctccttttctctttatttttctcctcctcctcctcttctccctcttctttctccttatactcctcctctcctcttactgtacttttttttccttctgctttctctgccctcctcttcctcttcttcttcttcttcttctttttttttttttttttgtggctggagtgcagtggcgcaatctcggctcactgcaacctctacttcccaggttcaagcgattctcctgcctcagcctcagtagctgggattaaaggggtccaccgccaccattccctgctaatttttgtaattttagtagagacaggtttttgccatgttggacagtctagtgtcaaactcctgacctcagatgatccatccacctcggcctcccaagtgttgggattacaggcatgagtcaccgcgcctggtctctttctcctttttttttttttaaagaaaaattgaaatcatggttttctaaaaatccctcctagctctcagcttcaccgaaccacgtcctggtcattgacttgccgtgtgactgctgtgcttcccctgtttccatttccctccatttctccctccttcctccctctgtcacccatgcccggaggagcacgataagggaccaggccgacctgggttccaaccctgcctgctccctgtcctgttgacgctctaattccacttgcagccccactttcctcatttgcatagtgttctcccagtaacaacagcagtcataccaagttctagggttctttcgaggatagtgtgtattcaccgcagtgcatctctgatgcctggcacatcggctgtgctcaagtaatggcagctattgcattacagtgactatggagttaggggaccgcatatggcaaaatgctgatcactgttttgaatttggtttcattcctctaatctcaaatccagtgttttaaggacatgctaaatgctttgtcctggagagctatcttaagggacaaaatcgttttcccagcgtcatctgtgacacatcctgacagtagagagctgcttccaagaagcaatttgaagtgccattatcaggcagggacgggggctctaggggatttcggggtcagcagatatgaaatgaatgatttcatagggctgtcacagagctgtggtgggaatttcccatgagaccccgcccctggctgagtcaccgcactcctgtgtttgacctgaagtcctctcgagctgcagaagcctgaagaccaaggagtggaaagttctccggcagccctgagatctcaaggtctgtccatctgggggagtgggtgggggcactgagaaggggtgagattggaacttttgctccctttgcccatttctagactttttctcctaatatgtaataacttctcttcaatagccctttaaataaacatcaataacttagcctgaagagtttttcactccttagttttgttaccatacaaacttcacatctcaaaacatgtctctgtttaagaaaatgtgttagtgagttgaacagggaggtctttccacatgttagtagttaggtgttcagctaaagggggaagagtgattatgtgatagcttcttcttgaactgaattgtctgatgcccctgacagattctctttgtaaggagtttatttcaggggcaataagtaattggcattattgctggttggtactgcaaagtacctatgaaagtccccaaaagttcttgctattgttatttctgcattttggcagaacatgatggaaaatgcaccctcaaactttggcaaaccggcacaaagctgtgtgtttaatcacgcctgccttgtcctagtggtttctatgaatctgctacttttccgtaatattgcatcattaattgttcctgaaaaaccctgagttatcctcttatagaattgtataagtaatgattgcaatatagataattttgaaaggagaaaccacctttccttggaaatgtttatcttttgcagagtgacatttgtgagaccagctaatttgattaaaattctcttggaatcagctttgctagtatcatacctgtgccagatttcatcatgggaaacagctgttacaacatagtagccactctgttgctggtcctcaactttgagaggacaagatcattgcaggatccttgtagtaactgcccagctggtgagtacccagttatcatgtgcatttgatctgctctgttggaagtatggttcagttagtctagtagtcagggcta

SEQ ID NO: 3565 - DNA, 6000 bp, Homo sapiens
tggccagaccaggacttatacatcagtgctctttctcctggggaaagcaagggtgagagaggcctggggagggaaaagaaggcagctgaggcttcagagtcagacagggttggagtaaatcctagccctgccaccctcatgctgtgtgacctcaggcaagtgacttaactactctgagcctcagttcatttataaagtggggatagcaatactgacttgaaatcttgatgccaggattaaatgtctgaccaagggcctggtacacagcaggagctcaatgaatgacactgttaatgttactatgcagaatctttaagagcatccccgagggcctcacagccttccctcctgcccatgggaaggggcacaacaaacctagttctggagagccagtgcccctttgcttagtttccaaccaggcttggtctaggggtgtcatgcttgtgggtgtgcattgctggggttcacccaggcagctgagaacccctaatgttggtgcctcaaaagggcagggagatctggggatgtgagttggagggagcctgacatgggtcctgccgattaggactggtggaggccaagggtgacccagagaagcctaatggagagtcctactgctaccaaggctcccaagaaagttgctcagaaaaggtgcacctgcggctgggcgcggtggctcttgcctgtaatcccagcactttgggagaccaaggcatgcagatcacttgaggtcaggagttcaagaccagtctggccaacatggtgaaaccctgtctctactaaaaatacaaaaatcagctgagtgcagtgatgctcgcctgtaatcccagctactcgggaggctaagcatgagaatcgcttgaacctggggagggggaggttgtagtgagccgagattgcaccactgctctccagcctgggcaacagagtgagactccatctcaaaaaaaaaaaaaaagaaagaaagaaaaggtgcacctggacctattgaagaagaaaggccccagcctcccctctctgatttccagcctcctacctgccagctgctgcctgggccagaaagaaccctttatctgctaagggtattttggggccatttgggactcgggttcccagctgttggaggaagtccctgaatttcctgaaccaagttgggaccttgtgtcttgctcagcatcactttggggacacagattcccaattccccttggatggcttcctactgcattcaccttcctcacctttcctccaagaagcccaccgagctgagactgtgtgagcaagcgctcctcgctccccagtctcctgtagcccctcgggcttggcttccttccacagcttgctctggagggccccacgaccccacaacaaggactgctgctgtgccttgcacagagcctagggacttccccttctactcttcacagcactttcataccacctgaaacctgccgagggcacccgggggctctatccactgcctgcttttaagagtcccatgaatggctgttttccttggttgctaccagcccatctccccctgggatccagctggctccctggccacaaaatgtgccttccctccacttaagccatgtgtcagctactttcctgggcgccctgggggaattctggttctcaggagtacacagtttcctggggcagagggatgcatgaaccagtcattatggttatgacatgatgagatcagatctagaattgcggcacaaaaaatgacagaaaccactttttgactgggaagagggctgggggacaggagacactgccaggaaagcaacaaggaggaggtggcattggaacaggttaggaagatgatcaggagtctgtgtgcgtcccaggtggaggccagcgtgggcaaaggctggcaggggtgagaaggctgcacatttggctggagtataggtccaggagaagtaaaaaggcacaagggaggagtcagcccctgccaggctgtgagcagacttgtgcacccttgcatttgggtgactctgacccaggggagccactgcaggggttcctttcctgcagaatgggcataaaagtaggaccttgttcatggggttttcatgaggatacaagaaaccaatgcctgaaaactcttagcacaaaataagcactcaaaggtagctgttattgttatcattaaatgaataatataattttctacgtggtcctctgccaaaacacacaccatacttccgcaagggttctctacaggggagtgtcttggtgagatgtgtgtgctagaaaggtctctttggaaatccatggagggaaggatatgagggagagacaagtttccacaacatctatagatttatcctttttaatggatgtgcaatattccattaaatggatgtaccacaatttccgtaatcatttcttgttgtgaatctcagagtatttcaaaaatttataaataatatataaggaaatgttactgtatagttttcttttttctttttctagttttccagttaaattatttccttagtttttcttcactgaggtgaaattactgagccactcacaagtagtacacatttttttttttttttggcttttgctaaaaattgccatactgctttctgaaaagggttgtaacatttaccagcagagtatgaatgagtattctggtctcaccacaactttggggttggatttaccaaaattgtttttataaagcaaaaaaaaaaaaatgatgattgtatagatctaaaaggttatcaaaggttgcttgaatttgcatttctttaattactaaaaaggttaaacttataaaacttgtaattgatttttatttgtatttctccttgtgcaagctattttgatgctgttgttcatttatttattcaaaacaccagcccttctctctctctcttttttaattaaacaaaaaatagagatgaggtcttgctacgttacccgggctggtctcaaactgggctcaagtgatcctccaacctcggcctcccaaagtgttgggattacagatatgagccatgtcacccagctgccagcttttctacttttgtagtagaaagctctggactgggaagcaggtgtcttgcgttcctcctgtccctgtctggttctgtcattatcacaggcaggtcacttccataattgcttacctcattgtttaacatagtcccagctcaaacagcctaagatactgggcctggtacatccagaggagagtctggaagtgggtctcttgggaaggggcatgatggagcagttttcccaagtggagtccagcagccccaggagggttgagcatggagtggtcagttgtggagaccttgctgggaagttcctggtgggaggttatcactcctaccctatagggccttcacctgatggaggcctggtacctcgcaggacagatcaaggtagacacagaagccagagtatccttaggctattctgggctcagggaaaataactggcccacccttaattagagcacctaggactgcctgcctatttctgagccttggctttcacatctgaaaaccaaacaaaatcagtcaaaagaacccttgacctgtggcccacccagcagatgctcaacacagacacacggaatgtggaataaaaggagcaaagagaaaacccaggggatggggaagcactggaagggaaaatcattcaccagcaaatgagaacatagtacgaggaggcttgaatcatttctgttaggagagagtgccagccgcctcctccaggaagaaaactctaaagggtcaggcctcagggaaataaaatgatctataccatccatcagttcctccaacattcagtccatccatctaccaatccacccacccatttacccactcacctgctgctcatccatccatccatccatccacctatgcatccatccatccatccatctatgcatccatccatccacccatccacccacccatttacccactcacctgctgctcacccatccatccatccatccatccatccatccatccatccatccacttatgcatccatccatccacttatgcatccatccatccatccatccatccatccatccatccatccacctatgcatccatccatccatccatccatccatccatccatccatccatccatccacttatgcatccatccatccatccatccatccatccatccacctatgcatccatccatccatccatctatgcatccatccatccacccatccacccacccatttacccactcacctgctgctcacccatccatccatccatccatccatccacttatgcatccatccatccatccatccatccatccacttatgcatccatccatccatccatccatccatccatccatccatccatccacctatgcatccatccatccatccatccatccatccatccatccatccatccacttatgcatccatccatccatccatccatccatccatccatccatccatccacctatgcatccatccatccatccatccatccaccaatttatcatccactcactgattcattttacagcaaatgcttatgaatggggatgggtgggtgatggttgctttttctgcagtctccctaggccagttgtcccttccaaagaatctcaagggcatgggagaaggtcctggctgatcgtgtcagggacaggaaactactcacatttcaccgtttcttggggcaggagtggaggtgggggcattggaacccccttggggcctcctaatatcctgtgagtccccacctccagggccagaagctgcctgcctccgctccccgcagcccaggtgcggcgggcagcacactccctagagccaggaccactagttccgtcaaatccggggcgggccattcaaacagctaagggaggcgtctcctagtgtgccttttcctgagtcatctctgcacgtgtttgcccccttttttcttcgctgcttgtagctaagtgttcctggaaccaatttgatacgggagaactaaggctgaaacctcggaggaacaaccacttttgaagtgacttcgcggcgtgcgttgggtgcggactaggtggccgcggcgggagtgtgctggagcctgaagtccacgcgcgcggctgagaaccgccgggaccgcacgtgggcgccgcgcgcttcccccgcttcccaggtgggcgccggccgccaggccacctcacgtccggccccggggatgcgcgtcctcctcgccgcgctgggactgctgttcctgggggcgctacgagccttcccacaggtaagcgggtgacgggcgcctggggaggtgccggcggtccagagcccggacagtgtggggtgcgtgggacgcaagggaggacactcctcaccccgttccctgcccagctggagtgagggggcgcgggtgacaagcaggaacaccggaatatgctagcacccacaggtgggaggctggctgaagggctagtggtggggggcgcctccttctcaccccgcgatggctgggactgattcattcattcagtgtgaattggactgagagcactgccatacgcgggaggcgctctttagcccgcctacctgcgggcccgtcggggtcctgggcagatcaggtgaggccgtgggagtagtgggcaggccagatggggcctcccttagccatgggaggttggtcgtccgcgctctaccctgttgtgtgcgcggtcccgtttgcccccttcctaagctggccactggctggagggtcaaggaaaggagggagagttggctgtgggtgagagtggggtgagggtgcaggaccaccgggattagcttccccaatccgcgtccggcaaagcaacgctgtggattgaattcgctggagcacgtggtgggcatttgcccctggaagaaggtcagtggtggggctgaagtctatggtgggttgcctcagaattgagtttggggactgctttaggaaaactgagcacttaccagtggccagcgccaaatta

SEQ ID NO: 3566 - DNA, 6000 bp, Homo sapiens
tctgtcgctggatttcagcaggtgtttcagcagcagctgagaccatgggcctgtctagttacatcaggctgccttggagagcaggcagggggctctctcctcatgatgctgactgggaatagccacagttaatgggtttgagcatcagagctccagtccactcaaagtaagtgttcactgaaacccaatgacctttcaaacactgattcaaatactgattaacgagcatgtaggaaccatcataacacatcgcatcatcttccccatagtctccaggctccagctaattcaggtaagagtccagtgaccttccccaaagaggggggttcctcagaaccctacaatgcaagaaataaattaatcctggctttacttttttgtctatttgaggaaaaatctgagaggcgtcacgaacactttgtagaggggagatgtgggtatgtgtgtggggttgctttgtaccacatcaaaaaggggtgcctccaccagggctctgggggtggagaggtgtagtgactgagcataacccacttctaatgtgggccaaattatcctgccccagaaaagcaggaagctttgaagaaggtgcccagtccccaggcaggaggcagtgccatccagaggagagtgctctgggctggaactcgccatctctgtttcctggctgtagctccagccctgcggctctctccatctgtaaaacaaggtagctgggtcagaccagtggtggccagctatgaactggccttcagagacattccgtctggccagcatagcaatccagccacccttcctaggcactcaagaggaatgaaattatacgttcacacagaggcacgcacaagaatactcacagctgccttgttcgtcatagttcaaactggaaacaacccaaatgtccatcaactagcgaacgggtatgtaaacagtggttcatctgtacaacagaacgccatttggcaacagaaaggaatgaagctgaatgaatatcaaaaacattatgcagagtggaagaagccagaccccaaagagtacatactgcatgattctgtcgacatgaaattctggaacagatacactcctctatagtgacataaagcagatcggtggttgcctggatctggaggtgggggcagagtgagtgaggaggggcactagggaaccttctggagggatgagaatgttctgtattttgattggagttagttacctttgtcagaactcatcaggctgtacacacttagggacattttctttttttatttttacttattaaaaatagagacagggtcttgctatgttgcttaggctggtttcgaactcctgagctcaagtgatctgcctgcttcagcctcccaaagtgctgggattacaggcgggagccaccctaccctgccaggggatactttcttgtatataaatgttgccttaggctgggcatggtggctcacgcctacgatcccagcactttgggaggctgaggtgggcggatcacttgaggtcaggagttcgagaccagcctggtcaacatggtgaaaccctgtttctactaaaaatacaaaaattagctgggcatgttggcaggcacctgtaatcccagctactcaggaggctgaggcaggagaatcacttgaatccgggaggcagaagttgcaatgagctgagatcgtgccactgcactccagtctgggcagcagaggaagactcaatctcaaaaaattaaacataaataaataaataattccttaataaagttgatttaaaagaaaaaaactttaaaaattgaggctgtatttaaacattaggcgatttcagttttctcttaaaagcaaaaggtctagcgtcactgtttcaccttcctgggtgaccacagctgttagagacaagtagcaacttctccactttgttttatttattttgagtctttctctgtcgcccaggctggagtgcagtggcatgatctcagctcactgcagcctccacctcccgggttcaaacgattctcctgcctcagcctcctgagtagctaggattacaggtgtgtgccatcacacctggctaatttttgtgtttttagtagagatggggtttcaccgtgttggtcaggctggtctcgaactcctgacctcaagtggtcctcctgcctcagcctcccaaaatgctgtgattacaggtgtgagccaatgtgcctggccagcttttccactttgatcttttgaaacacaaatctgactgtcttagctcccacggtgttgcctcgctggaagccaccagtccctgctggttaactctttcctggagacaccagcctccttggcgctggttctcagatgttacgtcccctctgcagatatggctgagaaggacaccacctttgaggcgccacccctggggacccagccggactgcaaccccaccccagagaatggcgaggcgcctgccaggtgactcccccaccccttctctctgtttggctgctgcaggagggagctgtccctgccatgcccaggggatgcctgggaggcagctgggctgggggtggaggtggggcctgggctgctcttttgttaaatgtgtgcccatctctttgctgacaccattggaaagccagaaggccttgaaacccagtccctgccctcaaaatgcctggcagagactcggggcagaggatctaggggcccaggctctggttgcgcagtctccagagaaagggaattattcctgaagacccacttccctcttcccatcttcatcactcctgccttgggcttctccccgcagcaccagccccactcagagcttgctggtggactcccaggccagtaagacgctgcccatcccaaccagcgctcccgtcgctctctcctccacggggaagcccgttctggatgcaggtaatggtcccagcccactcacccctactcccagcaggggcttcctcctggggaagtgtggattgggggagccaggagggagcttctcctttgtgggtatggtctgagaagggggattaaggttgaccccaggtttctggcttcttgagttggtgctgtggctctggcacttgctagtgactattcttttctttttgaaacagtctcactctgttgctcaggctggagggcagtggcacccatcttggctcactgcaacctccacctcccaggttcaagagattctcctgtctcagcctcccgagtagctgggtttacaggcgcttgccaccacgcctggctaaatttttttttaatttttagtagagacggggttttgccatgttgtccaggttggtctcaaactcctgacctcaggtgatccacctgcttcagcctcccaaagtgctaggattataggtgtgaaccactgcgcctggctgctagtgactattctttaattcttgtaggcaggaatttttttcacagcttcatcctcgtggcttataattgctactcagaaaataggtctttgttgattgatttcatgactttgactagttgttcgagcctttgagcctcagttgtctcatctatacaatggtaatggcagagaccgtgcagggttataagcagtgtagcattgtagacggcctctgtcagagttagctcttaggctggacgcggtggctcacgcctgtaatcccagcactttgggaggccaaggtgggtggatcacgaggtcaggagtttgagaccagcctggccaacacgatgaaaccacatctctactaaaaatacaaaaattagccaggcgtggtggcgcgcgcctgtaatcccagctactcaggaggctgaggcaggagaatcgcttgaacccgggaggcggaggttgcaaggttgcagtgagccgagattgcaccgctgcactccagcctgagcagcagaatgagaatcagtctcaaacaaaacaaaacaaaacaaaacaaaacaaaacaaaacaaaacaaaacaaacaaaacccccaagagttagctcttagggaaagatgccaggttactcattttaggacttgcagttctagtggctgacacgaggtggcagtagtgctccggccagagtttctgaaagtgcggtcccgtctggcagcattggcaccggctgggaacttgttaggaaagcaaattatgggccccatcccagacctagagaatcagaaactgcactttaacaagatctccagggcactcatgtgcacattaacgtttgagaagcacttaactggcatatactactttttaaacatctaaacatggacttcaataaagtgcaatcactagctctatgatctctgtaagtgacaaaagggaaaaacgaagcgagtttagtaccgaggtgtgaagaagtagatctagataggggttaagagcgtggccctgcagtccccccggcctggcctggcctgggctggggctctgccacttactctcagggtgaccttgggcaacttaacgaactttcgtgagcctcagctcccctcatttttaaactgaaggtagtgacggtgcctagggcatagggttggggatcattcattcagggaacgcttgtggggtgtgtttatgtgcagtggggactccatgcctgccctcatcaagcaggtctagagggttggccgggaggggactgggttcaacctcttccttcccctcactgcttggccctccccaccctgactccggccacaccagcagtgctgccagatgccggtcacaccgggccctcgtccacagtccccaaattttggtctattggacctcaattcctttgttctggctcctagacgcctcaatttctcactctctagacacagtttgcccttctctcagccttcaatagttgatcagcttcctggagccaggcgagggagggctggatgagataagagccttggcttggaaaggacctgttgttgttagccatgatggaagctgtgtcccaggagaaggaggaagtcgtctggggctggggctgtcttgtgtggttgcagcaaggcaaagagtgtggggcgtctctgtgttccagggccagtgctcttctgggtgatcctggtgttggttgtggtggtcggctccagcgccttcctcctgtgccaccggagggcctgcaggaagcgaattcggcagagtaagtggctgtgtccttggggccttggggaggacaggttgctctctgccagcctggcctgggttctttccctgcctgctcctgctctctgaggccgccacccccagccttcctcctggtgtcgtttcagagctccacctgtgctacccggtccagacctcccagcccaagctagagcttgtgggtgagtgtccagccgtccaaaggggctgcccgagccagaggaacacagggcagctctgggcccggggcgtgggctccagagactgaacttctaccccagcctcgaagctccctgtctgtggctcctgtcgcattctgtacatctgtagggatgcaatgtgggtgaaaactcatgcgtgtggagaatgcaatgaggtgaagactgtactgggtgtgacgactgtgtggcttgcccagagcagcacctggatggatgctggcatgaacgtttaaaagtctatcttgtctgtcactttttcctccagtacccccagggggcattcctgccagccttgccttcctctctacattctaccctccctttctccctctccctccttctctttctctttcccctctctccccctcttctaccacctggcaagtcagcccaggggcaggaggggaaaggagcacatggggcaagagggaccctggttctgccacttacaagctgtgtgaccctgggtgagttactgaattgtcctgtgtctcagtttcctcatccggaaaatgcagatggtagaatctacttcagaggcttggcctgtggattcgtcgaggtcgggctgttaagcgcatcgtggagtacctgcctgcaatcggtggctgctgcctattgacaggctggcctgtgcctggggctttttccttcctgg

SEQ ID NO: 3567 - DNA, 6000 bp, Homo sapiens
agccttaagcagggaaggagtagggttcccgctgtccaagcaaccctgtaagatagattcccactgggaccctgaggccaggtcagaaggagttggctttgtggctggctctgaaagctcactccaaaaagaatattgcatggagacctccccatggtggaaagagcccctcccagcacaaccacagctcagccttccaaactgccctcagccacacacagcacctgctgcacctcaaccctctgtacggtttctcagcaggtgcccctcagtcactgaggagtccattaaaaagccagatattaggccctcaacagacatgggcgtggggcccaggactctgcatgtttcacaagccttccagatgattcttatgctggttgaagctggaaagccactcctccaaaagatccactagaatgcccggtacacagtaggtgttcaataactgtcagtggacagaccggctgtcctcgcacacgtggcctgcccgtggccctgccttcttccaccctcgcttgcaggagtgcagtcatccacctactggggtgggagatgtcaggggacctctgagggctgtagactgagctgggaagtgaggagaggctccagggagtgtctggccaagagctcagattctgcacatgcagcccctgagttgaggacctgagggccacagttccatctctgcttgaagactgtgttgtcaacaaggagcaaatggggacttttctgcgctgtggggctgggagtctaccagatgcatggcttgggagtctgggttgggtatacagggcctaggagtgattgggctggactgggttcctgagccttgacccggacatccatgtacccattcattcattcattcattcattctctcaagtcttcatcccttcatcgcctcctgcgtacccttcatcctgtatttggtccttattcacttcaactttatcaagccccccgttaggtatctcctgggccagaacatacaggagatgcacaagaagggactcaatcaagggaaatagagggaaccaagagcaagtccccctaccctcgggtatcacacagttcagcagtgtgagagctccatgctgagaagagccccttggctatggagaggccaccaaaccaggtttgaacccgctgtaccccgtattagctggataagcataccataaagcttgccccccacctggtgcaagataaagtgtgtaagtcatctttccataaccgctagtatcacaattactaagagaggcgagggccgtgtaagcaactaataccggagtaagtgttatgctaatagtctgtagacgtaccatgttatcctgcccagcttgctggggtgtggtcaagggtggtttcacaggagagcacgagtggagctgtgactggaaggacaagtaggtgatcaccaaacaaacaaagaggaaaacacacctcaggcagaggaacctgcatggacaaaagcatggaggtgggaactcagggttgctccgaatgcccagggagttggcctgtagagctggggttcgtggtggggctctgcctggtgggccagctgggccaggacatgaaggcctccagtgtcttgtggaggaggctgaaatcagttctaaaggccatggagagccatgggctaggttgcttctcaaccttggcgttctggacgttttgggctggataattctctgtggatgaggctgtcctgagcgttgtgggatgtttggcagaatcctggcctctacctgtgagatgccagcagcacctctccctgccccctgcagctgcgaccacccaaaatgtctccagacattgccaaatgtgctggggagggagagggggtaaaatgacctctgggttgagaaatcctgggctaggagagtggcatgagtggctaatgctttgcagggctgggcctgaccactccacggaaaggcagattcggggacagagcctgaaggccagagcctcatcgggaggcccagagcatcatgggtgggagatagagccagggctgggctgtggggcagaaggagagagtccaggccctccacactgcctctgctgtccctgagttttaccatattccccagtggcaggtacaatatggtgagtgtcaagatcaatcccccccccacccacactgaagaaaaagtcccggaccacgtgtgcaggtcatgtggagagacaaactggttcagccagaactggccatcgccacctccagcctaaataagatgtggggttggagaagccaagagagaggattttggggaaggagtcaccattgggctgagtgccccctgctgccctttggagcggagagggcacttcctcttaccttgggccaagcaggaggggatacgagggagccatctgggggcttcatatcccaggagtttaaggaccataacacaggtggaagattcttgtctattttgtccactgctgagtccccagcactccagggctggcacacagtaggtgcttaataaaggagcctgtggctggatggacctgagccagcattgctggagtgagccagggtgcacggagagttagctgggctgctattggtgcgcagcaaagggcaggcaaccatggaccccagcgaggaggccagcctgaccatctccatcccaaagtgcttcctagtaggtaaggcggcctcagcaggagaagccaggaggacaccatcctgtaggagctgaaggggaggtggtgaattgtggccagcaggaggtgcaggcatttcaggtgctggggagctgtggccagtggagtcagtaagaaggtctccaagaaacctgcactagagccccagagagaatgagctggaaactgtccccaaagtccccagtgccagatgggtgacaactttggctgccatggaacactgtgccctttccttcccaaaccctcacccctgggcctgaccctggagtcaagaactgcacttggcagagttcagagagaagtcgcctgctctcaagcctgggtcggcctggagaaggggagaagccccatgttgcatagagattaagcttgaattcgttcccaggatgggacctaagcctgggaggatccccaccttcaggaggtgatggtgccattcactgggatagggaaactggcaggaggagccggttgttgagggttgggggtgcagacagtctgttggtcccattggtcttgaggtgtgtgggggacaactagagagaactattgtcccctgcttccacgaggtgacatctccctcctgccttcagctctattttagggatcaaggagtccttggagctgctcctaggcattctcataagggccagaagagctctgcatgtctgtccagcggctctgcagagttaaggctgtgggtcataccagccacaccctcagcgtggtccatgtcacagaaacatgtggaaaccaggtgatttcccagcctcctggtcaggaggtggggttttccatccccagggagtcacttcccagtttctcactcagcactcagcacctagaagcaccatccttgcaggctccactgtggggctggtggccgggagcaagggtctctgtacctcttcaggcagcctgcagtgaggaaacagggaacagaatagcctcctgccacccagcccaccccaacccttagaaatgccctatgtgctgggggctaggacccccgtaatccagggctggaggaatgtgctctggccccgcagggctggccctgtattagggctggcactcaaagtggggatggggggacagattgcagctggaatgggtgctcggtcatgatgtaaatcctggggaagccagctctcctgggcctggtctcagcagcccctcagggccctgcagcttccctggtgacattctctcccagcctctgttcatctgccccctgcctgggcaggagacttgagcagggaagtgcagagtcttctccctgtgagaaggctggatgcgtgtttaaggataaatgaacacgcgaagagtagtaacaacagccaagatttataaatgcctattgttatatatgtagatacttacttaagtatatataaagtacagactgcattatgtatattacatatctttaaatttttagaatagtcctatgaggtcagttcagagatccagacccaggtggtctggctctagagtctaaacaggccgagtgcagtggctcacacctataatcccagcaccttgggaggccagaggcgggaagatcacttgagggtgggaagaacacgtgagctcaggagttcgagaccagcctggacaacatggcgaaaccccatctctataaagaaatcagcctagcatggtggcccgagcctgtagtcccagctactcgggaggctgaggtgggaggatcgcttgagcgcaggagttggaggctgcagtgagctatgggtgaaagagtgagaccttgtctcaaaaaaaattaaaaaataagaattaaatatatttaaaatagagtctaaataagtgaatgatctagaattctcttggttcccctaaagcagctgtcagctttgggggatgtttttccaaattagtgcctcaccctcacgggacagggaagcctgtgggagctgggagggcaggtggaggccgggcaggtggaggccgggcaggtggagatggtgattcgaagaggaggggacgataggaggaggttgaggggtcacccgagtgctgggagtgacgctggaggtatcggcccagcgatgctggagtggtcgggtcggaggcccagcagcgtctggggaggggcgtgggggaggcgtgtccaaggccggctggccccgccccgccccgccgcctggcctctggcccgctggggcgcgggctttcgctttcagtcgagggctagcgagcgcagcggagcctggagagaaggcgctgggctgcgagggcgcgagggcgcgagggcagggggcaaccggaccccgcccgcacccatggcgcccgtcgccgtctgggccgcgctggccgtcggactggagctctgggctgcggcgcacgccttgcccgcccaggtgggtgactcgcgcggcccacgggggacagccgccccgcatgtccacccggctggtgcgcagccttcgggtgcccgggccgcgctctcccggggcgctgtcacgggctgggaggctgggagtcccagtcgccgccccccatccgcatcagacacgcgcgcctctggggacccgctggggactccgggcccggcacacgtgcgctcggggcacaactctggcccccgaagcccctcttacccgcgtcgtgacaggggcgcaccctggttcctccgcgagcgcaggccggggcatttggggctgagcagcgggtcctgggcagacccccgctagacccgggacccctcttccctcaccccggcgactgccgcgacagcccttccctcccacgcggtggagaaggggctgtgccggggcgctgccccactgcccacgccgggcaccctcttcaaaagacttccttttcctctgggcgacggttttccgatttcttagaaataccagggtcctgtgtctgaagagcaggaccaggtgtgtgtcaggtccactgagggcacagctggagggcgagctgcctgtctgcttcctccgatgcgtccgggggctactgcagagtctgttttctgcggcctctggggacagggcaagcgagggaggtctgggctggtaatcgagcaaggcaaatgaagtctccgggggccgcaggaaaatggagacagcagaaaccctagggctcctattcaatatgaacgtcactcccacagtagcaacgggcgtacaagggactgtgcaccctttgcctgtttttgactgtctcctggtctggtaacataggataaccccatttttgttttactgtctccatggtttggtaagataagataaaccattttttagagaaggaaaactgaggctcagagaacttgtatttcat

SEQ ID NO: 3568 - DNA, 6000 bp, Homo sapiens
tttttttcttagagacagggtcttgctatgttgtccaggctggtctcgaactcttggattcaagtgatcctcctgcctcgacctcccaaagtgctgggattataggcatgagccactgtatctgaccctacaaagaacatttgacatttttccatggggccaaggacccatggagtccttggggcctcattcctgctctcccgtccaggccaagaccctctgcaatccttgacagcacaggctccgtactgtggaactcacagtgcatggccaccttctccttctgagtcttctgagtccaaaatggggcccaaggtttcctgagcccaccagcagggaggaagaggctagaggacacagcccaggtggatgggctcaaagtcagaacacctgtttctggtcctggatgttctgctgacttgctgagtggatctgggcaaatccttttttcctctatgaaaaaggataatatagctgagctcagtggctcatgactataatcccagcactttgggtggccgaggtgggcagattgcctgaggtcaggagtttgagaccagcctggccaacatggtaaaaccccatctctactaaaaatacaaaaattagccgagcgtagtggcacatgcctgtagtcccagctattcaggaggctgaggtgggaggatctcatgagcctgggaggtggaggttgcagtgggcggagatcgcgccactgcactccaacctgggtgacagagcgagagtccacctcagacaaacaaacaacccaccatagtaactaccacttcctgagagccaagcgtgtgccggctctgtgcctcacattcacgtctctcagtgaattctgggtgatcctggggatgggtcctattacaattcctgttttccagatgaggaaactgaggctcaagagatgcattactggagtaaggtgagaaagctttgtgctgaatcctggatttgatccagggcatctgactccagcacctttcctgagctatatatatgaaacctccctgaaatagctttcattttatggagcacgtgctattttccaggaactgtgccgagagctttgcatccatttatctccttgaatccttgctccatctcattataatctcaccttaagtgtcacctctttgcgacgttttctgaggcttctcagtgagttcatacctcccccatcacatcgccccctctggcttagttcgttcataatactttttctcctttttttctttttttttttctggagacagagtctcgctctgtcacccaggctggagtgcaatggtgcgatctcagctcgctgcaacctctgcctcccaggtagctgggattacaggcacgcaccaccacacccagctaattttgtatttttggtagagatggggtttcaccgtgttggccaggctggtcttgaactcctgacctcaggtgatccacctgcctcagcctcccaaagtgctgagattacaggcatgagccaccacgcctggcctctcctttttttcttttaaataaatattattatgatgattatttttcgagacagaatctcactccatcacccaggctggagtgctctggcatgatctcggttcactgcaacctccgcctcccaggttcaagcaattatcctgccttagcctcccaaatagctgggattacaggcacgtaccaccacaccgggctaatttttgtctttttattagagacggggtttcaccatgttggccaggctggtcttgaactcctgacctcaaatgatccacccaactcggcctcctaaagtgctgggattgcaggcgtgagccatcacgcctggctcttttaaataaatattaaacaactgaacctggaaccttcagaacacattggttatgtgagatccactcatctgtttatctgttgcacaatctgcctgggtgtggcagaacataagctccttggaggctgggaccttattggtctagtctgttgttgtgtcctcaacacctctgtgcatgtctggcacataacaggcacaataagtatttgttggataaatgaatgactccagacaacaaatctatggagtacatagcactactaactgcattttacagataaggaaaccaaggcccaggtgtgaaacaactagcacagagtcagagggcgatgcaggaacaatgtaaaccctgagcctcccctgatgagtccgaatggctcctcccagctccatacctggaggtgtgaacgctctcatctttatcataaaaagagagggactgtgtaccaaccctctgttcagtgggctggactgggaagacaggccttttgcttgttttcattctatttctccagcgagagtgcagaggtttggacccccgttgaggccagactgacaggattagaggaaacagctgggctgagtccgtgccctgcaggagggagctcacattcccggactctgggagagagcagctccccacagctcagtcacattccaggtcggtcattttcctgagcccagatgtttgctaatgagctggggagaggggcttttagccctgagccccagctctgggccccacattacctcggccccaagaggctggcccagggccaggaggctctggcctcaggcccatgccctgtgccagccaggcctgtaggggcagctggaacaccactgccaaccaggtgcatctgctcgagctgggacactctgacgtgacaggttctgcctttcccgctggggcccctggggtccatcttcagtgcagcatccctgctgcagcctgatggggaggagcactgaggcagccgagagggtggagagggtgtggtgggcaaggaagcatggactttggtgttgacaggtctgggctcaagtccaggctttgttaatcactagcaatgtggtcttgagcaggtaatgacacattttggtgcctcgatttttcttacctgtaaaatgggaacaatgatgggactgtggtaaggattagaggagatgaagcagacagagtgaccagcataatgcctggcacaaaatgggtagatattactaccaagttacttcccaggccccctgcccacactgtagctttcccgtcaccagacagatggtgactcaactccaaaccctttgtccctgattagggggttggtgttgttcttgaacctcccggtgtttgagagatggtgggctgccctgtcaagggcactggctggaagttgtggcttctactcctggctctatgtgtgatctgaccagctcatcaggctccacaattagctttctgcaatgtgggagtggattcttacaaaatgtagaactctactttctaccctgctcggggtctgcatgaaagatggcgggggtaagctttggctgcaaaatggtaaatatttcctgagtgtctactgtgtacagtgcagtgaggctggtttctgccgtacatggtatatagttatccaacagacactagctggcatgggctcttactgtgtgactttaggcgagttacttaacctttctcttgacgttccttttttcactttttttttttttttttgagacaaggccttgctggagtgacaagctcattaggttccacaattagccttctgcaatgttgtccaggctggagtacagtggcacaatcatagctcactgcagcctcaaactcctgggatcaagtgatcctccagcctcgggatttttttcacttttattattttatttgtttgtttgtttatttatttatttatttgagatggagtctcactctgcctcccaggctggagtgcagtggtgcgatctcggctcactgcaacctccgcctctcaggttcaagtgattctcctgcctcagcctcccgagtagctgggactacaggcacacgccaccacacctggctgatttttgtatttttagtagagagagggtttcgccatattggccaggctggtctcgaactcctgacctcaagtgatcctcctgccttggcctcccaaagtgctgggattacaagcatgagccactgcgcctggcacttttaaaacagagacaatacttacctcataggtttattgtgagagtggcaacagcttgcaatgggatgaggcacatggtaaggtgctcaatatgtgtgaactattataacggtcatagttaccattaagggaagacctatctgtgctacattaatgggggataataattactttattcgctgggcgtggtggttcatgcctataatcccaacactttgggaggctgaggcgggaggatcacttgaggccaggagttggagaccagcctgggcaacatggcaaaaccccatctctactaaaaatacaaaaactagctgggcgtggtggtgggcgtctgtaatcccagctactcgggaggctgagaattgctggaacctgggaggcagaggttgcagtgagccgagatcacgccattgcatttcagccagggcaacaagagcaaaattctgtctctaataataataataataacaacaacaacaacaacaacaacaacttcattcaaccaaatacattgtacatctcacctggcctgcccataagcaatggagacactgaaataaacacgattcctgccctcaaggtctaatggaggaaagagatgtacacagctattctagagggaaattgacatgaacagaagttctcatcctgtgctccaggatcacactggaggagggagatgctcccagagggtcttgggaaggctttccaatctggagctggaagaatgtttgcccaagagatgtacacagttattctagagggaaattgacatgaacagaagttctcatcctgtgctccaggatcacactggaggagggagatgctcccaaagggtcttgggaaggctttccaatctggagctggaagaatgtttgccagagatgaaaggaggggaagggaattccgggcagagggaagggcgcaggcaacagctaggaggcgcagatgcaggctgggtgtggagggtgcgagtaggctggagtacaccagggagttcccagcaggccactaggagccacccaggatgcccggcaacctcatgagtcagacaagcagggctgtgtctatctggaagtttccagccaagctaggtaaaacacatggacacaggtaactatgctgtaaagcaaaatccccaagtcctacaatcgtgtcccagtggtgtccctgggccaccactttccagaagcaaagttattttctcaccccgttgttaagcacacagaatagagaaggtacggccgcaatccacccaagtgcccactgattagataggaacccccgaggtgaggctggaagctggggccaggagctccactcttcccaggagtcagagaagtgagttcatttgctggctttttagttcctaataagtccctggggcttttcgggatgcttaagccaagggcgtggggccgagagcgacactaggataacactaggcaaggctgagcaacccaggctaccaacagcacggacttgaaccgggtcgcatgccggagcggacgggatgaggtgcaccgcagaactggggactcctggtgccgggacgcggcgggctggggcgccccactctcggggcaagtctgcaatgcccggtgcccacaaaaaggacacatccatctttgtcaccccgaggcctggcacggcctgacggcccaggctcggtaaaagtcgggcggagagagtggaagcgcagagaaacccggggagggcgcttaagaacgggccagggcgcccggctgggctgccctgcctctcgggcgccggccaggcgtcccggccgccccaccacgccgtcggagcgcgccgaagctcagcccggggcgggcgggccaggagagggcccggggcccctgccgccgcggcgccccctcctgcgcacccggagggagaggccgcgcgcgcccgcccgctctttctgcgcgcggccctccccgctgc

SEQ ID NO: 3569 - DNA, 6000 bp, Homo sapiens
tttgaacctggagggtagcaggttaacccccagctacccttgcaggtcaaaaggttcaccgaagagaaagaagcaagaaacgatggaatctggagtcaggatgaggcctggagctcccaccactgccccagccgactgcgcctctcattcctgttaacaccctagcgttcagccactgcctggactggaagcttgggggctccacagaccagagttcaaatcccattcctgactccctagccaaccgtcttgtggccatggctgaccctggctcttggagccctggtaaaggtatgtgtgacacgatcctccctcatgggggcgccgtgaggctttaaaggaggtgtccttggcacaggtgagtgtcttcccaaccccacccacccgccactcccaaatccaagccctccacttcctcagcggccctctgccaatgcctggtacattctgagctgccgcccacacagaaaggaaattccccaggaggtgacaacagcagacccattttggcaccgtggaaactgaggcacaggtcaaggaagtgacccacccgtagctcccactccggggaagagggcagggaacaaacacagcagccctgccctggttgctttcctgaaagtcttggtccagagggtcccccaggaaggccagctccggggtcaggcctgtgacacctctttcctgagatgcctgccaaaactgagacgccggggcccggccctcctcgtgtgaccccgccaggtatgaggcacggcctgggcacctgaatgtgctccccacgggactctgaggcccagccaggccaggagcaacggcctcccagcccccaggaaaggggcttcgattaacaacgctgccactgaggccccccagcccactgcctggattccggtacctggaaaggcatcctaaatgcaccctaaatacacaggagtggcctagatttcaaggaacacttacttcttcctgactcccgcccaccgtgaaaccctttgtagagtggattagctttggtataacaagtgaaccatcctccccaattcctcttctgggttaagtctgaatattcaaggtcactcaaggccagatataccaggattttcaaggtagagtgtatccactcaccccagacccacacacacacaaaagcaggcataccccaaaccacctgtgccccctatgaacgcagaacacacagacgcatatataagcatgcctatatatgcacaagaaaatgtacatccgcacaagcacgcacacacacgcgcgcacacgcacacacacacacacacgcacacacacacacaccaggcctttcctgttaccggttccagcaaccactcggtgcagagccgtggagggcagggctgacaaatcctcggtggaaagggcagggctctccctccccatcttcacctcctgcttccagaacctcctcggggaacctccccacacttggccccagctgatggagacggacgattctacctgtgggctcagcattcaggtgacaccacagtccgcatgcacaacgagcacgcagcgtttgtggctggtggctttcaaaccagatgctccccctcccctgcctctcccacctttcctctccccccacactcactaagggcagggtctggctctcctcctccattctccacaattatgacagactggggttcaaatcttagctcagccattctaatctttctctttttatctttatgtttttatttgtaacaggatctcactctgttacccaggctggagcgcggtggcacaatcatagctcacatcagcctcaaactctggggctcaagtgatcctcccacctcagcctccagaatagctggtggtacaggcatacaccaccatgcccagctaatttttttgtattttttgaagagacaaggtctccctttgttgaccaggctggtcttgaactcccacttcagcctcccaaagcactaggatcacttggccccattctaacctttctgtacctcagtttcctcatctgcaaagtggggacagtgctaatatccagctcacaggacagctgtgacaattaaactgaagaatacatggaaatctctggagagatcgcccatcatagttaattcctcagtccatgtcactttaagtgctagcttgggcctcttatcctccctggcctctgcctgctcccttctgcccctcgctcccacaggatcctcggcaggtcctgaggctatttcagtctgagctgcatctgccccagtgaaactggatttagggaaaaccttgaggtgaaactccagcaagtgggatgacagctgggaatggattttagaaattgtcaagggccacccaacatgattccctatctaaggtgggaactgagaggaagatcccactcagactctaagacagggtcgtggagacaccagcctcctccagaatccaacttcaagaaaacaggctgtgccccactgccaggctgagcatgctgctgggtgcagagggtgtggagggtggctgggctgcagccctaggcttggggcttggcaagggcggggcgatcgctccaggtcttgaaatgagcacagggacttccttgaatggtgcaactgaaattgttgctctgtgaaggggcaaggcagtgtcaggcttggggctccctgctcacccaggtcaggccccggctctggtcagcccaaccgggtttcctgggctcactctggggtttgaggatgagttctggccaaagctcatacattggctttctgtgtgcctggagtcaggagagtctaatggttatagctcgagccactgaccatttgcttcccccctcagcttcacgtttgcatctgtaaaatgggcagcctggcctgggaacgtccatttcagcagatcccccagggaggagcctggctccagcatactgcttaaggccgctgtgattccacgaccccagtctcacggcagggtggcttttccttccttccttcagcactggggagagcatgagtcaactgtccagagggcggacacacagggccgaccccgtgccacccaggcctgcctgcatcttccagccctgaccacctctgtgccagcccccaaacccaggccacggccctccttaccgcagaccctcctgcccgcaaacgaaaaacagtctccaaaacaaatccatgctaatgagctgctgcagggccaggctgcacatctgctcagcagaagttccactgcagacctcaccaacaaccctgcccgctccggcagcctccgacccttgaggttgtgggtggggggaagcagctaaactcagcctgaaatttcactttaaaataatgaggcgatatccctggccgatgcagaacacctactcccctgtccacccctccaaaacacaggcccgggagagaggtccagcttgcaggggtgggtggagaggggtaggggtcaccgaggaaacgctgcagcctcgccttttctttggccccaactcaaggcaaaccacgcccaagcagccccagcatctgggggagtctagggaggccccattccgcagtaacaaagggtgaggggctccttgttgacaaattgcttccccgccagcgcccggtctttggcctccagccctgacctctgttttcctggggtgcccctagttacaggctggtggcgtccagcttggggagcgagggcctccgaaagcctggaagtgtggctttctcccttgatgcccgccaacctccggccacgccaaggcaggcggctgccccctttgccgccgcttgtaaacgatcagaatcgccccgccctgggagcgggccgggcaggtggcccgcagcagggcctgtcgtccagccggcctcgcgggggtggaattcttaagaaaactgagcccccggaaaggctggctctccctgccccagactcaattccagggagatgacccgggccaggcctcggggccggcgggaggcagggggagggtttgccgcacccggtctaggaaactattcgtgaaccccgctgggggaaggcgagcctccgacactgggggattgtctggatcggagggcgggggatcagggagaggcgcagacacagggcgagacccccacagagggcagcgcagagacagagagagggagagaaaagccagaggcagagacacaaacgcgggcagccgaacacggaggcaggcggggaacggaaagagacgggcagaccaggggaaagtgagcggcggaaacggagcgacggagagacagacacacggacgtggggaccgaagcagagggggccgcgggaggcggaaacgtccagagccgagaggcgcggcgcggcgaggcccgggcacggccgggggacatgcgagcccggcccgcccggccacgcatctccctccctcgctccctctctcccccggccgcggaaactccgatccagaaacggaaccctggggcgagtctggggacgggctccggacgcggcggtgccccccggccaccccgtgccgcgcccacgtccccagcgccggcgtccggaggcgcccgccaggtcccccagggctcctgagctcggcggcggcgcctccacccggtgcccgcggccgccggacgcgccgggggacgcagctccgggctgggggcgcggcactgcccccgcggccgaagcctctggaagccgggcgcccgcgtgccgacccgggcgggacttaccgcgcgcgcccgccggtcctgcggagctgggtgcgggggtcgcgggcccgggcgccccaggaggctcggcgaggcggccggcagggcggggggcggccccgcgacgctcggctgggctgcgctgcgcgctgtctgcggccccgggcgggcgcgcggcgcgggggagcggctccgacgtcagggtggctccctccaaacagggcgcgagggcgggggcagcggggagggccgcgcgcagaaagagcgggcgggcgcgcgcggcctctccctccgggtgcgcaggagggggcgccgcggcggcaggggccccgggccctctcctggcccgcccgccccgggctgagcttcggcgcgctccgacggcgtggtggggcggccgggacgcctggccggcgcccgagaggcagggcagcccagccgggcgccctggcccgttcttaagcgccctccccgggtttctctgcgcttccactctctccgcccgacttttaccgagcctgggccgtcaggccgtgccaggcctcggggtgacaaagatggatgtgtcctttttgtgggcaccgggcattgcagacttgccccgagagtggggcgccccagcccgccgcgtcccggcaccaggagtccccagttctgcggtgcacctcatcccgtccgctccggcatgcgacccggttcaagtccgtgctgttggtagcctgggttgctcagccttgcctagtgttatcctagtgtcgctctcggccccacgcccttggcttaagcatcccgaaaagccccagggacttattaggaactaaaaagccagcaaatgaactcacttctctgactcctgggaagagtggagctcctggccccagcttccagcctcacctcgggggttcctatctaatcagtgggcacttgggtggattgcggccgtaccttctctattctgtgtgcttaacaacggggtgagaaaataactttgcttctggaaagtggtggcccagggacaccactgggacacgattgtaggacttggggattttgctttacagcatagttacctgtgtccatgtgttttacctagcttggctggaaacttccagatagacacagccctgcttgtctgactcatgaggttgccgggcatcctgggtggctcctagtggcctgctgggaactccctggtgtactccagcctactcgcaccctccacacccagcctgcatctgcgcctcctagctgttgcctgcgcccttccctctgcccggaattcccttcccctcctttcatctctggc

SEQ ID NO: 3570 - DNA, 6000 bp, Homo sapiens
ccatcacatcgccccctctggcttagttcgttcataatactttttctcctttttttctttttttttttctggagacagagtctcgctctgtcacccaggctggagtgcaatggtgcgatctcagctcgctgcaacctctgcctcccaggtagctgggattacaggcacgcaccaccacacccagctaattttgtatttttggtagagatggggtttcaccgtgttggccaggctggtcttgaactcctgacctcaggtgatccacctgcctcagcctcccaaagtgctgagattacaggcatgagccaccacgcctggcctctcctttttttcttttaaataaatattattatgatgattatttttcgagacagaatctcactccatcacccaggctggagtgctctggcatgatctcggttcactgcaacctccgcctcccaggttcaagcaattatcctgccttagcctcccaaatagctgggattacaggcacgtaccaccacaccgggctaatttttgtctttttattagagacggggtttcaccatgttggccaggctggtcttgaactcctgacctcaaatgatccacccaactcggcctcctaaagtgctgggattgcaggcgtgagccatcacgcctggctcttttaaataaatattaaacaactgaacctggaaccttcagaacacattggttatgtgagatccactcatctgtttatctgttgcacaatctgcctgggtgtggcagaacataagctccttggaggctgggaccttattggtctagtctgttgttgtgtcctcaacacctctgtgcatgtctggcacataacaggcacaataagtatttgttggataaatgaatgactccagacaacaaatctatggagtacatagcactactaactgcattttacagataaggaaaccaaggcccaggtgtgaaacaactagcacagagtcagagggcgatgcaggaacaatgtaaaccctgagcctcccctgatgagtccgaatggctcctcccagctccatacctggaggtgtgaacgctctcatctttatcataaaaagagagggactgtgtaccaaccctctgttcagtgggctggactgggaagacaggccttttgcttgttttcattctatttctccagcgagagtgcagaggtttggacccccgttgaggccagactgacaggattagaggaaacagctgggctgagtccgtgccctgcaggagggagctcacattcccggactctgggagagagcagctccccacagctcagtcacattccaggtcggtcattttcctgagcccagatgtttgctaatgagctggggagaggggcttttagccctgagccccagctctgggccccacattacctcggccccaagaggctggcccagggccaggaggctctggcctcaggcccatgccctgtgccagccaggcctgtaggggcagctggaacaccactgccaaccaggtgcatctgctcgagctgggacactctgacgtgacaggttctgcctttcccgctggggcccctggggtccatcttcagtgcagcatccctgctgcagcctgatggggaggagcactgaggcagccgagagggtggagagggtgtggtgggcaaggaagcatggactttggtgttgacaggtctgggctcaagtccaggctttgttaatcactagcaatgtggtcttgagcaggtaatgacacattttggtgcctcgatttttcttacctgtaaaatgggaacaatgatgggactgtggtaaggattagaggagatgaagcagacagagtgaccagcataatgcctggcacaaaatgggtagatattactaccaagttacttcccaggccccctgcccacactgtagctttcccgtcaccagacagatggtgactcaactccaaaccctttgtccctgattagggggttggtgttgttcttgaacctcccggtgtttgagagatggtgggctgccctgtcaagggcactggctggaagttgtggcttctactcctggctctatgtgtgatctgaccagctcatcaggctccacaattagctttctgcaatgtgggagtggattcttacaaaatgtagaactctactttctaccctgctcggggtctgcatgaaagatggcgggggtaagctttggctgcaaaatggtaaatatttcctgagtgtctactgtgtacagtgcagtgaggctggtttctgccgtacatggtatatagttatccaacagacactagctggcatgggctcttactgtgtgactttaggcgagttacttaacctttctcttgacgttccttttttcactttttttttttttttttgagacaaggccttgctggagtgacaagctcattaggttccacaattagccttctgcaatgttgtccaggctggagtacagtggcacaatcatagctcactgcagcctcaaactcctgggatcaagtgatcctccagcctcgggatttttttcacttttattattttatttgtttgtttgtttatttatttatttatttgagatggagtctcactctgcctcccaggctggagtgcagtggtgcgatctcggctcactgcaacctccgcctctcaggttcaagtgattctcctgcctcagcctcccgagtagctgggactacaggcacacgccaccacacctggctgatttttgtatttttagtagagagagggtttcgccatattggccaggctggtctcgaactcctgacctcaagtgatcctcctgccttggcctcccaaagtgctgggattacaagcatgagccactgcgcctggcacttttaaaacagagacaatacttacctcataggtttattgtgagagtggcaacagcttgcaatgggatgaggcacatggtaaggtgctcaatatgtgtgaactattataacggtcatagttaccattaagggaagacctatctgtgctacattaatgggggataataattactttattcgctgggcgtggtggttcatgcctataatcccaacactttgggaggctgaggcgggaggatcacttgaggccaggagttggagaccagcctgggcaacatggcaaaaccccatctctactaaaaatacaaaaactagctgggcgtggtggtgggcgtctgtaatcccagctactcgggaggctgagaattgctggaacctgggaggcagaggttgcagtgagccgagatcacgccattgcatttcagccagggcaacaagagcaaaattctgtctctaataataataataataacaacaacaacaacaacaacaacaacttcattcaaccaaatacattgtacatctcacctggcctgcccataagcaatggagacactgaaataaacacgattcctgccctcaaggtctaatggaggaaagagatgtacacagctattctagagggaaattgacatgaacagaagttctcatcctgtgctccaggatcacactggaggagggagatgctcccagagggtcttgggaaggctttccaatctggagctggaagaatgtttgcccaagagatgtacacagttattctagagggaaattgacatgaacagaagttctcatcctgtgctccaggatcacactggaggagggagatgctcccaaagggtcttgggaaggctttccaatctggagctggaagaatgtttgccagagatgaaaggaggggaagggaattccgggcagagggaagggcgcaggcaacagctaggaggcgcagatgcaggctgggtgtggagggtgcgagtaggctggagtacaccagggagttcccagcaggccactaggagccacccaggatgcccggcaacctcatgagtcagacaagcagggctgtgtctatctggaagtttccagccaagctaggtaaaacacatggacacaggtaactatgctgtaaagcaaaatccccaagtcctacaatcgtgtcccagtggtgtccctgggccaccactttccagaagcaaagttattttctcaccccgttgttaagcacacagaatagagaaggtacggccgcaatccacccaagtgcccactgattagataggaacccccgaggtgaggctggaagctggggccaggagctccactcttcccaggagtcagagaagtgagttcatttgctggctttttagttcctaataagtccctggggcttttcgggatgcttaagccaagggcgtggggccgagagcgacactaggataacactaggcaaggctgagcaacccaggctaccaacagcacggacttgaaccgggtcgcatgccggagcggacgggatgaggtgcaccgcagaactggggactcctggtgccgggacgcggcgggctggggcgccccactctcggggcaagtctgcaatgcccggtgcccacaaaaaggacacatccatctttgtcaccccgaggcctggcacggcctgacggcccaggctcggtaaaagtcgggcggagagagtggaagcgcagagaaacccggggagggcgcttaagaacgggccagggcgcccggctgggctgccctgcctctcgggcgccggccaggcgtcccggccgccccaccacgccgtcggagcgcgccgaagctcagcccggggcgggcgggccaggagagggcccggggcccctgccgccgcggcgccccctcctgcgcacccggagggagaggccgcgcgcgcccgcccgctctttctgcgcgcggccctccccgctgcccccgccctcgcgccctgtttggagggagccaccctgacgtcggagccgctcccccgcgccgcgcgcccgcccggggccgcagacagcgcgcagcgcagcccagccgagcgtcgcggggccgccccccgccctgccggccgcctcgccgagcctcctggggcgcccgggcccgcgacccccgcacccagctccgcaggaccggcgggcgcgcgcggtaagtcccgcccgggtcggcacgcgggcgcccggcttccagaggcttcggccgcgggggcagtgccgcgcccccagcccggagctgcgtcccccggcgcgtccggcggccgcgggcaccgggtggaggcgccgccgccgagctcaggagccctgggggacctggcgggcgcctccggacgccggcgctggggacgtgggcgcggcacggggtggccggggggcaccgccgcgtccggagcccgtccccagactcgccccagggttccgtttctggatcggagtttccgcggccgggggagagagggagcgagggagggagatgcgtggccgggcgggccgggctcgcatgtcccccggccgtgcccgggcctcgccgcgccgcgcctctcggctctggacgtttccgcctcccgcggccccctctgcttcggtccccacgtccgtgtgtctgtctctccgtcgctccgtttccgccgctcactttcccctggtctgcccgtctctttccgttccccgcctgcctccgtgttcggctgcccgcgtttgtgtctctgcctctggcttttctctccctctctctgtctctgcgctgccctctgtgggggtctcgccctgtgtctgcgcctctccctgatcccccgccctccgatccagacaatcccccagtgtcggaggctcgccttcccccagcggggttcacgaatagtttcctagaccgggtgcggcaaaccctccccctgcctcccgccggccccgaggcctggcccgggtcatctccctggaattgagtctggggcagggagagccagcctttccgggggctcagttttcttaagaattccacccccgcgaggccggctggacgacaggccctgctgcgggccacctgcccggcccgctcccagggcggggcgattctgatcgtttacaagcggcggcaaagggggcagccgcctgccttggcgtggcc

SEQ ID NO: 3571 - DNA, 6000 bp, Homo sapiens
ttaattccatctttgttaatttctatatacatttgcagtcaggagacctggtttctaggcctggcctcaccttttataagcatgtgaccatgggcaaattgttcccttcccccaaggcctctgtttccacatctataaaatagggataataatatcttccctgcctaacccccagaggtgctgcagggatcccagcagataatgggggcaaatatactaaagcactatctgcatctagatactctccatattgctgcatcctggaggtcaggggatggttggggctctcgggctgctctcctgcctagcactcagctccctggacttgatcttcagcagtccccataatcactggccttgtgaagaaccctttaatgatcttaaagcatcttcacattcctgagatggctgataataatagctaaaatattttacttagcacataccaaacattatgttgagtattttatagtctttatctggaatcattaaaataattctcgatggtaagtgctgtttatttttaattaatcaaacagttttatttttatgttttgtttttatatatcataccctttaatataaaattcacatgctggtattggtcttataccaaggagaatcagattatcaccaagaatttatcaaagagcacaagaacagctgaagtgtgaagttcaatggggaaaaatgtattattaattacaaggtgggaaatcattgttttcacaggcattgatgcagtgtaggccctgttacccccattttacagttaaggaagctgaggcgcagagtgctgaaacaacttgctgagaaacacacagcagtgagtggtgtgaagccaaaacttgagcctaagtctcactggatccaaggtccattttctttcaactacattatacacttgcttatagaatctttggctgctcttggtgtcctcagatcatatccttcatccttgcaggcacaaggctgacaaaagttaaggattggacaaaaatgacaataagggcatcgttacccagtcttccttgaaattgggtgtttggagggtgggttagggtagggacagagattcatggttggggcaggtggtgaggcttagacaaggaaagaagtactgaaatggtccacatgaacactcctaggagaatatattgatattgaaacattctgggcacaactcagtgttaatccaataaacattacttagtgcctaatattctggtgctggggctacatacagtgcttatatgtgcttcccgcccctcataaacacatgacaagcctgaaatgcttgtgttaaatattttttaaattaaaattaaaaaatacaggctgggtgtggtgggattacgcctgtaatcccagcagtttgggaggccaaggcgggaggatcacctgaggtcaggagtttgagaccaccctggccaacatggtgaaaccccgtctatactaaaaatacaaaaattagctgagcatggtgttgagcacctgtaatcccagctacttgggaggctgaggcaggagaatcacttgaacccaggaggcggaggtttcagtgagccgaggtcatgctactgcactccagcctgggtgacaagagcaaaactctgtctcaaaaataaataaataaataaataaaaagagataaagctaatacatgctattttgcagaacttggcagaaaaaggacgaagggaaaagggagaatcacagctgagactgtgtttacataataaactcattgtggtctttgtgtgtgttggggaaagcctggcagaaccagagaatttaagcaagtggagtctgtggggggaggggattaggaggtcatctttgccttactctaacttccccagaagatattgaggctgggccccttctattcctgtcctctcagtacctaacataattggaagaagcaaaggcttggatgcctcagagcactagccccagtaccacccatgtggggctgttctagcttggtagtcaatgacaccatcacacaaattcctcagccctgagaaccctctctcatcagctttcctcttgccagcctgggacctgatggaatggaaaatagagaactctgctagttatagaacattgtggctacctagttaatacctggaaaagcaagaagagggtatatatattttagaaataaaagtgaaatctaatatttttacagagtcttagagtttacaaagctttggcatctaccatctcatctctttgtatttgagtctcagcataatctacgaaacaggctgtattttgcccatttgacagatgggaggacaaaagcccagaaaagttaatgttgccatcctagtatgtctgagattaggaacgaatagagaggcatatccctgagtgtaacagggagggccttattagggaaggcatcttggaggtgactcaagagctgagtagaaaaacagaattatgcactaaataaagaaagggagactccaggtaggtgactttgcaaagacttgaaaacatggactgccggagaggttggcaggagcacgatgatgatgatgatgatgatgacgacgacgacgacaacgatgatgacaaatgacagcagctaacatctatccgttgcttactatgtgtagatactgttagaacagatactcttcaaagcagtttatctgcattaactataaaacctaccttgtaaggtaggtacttttattatccccattttacagatgacaaaactaaggcacagagacgtagcttgcctataacatcatataggaatgatcttaagggctaatataagaagcatgaattttatctggagagccgagagcacccccctcactctacttaacagagaggaggtgggcacagacttctgatttagaaagtcttcttggatgcagggtggaccgaggtcggagaggggaaaagaaactagaacctgactcagatatctgtccaaggaagacctgaacagagacagtggggatagacagcagaggactatcccacaattcctcatgtttgtggataagaaattgtccctcacgcggatcacgaggtcaggagatcgagaccaccctggctaacacggtgaaaccccgtctctactaaaaataccaaaaaaattagccgggcgtggtggcaggcgcttgtagtcccagctactcaggaggctgaagcaggagaatggcatgaacccaggaggtggagcttgcagtgagttgagatcatgccactgcactccagcctgggtgacagagcgagactccgtctcaaaaaaaaaaaaaaaaaaaaaaaaaaaaaaaaaaattcgccgggcgtggtggctcatgcctgtaatcccagcactttgggaggctgaggtgggcggatcacctgaggtcaggagtttgagaccagcctgaccaacatggagaaaccctgtctctactaaaaatacaaaaaaaaattagccaggcttgatggctcatgcctgtaatcccagctactcgggaggctgacgcgggagacttgcttgaacctgggcggcggaggttgtggtgagccgagatcacgccattgcactccagcctgggcaacaagggcaaaactccgtctcaaaaaaaaaaaagaaaaaagaaattgtccctcacatgtctctgcttcctctgtctgtcaaggcagaatatatttcaatcttcctgcctcaggaattgcgtgaaaattaatgggacagaggcccagctggctttcatctgctaaacaacacccttgcacgactggtggtgcacattaaatgctgaacatataaaatgtgctttgatggaggacctgggaataattatagcttgctaattattgttaattttaccacagctttgaaactctagactttctcaatgactcaaaaagagattgcaacccctgtatgccatgaaactagccacacagtggcagacaagcaatttctcacaggctccattctttcattatttacatggttcagctacttacgtgggatacaggaaaagaaaagcaacgatttgctgtgttagaatcaaattgtacaaaaaactctttacagtcttgctggctctttaagaatttgttcctgtttgtctctttatagccagtgcacaaataaatattatgtgcgtgtgtgcctgtgtgtgtgcgcttgtgtgaggtacagaaaattagtgtttaacagaacttttaaccctctggacaccaggatacctgtgttttacccttgatatggtgagtaacagaactgcttccctaacttcccttcagattctgtgtcacttcgtgtccacaaacactttatttaaggtctcatcactcctaggcagggtgccaaagacccctctcagaaatatgaggaagttgatagcagtgtgacttcaggtctttaagcctcatcagtaccacctataaaacgggtctgatagtccctacctgtcaggactggtgttaggatgagataatgtttgtgaactgtaaactatataaacgtgtgctactgtgagaactggacaaagaagagagggagtgagagaaattaagggagggctggggctgggaaagaacgaaaagggagtcgcgtatagaggagagcgcgacagtcgcgagccacactttgcaatgaaactctttagactttctgccgggagagcggcccagacgcgccaggtctgtagcaggaggccgcgccgagggcgggtccccagaagcctacaggtgagtatcggttctccccttcccggctttcggtccggaggaggcgggagcagcttccctgttctgatcctatcgcgggcggcgcagggccggcttggccttccgtgggacggggaggggggcgggatgtgtcacccaaataccagtggggacggtcggtggtggaaccagccgggcaggtcgggtagagtataagagccggagggagcggccgggcggcagacgcctgcagaccatcccagacgccggagcccgagccccgacgagtccccgcgcctcatccgcccgcgtccggtccgcgttcctccgccccaccatggctcggggccccggcctcgcgccgccaccgctgcggctgccgctgctgctgctggtgctggcggcggtgaccggccacacggccgcgcaggacaactgcacgtgtcccaccaacaagatgaccgtgtgcagccccgacggccccggcggccgctgccagtgccgcgcgctgggctcgggcatggcggtcgactgctccacgctgacctccaagtgtctgctgctcaaggcgcgcatgagcgcccccaagaacgcccgcacgctggtgcggccgagtgagcacgcgctcgtggacaacgatggcctctacgaccccgactgcgaccccgagggccgcttcaaggcgcgccagtgcaaccagacgtcggtgtgctggtgcgtgaactcggtgggcgtgcgccgcacggacaagggcgacctgagcctacgctgcgatgagctggtgcgcacccaccacatcctcattgacctgcgccaccgccccaccgccggcgccttcaaccactcagacctggacgccgagctgaggcggctcttccgcgagcgctatcggctgcaccccaagttcgtggcggccgtgcactacgagcagcccaccatccagatcgagctgcggcagaacacgtctcagaaggccgccggtgacgtggatatcggcgatgccgcctactacttcgagagggacatcaagggcgagtctctattccagggccgcggcggcctggacttgcgcgtgcgcggagaacccctgcaggtggagcgcacgctcatctattacctggacgagattcccccgaagttctccatgaagcgcctcaccgccggcctcatcgccgtcatcgtggtggtcgtggtggccctcgtcgccggcatggccgtcctggtgatcaccaaccggagaaagtcggggaagtacaagaaggtggagatcaaggaactgggggagttgagaaagga

SEQ ID NO: 3572 - DNA, 6000 bp, Homo sapiens
aacaatgatagactggattaagaaaatgtggcacatatacaccatggaatactatgcagccataaaaaatgatgagttcatgtcctttgtagggacatggatgaaattggaaaccatcattctcagtaaactatcgcaagaacaaaaaaccaaacaccgcatattctcactcataggtgggaattgaacaatgagaacacatggacacaggaaggggaacatcatactctggggactgttgtggggtggggggaggggggagggatagcattgggagatatacctgatgctagatgacgagttagtgggtgcagcacaccagcatggcacatgtatatgtatgtaactaacctgcacaatgtgcacatgtaccctaaaacttaaagtataataataaaaaaataaaaaaataaaaaaaataaataaataaatagaaaaaaaagaaaataaattatttaatcattcttcttgaaacaagaaattcctaaaaatatttgtacaattaagggaagggatgaaaagtaacagaaaacctgagaaacatgagatgagtctctaagctctttcaaccccttgttaattccatctttgttaatttctatatacatttgcagtcaggagacctggtttctaggcctggcctcaccttttataagcatgtgaccatgggcaaattgttcccttcccccaaggcctctgtttccacatctataaaatagggataataatatcttccctgcctaacccccagaggtgctgcagggatcccagcagataatgggggcaaatatactaaagcactatctgcatctagatactctccatattgctgcatcctggaggtcaggggatggttggggctctcgggctgctctcctgcctagcactcagctccctggacttgatcttcagcagtccccataatcactggccttgtgaagaaccctttaatgatcttaaagcatcttcacattcctgagatggctgataataatagctaaaatattttacttagcacataccaaacattatgttgagtattttatagtctttatctggaatcattaaaataattctcgatggtaagtgctgtttatttttaattaatcaaacagttttatttttatgttttgtttttatatatcataccctttaatataaaattcacatgctggtattggtcttataccaaggagaatcagattatcaccaagaatttatcaaagagcacaagaacagctgaagtgtgaagttcaatggggaaaaatgtattattaattacaaggtgggaaatcattgttttcacaggcattgatgcagtgtaggccctgttacccccattttacagttaaggaagctgaggcgcagagtgctgaaacaacttgctgagaaacacacagcagtgagtggtgtgaagccaaaacttgagcctaagtctcactggatccaaggtccattttctttcaactacattatacacttgcttatagaatctttggctgctcttggtgtcctcagatcatatccttcatccttgcaggcacaaggctgacaaaagttaaggattggacaaaaatgacaataagggcatcgttacccagtcttccttgaaattgggtgtttggagggtgggttagggtagggacagagattcatggttggggcaggtggtgaggcttagacaaggaaagaagtactgaaatggtccacatgaacactcctaggagaatatattgatattgaaacattctgggcacaactcagtgttaatccaataaacattacttagtgcctaatattctggtgctggggctacatacagtgcttatatgtgcttcccgcccctcataaacacatgacaagcctgaaatgcttgtgttaaatattttttaaattaaaattaaaaaatacaggctgggtgtggtgggattacgcctgtaatcccagcagtttgggaggccaaggcgggaggatcacctgaggtcaggagtttgagaccaccctggccaacatggtgaaaccccgtctatactaaaaatacaaaaattagctgagcatggtgttgagcacctgtaatcccagctacttgggaggctgaggcaggagaatcacttgaacccaggaggcggaggtttcagtgagccgaggtcatgctactgcactccagcctgggtgacaagagcaaaactctgtctcaaaaataaataaataaataaataaaaagagataaagctaatacatgctattttgcagaacttggcagaaaaaggacgaagggaaaagggagaatcacagctgagactgtgtttacataataaactcattgtggtctttgtgtgtgttggggaaagcctggcagaaccagagaatttaagcaagtggagtctgtggggggaggggattaggaggtcatctttgccttactctaacttccccagaagatattgaggctgggccccttctattcctgtcctctcagtacctaacataattggaagaagcaaaggcttggatgcctcagagcactagccccagtaccacccatgtggggctgttctagcttggtagtcaatgacaccatcacacaaattcctcagccctgagaaccctctctcatcagctttcctcttgccagcctgggacctgatggaatggaaaatagagaactctgctagttatagaacattgtggctacctagttaatacctggaaaagcaagaagagggtatatatattttagaaataaaagtgaaatctaatatttttacagagtcttagagtttacaaagctttggcatctaccatctcatctctttgtatttgagtctcagcataatctacgaaacaggctgtattttgcccatttgacagatgggaggacaaaagcccagaaaagttaatgttgccatcctagtatgtctgagattaggaacgaatagagaggcatatccctgagtgtaacagggagggccttattagggaaggcatcttggaggtgactcaagagctgagtagaaaaacagaattatgcactaaataaagaaagggagactccaggtaggtgactttgcaaagacttgaaaacatggactgccggagaggttggcaggagcacgatgatgatgatgatgatgatgacgacgacgacgacaacgatgatgacaaatgacagcagctaacatctatccgttgcttactatgtgtagatactgttagaacagatactcttcaaagcagtttatctgcattaactataaaacctaccttgtaaggtaggtacttttattatccccattttacagatgacaaaactaaggcacagagacgtagcttgcctataacatcatataggaatgatcttaagggctaatataagaagcatgaattttatctggagagccgagagcacccccctcactctacttaacagagaggaggtgggcacagacttctgatttagaaagtcttcttggatgcagggtggaccgaggtcggagaggggaaaagaaactagaacctgactcagatatctgtccaaggaagacctgaacagagacagtggggatagacagcagaggactatcccacaattcctcatgtttgtggataagaaattgtccctcacgcggatcacgaggtcaggagatcgagaccaccctggctaacacggtgaaaccccgtctctactaaaaataccaaaaaaattagccgggcgtggtggcaggcgcttgtagtcccagctactcaggaggctgaagcaggagaatggcatgaacccaggaggtggagcttgcagtgagttgagatcatgccactgcactccagcctgggtgacagagcgagactccgtctcaaaaaaaaaaaaaaaaaaaaaaaaaaaaaaaaaaattcgccgggcgtggtggctcatgcctgtaatcccagcactttgggaggctgaggtgggcggatcacctgaggtcaggagtttgagaccagcctgaccaacatggagaaaccctgtctctactaaaaatacaaaaaaaaattagccaggcttgatggctcatgcctgtaatcccagctactcgggaggctgacgcgggagacttgcttgaacctgggcggcggaggttgtggtgagccgagatcacgccattgcactccagcctgggcaacaagggcaaaactccgtctcaaaaaaaaaaaagaaaaaagaaattgtccctcacatgtctctgcttcctctgtctgtcaaggcagaatatatttcaatcttcctgcctcaggaattgcgtgaaaattaatgggacagaggcccagctggctttcatctgctaaacaacacccttgcacgactggtggtgcacattaaatgctgaacatataaaatgtgctttgatggaggacctgggaataattatagcttgctaattattgttaattttaccacagctttgaaactctagactttctcaatgactcaaaaagagattgcaacccctgtatgccatgaaactagccacacagtggcagacaagcaatttctcacaggctccattctttcattatttacatggttcagctacttacgtgggatacaggaaaagaaaagcaacgatttgctgtgttagaatcaaattgtacaaaaaactctttacagtcttgctggctctttaagaatttgttcctgtttgtctctttatagccagtgcacaaataaatattatgtgcgtgtgtgcctgtgtgtgtgcgcttgtgtgaggtacagaaaattagtgtttaacagaacttttaaccctctggacaccaggatacctgtgttttacccttgatatggtgagtaacagaactgcttccctaacttcccttcagattctgtgtcacttcgtgtccacaaacactttatttaaggtctcatcactcctaggcagggtgccaaagacccctctcagaaatatgaggaagttgatagcagtgtgacttcaggtctttaagcctcatcagtaccacctataaaacgggtctgatagtccctacctgtcaggactggtgttaggatgagataatgtttgtgaactgtaaactatataaacgtgtgctactgtgagaactggacaaagaagagagggagtgagagaaattaagggagggctggggctgggaaagaacgaaaagggagtcgcgtatagaggagagcgcgacagtcgcgagccacactttgcaatgaaactctttagactttctgccgggagagcggcccagacgcgccaggtctgtagcaggaggccgcgccgagggcgggtccccagaagcctacaggtgagtatcggttctccccttcccggctttcggtccggaggaggcgggagcagcttccctgttctgatcctatcgcgggcggcgcagggccggcttggccttccgtgggacggggaggggggcgggatgtgtcacccaaataccagtggggacggtcggtggtggaaccagccgggcaggtcgggtagagtataagagccggagggagcggccgggcggcagacgcctgcagaccatcccagacgccggagcccgagccccgacgagtccccgcgcctcatccgcccgcgtccggtccgcgttcctccgccccaccatggctcggggccccggcctcgcgccgccaccgctgcggctgccgctgctgctgctggtgctggcggcggtgaccggccacacggccgcgcaggacaactgcacgtgtcccaccaacaagatgaccgtgtgcagccccgacggccccggcggccgctgccagtgccgcgcgctgggctcgggcatggcggtcgactgctccacgctgacctccaagtgtctgctgctcaaggcgcgcatgagcgcccccaagaacgcccgcacgctggtgcggccgagtgagcacgcgctcgtggacaacgatggcctctacgaccccgactgcgaccccgagggccgcttcaaggcgcgccagtgcaaccagacgtcggtgtgctggtgcgt

SEQ ID NO: 3573 - DNA, 6000 bp, Homo sapiens
tgatagtttctttaaaacaaacaaacaaaaaccatattaaatagagacagggtcttgttgttgcccaggctggtctcaaacttctggcattaagggattctcccactccatcctcccaaagtgttgggattacaggtgtaagccaccgtgcctggcttaaagacagtttatcgtctttacttagacttttgtatgctatggactaaacatgctaaaatatgcttatgttaaattatgaggcttatattaacatgtagttttaatcctgaattcctcaatagcttctattttttttagccaagagaaaaatctcgttcttgtttggcatttcactttaacaaaatggtctgtatttagtccctatttaaaaaaatagatccaatacaaatgctatttctactacagctggagagcaccacctagagataaaaaaaagaacaggctgggcatggtggttcacgcctggaaccttagcactttgggaggccgaggagaatggatcgtttatgcccaagcgtctgagactaccctgaacaacacagtgagactctgtctctacaaaaaataaataaaaatttaaagggaagagaaaaatttattggctatgcatggcataaaacttcttaagatttttatctgcagcagtattgttccaaagtgtacactagtaaacatgacatcctagggatgttaacgtgaattataaaaaatattttattttttttaaattaaaaatatcttcttcaaggaaaagttgaattaaagttaaacagttttgttgtttttgttttttgaaacagagtcttgctctgtcactcaggttagagtgcagtggcaccatcttggctcactgtaacctctccctccagggttcaagtgatcctcccaccttggcctctccagtagctgggactataggtgcgccacacacgcctaatttttgtatttttttgaagagacagggtttttccatgtttcccaggctggtctcgaactctatcaccccacctcggtctcccaaagtgctaggattacaggtatgaaccactgtatcaggccaaacaggtttcttaattgtgagaattctcagaataatggccaaaattcattaagtgtacattctgaaccagctatcatgttataaacttacaacattatctgatttactcttcataatcctataaagttcatgctattaactgccagttaacagatgaggaaactggggcttgaaaaaactgtaagttgaattcatgacacataaattttagtcttcccaatgttgccaatattaaaatgctgtagtcagacatggtggcacatgcctgtaatcccagctactagggaggctgagacgggaggatggcttgagcccaggagttaaggccacagtgtgctataatggtgcctgtgaatatcgactgtactctggcctgggcaacgtagtgagactccatctcaatttttttttaatgggcaaattttatataaaaactgtatgtccaggttctacttatttattcattcatttttgagaaagggtttctctctgtcgcccaggctggagtgcagtggcaagatcttggttcactgtaacctccacctcccaagttcaagagattcttatgcctcagccttccgagtagctgggactacaggcacataccaccatacccagttattttttgtattttagtagacggagtttcatcatgttggccaggctgttcttgaactcctggcctcaagtgatctgcctgcttcaggctcccaaagtgctgggattataggtgttagccaccacgtccggcctgtctgggttctctttaaatcatttgaaaaattgaaaaacctggtaatactagttccaagtctatatggcaacaattagctttagcctcttttagaaggggcatgcactgtccaggctacccagtcctcaaagaaataagaatttaattattaaactctatccatttcactcatttttgttaccaacttgggctctgcaggcatttaatttccaacacaccccaagccctccctgactacagtttacaataagcctttaatatgtaaataaatactgtcaatctcttaaaagtagattgggagatgcagtgttccccaaacttgtttgaataggtaactcttttcaaatgctgaatacattttggaaatgctaatccataggtaataataatttataattattataaccatataaaggatctttaggccagggcggtgcctcacgcctgtaatcccagcactttgggaggacaaggcaggcggatcacctgaggtcaggagttggagaccagcctgaccaatatggtgaaatgccatctctactaaaaatacaaaaattatccgggcatggtggccggcacctgtaatcccagctactcgggaggctgagacagaagaattgctggaacctggaaggcggaagttgcagtgagccgagatcatgccactgcactccagcctgggcgacagagcaagactctgtctcaaaaaagaaaaaaaaaaaatatctttagataaacaccaaaacatgaaggaaggaaatggaaactacttacaaatattagtcctgatatcaatgaagaggtccctgtaagtgccacatagaatttgggtgtcaatgaatttaaaaatacagtcactgtcaaaagaacaagaatcaaagttttaaaaaatgcaaatttaaagtacttaggttacaaatatgcaagtatctttatgagtggtgggacttaagtagtattaatatctagtgtgaaattcacttgaaaaagttttaatttgtatatatattatacataatggcttatcactatttgcaacaaatcaaaatgaggtaattcagcttgctttggagaataaaactaaagcacttataagtcataatttagatagaacttttgcaagtctgtaagaataaaaagataaatatgcttttacaaaggaggttcaaaactactccatatttattttggtaggatacaaaaccactgtctcaaattagagggaaggaaacagcatatgtatttggtatatcagctagagaggcaaaatggctcaaagagaaaagcaacaaacagaaatctccctgagttactgaaatcctggagcagatttttcacttcaaataattatctcataagtactgtgggttttagaaagaaaataaaaatctggccaggtaggatggctcactcccataatctcagagttttgggaggccaaggcaggaggatcactggtagccagaagttcaagaccagcctgggcaaataaaatagacccagtctctacgcaaaatttaaaactcagccagtcgtggtggtgcacgcctgcagtcccagctacttgggaggctgaggccagaggatcgcttaagcagaagagttcaaggctgcagtgatcttgccactacacttcagcctgggtgacaaagggagactctgtctgtctttctctctctcacacacacacacacacacacacacacacacacacacacgaaacgtaaaaaagaaaaatctatagtaatcaactattctcatctaaatgttgcatatggttaacgtagaaaaataaatgacaagtcaatcagtaacactgtgcatagaaaccaccgttaagcacttcattcacctgttacagagatgccaaattagctcttcagtttagcttattttagagtgctagttatatttgaacttgatacctatcctccaaaaaaaccaaaatatttccgaacattaactcacagtctttcatgtcatctctgaacaggaaaggggacatttgctgccttttgcttcagaaaaatcaaccaccatactgaatcatgtaatggaaatacttatatcttgttctgaggttgctgctcagatcttgagtgaaatataatcacatggtaaggggacctgggccctaaacacttcatcctgtctacagctaaagaatagtacagtatatgagaatccatcaggatcatcacttcttacatgtgttcgtattgtcagcacagaatacgtagcaagtgttctacagacgtcgaaagaactagcaaacccactgttgtttgtggcgctctcacttcctgtactattttattactcaagataagcctaaaagaacagacaaaactatcacgaaaacgatttcttaacagaactattttaaaacaagagaatcctcaattaaaatcatgccattttctttctctgaaatctttaaattacagatgtgctcatctttgttgcctggatatgagttctttcagctgggcagcgggagactcaaagtagtgacttttaagggatcctaccagaggtgggggagccaatataaattacgtatcctaatctgagacactcttctgtcctaatacctgaagcttatagcttgtcaggtggcttttccatggaaaaacgaggacataagagagagggcggaccttaagagttctacggaggagccggtaacggcagcaggcttgtcaatcaactgcaaggttgcagcccaaaagaaaaagaactcacttgatcgctcatcatcgactcctcagaggccctctaggactaccgagaatctcttgccctttggctcttgcccccgacatctctcctggccccccgccctgccccaggaggtctggtcctctcacccgctgccaaattctcacacagcctcaaagggatcctcagggcgtaaagcagccccagccccgccacgaaccacaacgaggccccagtccccgccagcccggcccgcagtcgctccctccagcctagcgtcgggtttaggccagggacagatgcaggagacgctccaacagctgcggcttcacccacgccgccacggtccgccatcttgccgctatcgcaggcgccaggagctgggaggggagaaggacaggaaaccgggagtcgggaatcctgggatagtggcggacctgaagttggcctctgtgaaggctgagtcctggggaaccgggaccgagaagatttcgaaggtggaggagcgtgtctcaagattggggctacctgttctttcgtggggcagggaaggggcggacagcagcgcctattctggaggaactggactgagatgtgaccccgaagtgttaccgcttccaaacgaaatgagggtcacctttcacaccgccccccccccggggttggaaaagccaccgatcgttccagctgccgagcagctcttaaagctttggattcggctgtcgtggagataacgggcaccagaaaaacttgtaggagtagcaacagctatttggtcggatggaggccagaagccaagaataatcgaaacacgctgccagcgcccattagatggatgggaaatgagtgtaactcattgggaaagatattagacttcaaatcacctaaggcaaaccctacttcctggggcgcgggcgcgggcgctggcgttaggagacgtcactcccgcgcataactgacatggggccctcttggtcggcgtttccgggcgggtccttccgacggccgccgcggtgattccatcactcggctttcttcccggcctgcctcgcgcccgtagccgggctgggccagaacagcccaagatggccgacttcgatgatcgtgtgtcggatgaggagaaggtaaggggtccgcctctctctcttacctcctcccccgacagggaactggggcccggcccggctgcgttgggagcctagcagtgtccccaggaaaaagaagcttcttggtccatgctgacatacgctctccgcagtcgggacgcttccctcttagggggctttcctctgcctcacggtggccccagttcctcgttcctcgactctccttttctctcaggcctgaggcacagcccaggggcctccctgcaagggaacagacgtttcctttattggatcgtgactgtggacttttttctgtaattttgcgagagggtggtggttatgttgcgacatatcaaaaa

SEQ ID NO: 3574 - DNA, 6000 bp, Homo sapiens
gggttcacaccattctcctgcctcagcctcccgattagctgggactacaggcacctgccaccacgcccggctaatttttttgtatttttagtagagacggtgtttcactgcgttagccaggatctcgatctcctgaggtcaggtctcgatctcctgacctcgtgatccacccgcctcggcctcccaaagtgctgggattacaggcatgaaccaccgcgcccgggctttcttttctttttttttttttttgagacggagtttcgctcctgttgcccaggctggagtgcaatggcgtgatctcgggtcaccgcaacctccgcctcccaggttccagcgattctcctgcctcagcctactgagtagctgggattacaggcatgtgccactgcgcccagctaatttttgtatttttagtagagatggggtttctccatgttggtcaggctggtctcaaactcccgacctcagatgatgcacctgcctcggcctcccagagtgttggggtcacaggcgtgagccactgggcccggcctgtcctaggatgtcttaacagattatatgaatacctctcagcaaaactaactgaaaagtgaagatggaagaatgacagttttaatattaattgatgacttgttagaaaacagccacaccaaacaatctttagggcttgctttatcctacaatggtaactagtaaattaaggaggtaatacataatcaaggatccagtttaaaagcataaatatttggcaggtgcagtgactcacgcctgcaatctcggcactttgggaggccaaggcaggcggatcacgaggtcaggagtttgagactagcctgaccaacatattgaaaccctgtctctactaaaaatacaaaaaattagccgggtgtggtggcaggtgcctgtaatcccagctacttgggatgctgaggcaggagaatcacttgaactcaggaggtggaggttgcagtgagccgagatcgtaccactgcactccagcccgctgggagacagtgcaagacttcgtttcaaaaaaaaaaaaaaaaagtataaaatatttttcatgtgctctaacaaagccctcatatttcatctatttacaacattttctactgctctactaaataattttgataaacttgtttctcaaaaatgccttaacaccactaccattgtctaaactgaaagcatgtagtttttcttaatactgaaaactttatcttattactgaaagcattgtctaaactgaaagcatgacttctcaattaccatacttttgaaattgtacacaaatattccactagttaggctgaagggaaaaaatatgctagtcacacttttttccagccccccaaaattctctttgcttttatgttttacaaatgttgaatgaaataaaggaaatagacaatgaaaagaacccaaagaagtaattcatctcatatttcaggattcctaattatagtatcttggtcttgctaagcatgtaactaaagagctcaagttcattctcagaaactgtgaactcaaagctacaactaaaagatttatttctaaaagttattacactttcaacttcctgttttatttagacagctcatcatgaccatttcaggtaacaaaacccaacttcctctttataaagtgattaaaaaaacttcagcagttatgagaatagatgatattactagcttttacataaatatttacaaggaaactaagagtccattatcaccaaattttctaaaggttcactgcctttagaaaatgtaacaaagataaaaaacaatattaaaatatacttggcaacaaaaaaagtatgctagaagaggaaactggtcacagatctgctattaaaaaaaacaatactggctgggctcggtggctcacgcctgtaatcccagcactttgggaggccaaggcgggcagatcatgaggtcaggagttcgagaccagcctggccaacatagtgaaaccccgtctctactaaaaatacaaaaaattagccaggcttggtggcgggcgcctgtaatcctagctactcgagaggctgaggcaggagaatcgcttgaaccagagaggcagaggttgcagcgagcggagatcgcaccactgcacaccaccccgggtgacagagcgagactccatctcaaaaaaaaaaaaaaaaaaccataacccaagacattaatgttattaattaaaacactgccagtatctaaaggcatcttaattggcattttaaaatatatattttcccaagtttaattaaaggcattctaacctggtatcaaagacaaaaatccaacaacactggtcaatgtgtatcaggtaggcacaataaacttaaaagtttattatttaaattatttgtgaaattttggccggccgcggtggcttacgcctgtaatcccagcactttaagtggcgaagacggatggatcgtttgagcccaagagtttgagaccggcctgggcaacaagacgaaacccactctctacaagaaatacaaaaattagctggacttggtggcgggtgcctgtaatcccagctactcgggaagctgaggcaggagaataatttgaaccagggaggcggaagttgcagtgagccgagcgagactccgtctcaaaaaaaaaaaaaaattgtttagttgtattgtaacaggatttttgcttaattttatttgaatagtaactatttgccttagaacaatttattatagatcgatttccagcataggcttatacataaatgtttttgtcctaaatcttaaacatgtatgaagatcagtttccaaataagagaaaatctaacgctgttgtcaatggcttgttaaacatttcaaaatggcatgccatatctacatatatcaagttattccgtacagaggacttatggatcataacagtccccttcccatcccaacttcttattgaaaaaaacacccaggtagatttacagagcactcaaggggacacattttctaatagccacagtgggagacaaatgtcataattcttgtccaataagttgccttgtgaggtcattctaagttctacgtgccctaaaaccatgtacttactgaaaagcctgacaaactgttatgaaactgtgcaactgtcagaagaaaagttattccaccttagaatgtgctcttgtatttaagacccttttcaagaaatgagcatacaaaatgcacactgacaaattcaactgatcaaagactccacagtggagcatcaaagaaggcaggatgctttgttcagtcttgaacgtgttaacataaggtttattatgtgttacagaaaacctttctggaggttaagaaaatccatcagctattctagatttgttaacaagaaacaaaattttcaaaaattatcgttaaaagggatgtgtctatagggaaagactggtgttcaaattctgaagcaaatgccctgaggctcacagatttattatagcgaatcagacaggcgacagtacaggagaaaagtagtgcatgtgtagggagatggacaacatttgggacctctccttgtcgaagagtcgtgacagcaaaatcacttcctgaggaaggaggagcaaaagggaagttaagaggccatcctgaccaggaagtgactcgccctaaactaaccccaattatatctacaaatggggggatggggtgagccccaactgctaaaggcggtaaaataactgctttttgatatgtcgcaacataaccaccaccctctcgcaaaattacagaaaaaagtccacagtcacgatccaataaaggaaacgtctgttcccttgcagggaggcccctgggctgtgcctcaggcctgagagaaaaggagagtcgaggaacgaggaactggggccaccgtgaggcagaggaaagccccctaagagggaagcgtcccgactgcggagagcgtatgtcagcatggaccaagaagcttctttttcctggggacactgctaggctcccaacgcagccgggccgggccccagttccctgtcgggggaggaggtaagagagagaggcggaccccttaccttctcctcatccgacacacgatcatcgaagtcggccatcttgggctgttctggcccagcccggctacgggcgcgaggcaggccgggaagaaagccgagtgatggaatcaccgcggcggccgtcggaaggacccgcccggaaacgccgaccaagagggccccatgtcagttatgcgcgggagtgacgtctcctaacgccagcgcccgcgcccgcgccccaggaagtagggtttgccttaggtgatttgaagtctaatatctttcccaatgagttacactcatttcccatccatctaatgggcgctggcagcgtgtttcgattattcttggcttctggcctccatccgaccaaatagctgttgctactcctacaagtttttctggtgcccgttatctccacgacagccgaatccaaagctttaagagctgctcggcagctggaacgatcggtggcttttccaaccccggggggggggcggtgtgaaaggtgaccctcatttcgtttggaagcggtaacacttcggggtcacatctcagtccagttcctccagaataggcgctgctgtccgccccttccctgccccacgaaagaacaggtagccccaatcttgagacacgctcctccaccttcgaaatcttctcggtcccggttccccaggactcagccttcacagaggccaacttcaggtccgccactatcccaggattcccgactcccggtttcctgtccttctcccctcccagctcctggcgcctgcgatagcggcaagatggcggaccgtggcggcgtgggtgaagccgcagctgttggagcgtctcctgcatctgtccctggcctaaacccgacgctaggctggagggagcgactgcgggccgggctggcggggactggggcctcgttgtggttcgtggcggggctggggctgctttacgccctgaggatccctttgaggctgtgtgagaatttggcagcgggtgagaggaccagacctcctggggcagggcggggggccaggagagatgtcgggggcaagagccaaagggcaagagattctcggtagtcctagagggcctctgaggagtcgatgatgagcgatcaagtgagttctttttcttttgggctgcaaccttgcagttgattgacaagcctgctgccgttaccggctcctccgtagaactcttaaggtccgccctctctcttatgtcctcgtttttccatggaaaagccacctgacaagctataagcttcaggtattaggacagaagagtgtctcagattaggatacgtaatttatattggctcccccacctctggtaggatcccttaaaagtcactactttgagtctcccgctgcccagctgaaagaactcatatccaggcaacaaagatgagcacatctgtaatttaaagatttcagagaaagaaaatggcatgattttaattgaggattctcttgttttaaaatagttctgttaagaaatcgttttcgtgatagttttgtctgttcttttaggcttatcttgagtaataaaatagtacaggaagtgagagcgccacaaacaacagtgggtttgctagttctttcgacgtctgtagaacacttgctacgtattctgtgctgacaatacgaacacatgtaagaagtgatgatcctgatggattctcatatactgtactattctttagctgtagacaggatgaagtgtttagggcccaggtccccttaccatgtgattatatttcactcaagatctgagcagcaacctcagaacaagatataagtatttccattacatgattcagtatggtggttgatttttctgaagcaaaaggcagcaaatgtcccctttcctgttcagagatgacatgaaagactgtgagttaatgttcggaaatattttggtttttttggaggataggtatcaagttcaaatataactagcactctaaaa

SEQ ID NO: 3575 - DNA, 6000 bp, Homo sapiens
ttttttttttttttttttttttttgatggagttttgctctgttgcccaggctggagtgcaatggcgcgatctcggctcactgcaacctccgcctcctgggttcaagctattctcctgcctcagcctcctgagtagctgggattacagacatgcaccaccacacctggctaattttgtatttttaatagagacagggtttcaccgtgttggtcaggctggtctctaactcctgacctcagatgatctgaccgccttggcctcccaaagtactgggattacgagcgtgagccatcatgcccagcccataatacctcatttataatccactaaatggatgtctctactctggtttttcattcatacctatatggaaaagaaaagtatagtgaaaaaagcatggctacataatcagaaaaacctgggatctgaattttctgacaaatttacactactttgtttagcattaagcctggtcgtaataaaacagctaagtgttctggaagaaattatgataaatcagtactactaacaagactggacatgtgagtttgcacctgcttattaggctttatgctcctgtcctaggatttctttttcttttcttttttctttttttttttttttgagatggagtcttgctctgtcacccaggctggagtgcagtggcacaatctcggctcactgcaaactctgcctcccgggttcacaccattctcctgcctcagcctcccgattagctgggactacaggcacctgccaccacgcccggctaatttttttgtatttttagtagagacggtgtttcactgcgttagccaggatctcgatctcctgaggtcaggtctcgatctcctgacctcgtgatccacccgcctcggcctcccaaagtgctgggattacaggcatgaaccaccgcgcccgggctttcttttctttttttttttttttgagacggagtttcgctcctgttgcccaggctggagtgcaatggcgtgatctcgggtcaccgcaacctccgcctcccaggttccagcgattctcctgcctcagcctactgagtagctgggattacaggcatgtgccactgcgcccagctaatttttgtatttttagtagagatggggtttctccatgttggtcaggctggtctcaaactcccgacctcagatgatgcacctgcctcggcctcccagagtgttggggtcacaggcgtgagccactgggcccggcctgtcctaggatgtcttaacagattatatgaatacctctcagcaaaactaactgaaaagtgaagatggaagaatgacagttttaatattaattgatgacttgttagaaaacagccacaccaaacaatctttagggcttgctttatcctacaatggtaactagtaaattaaggaggtaatacataatcaaggatccagtttaaaagcataaatatttggcaggtgcagtgactcacgcctgcaatctcggcactttgggaggccaaggcaggcggatcacgaggtcaggagtttgagactagcctgaccaacatattgaaaccctgtctctactaaaaatacaaaaaattagccgggtgtggtggcaggtgcctgtaatcccagctacttgggatgctgaggcaggagaatcacttgaactcaggaggtggaggttgcagtgagccgagatcgtaccactgcactccagcccgctgggagacagtgcaagacttcgtttcaaaaaaaaaaaaaaaaagtataaaatatttttcatgtgctctaacaaagccctcatatttcatctatttacaacattttctactgctctactaaataattttgataaacttgtttctcaaaaatgccttaacaccactaccattgtctaaactgaaagcatgtagtttttcttaatactgaaaactttatcttattactgaaagcattgtctaaactgaaagcatgacttctcaattaccatacttttgaaattgtacacaaatattccactagttaggctgaagggaaaaaatatgctagtcacacttttttccagccccccaaaattctctttgcttttatgttttacaaatgttgaatgaaataaaggaaatagacaatgaaaagaacccaaagaagtaattcatctcatatttcaggattcctaattatagtatcttggtcttgctaagcatgtaactaaagagctcaagttcattctcagaaactgtgaactcaaagctacaactaaaagatttatttctaaaagttattacactttcaacttcctgttttatttagacagctcatcatgaccatttcaggtaacaaaacccaacttcctctttataaagtgattaaaaaaacttcagcagttatgagaatagatgatattactagcttttacataaatatttacaaggaaactaagagtccattatcaccaaattttctaaaggttcactgcctttagaaaatgtaacaaagataaaaaacaatattaaaatatacttggcaacaaaaaaagtatgctagaagaggaaactggtcacagatctgctattaaaaaaaacaatactggctgggctcggtggctcacgcctgtaatcccagcactttgggaggccaaggcgggcagatcatgaggtcaggagttcgagaccagcctggccaacatagtgaaaccccgtctctactaaaaatacaaaaaattagccaggcttggtggcgggcgcctgtaatcctagctactcgagaggctgaggcaggagaatcgcttgaaccagagaggcagaggttgcagcgagcggagatcgcaccactgcacaccaccccgggtgacagagcgagactccatctcaaaaaaaaaaaaaaaaaaccataacccaagacattaatgttattaattaaaacactgccagtatctaaaggcatcttaattggcattttaaaatatatattttcccaagtttaattaaaggcattctaacctggtatcaaagacaaaaatccaacaacactggtcaatgtgtatcaggtaggcacaataaacttaaaagtttattatttaaattatttgtgaaattttggccggccgcggtggcttacgcctgtaatcccagcactttaagtggcgaagacggatggatcgtttgagcccaagagtttgagaccggcctgggcaacaagacgaaacccactctctacaagaaatacaaaaattagctggacttggtggcgggtgcctgtaatcccagctactcgggaagctgaggcaggagaataatttgaaccagggaggcggaagttgcagtgagccgagcgagactccgtctcaaaaaaaaaaaaaaattgtttagttgtattgtaacaggatttttgcttaattttatttgaatagtaactatttgccttagaacaatttattatagatcgatttccagcataggcttatacataaatgtttttgtcctaaatcttaaacatgtatgaagatcagtttccaaataagagaaaatctaacgctgttgtcaatggcttgttaaacatttcaaaatggcatgccatatctacatatatcaagttattccgtacagaggacttatggatcataacagtccccttcccatcccaacttcttattgaaaaaaacacccaggtagatttacagagcactcaaggggacacattttctaatagccacagtgggagacaaatgtcataattcttgtccaataagttgccttgtgaggtcattctaagttctacgtgccctaaaaccatgtacttactgaaaagcctgacaaactgttatgaaactgtgcaactgtcagaagaaaagttattccaccttagaatgtgctcttgtatttaagacccttttcaagaaatgagcatacaaaatgcacactgacaaattcaactgatcaaagactccacagtggagcatcaaagaaggcaggatgctttgttcagtcttgaacgtgttaacataaggtttattatgtgttacagaaaacctttctggaggttaagaaaatccatcagctattctagatttgttaacaagaaacaaaattttcaaaaattatcgttaaaagggatgtgtctatagggaaagactggtgttcaaattctgaagcaaatgccctgaggctcacagatttattatagcgaatcagacaggcgacagtacaggagaaaagtagtgcatgtgtagggagatggacaacatttgggacctctccttgtcgaagagtcgtgacagcaaaatcacttcctgaggaaggaggagcaaaagggaagttaagaggccatcctgaccaggaagtgactcgccctaaactaaccccaattatatctacaaatggggggatggggtgagccccaactgctaaaggcggtaaaataactgctttttgatatgtcgcaacataaccaccaccctctcgcaaaattacagaaaaaagtccacagtcacgatccaataaaggaaacgtctgttcccttgcagggaggcccctgggctgtgcctcaggcctgagagaaaaggagagtcgaggaacgaggaactggggccaccgtgaggcagaggaaagccccctaagagggaagcgtcccgactgcggagagcgtatgtcagcatggaccaagaagcttctttttcctggggacactgctaggctcccaacgcagccgggccgggccccagttccctgtcgggggaggaggtaagagagagaggcggaccccttaccttctcctcatccgacacacgatcatcgaagtcggccatcttgggctgttctggcccagcccggctacgggcgcgaggcaggccgggaagaaagccgagtgatggaatcaccgcggcggccgtcggaaggacccgcccggaaacgccgaccaagagggccccatgtcagttatgcgcgggagtgacgtctcctaacgccagcgcccgcgcccgcgccccaggaagtagggtttgccttaggtgatttgaagtctaatatctttcccaatgagttacactcatttcccatccatctaatgggcgctggcagcgtgtttcgattattcttggcttctggcctccatccgaccaaatagctgttgctactcctacaagtttttctggtgcccgttatctccacgacagccgaatccaaagctttaagagctgctcggcagctggaacgatcggtggcttttccaaccccggggggggggcggtgtgaaaggtgaccctcatttcgtttggaagcggtaacacttcggggtcacatctcagtccagttcctccagaataggcgctgctgtccgccccttccctgccccacgaaagaacaggtagccccaatcttgagacacgctcctccaccttcgaaatcttctcggtcccggttccccaggactcagccttcacagaggccaacttcaggtccgccactatcccaggattcccgactcccggtttcctgtccttctcccctcccagctcctggcgcctgcgatagcggcaagatggcggaccgtggcggcgtgggtgaagccgcagctgttggagcgtctcctgcatctgtccctggcctaaacccgacgctaggctggagggagcgactgcgggccgggctggcggggactggggcctcgttgtggttcgtggcggggctggggctgctttacgccctgaggatccctttgaggctgtgtgagaatttggcagcgggtgagaggaccagacctcctggggcagggcggggggccaggagagatgtcgggggcaagagccaaagggcaagagattctcggtagtcctagagggcctctgaggagtcgatgatgagcgatcaagtgagttctttttcttttgggctgcaaccttgcagttgattgacaagcctgctgccgttaccggctcctccgtagaactcttaaggtccgccctctctcttatgtcctcgtttttccatggaaaagccacctgacaagctataagcttcaggta

SEQ ID NO: 3576 - DNA, 6000 bp, Homo sapiens
ttcttaagatttttatctgcagcagtattgttccaaagtgtacactagtaaacatgacatcctagggatgttaacgtgaattataaaaaatattttattttttttaaattaaaaatatcttcttcaaggaaaagttgaattaaagttaaacagttttgttgtttttgttttttgaaacagagtcttgctctgtcactcaggttagagtgcagtggcaccatcttggctcactgtaacctctccctccagggttcaagtgatcctcccaccttggcctctccagtagctgggactataggtgcgccacacacgcctaatttttgtatttttttgaagagacagggtttttccatgtttcccaggctggtctcgaactctatcaccccacctcggtctcccaaagtgctaggattacaggtatgaaccactgtatcaggccaaacaggtttcttaattgtgagaattctcagaataatggccaaaattcattaagtgtacattctgaaccagctatcatgttataaacttacaacattatctgatttactcttcataatcctataaagttcatgctattaactgccagttaacagatgaggaaactggggcttgaaaaaactgtaagttgaattcatgacacataaattttagtcttcccaatgttgccaatattaaaatgctgtagtcagacatggtggcacatgcctgtaatcccagctactagggaggctgagacgggaggatggcttgagcccaggagttaaggccacagtgtgctataatggtgcctgtgaatatcgactgtactctggcctgggcaacgtagtgagactccatctcaatttttttttaatgggcaaattttatataaaaactgtatgtccaggttctacttatttattcattcatttttgagaaagggtttctctctgtcgcccaggctggagtgcagtggcaagatcttggttcactgtaacctccacctcccaagttcaagagattcttatgcctcagccttccgagtagctgggactacaggcacataccaccatacccagttattttttgtattttagtagacggagtttcatcatgttggccaggctgttcttgaactcctggcctcaagtgatctgcctgcttcaggctcccaaagtgctgggattataggtgttagccaccacgtccggcctgtctgggttctctttaaatcatttgaaaaattgaaaaacctggtaatactagttccaagtctatatggcaacaattagctttagcctcttttagaaggggcatgcactgtccaggctacccagtcctcaaagaaataagaatttaattattaaactctatccatttcactcatttttgttaccaacttgggctctgcaggcatttaatttccaacacaccccaagccctccctgactacagtttacaataagcctttaatatgtaaataaatactgtcaatctcttaaaagtagattgggagatgcagtgttccccaaacttgtttgaataggtaactcttttcaaatgctgaatacattttggaaatgctaatccataggtaataataatttataattattataaccatataaaggatctttaggccagggcggtgcctcacgcctgtaatcccagcactttgggaggacaaggcaggcggatcacctgaggtcaggagttggagaccagcctgaccaatatggtgaaatgccatctctactaaaaatacaaaaattatccgggcatggtggccggcacctgtaatcccagctactcgggaggctgagacagaagaattgctggaacctggaaggcggaagttgcagtgagccgagatcatgccactgcactccagcctgggcgacagagcaagactctgtctcaaaaaagaaaaaaaaaaaatatctttagataaacaccaaaacatgaaggaaggaaatggaaactacttacaaatattagtcctgatatcaatgaagaggtccctgtaagtgccacatagaatttgggtgtcaatgaatttaaaaatacagtcactgtcaaaagaacaagaatcaaagttttaaaaaatgcaaatttaaagtacttaggttacaaatatgcaagtatctttatgagtggtgggacttaagtagtattaatatctagtgtgaaattcacttgaaaaagttttaatttgtatatatattatacataatggcttatcactatttgcaacaaatcaaaatgaggtaattcagcttgctttggagaataaaactaaagcacttataagtcataatttagatagaacttttgcaagtctgtaagaataaaaagataaatatgcttttacaaaggaggttcaaaactactccatatttattttggtaggatacaaaaccactgtctcaaattagagggaaggaaacagcatatgtatttggtatatcagctagagaggcaaaatggctcaaagagaaaagcaacaaacagaaatctccctgagttactgaaatcctggagcagatttttcacttcaaataattatctcataagtactgtgggttttagaaagaaaataaaaatctggccaggtaggatggctcactcccataatctcagagttttgggaggccaaggcaggaggatcactggtagccagaagttcaagaccagcctgggcaaataaaatagacccagtctctacgcaaaatttaaaactcagccagtcgtggtggtgcacgcctgcagtcccagctacttgggaggctgaggccagaggatcgcttaagcagaagagttcaaggctgcagtgatcttgccactacacttcagcctgggtgacaaagggagactctgtctgtctttctctctctcacacacacacacacacacacacacacacacacacacacgaaacgtaaaaaagaaaaatctatagtaatcaactattctcatctaaatgttgcatatggttaacgtagaaaaataaatgacaagtcaatcagtaacactgtgcatagaaaccaccgttaagcacttcattcacctgttacagagatgccaaattagctcttcagtttagcttattttagagtgctagttatatttgaacttgatacctatcctccaaaaaaaccaaaatatttccgaacattaactcacagtctttcatgtcatctctgaacaggaaaggggacatttgctgccttttgcttcagaaaaatcaaccaccatactgaatcatgtaatggaaatacttatatcttgttctgaggttgctgctcagatcttgagtgaaatataatcacatggtaaggggacctgggccctaaacacttcatcctgtctacagctaaagaatagtacagtatatgagaatccatcaggatcatcacttcttacatgtgttcgtattgtcagcacagaatacgtagcaagtgttctacagacgtcgaaagaactagcaaacccactgttgtttgtggcgctctcacttcctgtactattttattactcaagataagcctaaaagaacagacaaaactatcacgaaaacgatttcttaacagaactattttaaaacaagagaatcctcaattaaaatcatgccattttctttctctgaaatctttaaattacagatgtgctcatctttgttgcctggatatgagttctttcagctgggcagcgggagactcaaagtagtgacttttaagggatcctaccagaggtgggggagccaatataaattacgtatcctaatctgagacactcttctgtcctaatacctgaagcttatagcttgtcaggtggcttttccatggaaaaacgaggacataagagagagggcggaccttaagagttctacggaggagccggtaacggcagcaggcttgtcaatcaactgcaaggttgcagcccaaaagaaaaagaactcacttgatcgctcatcatcgactcctcagaggccctctaggactaccgagaatctcttgccctttggctcttgcccccgacatctctcctggccccccgccctgccccaggaggtctggtcctctcacccgctgccaaattctcacacagcctcaaagggatcctcagggcgtaaagcagccccagccccgccacgaaccacaacgaggccccagtccccgccagcccggcccgcagtcgctccctccagcctagcgtcgggtttaggccagggacagatgcaggagacgctccaacagctgcggcttcacccacgccgccacggtccgccatcttgccgctatcgcaggcgccaggagctgggaggggagaaggacaggaaaccgggagtcgggaatcctgggatagtggcggacctgaagttggcctctgtgaaggctgagtcctggggaaccgggaccgagaagatttcgaaggtggaggagcgtgtctcaagattggggctacctgttctttcgtggggcagggaaggggcggacagcagcgcctattctggaggaactggactgagatgtgaccccgaagtgttaccgcttccaaacgaaatgagggtcacctttcacaccgccccccccccggggttggaaaagccaccgatcgttccagctgccgagcagctcttaaagctttggattcggctgtcgtggagataacgggcaccagaaaaacttgtaggagtagcaacagctatttggtcggatggaggccagaagccaagaataatcgaaacacgctgccagcgcccattagatggatgggaaatgagtgtaactcattgggaaagatattagacttcaaatcacctaaggcaaaccctacttcctggggcgcgggcgcgggcgctggcgttaggagacgtcactcccgcgcataactgacatggggccctcttggtcggcgtttccgggcgggtccttccgacggccgccgcggtgattccatcactcggctttcttcccggcctgcctcgcgcccgtagccgggctgggccagaacagcccaagatggccgacttcgatgatcgtgtgtcggatgaggagaaggtaaggggtccgcctctctctcttacctcctcccccgacagggaactggggcccggcccggctgcgttgggagcctagcagtgtccccaggaaaaagaagcttcttggtccatgctgacatacgctctccgcagtcgggacgcttccctcttagggggctttcctctgcctcacggtggccccagttcctcgttcctcgactctccttttctctcaggcctgaggcacagcccaggggcctccctgcaagggaacagacgtttcctttattggatcgtgactgtggacttttttctgtaattttgcgagagggtggtggttatgttgcgacatatcaaaaagcagttattttaccgcctttagcagttggggctcaccccatccccccatttgtagatataattggggttagtttagggcgagtcacttcctggtcaggatggcctcttaacttcccttttgctcctccttcctcaggaagtgattttgctgtcacgactcttcgacaaggagaggtcccaaatgttgtccatctccctacacatgcactacttttctcctgtactgtcgcctgtctgattcgctataataaatctgtgagcctcagggcatttgcttcagaatttgaacaccagtctttccctatagacacatcccttttaacgataatttttgaaaattttgtttcttgttaacaaatctagaatagctgatggattttcttaacctccagaaaggttttctgtaacacataataaaccttatgttaacacgttcaagactgaacaaagcatcctgccttctttgatgctccactgtggagtctttgatcagttgaatttgtcagtgtgcattttgtatgctcatttcttgaaaagggtcttaaatacaagagcacattctaaggtggaataacttttcttctgacagttgcacagtttcataacagtttgtcaggctt

SEQ ID NO: 3577 - DNA, 6000 bp, Homo sapiens
aaaaagaggtttacttaatcattcaaatcactatctggagggccacagagtaaggccctctaaatgcttggcaagaccaagatatcataattaggaagcttacttatgggggtgggaagctgaaagtcctgtgaacacaatgtttctgggtcaaggcaagattatgggggtgtctggatgaacctgaatttattttactttcttatgtcaatcactgcttatcccttccagtatgacttctcccagtgctcactcgaggtacctcttcactcttatttaccaaatccagttggaaagaatactgtcagagtgagtgctgttttctccgtcctaatctttctatctcagtagcatttgccactcttaattcattcatgccttggaaactttttccctcttgggtcctttttctttaaaacacacacctgggtgtgtgttttaatctgatcgctaaaggagagtacttctagctggtgaaggaaatactttcattaggggctttgcaaggctccaagtatatatatacaccatcattttggtaaccataaggctttgcagtttatgggatctattaggaagatgctcccagaggggtcaaatgttcccagcagtggcatggcagagcaccaatgatggcagatgctcagatagaaggaatgcacagaggcacccaaactgtggacatactcttgaatacaagaaacacctagagactaacagaaataattgtaggggaaggggtgttttacaggagatgaaggggtgtgaactggagagatatgagaattaatgaagttgtgttctctttcataccaataggctgtgcatacactgtgtgcttggcactatgctaggcactagataaagagacatggtttcaattatcaaggaactcagtcttgtaatcagggcaaatgtaggaaagcagacaatgaatagaacctcccagaacatttttgtgtttcaatttttaaagtagagatttttcattagagtttgaaatagttaattaaattttcttgggctggtttgatccaattcctccctacttctctattttagatggaaattgaggcccacccatagaggttaagtgaggtttccaaaatcagtgacaaggtggctagaagcacgaaagggaaaggccatatctaacactcacaatcactcttttccattacatcataatacctcttttttttttttttttttttttttttgatggagttttgctctgttgcccaggctggagtgcaatggcgcgatctcggctcactgcaacctccgcctcctgggttcaagctattctcctgcctcagcctcctgagtagctgggattacagacatgcaccaccacacctggctaattttgtatttttaatagagacagggtttcaccgtgttggtcaggctggtctctaactcctgacctcagatgatctgaccgccttggcctcccaaagtactgggattacgagcgtgagccatcatgcccagcccataatacctcatttataatccactaaatggatgtctctactctggtttttcattcatacctatatggaaaagaaaagtatagtgaaaaaagcatggctacataatcagaaaaacctgggatctgaattttctgacaaatttacactactttgtttagcattaagcctggtcgtaataaaacagctaagtgttctggaagaaattatgataaatcagtactactaacaagactggacatgtgagtttgcacctgcttattaggctttatgctcctgtcctaggatttctttttcttttcttttttctttttttttttttttgagatggagtcttgctctgtcacccaggctggagtgcagtggcacaatctcggctcactgcaaactctgcctcccgggttcacaccattctcctgcctcagcctcccgattagctgggactacaggcacctgccaccacgcccggctaatttttttgtatttttagtagagacggtgtttcactgcgttagccaggatctcgatctcctgaggtcaggtctcgatctcctgacctcgtgatccacccgcctcggcctcccaaagtgctgggattacaggcatgaaccaccgcgcccgggctttcttttctttttttttttttttgagacggagtttcgctcctgttgcccaggctggagtgcaatggcgtgatctcgggtcaccgcaacctccgcctcccaggttccagcgattctcctgcctcagcctactgagtagctgggattacaggcatgtgccactgcgcccagctaatttttgtatttttagtagagatggggtttctccatgttggtcaggctggtctcaaactcccgacctcagatgatgcacctgcctcggcctcccagagtgttggggtcacaggcgtgagccactgggcccggcctgtcctaggatgtcttaacagattatatgaatacctctcagcaaaactaactgaaaagtgaagatggaagaatgacagttttaatattaattgatgacttgttagaaaacagccacaccaaacaatctttagggcttgctttatcctacaatggtaactagtaaattaaggaggtaatacataatcaaggatccagtttaaaagcataaatatttggcaggtgcagtgactcacgcctgcaatctcggcactttgggaggccaaggcaggcggatcacgaggtcaggagtttgagactagcctgaccaacatattgaaaccctgtctctactaaaaatacaaaaaattagccgggtgtggtggcaggtgcctgtaatcccagctacttgggatgctgaggcaggagaatcacttgaactcaggaggtggaggttgcagtgagccgagatcgtaccactgcactccagcccgctgggagacagtgcaagacttcgtttcaaaaaaaaaaaaaaaaagtataaaatatttttcatgtgctctaacaaagccctcatatttcatctatttacaacattttctactgctctactaaataattttgataaacttgtttctcaaaaatgccttaacaccactaccattgtctaaactgaaagcatgtagtttttcttaatactgaaaactttatcttattactgaaagcattgtctaaactgaaagcatgacttctcaattaccatacttttgaaattgtacacaaatattccactagttaggctgaagggaaaaaatatgctagtcacacttttttccagccccccaaaattctctttgcttttatgttttacaaatgttgaatgaaataaaggaaatagacaatgaaaagaacccaaagaagtaattcatctcatatttcaggattcctaattatagtatcttggtcttgctaagcatgtaactaaagagctcaagttcattctcagaaactgtgaactcaaagctacaactaaaagatttatttctaaaagttattacactttcaacttcctgttttatttagacagctcatcatgaccatttcaggtaacaaaacccaacttcctctttataaagtgattaaaaaaacttcagcagttatgagaatagatgatattactagcttttacataaatatttacaaggaaactaagagtccattatcaccaaattttctaaaggttcactgcctttagaaaatgtaacaaagataaaaaacaatattaaaatatacttggcaacaaaaaaagtatgctagaagaggaaactggtcacagatctgctattaaaaaaaacaatactggctgggctcggtggctcacgcctgtaatcccagcactttgggaggccaaggcgggcagatcatgaggtcaggagttcgagaccagcctggccaacatagtgaaaccccgtctctactaaaaatacaaaaaattagccaggcttggtggcgggcgcctgtaatcctagctactcgagaggctgaggcaggagaatcgcttgaaccagagaggcagaggttgcagcgagcggagatcgcaccactgcacaccaccccgggtgacagagcgagactccatctcaaaaaaaaaaaaaaaaaaccataacccaagacattaatgttattaattaaaacactgccagtatctaaaggcatcttaattggcattttaaaatatatattttcccaagtttaattaaaggcattctaacctggtatcaaagacaaaaatccaacaacactggtcaatgtgtatcaggtaggcacaataaacttaaaagtttattatttaaattatttgtgaaattttggccggccgcggtggcttacgcctgtaatcccagcactttaagtggcgaagacggatggatcgtttgagcccaagagtttgagaccggcctgggcaacaagacgaaacccactctctacaagaaatacaaaaattagctggacttggtggcgggtgcctgtaatcccagctactcgggaagctgaggcaggagaataatttgaaccagggaggcggaagttgcagtgagccgagcgagactccgtctcaaaaaaaaaaaaaaattgtttagttgtattgtaacaggatttttgcttaattttatttgaatagtaactatttgccttagaacaatttattatagatcgatttccagcataggcttatacataaatgtttttgtcctaaatcttaaacatgtatgaagatcagtttccaaataagagaaaatctaacgctgttgtcaatggcttgttaaacatttcaaaatggcatgccatatctacatatatcaagttattccgtacagaggacttatggatcataacagtccccttcccatcccaacttcttattgaaaaaaacacccaggtagatttacagagcactcaaggggacacattttctaatagccacagtgggagacaaatgtcataattcttgtccaataagttgccttgtgaggtcattctaagttctacgtgccctaaaaccatgtacttactgaaaagcctgacaaactgttatgaaactgtgcaactgtcagaagaaaagttattccaccttagaatgtgctcttgtatttaagacccttttcaagaaatgagcatacaaaatgcacactgacaaattcaactgatcaaagactccacagtggagcatcaaagaaggcaggatgctttgttcagtcttgaacgtgttaacataaggtttattatgtgttacagaaaacctttctggaggttaagaaaatccatcagctattctagatttgttaacaagaaacaaaattttcaaaaattatcgttaaaagggatgtgtctatagggaaagactggtgttcaaattctgaagcaaatgccctgaggctcacagatttattatagcgaatcagacaggcgacagtacaggagaaaagtagtgcatgtgtagggagatggacaacatttgggacctctccttgtcgaagagtcgtgacagcaaaatcacttcctgaggaaggaggagcaaaagggaagttaagaggccatcctgaccaggaagtgactcgccctaaactaaccccaattatatctacaaatggggggatggggtgagccccaactgctaaaggcggtaaaataactgctttttgatatgtcgcaacataaccaccaccctctcgcaaaattacagaaaaaagtccacagtcacgatccaataaaggaaacgtctgttcccttgcagggaggcccctgggctgtgcctcaggcctgagagaaaaggagagtcgaggaacgaggaactggggccaccgtgaggcagaggaaagccccctaagagggaagcgtcccgactgcggagagcgtatgtcagcatggaccaagaagcttctttttcctggggacactgctaggctcccaacgcagccgggccgggccccagttccctgtcgggggaggaggtaagagagagaggcggaccccttaccttctcctcatccgacacacgatcatcgaagtcggccatcttgggctgttctggccca

SEQ ID NO: 3578 - DNA, 6000 bp, Homo sapiens
aaagctgttttgttggcaagaaggatacctttctttacaaaattagctttgagcctgtccaaagctaaggacatataagcatctgtgttcagcgactggaatctcaagtaagttctcaaagtcaatatttaggaaattggacacctaccatgtactagggtacatgtagataatttctttttggtaaatacatatagtcagcaaatgctgtgcacatattcaagtaatagaaagtaattctggcaggtactttattaatatatatagtcttggctgtgctgacagaaaaaaaagcaggaacttgtggagccttaagaaccaaagaactaaaaatcttgttgaattaaatcctggtgagagaaatcatcaagatgggaaagttggagggaactagagagataggaacctagagttctctgatgggtgatactcttttttttttttttttttttttgagacagagtctcacactgttgcccaggctggagtgcggtggcatgatcttggctcactgcagcctctgcctcccaggttcaagtgattctcctgcctcagcttccctattagctgggattacaggcatgcaccactacactcagctaatttttgtatttttagtagagacggggtttcaccatgttggccaggctggtcttgaactcctgacctcaggtgatccacccgcactggcctcccaaagtgctgggcttacaggtgtgagccaccgtgcccggctgggtgatagtcttaagtaatgggaaaaattatgaactagggcaactttcctaagacttccttcctctgtaaaaaagaaccctctactccaaggagatcaataggtaaaaaatacaggtgaaggctgaagtgggagcaacccagtgataactacacctgtgtaaggcttgtgcaagacatttgataggtaattgagtaagttaagactatgggagacttctgaacaaaagtgtggggttgcagtctgctcctataaccagtcctaaagtttaagggtagtgctgtaaaggaaaggaaagtttgggaaagggcccaaaattataaataacaatagccaccatgttttaagcttttgctacatgtctggcaatgtgctaggtactctgcatatacatataaatacccatcttgtaaggtgagtattatcctcatcatatagttgtaaaaataggttgactttgcagagtcacacacttgtaaaaattgtccttttttttttttctttttaaagacagggtctcactcttgcccaggctggagtgcagtggcatgatcttggctcactgcagcctcgaccttcgacctccaggtctcaagcaatcctccacctcagcctactgagaagctgggactacaggtgcacaccaccatgcctggctaatttttgtatttttggtagagacagggtttcaccatgttgcccaggctggtcttgaactcctgagctcaagggatccacctgccttaccttcccaaactgttggaattataggcgtgagccatggcaccctggctaaaattgttctttctaaaactacagtttctacattgagttaattagtgtactttcctctgtgatttcccttttgtcagaatgctattttattcactagccttgggcagcttaattcatctcagatttgcatttaagaaactgagggccgggtgccgtggcccgtaatcccagcactttgggaggccaaggccggcggatcacgaggtcaggaaattgagaccatcctggctaacatggtgaaaacctgtctctactaaaaacacaaagattaactgggtgtggtggcaggcgcctgtagtcccagctactcaggaggctgaggcaggaggcggagcttgcagtgagccgcagttgcaccactgcactccagcctgggtgacagagtgagacactatctcggaaaaaaaaaaaaaaaaaaaaaagccaaactcgggcagatcacctgaggttgggagttcgagaccagcctggccaacatggtgaaaccccatctctactgaaaatacaaaaattagccgggcatggtggcacatccctgtaatcccagctactcgggaggctgaggcaggaggcttgaacccaggaggcagagattgcagtgagctgagagagccgagattgcaccactgcactccagcctgggcgacagagcaagactctgtctcaaaaaaaaaaaaaagaaactgagaagaaaaatatgatccaagcagcatttcctataagctccccaaagtaaattttgctccaaaactaatttgggggtatctgcatagagtttctggccagcaatacttgagcaagaagagtaaaaaataatctctcttgtggggaatgaatagggtcttcatctctaggtatgctggatgttttctttctttccttccagattacgctcctctattctgtagcctgttctctgtcctgggagactgacctatatgaacatcaatgggcttcctgtgctttggcctccagttggattcagccaatagggagccctgacaggagactgggggaagagaaaagactgaagtcgatgtattgacatttgccaggcacagtggtgcactcctgtaatctcagctactcgggaagctgaggcacgaaaatcacttgaacctgggaggcggaggttttggtgagctaagatcacaccactgcactccagcaactgtatcgcaaaaaaaaaaaaaaaaaaaaaaaaaagtcactgcttctctcaaggcactctccccctccaggacctagaaactaataactccttttatccttttaggcctaatacagttattagcctccagttactgacctatcctttgcccatacctttcaaaatagcccttcattattttgagaatgttatttcctgttgggaccctgtctgatacacctggtaaaggtaggtgatcttttcgatttacaggcttcatattttatccatgtacttgaaccttactctcatacatataaccttatattcttatgagccaacagttctgaagggtcaactgctggattaagtagcagagagtgacgcatacctgtgtggttctcatggatgggacagtgacatcaaggagttaaaaacctgagagacaataatatctcaggcccctgtgacttagcccccaaagaacccaagatgctgaacagcttttcaagctctgtgactgtggaaccttctgtgattcaagtccccaaagccttacacaaactgatggaatctgtctgctggggccctggtttctccataacctcccaggatgcctctgagaaatcagcttagaaatccctgaggatgatgatgctatcctcccgttggcacattctggttttcctaaagacaaaaactgagctaatggtatgattttttaaaaaagagtattagcagattccttgaggtcatatttatccttctattgtcagggataatttactttaattcatcctcttaatttattattcactactctctatcagggagaggtatctgtattaatgaactgcatacttggtagaagtctgctttattttgggcaaatcattttcccacaaagcacttaatttaaatatatatatttatacggtactttacaaatccctgttgccatatgttctttccattccttaccaaaaaaacagcctcaaagatgttggttgaattgccaaggtcacatagaaaacaagaggtagagacccaggactgttgctctcactgcaacatagttacttctgttagctctgagagttcagtttagatactctttggctaaagaagtcaccatagtgataaatactaataaaagaacatattttataattaaactacaaccaggactttaacctataaattactgctgcctgcaaagaattacaagattaaatttccattgtatatatctctcttttaggtctatatttaaaccttaggatcatttaccctttttgtttgtgaccaccttcaaggcaagaactatatttgagttttgtccctcagaggactgtgaaaggctgcagccttgaaacttttccttgtccttcaaaatttcggtttgaagaggataatgaagtcaagtgactggattctctactccttccttgcttgctttcctccagtatctaggaaactagcactggccccgaggcaccttggtttaagtaaggcaccccatacgggaaaaactgagacctaaaggaccacttcaacctggtgaaacaagcgccaagcaaaaagaggtcagactctggaggacaaccaaatttggccagacaagcttaactgaaatggaaataatgttcagagggcattaaaaaaccctgggggtaaaatctataggtgaaaattataaggatacaaagggaaagggattgcctagtgaaagcagatcgcaaagttaggaataggaatagcctatgcgtgagtttgaaggaattactatctcacaagataccatgccttcgcctttagaaagcgttttcacattctggtacttgagcttctcaaccccatttttcagatgaacaaatggaggctccgggcggagttctgaccagtcatgatcacaagtaataaagcgcggaactaggaacaagttcaggcttccccaaattgttctcagcagtttcccgccgaggacatttaggtagcaaacgggaaggggactggtgaggcttccttagcagcaagagttggcccgacccccaggcggagccagcgggagaatgtggggctcgaactgggcggacattgcagccacgcgggggtgaaaaacccgatttgtaaattcgcaccagctgcctcctgcgttaggccttaaagcgttgttagcgagggtggtgggcggtgcaggtggtcctgttcgtccctctcattggtgccggggataacggacaggtatccgcagccagtcccaaccggagcaaagggagcttcacgacagctacacgctacctggtcctgagcgcgcggagcttgagcgcggcggcggcttcttggggggtggctaagcgtgcgtgtgacgccgcgcacgctctcgtcccccgtcccgctccttaagtaagagccgggggcagacccttgcctccaacagggacgaatactttgctgttttttgtagcctacccctcatgcaacccaaaatctgccagacaaattctcctaaggacaagattttctgatgtggaacttcaagtaacgtacactgcagcttcattttatttctcaaaaaattccctccgccgccccatcccatagactaggcctttaagaaagtccctcttacctcgatctggaaacgagctccgagggccttccccagcctcaactaaactttaccggggtccccctggccctggctcacctcgacaccgttaattcgctcgtctcctttaggaaacctttccagactgccccccggcgggaccgcagccatcccattacccgggagagcccagggcccagatgaaggcagagagcgagggcgcccagagcgagccgaccgactgccgccctcccccgcccgagtgaagtcaggcagtggctgcagacacggctgtattgggaagcggaggctcctacacagtaggagaggcacgtcccagacccagaaggcccgaggactctggacacagcgcgcgcggcccgcccggggcacagtctctgggggagccccgaggggcgagttaaggcagcttggctggaagggagcggggagtgggagtccgccagctccccctgaaatgctggctcactgaggagacgggcttctcacctcccactcttctgtcgaggacagggggaaagacagtcaataaataaacccgaggcgaaaaggggcctcgggagactctgcgagtcgggaaggctggaggtgcggggcgagggggcggtgaaacgtcctgaagagcgtccagctcgtggccgagaggactcgggcgctccccacgctggaggccgtgggccgctccct

SEQ ID NO: 3579 - DNA, 6000 bp, Homo sapiens
taatttttgtatttttggtagagacagggtttcaccatgttgcccaggctggtcttgaactcctgagctcaagggatccacctgccttaccttcccaaactgttggaattataggcgtgagccatggcaccctggctaaaattgttctttctaaaactacagtttctacattgagttaattagtgtactttcctctgtgatttcccttttgtcagaatgctattttattcactagccttgggcagcttaattcatctcagatttgcatttaagaaactgagggccgggtgccgtggcccgtaatcccagcactttgggaggccaaggccggcggatcacgaggtcaggaaattgagaccatcctggctaacatggtgaaaacctgtctctactaaaaacacaaagattaactgggtgtggtggcaggcgcctgtagtcccagctactcaggaggctgaggcaggaggcggagcttgcagtgagccgcagttgcaccactgcactccagcctgggtgacagagtgagacactatctcggaaaaaaaaaaaaaaaaaaaaaagccaaactcgggcagatcacctgaggttgggagttcgagaccagcctggccaacatggtgaaaccccatctctactgaaaatacaaaaattagccgggcatggtggcacatccctgtaatcccagctactcgggaggctgaggcaggaggcttgaacccaggaggcagagattgcagtgagctgagagagccgagattgcaccactgcactccagcctgggcgacagagcaagactctgtctcaaaaaaaaaaaaaagaaactgagaagaaaaatatgatccaagcagcatttcctataagctccccaaagtaaattttgctccaaaactaatttgggggtatctgcatagagtttctggccagcaatacttgagcaagaagagtaaaaaataatctctcttgtggggaatgaatagggtcttcatctctaggtatgctggatgttttctttctttccttccagattacgctcctctattctgtagcctgttctctgtcctgggagactgacctatatgaacatcaatgggcttcctgtgctttggcctccagttggattcagccaatagggagccctgacaggagactgggggaagagaaaagactgaagtcgatgtattgacatttgccaggcacagtggtgcactcctgtaatctcagctactcgggaagctgaggcacgaaaatcacttgaacctgggaggcggaggttttggtgagctaagatcacaccactgcactccagcaactgtatcgcaaaaaaaaaaaaaaaaaaaaaaaaaagtcactgcttctctcaaggcactctccccctccaggacctagaaactaataactccttttatccttttaggcctaatacagttattagcctccagttactgacctatcctttgcccatacctttcaaaatagcccttcattattttgagaatgttatttcctgttgggaccctgtctgatacacctggtaaaggtaggtgatcttttcgatttacaggcttcatattttatccatgtacttgaaccttactctcatacatataaccttatattcttatgagccaacagttctgaagggtcaactgctggattaagtagcagagagtgacgcatacctgtgtggttctcatggatgggacagtgacatcaaggagttaaaaacctgagagacaataatatctcaggcccctgtgacttagcccccaaagaacccaagatgctgaacagcttttcaagctctgtgactgtggaaccttctgtgattcaagtccccaaagccttacacaaactgatggaatctgtctgctggggccctggtttctccataacctcccaggatgcctctgagaaatcagcttagaaatccctgaggatgatgatgctatcctcccgttggcacattctggttttcctaaagacaaaaactgagctaatggtatgattttttaaaaaagagtattagcagattccttgaggtcatatttatccttctattgtcagggataatttactttaattcatcctcttaatttattattcactactctctatcagggagaggtatctgtattaatgaactgcatacttggtagaagtctgctttattttgggcaaatcattttcccacaaagcacttaatttaaatatatatatttatacggtactttacaaatccctgttgccatatgttctttccattccttaccaaaaaaacagcctcaaagatgttggttgaattgccaaggtcacatagaaaacaagaggtagagacccaggactgttgctctcactgcaacatagttacttctgttagctctgagagttcagtttagatactctttggctaaagaagtcaccatagtgataaatactaataaaagaacatattttataattaaactacaaccaggactttaacctataaattactgctgcctgcaaagaattacaagattaaatttccattgtatatatctctcttttaggtctatatttaaaccttaggatcatttaccctttttgtttgtgaccaccttcaaggcaagaactatatttgagttttgtccctcagaggactgtgaaaggctgcagccttgaaacttttccttgtccttcaaaatttcggtttgaagaggataatgaagtcaagtgactggattctctactccttccttgcttgctttcctccagtatctaggaaactagcactggccccgaggcaccttggtttaagtaaggcaccccatacgggaaaaactgagacctaaaggaccacttcaacctggtgaaacaagcgccaagcaaaaagaggtcagactctggaggacaaccaaatttggccagacaagcttaactgaaatggaaataatgttcagagggcattaaaaaaccctgggggtaaaatctataggtgaaaattataaggatacaaagggaaagggattgcctagtgaaagcagatcgcaaagttaggaataggaatagcctatgcgtgagtttgaaggaattactatctcacaagataccatgccttcgcctttagaaagcgttttcacattctggtacttgagcttctcaaccccatttttcagatgaacaaatggaggctccgggcggagttctgaccagtcatgatcacaagtaataaagcgcggaactaggaacaagttcaggcttccccaaattgttctcagcagtttcccgccgaggacatttaggtagcaaacgggaaggggactggtgaggcttccttagcagcaagagttggcccgacccccaggcggagccagcgggagaatgtggggctcgaactgggcggacattgcagccacgcgggggtgaaaaacccgatttgtaaattcgcaccagctgcctcctgcgttaggccttaaagcgttgttagcgagggtggtgggcggtgcaggtggtcctgttcgtccctctcattggtgccggggataacggacaggtatccgcagccagtcccaaccggagcaaagggagcttcacgacagctacacgctacctggtcctgagcgcgcggagcttgagcgcggcggcggcttcttggggggtggctaagcgtgcgtgtgacgccgcgcacgctctcgtcccccgtcccgctccttaagtaagagccgggggcagacccttgcctccaacagggacgaatactttgctgttttttgtagcctacccctcatgcaacccaaaatctgccagacaaattctcctaaggacaagattttctgatgtggaacttcaagtaacgtacactgcagcttcattttatttctcaaaaaattccctccgccgccccatcccatagactaggcctttaagaaagtccctcttacctcgatctggaaacgagctccgagggccttccccagcctcaactaaactttaccggggtccccctggccctggctcacctcgacaccgttaattcgctcgtctcctttaggaaacctttccagactgccccccggcgggaccgcagccatcccattacccgggagagcccagggcccagatgaaggcagagagcgagggcgcccagagcgagccgaccgactgccgccctcccccgcccgagtgaagtcaggcagtggctgcagacacggctgtattgggaagcggaggctcctacacagtaggagaggcacgtcccagacccagaaggcccgaggactctggacacagcgcgcgcggcccgcccggggcacagtctctgggggagccccgaggggcgagttaaggcagcttggctggaagggagcggggagtgggagtccgccagctccccctgaaatgctggctcactgaggagacgggcttctcacctcccactcttctgtcgaggacagggggaaagacagtcaataaataaacccgaggcgaaaaggggcctcgggagactctgcgagtcgggaaggctggaggtgcggggcgagggggcggtgaaacgtcctgaagagcgtccagctcgtggccgagaggactcgggcgctccccacgctggaggccgtgggccgctccctttaaaagttgaaacggccgccgttcgggacggcctggcgggaggagggcccgacgaggggaggcttcagggacaactggggcttctcgacgtccacccttttcagggcgcggccccggtagccctcgggccggcccaggtacaggaggtgcttcccgggacccccggagtacctggagggacctcccgaggggactcgagtgagcagggcagggggggcccggtggccggagaaaggcaacctccggcctccgccgacgcccagccggggagcgggggcggagagcgcgggccgggcgggggcagaggcgcacctgccctcggggggcacgtccagcctcagcggcgaggcgcactcgtggggcctggggctggggccgcccaagagggcgggggcgggctccggcgggagcgcccgcgaggttaaaggggcggggggctcggccccctttctgggcggctgcgggccgtgcaggtagcgcagcagttcctccagggtggtgacttccacggcctgcccgggacagccgggcggcggtggcctcaccagcacgcggggcgcgggcccgcccgccgcgtgcccgccccgtgagcggcccggaccctccttggcgttgttcctgttctggttccactcccaggggtccccggcggcgcggaggtgcttgaccggcagctccggcgtggactcgggggtgggcaggcaggccagctccggcgggggcacgccctccggaggcggcaggaaggtggtgtagagctgcggcgtctgcaccgcgtccccgtccttggagggcggcgggggctctgggcccccaccgtggagccgggccaaactgcggagggagagagggcgcgggagccccggagtctcgatgtccttgccccgacgtcggtgggcgcggcgacaagcacaggagaccaggaggccagagactgaggcgcccagggcaaaagctgcggccacactggccaggaggagtgggatggggacggagcgggaggccgaggctgggggcaggtcccggcgcacgcctgccgaccgagagggaggagggaggctcagccaaggggaggcggtgcggggtacctaggcccagaggcgccggcagttcccaggcctgacatcatcgtccctcccgctgctactcagcctcactcctacagcctccaccatcctcaggattcacctctcctgactcctcagcatacagcccacgcactacccctcacactcaggccagagcttgggcctggggattccccatcccacttctggcccctgtagccatgccaagagcaactgccaaaaactgctcgtgcaggagaactcggggctgggatgcccaattctggggaagggaggctccaaacaggcgttagtgagcaccaaa

SEQ ID NO: 3580 - DNA, 6000 bp, Homo sapiens
cccagcactttgggaggctaaggtgggcagatcacctaaggttgggagttcaagaccagcctgaccgacatagagaaaccccgtctctactaaaaatacaaaattagccgggcatggtggcgggcgcctgtagtcccagctactcaggaggctgaggcaggagaatcacttgaacccgggaggtggaggttgccatgaggcaagatcgcgccattgcactctggcctgagcaacaagagcgaaactccatcttaaaaaaaaaaaaaaaaagacaggaagcttgtcttttatctttttatccccagcacttaattgtaatgcctggcatacagtaagtagaggaagaaataaatgcatcaaagattaaaaacaaacaaacatcctatggctcagaggaaaaacaacaacaacaacaaaaaacaaaaacaaaaaaaaaacaagccaggtatggtggctcatttctgtaatcccagcattttgggaggccaaggcaggcgaatcatgaggtcaggagatcgagaccatcctggctaacatggtgaaaccccgtgtcgattaaaaatacaaaaaattagctgggcgtggtagcgcgcgcctgtaatcccagctactcaggaggctgaggcaggagaatagcttgaacctgggaggcagaggttgcagtgagccgagatcgtgccactgcactccagcctgggcgacagagtgagactccatctcaaaaaagtaaataaataaaaataggacaggcacggtggttcacacctgtaatcccagcacttcgggaggccgagctgggcgaatcatgaggtcaggagttcaagaccagcctggccaacatagtgaaaccccgtctctactaaaaatacaaaaattagccgggcgtgggggtgcgcgcctgtaatcccagctacttgggaggctgaggcaggagaatcacttgaacccaggaggcagaggttgcagtgagccgagatcatgccactgcactccagcctgggcgacagtgtgagactcgatctcataaataaataaataaataccccaaacaaaaaaagagtaaaagctgtgaactatctccagctatgtcaggctgacttacttgactgctttaaatcacactaaacttactctttctgaactgatatgagagtattgatcttaaccatggtaaaacctcacctaaaacaaacatcggactgttccatcctgaatacttttccaaataactgaagtttatccaattaagtgcaaaatatcttcattttgcttcaaagtagaaattgctcaaaaaagtactattcacttcctgtagattatacagtggaaagagcaccattgaaagtcattgagacttagctagattcatctctggagtatggctttggataaactacttatctctaagtctgattctgtcttctgtaagtggacatactaccttcctgcctacttcttaggatcaaataagatcctgtaggtgaaacattttgcaaattcaaaagtgttttgcacatttaagataccgtcatttggccagggtacacagtgactcactcctgtaatctcagcactttgggagattgaggcaggaggtctgtttgagtccaggagtccaaggctgcagtgagcagtgtgagccactgtactccagcctgggcaagatagcaagaccctatctctaaaaaaaatttgtggccaggcgcagtggctcacgcctgtaatcccagcactttgggaggtcgaggtgggtggatcacaaggtcaggagttcgagaccagcctggccaatatggtgaaaccccatctctacttaaaatacaaaaaaattagctgggcatggtggcacatgcctgtaatcccagctactcgggaggctaaggcaggagaattgcttgaatccgggaggtggaggttgcagtgagccgagatcacgccgctgcactccagcctgggtgacagagcgagactccatctcgaaaaaaaaattgttcttggccaggtgtggtggctcatgcctgtaatcccagcactttgggaggctgaggtgggtggatcacgatgtcaggagttcaagaccagcctggccaagatggtagaaaccccgtctctactaaaaatacaaaaattagccaggcatggcagtgggtgcttgaaatcccagctactcaggaggctgaggcagagaatcagttgaacccgggaggcagaggttgcagtgagccgagattgcaccactgcactccaccctgggcgacagagtgagactctgtctcaattgaagaaaaaaaaaaaaatgagagagaaaataaaagacttccccatgaatgaagtaaatgaacattataacatgtgactcctatgttactaccattttcccctcatatcctggttcttggatatgttttgactttattctttcagcacatatttattgaccacagtatgtgccaagcactgtgtagacactaaaagataatctgagcttagtgggtagacagttaataaaatcacaaattacagacgggcgctatggctcatgcctgtaatcccagcactttgggaggccaagatgggcagatagcctgaggccaggagttcgagaccagcctggccaacatggcgaaaccctgtctctactaaaaattcaaaaattagtcaggtgtggtggcagtgtaatcccagctgctcaggaggctgaggcaggagaatcacttgaacctgggaggcagaggttgcagtgagctgaaatcgcatcactgcactccagcctgggtgacagggacagagcaagactctgtcaaaaaaaaaaagaaagaaagagagagagagaggaaggaagggagggagggaggggagtctgaagctggagaggaaaacaggtaaagactaggtagcagaattctgaatccagaagttattattgtatttgcatcttcttatatttttattccctttattctttttcttttttcttttctttttttggagaccgagtctcactctatcaccaggctggagggcagaggcgcgatctcggctcactacaacctctgcctccctggttcaagcgaatctcctgcctcagcttcccgagtagctgggactacaggcatgtgccatcatgcccagctaatttttgtatttttagtagagatggggtttcaccatgttagccaggatggtcttgatctcctaacctcgtgatccgcccacctcggtgtcccaaagtgctgggattacaggtgtgagccaccatgcccagccgagacagggtttcaccacgttggccaggctggtctcaaacttctgacctcaggtgatccacccaccttggcttcccaaagtgctgggattacagtcatgagccaccgcgcccggcctggggcaacttttttaaagtttgccatgatctgatctttttccttcttcacttatctctcaaacaacttacattccagacataaatcaccacttcctgagaacgtcctgtattttgtttttttcctgcatgtgcttatgccgtccccatcatctgggacttcttccccatctctggctattaagtagttgaatctatctttccaagtctacctcttcagccctatcataattaagcttctttactctcaaaattatttaaatctccattaaagttaatggcattgtttgactagtattactgttctttatgtttaagcttatttccctcgccagattccccataagattcttgatagcaagtgtttttgtctcattcaacaactgtgacttccaggatgggtgcagtggctcacgcctgtaatcccaacactttgggagactaaggtaggaggattgcttgagcttagaagttcagcctgggcaacatagttagaccctcctctctacaaaaaaaaggaaggcttgtgagcctctggtcccagctacttgggaggctgaagtaggaagagctcttgagcccaggaggtcaaggctgcagtcagctgtgatgatgccactgcactgtggcctgggcgacagagtgagaccctatctcaaaaacaaaacaacaaacaaacaaacaaaacccaattgtggcttcccctcattttgtatccctttagcagctacaaagtagctactacagtagcctactcagtaggccctgcggggtgcgttggctcacacctgtaatcccagcactctggaaggccaaggtggatcacctgaggtcaggagttcaagacgatcctggccaacatggtgaaaccgtctctactaaaaatacaaaataagccaggcatggtggcacaggcctgtaatttcagctacttgggaggttgaggcaggagaatcacttgaacccgggaggcagaggttgcagtgagccgagatcaccccattgcactccagcctgggcaacaagagcaaaactctgtctcaaaaaaaaaaaaaaaaaaaaaaaaaaaggcaactcagtaggcttgttcctctacgctagtgattcagtgctgtgctggcacctgctggtcacctgtggtgcagcagccctggtcccagcaccttcctcccttcagtattaagggttgtgacagtctgtgctcttacctggcaatcactggaataatatattaaatacttgccccacagcaccacctttcaatcttcagaacttttcccactgacctcctaccccagaaatttgggctttacatccttcccagtactgtagaaatgtaaggacaggatcttcaggaactgggcagcaagaaaagaaagaagcaatttgagagtggaggatgcaaatccctttccccccttcaaagaattgagactatttccaacagaattccactctttttgacctttgtcttatttctaggttgctcttgggccataggccttcttggtgacagaagtgatgaaccggaggttaagcagagagtaggtaggcggggctcaaggggtggggccaagccaaagggctctcacactaagtgaagcttctccattctgtaagctttccgggaacatccaaggcaagactggcacccagcacagcaggtgagggaccggcagtgacagaatggtagactttaggggtaatggtggcagaggaatctctagctctttcagtcttagcttttcatattgtgaaactctcgcttgtacaattcttgggtcctttgtagagcttagcttagtttttctggtggcaaggcagcctctgaaagacctggttttggatgcggtgggggcagggctgagggatgcaggtggatccacatccatatggatgtgtgcgaaatgcaaggaaatcttaggaaacaaggagatagatgggtaagggccagagggagagtatggccaggccagaggatcatagggaggacccagacaagagaaaaagggagactgaaacagggagagagggagaagacagcggaataaatgtgagacggcaatgggggcaatggagagctgggtaacaggaaggccaaggaggaaggaaggctcacatggagcaatctcctcttccggctggggagcatggtccagaaagccccaaggcaagctgggagcaaagcaaggttcaggtttccactggaaggattcagctggggaaaaaaacccccacagtctccacctcctctgcctcttcagactcccattttggtttgggggagagggcgaggctgctcctcactgcggtcacagccacatcctgcagagcagaggagggggaagtaagaagcaaaacaaccagaagaaccacaggcgaagaccatggggagagaaccctggacacatggagctgatatgccaccaagagggtcctgagttcagtgtagcagaaggctcagaccttcaggactgcctgcccttcttgaggtgttggcttctcgtgcttcctcagtgtgctttaaccacactgggagcattccggggaaggaggtttctctggattatttggtttgaagcccatctttataatttactagtgactttggccaaatt

SEQ ID NO: 3581 - DNA, 6000 bp, Homo sapiens
ctgtgcaactatggattatatctataatattaagtacaaggagatcctgcaaatcagcacaaaaaaaggtaagaaacccagtttaaaaatgggcatggcatgtgaacaggaaatatatacaaaaaggaaaacttgaatgccaacaagcatatgatcagatgtttaacctcacaagagatcagaaaaaggaagatcaatagacaatgatatataactttatagtcataatgcttggcaaaaattaaaagatggataataccaagtagagctgaggacatgggataaaatagttcttcataattggtggtggtgtcaaggcattcagccactcagatgagcatccagaaatcacttagtgaaattaaatatataggtgcatgtctgtgaataaacaagtttcagccaggagtgtactggggtctttgctcacctctggggaaaatcagatttggttttcttactaacttggcagatgcccttggaagtctcctctaggtttgtgaaggttcatagcagctactttccttatgcatcactctctgcgactgctgagtcacctctggagctctgagttacaatccactgagtccacttccctggtagaacactggatggaagaaagaaataggaactttgttctctttatgcccctgtccttttaacctccatgtgactaacatcctaggtgtagcagcatacttaaatcctttttctagatggttaagacaatttctgaaggaaattacaatgccggagggaccacaattgaagataacttgaattttcatctaatgagaagatactttaaaaaatcataacaactagtataaggtggtttctcctattttgtcctccatataaatttgctcccaagtgtcacccaggtccctttgaatctctatggctcgtaagcccccccctcctcctcaaagagattgtcagctctgaatatttctcctttgtctatcctcaaggaacctctggttccagaatcagagattctgcaggtgtaattggggagggtagagcaagacttagcaaagctcttccatttaaattcccagcctgtgggagccaccagcctttgatttatttattaagttcatctctcaaaggcaaatattattttctttagcattcacagaactaagatctacttgtaacaattatttctccttattaataaggtttggaaataccccaaaacataatgggtccctgttattgtacatagggttgttttatttttccatgactttgccaacctgtgatgtttggtggcattactgaagatcaatatgagtgtttaaagatgctctctttgactctatttcagttcagattctctctatgcctggaggatagcaggagagttgggggcaggtatggtcttctaatttcttctgttgcagaatgaatcaacagaagcagcagggaagaaggagatgtaaaaatacagcataattcttattggacagtgctggaagttcctgtgggagtttgagatagaaaaatcgagaggtactagtctgaaatggagaggctcatcagttcagggtaggatctcagagagatactggatgtcaaacgtggactttgcactttcccctgcaacctctctccctctctccactttgtttgtccttaatggaagaaggtcgattatattaagtctacagatgaattatttggggaaagattcactaaatttacaacatcttttgagtgcctaccttggtgctagggactattctaagtgtatcaaatgctttgactcatttaatcctcccaacccccgtaaagcaagtactattatgatcatgcttatttttataaatgagaaaactgtggcaccgaggagggaaggtgacctgtccagttcacacagttaatgagcagaagagctgggattggaagtcacatagtttaactccagaaccacccactcccaaccatcatgcaacaccacctccccatccaggatatggtgtatttttcccacttatttgaatctttgacattttcagtagaatttttataatttaaaagatatgggccatgcacggtggctcacgcctgtaatcccagcactttgggaggctgaggcgggcagatcacgaggtcaagagatcgagaccatcctggccaacatggtgaaaccccatctctactaaaaatacaaaaattagctgtgtgtggtggcatgtgcctgtagtcccagctactcgggaggctaaggcaggagaatcacttgaacccaggaggcagatgttgcagtgagctgagatcacgccattgcgtgccagcctggcgacagagtaagactcaatctcaaaaaaataaaaaatacatatatatggttctggacaatttttcttacagttattttgggattttcaaatagtttttttgttgtctatatggtagaattcttaaaattacaatttctgattatgaaatttaaagttagttgaattcataacgatgaataaagtcacatgtgagttcaaaagctcgttaactcgtgcactgtcttgctagtctcatcccttgcactgtttaagagtggagagtgggatgtgagcaggagtgcctggtaaggaggcagtaggagctgacgctaaagagccttgggtaacggtaagaagcttgccttgctcctgaatcaaaccttccaacagaaggcagggaagtgagatcattaggtttgttttttaaaaagcatttttcttatagcattttactgggtgatttgggcttgggaaaggtcggtggcagggcacctgttagggcattattgcagtatttcaagtgagagataaagtctgaccccaggcaacagcagtaagaaaaatgggagtagcgaggatggggcaggggggcagtacactgaggggagggtaaggaacaggtctcaggtaaaagcgacagtcctgggtgaccagttaaacgttgggggagaggaaaagaaaggagatgaagttgccaccagaaagagtggcctcaggagaaaggggttgtacagggttggggatggggtgggatgggcagaatgtatcagagaaatagtacccttggggttggtgtggtacaggtgagtgggcctgaatgatagtaatggaaatcccaaagcatgatataaaaactaacgaaatttgaaaagtaataaacatgaaaaaaatgaaaaattttgatttatgggggatttatttggcttctattggagaatgattaggactgaagctaactacttggaagttattggcatataaatggtatgtgaggccagaggaaatggtgagatgagcccaagtagagaggccagctttaaacaacaacaacaactaccaaaaaaaaaaaaaaaaaaaaaaaagcaaaacaaagaaataggacacagagttagatttgaatgtcagatatatgatgaataattgtttagtatattccatgtttggacatgtttaagacctacttgtcctaaaaataatgtattatttatctgaaattcaaatttaactgggcaccatgtatttcatctggcaaccataacaggggcagcacacagaaatgttggcagggaccaggcaggcctttcagatagtgaggtggtgtgtgagacacaggccagtggtggaggctgggtgacccagaactcctgtctctcattctcaggggcagctgctacatacttcccactgattgggtttgcagagatggcctcgagggtgtctgatattctgatatttcaaaacagaatagaaatatgtattttaatgtgtatttaatatatatattttaaaatatttttaatgttgatattaaaagtggtcagttgggctcagtgcagtggctcatgcctgtaattccagcactttgggaaactgaggcaggaggatgtcttgaagctaggagtttgagacaagcctgggcaacatagcaagtccccatctgtacaaaaaaaaaaaagaataaattagtcaggtgtagtgacttatgcctataatcccagctactcaggaggccaaggcaagaggattgcttgagcccaggagtttgaggctgcagttaactacgatagcaccactgcactccagcctgggtgacagagtgagactctgtctctatttaaataaataagtaaataaataaactgggcaaacaatgaaaatgaaaacattgcgaaatacaaagcagctctgtgggttccactggtttgcagcctctgatctaatttctaaagtgggtgtagcaggtttttaacctgtaaattatggtgatcggcaggtcagggtaaatggtagttgtgtgtggggaagagatgatggcaacagatgttttcctcctgcaaaaactaaaatgtgggagtgacttctctggccatgactccatggtctctcccctcagagccattttcagtaaaatttttatagtttaaaaaatacggttctgaacaatttttgttagagttattttgggatttttaaatagttttttggttgtgtatatggtagaattcttaaaattatacaattataatgtataaaaaagcatgcaattataattcataaaattatagccccactgaccattctcctgtagctgggagcagttcacactaacagggctatacccccatgctgacctgctctgcaggatcccaggaaggtgagcatagcctactaacctgtttgggtagcacagcgacagcaactgaggccttgaaggctgttatcagaaaattgtgggcggaaacttccaggggtttgctctgagcttcttgaggcttctcagcttcagctgcaaagtgagtgggtgtttctttgagaagcagaatcagagagagagagatagagaaagagaaagacagaggtgtttcccttagctatggaaactctataagagagatccagcttgcctcctcttgagcagtcagcaacagggtcccgtccttgacacctcagcctctacaggactgagaagaagtaaaaccgtttgctggggctggcctgactcaccagctgccatgcagcagcccttcaattacccatatccccagatctactgggtggacagcagtgccagctctccctgggcccctccaggcacagttcttccctgtccaacctctgtgcccagaaggcctggtcaaaggaggccaccaccaccaccgccaccgccaccactaccacctccgccgccgccgccaccactgcctccactaccgctgccacccctgaagaagagagggaaccacagcacaggcctgtgtctccttgtgatgtttttcatggttctggttgccttggtaggattgggcctggggatgtttcagctcttccacctacagaaggagctggcagaactccgagaggtaagcctgccggcagactgctgtgccctggaggcaccaggcataaggggatggagggcccactgcctggcttgcaaagtgcttttcaatcctttttttttttttcttagaaatgggttgttctagttattctattctatagacagagaaatggaggctcataggggtgaagggaatattttttactttgtaaagaatcagagcccaacagtttgtctttcctcagttgtcaactcagtctgttgaaccacttactgcctcatacctattgatttaaggagtaaaaaacaaacaaacaaaacttttaagttttgcttggaagtaaatttgttcagatgaccaaactaaatcttgaaaattggtacgattccaaatcacaaaactgagggacagtgaggcaaaattgcttggccaaagcccaagttagcagaacttctgaggtatttggattctctttccagggcttggtttatttgacgattctgcctcttttgcttaaagaattttatttttattatacatcttttctctttctgttttactagtctaccagccagatgcacacagcatcatctttggagaagcaaataggtgagtcttttttcgcatgtacattgagttcccaaaga

SEQ ID NO: 3582 - DNA, 6000 bp, Homo sapiens
taacatgtcctgtgtatttaggaatcatttcatatagaaaagcaaaaatcagcttttatttatttaggttcctggttccaaaaccaacaaatctagtattaaccaaatggctacaagatcaatgtgaatggcacaagatcatgtaaaaaatagaaaaccagatgagaaagagtcttagactgtagagcatatgaacacatgtcagagttgggtgctgaaagcagtggatgtgctgattattctccactgaagctggtatgtagtagtttgaagggggaaattttaggaccttgtcaaagggggaaccaaatagaagagtaaagggaaaatatttttcttctattccctcttccagggccaccccccaaaattcagatttggggggaatacttaatctcaggagtcttaagacccttttaactcaactagattgataggtaaaatacataattctatggcaatcgatgcaatattgggcaagatgtaatttaacagcaatgctcattcattacagattctagggtgatgtttgatggtttcaaataggaagtattatgccatattgcacaatggccaatgttttcattgagatcctaagcagcaagtcattcttcccatcaaaaggtatttaagatactcctcctatggccaaaatacaaaatgctcattagtccagaaagggcatacacacacacacacacacacacacacacacacacacacacacacaaaacaacatgccactgacatagagggctcaggctagagagatagggacctataacatcacagagccattctaaatgattagttgtaaggcaggtggctagcacagaaaggcttcaatggaaattggccattagactttttacttgaagttgtacttgagctagtaaaacatagccaaacaataaagaatttggtaaaggttccaaaaaagtggaaatccaaaaaaagacagcacaaagcaacacaatgtgggggcatagaggagggtccccaggttgtgaaatcaaaacaccacttgaatttgatctatttcctagatcaacctgattaggattgttactagttctatagacaggatgatctgaaggttgatatagtccttgtatatcttttagaatttattgtacctataatatgtacatgtgtatatgtatgtatataatatggacatgtaataccttcacatacatctacttatgtataatgaactgtacgtaattctctttatggagtaggcatttattaattttaacagatactgttgtttctttcaaaaaattccaagtttaaaaccctatttatagatcatgtctgtctattttctcccattattgatttactgcatatatccatctatgtgtcttcaagtcaaatgagccctatttgtcgtgacagtaatactctgacacccagagtagacaaaattagttgtgtattattcctcactgagttctgacatattgaaaaattctgattgattatgctatacccatacactatctcaaggataaagtcatgataaacagtggtattaggggaatgtggcgaggagtgcagacctgagtactaacagatttggaggaaactgatgtccacctaatgccctcttacagactttaatatatcttctactctgttgactctacatggggtgtacctgacatacttcagcataaagaggtagaaaaaatatgagttttggggcccaacataggaggattcaatccctattctgcctttatgggcaaatgattaatcttcctgaatgtcagttcatcattctaacagatacagagaatacagggctgtttgatgttcagatgtaatcatttgtacgcagagaagaagcagtaagtgcctaatgcattttaaggtaatttagtcagtaagtgaactgaaaccatgttgttctataattaattctgaattcaaagcagccatggatgcagttcaaattgcttaatcaaacatatcttagaacctttttttcaatattaaaaatacagaatagaggttttctttgaccttttttcctgaaatttcttactttgcagctcttgaatgaaaaataccagcttcatttaaaaatttaggattttgtcattgtttatattgagttcttattttaatttctaatatttacagatgcttatacctctgaatatttatttctaaagttttatcataccctcaagaaagagtaccctcctctctcttcttaaacagtttatttctaacccgctatttcaacggtttcagtttatcaaggtctgttttctcaggcactttcttatgtatagtatcaatttgggcgtctgtctccctgcggataaggtttcaatttggttagatggcaaattcattggcagctgttactttttttttttttttttttgagacggagtctcactctgtcgccggactggagtgcagtggcgcaatctcggctcactgcaacctccacctcctgggttcaagcgattcccttgcatcagcctcccgagtagctgggaccgtaggcgcgcgccaccacgcctggctaattttttgtattttagtagagacggggtttcaccatgttggccagggcagctcttactttttaaaatatcccccaaatctcctagcacagtagtgggcagatagtaaatgtttgacatggatttgcttgtcagatttaattgaaaaacaaacaaacaaaaaaaacccagaaacttcatgctcaagtatctgagccagggacggaccataaacccgaagcttgaattggtgctcatttacctcttgtcaaatcctgagatataacatgtaatcctgataacttacaccaaaatcgtgccaactgtgactcattgctctagaatttcagaaagtcttgcctactgttacctgtcttaacttgaagtttcctcatttctaaatcctatttcatgaaaagaggccctagaatatagtcttcttgaaataagtatgtcatctttcttaagatactgtcataaggttaaataattaataaggatattccagggcctaacagtggttaaaggcggaaggaggaactggattttatttaaaacagtttctcatgtgaataaatgtttacctaaggtagcaagccagggaaattccctcaaaaatttggaaagcagacaggaaaaggggcagatcataaaaacaggaaggacataatttaacttccaattttaagttctgtgcttgtgtatatgaattccagatctgatgcaagtgcaaaggttatgggatcaaggcatcagtctttttctagagtaagtttattctttatccctgcattgcagcatctaagtacagagccacaaaaacatttgttgtgttgaaaaatcatttttgtgtaactggtcttttaagaagtagtttattgaacaaggtaaaatagggcccaaattaaaattttgacagttcagagagaaatattgctaataatattgtaaatagtgcaatattaagacaaaatggttggattacaaagcagtatctgtgggcttgagttttcactccatcattaaccagccagcagtgatttgagacactactcacaccctcttgtccttagtttcctttttttgtaaaggaggatgttaaatctctggacttttttctaatttataaatcgtcaattctctcttagattaaaaaataggttttccaaaatactttcattgtacttccttttgtttaagtaaactttaggtgaattttatcttgtgggaaagataaagaatgttcattcttttctaggatttaataattgaattaaacttcactacatcgctaaagagggtagagaagagataatctaacatttatggaatgcataaacttttcaccttcatttcattctccacaaaagcattataaagtgaaaattttctccattttacagtgaaggaaactgaagctcagagaactcaagtaacatgcctaaggccacagagcaggtaggaactgggcagtgccagcctctgctcttgaggtctgtctgatttaaaagcctgtgtgactgaggtccatagaaccaggagacttcctcaattttgtagtaaacccatatttttgggcccaggaagaaaacccaaggtttttttttttttttttttggaatagagtataagctctggctgagggcaggatgcaggaaaatatccttctgtaaaataacttcttatgccagaactagattatcagagtttaaaaatgatgaaatataaaattgagcttgttgtatttacaattttttattaaattcttgtaatacacttgatattttctagagactcagaatgaacgcattctatacactagaaattgatgaaacatttttgtgagtatagattttatttttccaggtttactgaagtataattgacaaataaaaattgtgggtatttaaggtaaacaagatgatgacttgattaaaactctattttttccaaactagagatcctagcctctccaacttcctaacactctgccgctcatgtacatgatatctggagtatggtagggggattaatctcaaactttattttttcttataaaaagtgattttcttatctagaaataatctggaatactttcttagatgagagcacaccactttattctcccaagcctcctctacacgtgcactgtactgccgtttgatttaggaaagaaatttttttcccctctgaacttcccttgtgcttttttttttatgttctgagtttgtgttggctttcagccttccgttccttttgttgtatttgatctggtgccaaatgagagtcagcacttaagttataagtatcattttctaacacagtgacagaaggaaaactccgccttccacacccactactaattaccatattgctacaaaacatgacattgcatccttcacccatcacttgtgaatttttgttttccacagctctcatttctccaaaaatgtgtttgagccacttggaaaatatgcctttaagccattcaagaactcaaggagctcagagatcatcctggaagctgtggctcttttgctcaatagttatgttgctatttctttgctccttcagttggctaatctttatttttctccaattagaggtaaggaggcaattgtacctaaggttactatttgctataatcctctatttatttgtttttctagttgttatcattgtcactcagtattgttagcaatagttggaaggaagagatgtgtatacataatgtaaatacaattctaatattgtcatgacatggcgtttgaagtttatctaaaggttttgagataaaaggtatcagaaaatgctaaatgttagctgcagaactctgttagatagagagaactggttaagccaattgacaggggcctgtggagtatttttccttccctctgctatagctcttggtggaataaaaaaggtaaaaatatgaatgaatatcaaggaatgggatgcaagctatagtcttatttatggaaaagacttaaaaaaatagtgaaagacaggattaagtaaatgacaggtggtttgtgtgtctttgaggagggaagtggccctgagctaggtgtaagaagatctggattctggttctgggtctcctaataaccagctgtataaatttgataaagacatttaatctctctagtttgcagcttctttatctaaaaaaactggtggtaggggaatggatttattatgatgtttcttctagctataaaatgtcatgatcaagaatttatttaagggtagtatgaagaataaatgcctaagtcactcaaaagcagggaacaatgactttagattgagttgatcagggaagacttcatggaggaatgagaaagcccatatctatttgggaagcccctgatgcttgtcaggaatttcccattgagatgcaggccaagctgtgggcctagagaatgggatggtacactgggaatggagattagttttgttctttactaaa

SEQ ID NO: 3583 - DNA, 6000 bp, Homo sapiens
cctgaactgacactgcacaaacaggctccactgccctcactcctggcccaacaggcactgcccctccccagtgccccagatggccagactgcttctcgtttctcccagatcaaggaagctgttcctgtcctaattccagtgtagattagcacctgtccccctgcacccttcccttctgcactgatacctaggacccagaactttccaggttgtggagattccgctttcctgtctgtgacctccctgaggactaaaaatgtgttttgtttgtgtcttttcctctagtatttggctcagtcttgttgaatggacaaatgaaaatctgacttagagataaatgaaaaatgtagattttttttatcaccaaaaaaccccaaaaccaaaacccagacaccaaaaaatccaaacaacaacaaaaccctcaaaccaaagaaaaaaaaaaaacccaaatgttttttgcttctttctgaacatgaggtatcttgtgagtggtcaaagcccttttcttttccatattttctgtagtcttgaaatggctattcatttaggaggttaatagtctatgggaagataattactttggtttattttacatcctgtggctttattttaaggctgatttgctctggtgtgcttatgtatttaatatttgtgagatactttaagaaaaattgccaccaggcttggtggctgatgcctataaacccagtgctttgggaggccaaggcaggaggattgcttgaggctaggcatttgtgaccagcctgggaaacatagggagtctctacaagaaattttaaaagaaattagccagacctggtgttgcgtgtctatagtcctagctacttgggaggctgaggcaggaggatcgctcaagcccaggagttccggattacagtgagctatgattgtgctactctactccagcctgggcaacagagtgagaccctgtctctaaaataaataaataaatgcaaatgaaaaaaattgcccatagatttagtaacgtatttgacccctttaaaaacaattaagctttattttttgaaaaacgttttgaagatggaggactctgcttatgtgcctgagactgaaaggtcagcaatgataactctaatagtgatttcatttgttcaaatgctagactagcccagtgatgaactttggaatgcctagatagtctatcagaaatctgtgcctgaaacttccagcctggtgtgtgtgtatctcttcccacaaagaatgtgaagagctgtgaaaacgtgttcaataaaaaaagagacaattaagtgtaaaatatcacttaaacatcaacaaaaattacaactaggcaaaatatggtagtaggacgacaagacaataaaaatgagaggtgtgtcatccaagtgttagcctaaatgtgggtagagatgactctgtgcaaagatttttctttctcggagccatgatattaacactgagaagaaatgctgcttaaggtacaagtatgtgcatggtaaatgtttatttttttcattcttttgacagtaatttaaaaatgttatctacgattttcagcatgaatagtttttactactttttcagcttatttctagtttccaatagtatttatggctttttttttttttgctgtgactcttagtcattttttgaaaattgacgagtaaatagttactgattttaatactcttttatgaagaactattacacaagaattgggctttacacactgatttttccttcagcttttttctccacaccctgtatgtaacacaagctttgttcaagggaataactatgacaaatatgtttggatacaatttgatttctagttttggcttggagtctatgatattgtgccttagttaccttatctttcagataaaacttaaatttctcaacaccagtatgttctcctaatgcaaggcataattattgtagtgaaggtattaattcatattttaattgattaatactgtagtcataaatgtactttacatttcccacaaactttctcttttaagtatgcctcatttccattttttctgtgaagtggtataacaactcatactgtcaatatccaaaatatttctccctcctttctttacatatctgctgggtgcctcatggggagctgagagagacatacttggccacaaagagagacaattccgtcttaaacagcttttccccagcatccttatgttgtccagtacagtgccaggctcatgtgatgtactcagtaaatatttgcccatttgaactttacattataagtaattttatcatttatttcatttcattgtttattttagtggtaaagggtacctggtgtctattgatagaatactcttactttccaagttctgaggccagccacgacctcaaagaaagaaataatcttcaaagcttatttacatctattcatttgttcattcatggaaaaattatgtacgggaaaaatgtgaagtggaaggaaaggagacaaggatacccttctgcttcttttctggtatgcagaaaattaatcatataattgtttattgaatttgcctcaaagggttaaatgagagaaagattgcaagtccatctaacacagtgtctgacacatagtaaatgcttccaaaaggtagtttatttttatgcaatagactacaaccaaggatctctcctttacttctgcatgacccagtgtcctattttcttgttttgtctttttcattcaagaatgatctgtgtgtgctttctttctgaatctgtgagaggggttcaatgtttagttacatagtaaagtgcagataagaaccttgggccagcatttcccctaaatcttttctatgatttaagacaccttggggaagggatatatgagctgctacattaacggatgatgatttttatctttaccaagtgacccacaatttgttactggtgcaataagttaagaaaatagcatacttttatgactgtcatttcacagtcactcaaatcagaactggaatgtcacaaaaacaactccctgttagcccagaggaaaaaaaaaaagaaagaaagtaaaggggaaattcagattagtcacaaagaagttcccccgcctgcctgcaaaagttgcagcgttaaaactgagagagtccgctttgctctttcaatcgccttttatctctggccctgggacctttgcctattttctgattgataggctttgttttgtctttacctccttctttctggggaaaacttcagttttatcgcacgttccccttttccatatcttcatcttccctctacccagattgtgaagatggaaagggtccaacccctggaagagaatgtgggaaatgcagccaggccaagattcgagaggaacaagctattgctggtggcctctgtaattcagggactggggctgctcctgtgcttcacctacatctgcctgcacttctctgctcttcaggtaagatgcaccactgggcgctgttttcccaccagctcatgctgatggcagctgcaacagctgcaaacagtcgcttggaaataatcttatgccaaaagtgttgagttttttttccctctccccacagcaatcgtaaagtgtggttaaacgcccttctgtctctcctttccttccttcttttcagcagtggcagtggtagggcagagtggaggtagggcagaggcacagcttctagatctttttctttttctttgcaatgcaagattccttgtatccctttataagctgtcactttgaagctttgagtcactgatatacctggtctacccattgtgatagtaatgtgtttgatcaggcaattaatattaaaaggaaataggaaagagaccagttccactttcccataatattcatataccctatagacctgcaaggtgattttctttgtaaagaatgctgaaggtatcaatattaatagcggagcaatgtgtgcgtgcatgtgtgtgtgcctatgtgctcactcattcaccccaatgatttaatcagatattgtttctcacaatctatctcttccagtcataatttaaagacatcatttcaccttttccctaccttattaaatacatcatgtagtaggagattatccttctagtattttccccatatagttaaaatatttccatttttctttcactttattcttgttccacacttctctcttttgcattattttttcttattcagtagttcagatatacaaacattattaggtatttaaggatgttcttcactgcagaagatgccactggagaaaaataaatctatactctcttcgtgttcctttgttgagctagtctgataatcttgttttctaggtggttgctttgggttagaaatgtttctccctgataaagttcaggtaatacaaactgatttctgatggtcttgtctgagattaagcacctccaatgaaaccagaatgagatgagcagtcttggcaaatgcctgggcttgtttctgcctacaggaaatagggttttcagtgcatggaggctggtaagagtgtgtgtggttatgatcactgtaccacagacagtgcttgtgtctccaaattccagaagtgtagctagtgtcatgctcaggtctgcagaacagtgagcacaacaacacattgatcctctcctcatcacaccacactcttatgtcttctcgcagaactctttgggtgaaattaaagtaggcgactcggggagagggtgtgggggaagagtaaggtgtccatggcaggatgcccaagacatcgaccggatgcccaagacatcaaccggaattaggctcttttgagaagaaaacaaagagagtaaccaaatatagaacagctgagtgcattcaccagtctgggagccctgagagtgctttttctaacaaccacagtgttacatatttccttacaccatgggatgataaaacacaggacacatggctccattcaaggctaactgattgcacaacggctctgagcaggagagagcaaaaggtgaaccacagttgtacagcttgctggtggttggggtcacattggactatcaatatccaggagatgttgagaaaaagaggggatcctttccaacaagtcatccagcaactctgggacagaaggaaagctgtgggaagaaaagcagggtgctggtttctaggacactaaacctcatggtgagtgatctctaggggagaattagcttctatagtcctggcacagagatggaagcaagacataggtggtatatttgagttgtttgcttaagaaacatgccctgtctactctgaaaatagatttcttttttttgctcaggatatttgaagttcttcacttgatgttaattataatttttttatttctaattagctaatgtaatttcttatattgttataggatctgggacagcacaatgggtccttacatttaatcttatatttattatttacacttcattatgagaaggatagcatagatgggttgtgtgtgttttccctagaacctgatagtttaccaaataatgttggtggcagtgatagcagcagtgtgtgtgtgtgtgtgtttgtgtgtgtgtgtgtgtgtgtttctgtgtgtttgagagagagagagaaacagagacagagagattgagagagaacattgtagagcagctgctgacaaagagacatagactagtagccatttaaaactcatctacaatactgtttggaagtttgattgagggatcgggtggtggtggtggtggtggtgttggtagtgatgaggcaagtcaaacctctattttataagacataatgttacagtgatgtgtattggaggtgaaatagagctgaaatgctcaccatttacccagttaaattggacctcttttattgtgagagaaaggtttttgggaaataattgtgattttcccttttatttcttagatttaattttttagccttataaaataattgcctacatgaatggctctgtaaatacagatatagctaccaagctccatttggcc

SEQ ID NO: 3584 - DNA, 6000 bp, Homo sapiens
atagattaatgccctccttttggggtgagtgagttctcactgtatttgttcctgcaagagctggttgttaaagagagcctggcacctctctcttgtatcttgctttctctcttaccatgtgatatctccacactctagctctcttttaccttccactatgagtagaagcaccatgaggccctcacaagatgcaaatgttcaaccttgaatgttgcagccgtcagaattgtgagccaaataaacctttttttccttacaagttacccagccttgtgtattcctttacagcaacacaaaatagactaagacacccaaggaatcagaatttctagagtgaaggtattaggagtcagaatcattaaaaagttctcctagtgattcagatgataaactaggctttgggagccactgatcctatcaacaatctactcaatgctagaattctctgaacagaatttcttcaaggttttgtttagtacttctagaacacagcaagctcactacctcacaggacagcccttcatggggaatgtgtaacgtgtagggttttgatagtcagaggtggagggtaagggtgtttgaggcagagtgaatattagaaataatcagaaaatagagggagataagtttggaaggaaaacttggaactcctgcaggaggaaacctgtgccaggatgaagggcttggagagctgactgcaggagctcaagtgaggagtaataagagtttggattagaagcaataggaatggcaaagaggaggaaagaaaaaactgcattgcagggctagcctacaaagcttgatgactgggaacgaggatgattcaaagttgattcttggattttgaggtcctggagtacaaaaacattaaccaggacagtgacattaggatcaggaataggttgaaaaggcagattacaaatcagattttgacatttgaaaatgcatttgtttctgtcacctccgacatcactctatcacttgtcccagggcagagtttatctatgactccctgtgtatgctcagagattggcactgagtacactctcagaatgtctggtgaatgaagagccactgtaagtgtcttctccatttgtgtcctccctgctttagtttaggaccttatttctcacttgaatcattgcagactcaaggtccctagcttataccactgtctttgtgtgttttagaacaaggcaccccctgcgggtttataaattagaaaaagagcctgcatttaaatgagtacagccctttgttcagggcttaggaagcaaagttcacctttgtgggatgataaacatatcccttcctgcaggaggaaacttcctgtaccaggatggagggcttagagagctgactgcagaggtggaattttagatctcactcattccctcagctggcacagagcaccctggaaatgtctcccagttggccaacttgatcctgccttgccatatctgtctcttttcccccccctagaattatttcctgaagtacctgccatttctatttccctcagtcagagtgattttttttgtaattctaaaatgtaatcatatcatatcatatcacattctgcttcaaacctctccatgtttctccagtagctgcagcatgaagtccaaagtccttaacttgtaacaaaagtccatttacgacagattcttctgagcctcttctccagcagccactctccttcaccatcttcctcttcagctgtagttccctgaactgacactgcacaaacaggctccactgccctcactcctggcccaacaggcactgcccctccccagtgccccagatggccagactgcttctcgtttctcccagatcaaggaagctgttcctgtcctaattccagtgtagattagcacctgtccccctgcacccttcccttctgcactgatacctaggacccagaactttccaggttgtggagattccgctttcctgtctgtgacctccctgaggactaaaaatgtgttttgtttgtgtcttttcctctagtatttggctcagtcttgttgaatggacaaatgaaaatctgacttagagataaatgaaaaatgtagattttttttatcaccaaaaaaccccaaaaccaaaacccagacaccaaaaaatccaaacaacaacaaaaccctcaaaccaaagaaaaaaaaaaaacccaaatgttttttgcttctttctgaacatgaggtatcttgtgagtggtcaaagcccttttcttttccatattttctgtagtcttgaaatggctattcatttaggaggttaatagtctatgggaagataattactttggtttattttacatcctgtggctttattttaaggctgatttgctctggtgtgcttatgtatttaatatttgtgagatactttaagaaaaattgccaccaggcttggtggctgatgcctataaacccagtgctttgggaggccaaggcaggaggattgcttgaggctaggcatttgtgaccagcctgggaaacatagggagtctctacaagaaattttaaaagaaattagccagacctggtgttgcgtgtctatagtcctagctacttgggaggctgaggcaggaggatcgctcaagcccaggagttccggattacagtgagctatgattgtgctactctactccagcctgggcaacagagtgagaccctgtctctaaaataaataaataaatgcaaatgaaaaaaattgcccatagatttagtaacgtatttgacccctttaaaaacaattaagctttattttttgaaaaacgttttgaagatggaggactctgcttatgtgcctgagactgaaaggtcagcaatgataactctaatagtgatttcatttgttcaaatgctagactagcccagtgatgaactttggaatgcctagatagtctatcagaaatctgtgcctgaaacttccagcctggtgtgtgtgtatctcttcccacaaagaatgtgaagagctgtgaaaacgtgttcaataaaaaaagagacaattaagtgtaaaatatcacttaaacatcaacaaaaattacaactaggcaaaatatggtagtaggacgacaagacaataaaaatgagaggtgtgtcatccaagtgttagcctaaatgtgggtagagatgactctgtgcaaagatttttctttctcggagccatgatattaacactgagaagaaatgctgcttaaggtacaagtatgtgcatggtaaatgtttatttttttcattcttttgacagtaatttaaaaatgttatctacgattttcagcatgaatagtttttactactttttcagcttatttctagtttccaatagtatttatggctttttttttttttgctgtgactcttagtcattttttgaaaattgacgagtaaatagttactgattttaatactcttttatgaagaactattacacaagaattgggctttacacactgatttttccttcagcttttttctccacaccctgtatgtaacacaagctttgttcaagggaataactatgacaaatatgtttggatacaatttgatttctagttttggcttggagtctatgatattgtgccttagttaccttatctttcagataaaacttaaatttctcaacaccagtatgttctcctaatgcaaggcataattattgtagtgaaggtattaattcatattttaattgattaatactgtagtcataaatgtactttacatttcccacaaactttctcttttaagtatgcctcatttccattttttctgtgaagtggtataacaactcatactgtcaatatccaaaatatttctccctcctttctttacatatctgctgggtgcctcatggggagctgagagagacatacttggccacaaagagagacaattccgtcttaaacagcttttccccagcatccttatgttgtccagtacagtgccaggctcatgtgatgtactcagtaaatatttgcccatttgaactttacattataagtaattttatcatttatttcatttcattgtttattttagtggtaaagggtacctggtgtctattgatagaatactcttactttccaagttctgaggccagccacgacctcaaagaaagaaataatcttcaaagcttatttacatctattcatttgttcattcatggaaaaattatgtacgggaaaaatgtgaagtggaaggaaaggagacaaggatacccttctgcttcttttctggtatgcagaaaattaatcatataattgtttattgaatttgcctcaaagggttaaatgagagaaagattgcaagtccatctaacacagtgtctgacacatagtaaatgcttccaaaaggtagtttatttttatgcaatagactacaaccaaggatctctcctttacttctgcatgacccagtgtcctattttcttgttttgtctttttcattcaagaatgatctgtgtgtgctttctttctgaatctgtgagaggggttcaatgtttagttacatagtaaagtgcagataagaaccttgggccagcatttcccctaaatcttttctatgatttaagacaccttggggaagggatatatgagctgctacattaacggatgatgatttttatctttaccaagtgacccacaatttgttactggtgcaataagttaagaaaatagcatacttttatgactgtcatttcacagtcactcaaatcagaactggaatgtcacaaaaacaactccctgttagcccagaggaaaaaaaaaaagaaagaaagtaaaggggaaattcagattagtcacaaagaagttcccccgcctgcctgcaaaagttgcagcgttaaaactgagagagtccgctttgctctttcaatcgccttttatctctggccctgggacctttgcctattttctgattgataggctttgttttgtctttacctccttctttctggggaaaacttcagttttatcgcacgttccccttttccatatcttcatcttccctctacccagattgtgaagatggaaagggtccaacccctggaagagaatgtgggaaatgcagccaggccaagattcgagaggaacaagctattgctggtggcctctgtaattcagggactggggctgctcctgtgcttcacctacatctgcctgcacttctctgctcttcaggtaagatgcaccactgggcgctgttttcccaccagctcatgctgatggcagctgcaacagctgcaaacagtcgcttggaaataatcttatgccaaaagtgttgagttttttttccctctccccacagcaatcgtaaagtgtggttaaacgcccttctgtctctcctttccttccttcttttcagcagtggcagtggtagggcagagtggaggtagggcagaggcacagcttctagatctttttctttttctttgcaatgcaagattccttgtatccctttataagctgtcactttgaagctttgagtcactgatatacctggtctacccattgtgatagtaatgtgtttgatcaggcaattaatattaaaaggaaataggaaagagaccagttccactttcccataatattcatataccctatagacctgcaaggtgattttctttgtaaagaatgctgaaggtatcaatattaatagcggagcaatgtgtgcgtgcatgtgtgtgtgcctatgtgctcactcattcaccccaatgatttaatcagatattgtttctcacaatctatctcttccagtcataatttaaagacatcatttcaccttttccctaccttattaaatacatcatgtagtaggagattatccttctagtattttccccatatagttaaaatatttccatttttctttcactttattcttgttccacacttctctcttttgcattattttttcttattcagtagttcagatatacaaacattattaggtatttaaggatgttcttcactgcagaagatgccactggagaaaaata

SEQ ID NO: 3585 - DNA, 6000 bp, Homo sapiens
acagacacagctaaatgtttagagccacaagactctgggacccaactccttcacatgcttgggagttacctgcacccgaggattcatcccaggagtcctcaaggtcactggtttctcgtatccggtcactgattcttagctgacaatcctcatctgatgccttaactgttttcaagataggctgatgatcagctgcctgagtcctttttgattttagaatgccggttccctcttcccctggggcgtcagaggccactaagttctgatcacagtgcttggcccaagcagcatcctccattaagttgtctgggtcagtcactatctgatttcggagaagctgatccaacgtatcataaaatggacagtgtggtggctcacccatacttgtggcatgggcaacataggcctttaaatataatgccttcagaactttaaacttggagcggcactgacgttcggtgcggcggaagccctcctgctgcattcgcttagacacagcctgatagacatctgcattgtgatgcacagtctggaggcgctgaatatactctgcctcgcctagtatggagagaagagttcgtgtctcctgtctggaccaccggatgcccgcactgctattggcactggccattgtgggttggaaaggagggctaggcagcttctggacagcaaggtgcaagtctgaaggtgtggggaagctctgtgtgctctcaggatatctccaggatcttccctctcagggataattgctgagaagccaggtccaaggaccgcatttctggctggaaggccacaggggaatgagagttacaggaagggtgtaaggataattttggcagcaagttaagtggtgctacctgtgagtaggtcataaacaggcatgaggccaagactgagatagcccaactttgggagttcacccagggtagacacggcaccaagaacctaatggcttggtaacaaaaaggccaaatgctttcatggctgagagttggtacaacaatggatctgtaaaaatcacccttgtctggtgagtagatgggctgggagggaaaatcacctggaccatgaggcagctaacgctaaaggagtccaagcatgaccacggtatagcaatctgaaagatgctcagtctttactaatcacagcacgctgtggctctgtgttacccatctgactgtcagtgtgggccagaaaagtgagtttaagttgctctgctaatacaaattttttttttgcacaatatggcagaagaaagccacataattactctaaccatgtgccctcaaacagcagcataaaacaaacagtaacatattgttggctaccaggggagagatctatggaaatgttctgtatctggactatatcgatgtgagcatcttggttgtgacactgtactataattttgcaagatataaccacggggagaggtggtgaatccagcaatgtgtttgatgtctctgtattatttcttacacagcagcatgggaaactgcaattctctctaaataaaaagtttaattaaaaaaatcatattgttggctgctcagtgatttgggcttgaagacccatctacgattcttttttctagactttatgatctgaaaatatttgacaccaacttatatttaatatgctcggtactaagttttatcaataggtaaaaggatatggggatgtatttattgtcactgaatattgaattctctccaaacaactatagtttttggcttagtgcataagtatcctgaggaaaaagattaatatcaagttcaatttaattgaacacaggtaagagacagaaaataagataaacaggtaagagatacctgcataaatttaatctataatatccaattctaaatcaacaccaggacatttttacttaaattctcactaaacaaagttgaaagaaaagaacctggggccgagggtgaggagacctgatctgcagtcttacccagtttaccccctaggataatgccacaatttctttgtaccttgattttctcatctataaatggggaatgatagtatttgcgttgccaattttacaaggatgttgagagaattaaataaaataatagatgtgaaagcactttgaaaatttaaaaacactctatcaagtattactacagtagtgaaaatgaaaacccctaattattatagcaatctataatttgaggagacagaagtctggggaagcaagcctgttttaatcttctaattaaacttacaacagatgattaatctgattcttacataagacgttaatttagctgttactctaatgattaaatttgtaagtcaagtggaaaagttcgttcccagaaagtgtcacaaaagatcctgaggaagaaaatcaatagtgtctacataaattacgaaaaattgtaatagattcagcaaaattcaaccacattgtcaataagtcttcaaattcccacaaaatctttgaaatcctctcagttaaaaaaaatctaaaaatgtgaacaatccaaattaccacctctgacgcaaattaccaaattgacctgtcagcaagaaactaacatctgagtgaatcccatatcagagaagatccaacactaagaatcaaaagacactgcctactgggggtactctctgtaatgactcagtcataaaaagcaatgaagaaacaaactatgctgtttctaatttcttttcacattatgcttagaatttatgaacatgttcctattaccatatttaaaagtatcatttgattccataccttctgcccaggatctgctttactttcattactgtatttgaaatatttcttattctactttgttttgctgccaatccaacaatctgaaaaaaaaaataatatatatatatatatattacaatgtatgtaattttaaattatttcagaagtacaaaaatggggggactagtacctcttcattttctgagtaagcaacaacagctggagtaactcggtcaccggcatcatttgcaaccacaccagcccggccatcctagagaaaaaaacacgaaatacatagtctcattagacgtattcagacgtgtgcatttgtgcaccagtgttactttgccatctgtgtggaaagaaaaactgctatctcaatattttaaacttgcaaatttaattaccatttaatttcctcgttttcatagaaagcctataattccatgaagaactgcctcatgttttcagtctgctctgcaaagtcaacaattgaatcaaaagtaataacaacctttctacacacaaaacgaaggctattattacgttacctttcctacctctcttccttcttaccattaccatttcttttttttttttttttggacacggagtcttgctccgtggcccaggctggagtgcagactgcagtgccagatctcggctcactgcaacttccgcctcccgggttcaagccattctcatgcctcagcctcctgagcagctgggattacaggcgttcccggctaatttttagtatttttagtagaggcggggtttcaccatgttagccaggctggtctagaactcctaacctcacgtgatccgcctgcctcggcttcccaaagtgctgggattacaggcgtaagccaccgcgctgggcccctttcttcccatttctacaaatgaagtagtattattccctttggcttttcctaacaagtcatttgacatttaaacgcgggactagtggcaacggagttcatgattatcgtttcttctgcctccccactgatgagagaaaggccacaagtcctgtcaggctctcacttccagaaaggccacctctgtagaccacgcaccatcaactggcttcacagccaggcagctttgcgggaccatcagccccagctcgactgcagcctccccgcccctccgggacctagacgttcgggcccagctcagcgcgttctgcggccctgctgtcccagagaccaccgcctccaagtacctcgcggccacaactttcccaggacctcccacccgcgggaatcctgaggccctgacgtcagcgagaccccttccggcatccagaggccaggacgtccccgtgacctcccccaaaatgctcgcagccccgccgtccccgggaccccccgggacacccagcggccccgctgtctccgggacccccccgggcaccctgcagctacgtcgtccctgggacccctccgggcatcccgccgccatgacgccctgggaccccgcgcgtctacatcgccgcgagcctccgccgcggagtagacgactttccggaggaatcgccaggcgcgaggccgggcctgcccggcccttcgctccggagtgtcctcgcggcaacgccactccacgacatccctaggccggcgacacgccgctctcaagcctgtggatgacccagcgccagaaaaccgggtggccgtcatgaagccctagcccagctccgcagcccctcaccttatagacggccacacaggctgaggtgcagcccaggtgaactccgatggccgccatgaggcagcagggacggcagcggcaggaatgagggggtcccccaacagcaacagctaccggccgcccaacggccccatcaggcaccgcggagcttcacgttcccgccagccccctgcgtccggtcggccgctacagcctcccgcgtcgccgccaatcagcgtgaaggttccgcctttcttcacgcgcagtccgcgagtagcttcagcgcgtctctgcgctccgcggaaactgcacagtgcgcacgcgcaaccggggagggacgggaaaaggctcctacactccgcccccttcctatcccttccttgagagccaatggaaactctgtgttcagttgcgtcatttgtcctggcaactactggcagattctttccaacctcgaattctgctcagctcgctttggcagcttggtgggcggtgggcgcgggtggcggaggcgattgaagctgctggcccagcatgtggtgcgcgagcccagttgctgtggtggccttttgcgccgggcttttggtctctcacccggtgctgacgcagggccaggaggccggggggcggccaggggccgactgtgaaggtgagcggtgtgacaactgcttgcatggcggcggccccgcgctgcggcgcagcagctgtcggctttggcttctcctggccctggctataaataacattccgcccaggaaatgcaggccctgtccctcgttttagatcgcccaagcccagctcgagtaaaaagctcaagccgggcctggtggtaacgtgaggccacgttgtggttttgctgtgaatattaaacttcagcagtaaaagctggtgggtttgtatttggattagagtttgtgcaaagaatgctagattcagatgatactggcgccagattgattctgctgcttccaaccagcaagatttgcctccccttgcacagaagacgtctttcaagtccaagctagttggtgactccccaaaggaaaacaaaacatggcattgagttgagtagcttaaatcagaggacatagctaatatttgttaggactctgtaggtgaaaattgctttgcaaaggagtacactgactccttgggaaagagaggaatacaaaagagtggttcctttttgttcacggtatctcagctgtgaactcgcagtcagaatacgtgagtctgtatcccaccaagtcccctagctctgagactttggtttttgcaaaatcagcgtacttcactttagagatctgttagcaaaggcaaagaaggtaagtggctatgctagccccttccttctggactcctgtagcgctcactccatgttttactgaaaataattagtttaaatgtatatgccctcagctggaaaatatatccctagtgaacaggaaattgtaggttcatcatatatgttgagtgaatggatgggtatagtcgtactaaagttgtgtttttgtttgttttgttgttttgttttttgtttttgtttttgttttgagacagtctca

SEQ ID NO: 3586 - DNA, 6000 bp, Homo sapiens
tccctttagacttccttcgtaccacaggctctcctgggtctccagcctgcttgcccacactgcagattttggacttctcagccttcacaatcttgtgagccaattccttataataaatctctttttacatagataaatattacagatattaagaagatatatagatatagattatatgttctgtttggtcctattggttttatttctctggagaaccttgactaatataacatccaactggaaacagtgagaaggcagctagatatagaaatgtgaagatcaggtataagatctaggatgactatataaatctggaagccatcaacattcaaatggtgtttttgagatgagaacacaaagtaaggagagacggaaaagagacacagtcctgggtctcagccttgtgaaatcccaatgtttagcaattgggaagatggaaaacaaccagaaaaagacggaaaggagcagccagtgaagtaggataagaacaaagactgagtgttattccaaaaggcaagtgaacacagtgttaaaaggaatgtgtaatgatctgctatattacacgtggaaaatgagatccctctcaacatgtattttgctgagtttaattagcaaatatatccagtatgcaaagcagaaacctgctgtaatgattaatgctacaagtcagcagaaactatcatcaggccaggcacgggagttcacacttgtaatcccagcactttaggaggccaaggctggcggatcgcttgagctcaggggttcaagaccagcctcggcaacatagtgaaacttcatctctattaaaaatacaaaaaatttgctgggtgtaatgacaagcacctgtagtccagctactcaggaggctgaggagggaggatcacttgagcctggaagacggaagttgcagtgagctgagactgttccactgtactccaacctgggtgacagagtgaggctctgtctcaaaaaaaaaaagaaaaaagaaaaagaaactatcatcaaagtctcctaggagcctctaattcttgtctcctacaaaagaaacccccagtattccagtgcctcatcactcttgtggtatttcccacagtataccttcatatgatttctatacctcaactatcactctgccaatgtatcatctaggtgatgaaagttaggaatactaacttgtccttttcaagatctacatttgactcactaaaatatacccaaaattttatcacagcatatatgcatacatttcttcaacaaactgagcgcctaccatatgccatgcactatggtagctgctggacatgaggtggtgagaaacactgccttgactttcagaggagaccaaaacaatatgagaagtgtatcagatactgtgggaaaacaaaggagcggcacctggaggaaactgggaaactgctgaaagatactaaataaggaagtaatatgatagccctgccaggggactagacaggagggagacaggtagcaggaagaatgctattttgacaatgcggaggggaaaactgctgaagttctgtaaggaagtcctagacttgagtaaggagaaaggagcaggaccagtcaggaggtagactcaacgatgtagtgattggttgggggataagggggaaagagaagtctagaatctaggctaggtgaccaggtagttgtcccatgctgtcaccgtaagcatgacagtaacaggtttaggggagtgagaagggaaggagatgatgactttggttttttgactgtgttgatgttgatgtacatcatatctaagagggcatgttcactagtcaattggatgcaaggtctgagactctagaaaggtcagtggatataaggttagagatttattagactggaggtaggttggtttgggttgccaagaagagtgtgtagactgagaagagagaagagaagagagcagaaccctggaaaattctaagccatggctagaggatcagaagcccacaaagacacactggacaagtgggcatagagacaggaaggagaaaagcagtatcatgaccatgaagagaaggcagtctctgaaagggaaagatgtcaatggtgtcacacaccacaaagaagtcaaggtaagaaaggaaactcattttctggacttacatgaagagaataacctcaccataaatgccctaacaaattagtagcttcttaagttttctgggatgtctttattgctaaaataacctcagatagccatacttcttttatttatattgtgcttttatgtttattaaagatagttttataagtgaatctataattattttaaaataaaaagttatttaaaatagtcccataatataatcctttaaaagagatttggaaatatttatgtttttccagtaaacctcacattacctaataataggactcacagacttgaatatctacaggggccaggcaaggaaaaagaagagttaagcaatttgaatcgggggcagagtaggggcggcaaactactcaaaacccaagtcctttctaaaaagagcagccaatagccaattctactatacagccataaggccaatcttgccaggtcatctggttttttgagaaaagccagaaatatgaatttttacataaaatttcccaattttaaaatgtacccagtgaatttaatttttttcaaaatattttgtaaatgtaacgaaacatatcaataggtccgagacggctcaggaaccattcagtttttttgccttcgctctagagtatgtataatatggcattttaatcttatacattgagaagaaattaagttgtaaataagaaaggaggctgaggagggaggatcactcataagcagtaatagagctggatgcagaatctggttcttttagttaccaaactgttatgtccttcctctgcgattacacaagcttctttacctaacaaatgaaatatatagacaggttagtcagacatgcaataatcacagcatgctgtaataaatttaggacagacagcataagcttcccatttaattaatccagatgctgtctctcttgaaacatttataagtgggagccccagatgagtcatcaaatcaattgtctttgcctcacaaagtctgttttaaaagtataggacacaattatagcatggtttggagcaaaattataacttagctaaacaaatatctttatatcgagtaataacatgtagatattttaaatttctggagaaaagtttaattattgcagagctcatagaaagccaggctccaattattaacactttaaggactgggcgctgtggctcacgcctgtaatcccagcactttgggaggctgaggcgggccgatcacctgaggccaggagttcaagaccagtctggccaacatggtgaaactgcatctctattaaaaatataaaaattagtcaggcgtggtggtggtgcctttagtaccagctacttgggaggctgaggcaggagaatcgctggaacccgatgatggaggctgcagtgagccaagattgtgccactgtactccggcctgggcaacacagtgagactgtctcaaaacaaaaacaaaaacaaaaaacaaaacaacaaaacaaacaaaaacacaactttagtacgactatacccatccattcactcaacatatatgatgaacctacaatttcctgttcactagggatatattttccagctgagggcatatacatttaaactaattattttcagtaaaacatggagtgagcgctacaggagtccagaaggaaggggctagcatagccacttaccttctttgcctttgctaacagatctctaaagtgaagtacgctgattttgcaaaaaccaaagtctcagagctaggggacttggtgggatacagactcacgtattctgactgcgagttcacagctgagataccgtgaacaaaaaggaaccactcttttgtattcctctctttcccaaggagtcagtgtactcctttgcaaagcaattttcacctacagagtcctaacaaatattagctatgtcctctgatttaagctactcaactcaatgccatgttttgttttcctttggggagtcaccaactagcttggacttgaaagacgtcttctgtgcaaggggaggcaaatcttgctggttggaagcagcagaatcaatctggcgccagtatcatctgaatctagcattctttgcacaaactctaatccaaatacaaacccaccagcttttactgctgaagtttaatattcacagcaaaaccacaacgtggcctcacgttaccaccaggcccggcttgagctttttactcgagctgggcttgggcgatctaaaacgagggacagggcctgcatttcctgggcggaatgttatttatagccagggccaggagaagccaaagccgacagctgctgcgccgcagcgcggggccgccgccatgcaagcagttgtcacaccgctcaccttcacagtcggcccctggccgccccccggcctcctggccctgcgtcagcaccgggtgagagaccaaaagcccggcgcaaaaggccaccacagcaactgggctcgcgcaccacatgctgggccagcagcttcaatcgcctccgccacccgcgcccaccgcccaccaagctgccaaagcgagctgagcagaattcgaggttggaaagaatctgccagtagttgccaggacaaatgacgcaactgaacacagagtttccattggctctcaaggaagggataggaagggggcggagtgtaggagccttttcccgtccctccccggttgcgcgtgcgcactgtgcagtttccgcggagcgcagagacgcgctgaagctactcgcggactgcgcgtgaagaaaggcggaaccttcacgctgattggcggcgacgcgggaggctgtagcggccgaccggacgcagggggctggcgggaacgtgaagctccgcggtgcctgatggggccgttgggcggccggtagctgttgctgttgggggaccccctcattcctgccgctgccgtccctgctgcctcatggcggccatcggagttcacctgggctgcacctcagcctgtgtggccgtctataaggtgaggggctgcggagctgggctagggcttcatgacggccacccggttttctggcgctgggtcatccacaggcttgagagcggcgtgtcgccggcctagggatgtcgtggagtggcgttgccgcgaggacactccggagcgaagggccgggcaggcccggcctcgcgcctggcgattcctccggaaagtcgtctactccgcggcggaggctcgcggcgatgtagacgcgcggggtcccagggcgtcatggcggcgggatgcccggaggggtcccagggacgacgtagctgcagggtgcccgggggggtcccggagacagcggggccgctgggtgtcccggggggtcccggggacggcggggctgcgagcattttgggggaggtcacggggacgtcctggcctctggatgccggaaggggtctcgctgacgtcagggcctcaggattcccgcgggtgggaggtcctgggaaagttgtggccgcgaggtacttggaggcggtggtctctgggacagcagggccgcagaacgcgctgagctgggcccgaacgtctaggtcccggaggggcggggaggctgcagtcgagctggggctgatggtcccgcaaagctgcctggctgtgaagccagttgatggtgcgtggtctacagaggtggcctttctggaagtgagagcctgacaggacttgtggcctttctctcatcagtggggaggcagaagaaacgataatcatgaactccgttgccactagtcccgcgtttaaatgtcaaatgacttgttaggaaaagccaaagggaataatactacttcatttgtagaaatgggaagaaaggggcccagcgcggtggcttacgcctgtaatcccagcactttgggaagccgaggcaggcggatcacgtgaggttaggagttcta

SEQ ID NO: 3587 - DNA, 6000 bp, Homo sapiens
ccaccagaaacaaaaccagctctcgaagaggagactggagtctgcggtgtggaggctaccccaggagtgctgcggttggtgctggtgcaggggctgggctccccggacacacccagtctggccatggggctgctctgacagggagcaactgcacctctgaaaaggctgtgggagctgctgtagctgggggtcccttgagagcaccctgaaaaacaaagcaacaatgttgcaaagagaacattcctgctaagggaatgcttggagccagcagcagagctgagacaaattataaaactatggttgttcctggaaagcctctttccaccagggactgggaagaatccatttccttaatctggacaattgtgacctgtttgatttcacctctaaaacttctcccttgccttcctgaacccctttgtacatagctatccaacccactctagacctacaatttcctgactaccagttattaataatgccagaactagtttggttctagagagcacttctaggtttaaagggttctaataccttatgttgccaggggcatagcttttgaaaacctggaaccctttagcttactattaggtttttgaaaaggtgcgtggggcagaatgaggcagaaacaggaactatgctgaagaggacactatccaaacagacacagctaaatgtttagagccacaagactctgggacccaactccttcacatgcttgggagttacctgcacccgaggattcatcccaggagtcctcaaggtcactggtttctcgtatccggtcactgattcttagctgacaatcctcatctgatgccttaactgttttcaagataggctgatgatcagctgcctgagtcctttttgattttagaatgccggttccctcttcccctggggcgtcagaggccactaagttctgatcacagtgcttggcccaagcagcatcctccattaagttgtctgggtcagtcactatctgatttcggagaagctgatccaacgtatcataaaatggacagtgtggtggctcacccatacttgtggcatgggcaacataggcctttaaatataatgccttcagaactttaaacttggagcggcactgacgttcggtgcggcggaagccctcctgctgcattcgcttagacacagcctgatagacatctgcattgtgatgcacagtctggaggcgctgaatatactctgcctcgcctagtatggagagaagagttcgtgtctcctgtctggaccaccggatgcccgcactgctattggcactggccattgtgggttggaaaggagggctaggcagcttctggacagcaaggtgcaagtctgaaggtgtggggaagctctgtgtgctctcaggatatctccaggatcttccctctcagggataattgctgagaagccaggtccaaggaccgcatttctggctggaaggccacaggggaatgagagttacaggaagggtgtaaggataattttggcagcaagttaagtggtgctacctgtgagtaggtcataaacaggcatgaggccaagactgagatagcccaactttgggagttcacccagggtagacacggcaccaagaacctaatggcttggtaacaaaaaggccaaatgctttcatggctgagagttggtacaacaatggatctgtaaaaatcacccttgtctggtgagtagatgggctgggagggaaaatcacctggaccatgaggcagctaacgctaaaggagtccaagcatgaccacggtatagcaatctgaaagatgctcagtctttactaatcacagcacgctgtggctctgtgttacccatctgactgtcagtgtgggccagaaaagtgagtttaagttgctctgctaatacaaattttttttttgcacaatatggcagaagaaagccacataattactctaaccatgtgccctcaaacagcagcataaaacaaacagtaacatattgttggctaccaggggagagatctatggaaatgttctgtatctggactatatcgatgtgagcatcttggttgtgacactgtactataattttgcaagatataaccacggggagaggtggtgaatccagcaatgtgtttgatgtctctgtattatttcttacacagcagcatgggaaactgcaattctctctaaataaaaagtttaattaaaaaaatcatattgttggctgctcagtgatttgggcttgaagacccatctacgattcttttttctagactttatgatctgaaaatatttgacaccaacttatatttaatatgctcggtactaagttttatcaataggtaaaaggatatggggatgtatttattgtcactgaatattgaattctctccaaacaactatagtttttggcttagtgcataagtatcctgaggaaaaagattaatatcaagttcaatttaattgaacacaggtaagagacagaaaataagataaacaggtaagagatacctgcataaatttaatctataatatccaattctaaatcaacaccaggacatttttacttaaattctcactaaacaaagttgaaagaaaagaacctggggccgagggtgaggagacctgatctgcagtcttacccagtttaccccctaggataatgccacaatttctttgtaccttgattttctcatctataaatggggaatgatagtatttgcgttgccaattttacaaggatgttgagagaattaaataaaataatagatgtgaaagcactttgaaaatttaaaaacactctatcaagtattactacagtagtgaaaatgaaaacccctaattattatagcaatctataatttgaggagacagaagtctggggaagcaagcctgttttaatcttctaattaaacttacaacagatgattaatctgattcttacataagacgttaatttagctgttactctaatgattaaatttgtaagtcaagtggaaaagttcgttcccagaaagtgtcacaaaagatcctgaggaagaaaatcaatagtgtctacataaattacgaaaaattgtaatagattcagcaaaattcaaccacattgtcaataagtcttcaaattcccacaaaatctttgaaatcctctcagttaaaaaaaatctaaaaatgtgaacaatccaaattaccacctctgacgcaaattaccaaattgacctgtcagcaagaaactaacatctgagtgaatcccatatcagagaagatccaacactaagaatcaaaagacactgcctactgggggtactctctgtaatgactcagtcataaaaagcaatgaagaaacaaactatgctgtttctaatttcttttcacattatgcttagaatttatgaacatgttcctattaccatatttaaaagtatcatttgattccataccttctgcccaggatctgctttactttcattactgtatttgaaatatttcttattctactttgttttgctgccaatccaacaatctgaaaaaaaaaataatatatatatatatatattacaatgtatgtaattttaaattatttcagaagtacaaaaatggggggactagtacctcttcattttctgagtaagcaacaacagctggagtaactcggtcaccggcatcatttgcaaccacaccagcccggccatcctagagaaaaaaacacgaaatacatagtctcattagacgtattcagacgtgtgcatttgtgcaccagtgttactttgccatctgtgtggaaagaaaaactgctatctcaatattttaaacttgcaaatttaattaccatttaatttcctcgttttcatagaaagcctataattccatgaagaactgcctcatgttttcagtctgctctgcaaagtcaacaattgaatcaaaagtaataacaacctttctacacacaaaacgaaggctattattacgttacctttcctacctctcttccttcttaccattaccatttcttttttttttttttttggacacggagtcttgctccgtggcccaggctggagtgcagactgcagtgccagatctcggctcactgcaacttccgcctcccgggttcaagccattctcatgcctcagcctcctgagcagctgggattacaggcgttcccggctaatttttagtatttttagtagaggcggggtttcaccatgttagccaggctggtctagaactcctaacctcacgtgatccgcctgcctcggcttcccaaagtgctgggattacaggcgtaagccaccgcgctgggcccctttcttcccatttctacaaatgaagtagtattattccctttggcttttcctaacaagtcatttgacatttaaacgcgggactagtggcaacggagttcatgattatcgtttcttctgcctccccactgatgagagaaaggccacaagtcctgtcaggctctcacttccagaaaggccacctctgtagaccacgcaccatcaactggcttcacagccaggcagctttgcgggaccatcagccccagctcgactgcagcctccccgcccctccgggacctagacgttcgggcccagctcagcgcgttctgcggccctgctgtcccagagaccaccgcctccaagtacctcgcggccacaactttcccaggacctcccacccgcgggaatcctgaggccctgacgtcagcgagaccccttccggcatccagaggccaggacgtccccgtgacctcccccaaaatgctcgcagccccgccgtccccgggaccccccgggacacccagcggccccgctgtctccgggacccccccgggcaccctgcagctacgtcgtccctgggacccctccgggcatcccgccgccatgacgccctgggaccccgcgcgtctacatcgccgcgagcctccgccgcggagtagacgactttccggaggaatcgccaggcgcgaggccgggcctgcccggcccttcgctccggagtgtcctcgcggcaacgccactccacgacatccctaggccggcgacacgccgctctcaagcctgtggatgacccagcgccagaaaaccgggtggccgtcatgaagccctagcccagctccgcagcccctcaccttatagacggccacacaggctgaggtgcagcccaggtgaactccgatggccgccatgaggcagcagggacggcagcggcaggaatgagggggtcccccaacagcaacagctaccggccgcccaacggccccatcaggcaccgcggagcttcacgttcccgccagccccctgcgtccggtcggccgctacagcctcccgcgtcgccgccaatcagcgtgaaggttccgcctttcttcacgcgcagtccgcgagtagcttcagcgcgtctctgcgctccgcggaaactgcacagtgcgcacgcgcaaccggggagggacgggaaaaggctcctacactccgcccccttcctatcccttccttgagagccaatggaaactctgtgttcagttgcgtcatttgtcctggcaactactggcagattctttccaacctcgaattctgctcagctcgctttggcagcttggtgggcggtgggcgcgggtggcggaggcgattgaagctgctggcccagcatgtggtgcgcgagcccagttgctgtggtggccttttgcgccgggcttttggtctctcacccggtgctgacgcagggccaggaggccggggggcggccaggggccgactgtgaaggtgagcggtgtgacaactgcttgcatggcggcggccccgcgctgcggcgcagcagctgtcggctttggcttctcctggccctggctataaataacattccgcccaggaaatgcaggccctgtccctcgttttagatcgcccaagcccagctcgagtaaaaagctcaagccgggcctggtggtaacgtgaggccacgttgtggttttgctgtgaatattaaacttcagcagtaaaagctggtgggtttgtatttgga

SEQ ID NO: 3588 - DNA, 6000 bp, Homo sapiens
gagttcaagcaattctcctgcctcagcctcctgagtagctgggattacaggggcccgccaccatgcccggctaatttttgtatttttagtagagacggggtttcactatgttggccaggctggtctcaaactcctgacctcgagtgatctgcccgccttggccccccaaagtgctaggattacaggcgtgagccaccgtgcccggtttacaaaatctgaattgtacactttaaataggtgagctgtatgatagcatgtgaattatatctcaacaaagctgttaaaaaaattaatgggacatgcagtagtagaaaaagacagaaaacacttgcatgaggggagaggcaaggccaaagaaaatctctgaaggttagggaagatctgaatgtgtttactgactgagatatatcagtaaaaaaagagagcttgatgtaaacaagacatcagagaagaaaaaaagtctggcggggtgcagtggctcacgcctgtaatcccagcactttgggaggccaaggcgggcagatcatgaggtcaggagtttgagaccagcctggccaacatggtgaaaccccatctctactaaaaaatacaaaaattagctgggcatggtggcgggcacctgtggtcccagctactcaggaggcggagacaggagaatcgctggaacccaggaggtggaggttgcagtgagctgagatcgcacgactgcactccagcctgggcgacaagagcgagactctgggcctttaaaaaaaaaaaaaaaaactcctatagggggtagataggaagaaaaaagaaaaatggtgacacctctggaagtaagaataagtgtgaacagctggtggtgaaggtaagttgagagtttacaaatgaaagatcctatttttcattgaggtaggaggtcttcagcagaaaatgagaaatggatagagtaagaaacccagaaaagtaatccaagttggaaaacctgctgacaagaatgggaaaagcaagcaagataaaaagcttgtcaggtagaactgagcagtgtgagaacagaaataagttataatggggctgatatgcatgattgtataatattctcagctggactggtcagtccatagcttgtaaactgagatggcagatgactggggctgtttcaggggccgaaggatgctgagagtgcaggtgagatgcatgggcataagatcccactgagcagggaaggcagtgatactaaagaacttgaaagaatgggatttagtgactgattcaatatagaagatgaaggaggaaaataaagacttaaacaagattcccgattcacttatctgatagatttggtagattaatgaccaaaacagttcttggaaagtgaggtaggctatagacagatgaattactcaaaaatatacagtttagatcaaaaaatcttttgagaacaactctgccgttttttaagagcaataaaggaaggcttagagaagtgaaacgagtttgcttaagtcctaaggtactaaacaaaagctggaaatgactttgcaatccaggccattctattataacctagaacctgactaaatctggagtgtgacaagatggcaggaaatgcaaatggtgatgttcttgagagtcagtaacactaaaattggtttgaaacggtaggttcatttcaggtgatagtggggaaatacgatccacgaacaaaacgaaagacaattggagatcaaacatttgctctggtaacccacacggagataatcaagagttggatgtagagggatatgagcacctgaaaatattctaatgcaagaacactttatgcttcaaaatcctctcaatgctatttggcaacacagatgataggacatataaatttatcatgccttagaattttaaacattaagaagagcttttcttttaatgttctttttatgttacagaaatacgaaatactgaagtctgattaggtctcttgtaaggggctagatatttgccttacctttactaccttgtagtcacacaagtattccacctcataattgtttagattccttttggtgattccaatcgatttacatgtgagcttttcttttctacataattcctgaagagtatcaagtgaaactaggcaaggcacacaccaagctacaataagaaaatagaattctttactaatgaaatagctattcaattaaaacaaaaaagagaaacttaaaacctctattccccatctttcaactggcaattttagactaaaaattcctatgacaagaaaccagttacatgtcttcaagaaaaagttaaacattaaggaactattttgttaaattggtgttcttggattttctcatggatttctattccactacgtttaactgacatcagttaatttccattaagtcacttgaaaatgtttcatgtctgtaagcttttttaagattatatacagatgcaggtcaacagagataatgtttttcactttcattgtattctacatagactacaatcactattttaataaaatgtaaatctctaggacacttattcttaaaaacatatctaaaatatactttaaaacaatcttataatttgttaacacgtaactttcattttttttaactggacaaaacgaactgaaatctaattaaaatatatttctacggttacaaactcattatatgttagttttctctttgatatgttgcatgaagctttaattccacttattattctacccatactgcaatatattatcaccaaggtgaataaactccagttattaaaaaaatggagtatatcgatattttgtaatacttatggactgtactgtttttaaagccaaacttttaaaacggtgttcaatttacataagccatgtactaaactcaaagaaaattagacatactcatcatcaaccctccagaaaccagaaactaattgcgttccagaagatttcaccctcaaatttctgtaagcagcatgttaccacactgaatttaaagtgtaaattaacacgtttaggaaaatggaacaaacttgttgttagggctagtgtcatggtaagcacttgacaaaatcaaaagtcctctgcactacccatcgctcggtcaccgagctatgtgactttagtgaggtctcaatctttttggctgtcagattcactggaaaaaaatggagaaaactggtgttaccaaacaaaatctatcagtaaactcaagctttacttggtagctctccaaggtagttgcgatcaccttttgcgttttgaggtaatttcagggaagggagaacacttgttagtggcaataacttttccggcccctttcctcatcctccccacctcacacagaaacttcattgtcagaaacccttaagcataatttctaccatctcactggctgcaaacgattccatcctaaagcagtaaagacaaaggtattttcctccagaaaacgtgggggaagaggctgattggctttgtagtggtcgtttgggggtaggacagtgatgggaaagaaatgaccccctaagtcccttccatctacaaaaactagagaacgttttgtgttaagctgacctcattaagggaatcacgtataaaggaggttcctcttatctactcaaggtgtgtttgtgtgcttttcctaaacatttttatctagttgaggattcaaaacacaacccgcaaaggaaatgctctttgaaaattaaaaaaaaaaaaaaagtgaacatgaaaaactgcaaacacgtggttaaaaaaagaaagacaatctctcgacagtctccagtaatgcagaaaaagatttcactgacaaaattaaatagttcatgaccaccacaaacaccttccgctggttcacagtaacccctgacattctccaaggagaaaaattcagggataatgaggtcataatcccagcggagaggagacgagcttgaaaacacctttacattccggaacgcacggaaaagttccaggctctcaaagcgtgcgcgacaccaacaccccccgacgcccacacccacgcgcgctcggtgcccagttccccggtgcccaattccccagcgtccacagaaataacaccaagctcccggtgggtgaaagagttaccgtaagccagaggctgcaacctcaaatacccactttctgggcgattctccaacgaggcactcaacctcctagcgtgtccgccttgggggggattcctcgcttatcccctttcttagcacacaggcgccccgatttactctccccctctgatattaaggtcatgttcacgccggcgggcgtcgcttcccgcctcccacttcaaaggcccgggcgcatgccgcacgccgcgctcgaaccaccacaaaggagccagtcgcagccgtgccccccggacctccaaccggggactgccggggagcggcctcgaagcccgaggccgccacgggagacgcggagggggccgggccgagcgggcggagaggccacgctccacttccgaagtgccccaggctcggacagtgcccacctccgcggcgggagccggccgggcagggaggcgggtcagcggcctgggggaggataggcgtccgcagcgtgcgtcccggagttggggtcgcggcgggcggggaaccgccacgtcgccatctggctggcccgcgggacggccccgccgcccgggccttgggagcttgcctgggaacagggaaggcgagggggccgcgctccagcctcacctcctcgcgcctcggccccgaccgccgccatcttgtagagctttcattcaaactggcgcggtctgacgggatagctcagctggcccgacgccccgcccctggccggcccgcgcgggacttgggggccggggcttgttgggggacggaacccgcacggcgtcctgacgtcactggcggccgaccccccgccgcggcggccagcgcgcctgcgccccaaagctaggcccggccccaagcgcgaggagcggggcggggcgagcgcgcgtgctcccggatcctcggcagtgtccggcgcccccttcccttcgccaggcccgtttggcgccttcactcgggaagacgtcggccaggactttgcgctttggagacgtcttacttcggcagcactcgcacactgcgagatccgacacgggcagcggggacctagggagccggggacgctgcctgtcgggtacggttccgcagctaccgcagccccgtgggccatggttagtctccccccgacaccgctccctctagagctccgggcttcggaagcggctgcacgtgggcatggctggagaggttccgctggcttggggcagtcgccgggattccgactggttggtgtggggtgtggcctgtgctatccagctcccagctgatcctaatgtgcggcacagcggaaaccaccggtccacatcagtgcttctcacttaaaggggcttacgaatcgtcgggggtgggggagctggacttggaattttttaagagatgaggtctcactctgtcacccaggctggagtgcagtggcgcgattacggctcactgcagactagacctcctgggctcaactttaatgtaaattgggattgggtaggtctgtaaggggacccgagctcccctcccatgttgttgccaagctcctgagctcggcctggtggcgggtgggggccgggaggagaaggacacgttagtaaggaagctgcaggacgactccaggggcctcccacctggtctccacccccctcccccacccattcttgacgctgcatccatgattgttctaaacaacctaaagcagaaatcttagagcaaataacgaaaactggcagaaggccatttgatatctccttaaaaaattcatgtaaaaaattacataaacgtttcaaagcagtatgtataaatttgaaatactggaaatgaacgcagaccattaaaggaatagttaattatttgattccattatgaaatactgtctagccgtcttaaaaaggtgttcatgaagcttttagtattcagcaaaaccaa

SEQ ID NO: 3589 - DNA, 6000 bp, Homo sapiens
tagtgtttttttatttttcaaggtgaaaatagctttaaattttttgtttgtaagaatgatacatagtcaatataaaattcaaattccaaaagaaaaaaatataaaacattctttattctaccatccagaatagtaactataaagatttttggtgagtaccttgataatcttttcatgtacatcctagttatctttgttatatgtatgtcgtagcaaagataattgggatgtacatgagatacatgcaatttatactcatgaaatgtaaatatatttcatgaagtttaaatatgtatatatttaaatgtggggaaagtagtcaagtaagtgaagtattacataaatatggaagaaaagttttgaagaagtcattttattgtggaagtttcaataatctacctcgggtcaagttttttatataaaaggccagatagtaaatatatacatatttaaacttaaacacttttaccactaaaagcttatgtcaaattatagttttgcctatttacatctgacattgtctgaagaacagagccaaatataaaaataggaagaaatacctatgatgtgaaagtcttggaacgtgtcttagtttggactgctataataaagtaccatagtctggggggtggcttgtaaacatcagaaatgtatcatagttctggaggctggaagtcagttcgggtgctggaccaggctggaagcggggccgggttctgatgagggctcccttttgggttgccagctatccttataacctcacacggaggatagagggcgagagagctctgaagggtccctcttgtaagggtgtcaatcccatgcatgcagcctccaccttcatgatttaatcacctcccaaaggccccacctcccaatataatcactttgggggcgaggatttcaacactggaatttttcagagatgaaaacgttcagtccttaacaggaggtcacaaaatattcatcacaaactgaaagcttttatatgtataagaattcttaaaagtatcctagcataaaagttctatgggaaaaatcacaatatctaaaatgataatgagtgaccatataatactgttatttgctttaattcattatctcattttaaaattttgatctcatcacaattccacgagtagttgtactatgtagagagtaatatggccttggttatttctgttttccagataatagattcacagcagttaaataaagtatccaaggtctcacagtgaataaatggtggattttgaactaacattcagatgcttattttgtaaacttaatttttcttgactgcttactattttaagcacattacatggattatttcatttaaattcacattcttaatctagtgttcattctatgattctttgcctctcagaagagaacgtttatttcagtagaagaggagacactccagaaatcatgtggtctttgtgaaaaaaatactgggaaagggtcatgattctctacttttcccttgaggaccctggtgtgtgtctctcagtggctttttatttctctctccatttatagccaggatttaccaacaccctcaaacattttagtcccaggaaccctttatagtcttaaaaaataacatgttgagaacccatagagcttttgtttgttacatatacataaaatgtagttatataactatagttaccatatggaaattaaaaccaattttaaaaattatttctaagtaataaagttaattttttatgagaaataatttttctaagacaaaaaattagtggcaagggtggtatctggggttttattttttgttttttgtcttgagacagggtcttgctctgttgcccaggctgcaatgtagtggtttgatcatagctcactacaccctcaaactcctgggctcaagcgatcctcccacctcagcttcctgagtagctgggaccccaggcatgtgccaccacgcccagctaattttttagtagggttgccctggctggtctctagcaattcctcagcctcccaaagtgccaagattatacgtgcgagccactttgcctagccaaaagcagtattttgtattttttcaaatctctttaatgtctggcttaataggagatagctatgttctggtacctgcgtcttcgttcaatgtgttgcaatattcaaattgtgtaacctctagaaaattccactatgtactcatgagcgaaggaaggcagagaacatgttggtctgaaaatagttttgcgctcatgaaccctgtgaagagtcttcgggtcccaattaccatactttgagaattgctgctctagatagtaaacacggtgatgaatgttgaacagacagggcctcatctatgcgctggaatggatgggattcaagacacgaaacgaaacactggatttacaaaatagtgcgatgcattcattatgaatcaagaccaaagaacaaaaacccgacaagataattgcaaattttgatgagtgctttttaaggatgcaaagtagggctaaagaatgaggtaacatgcgaggcctctgtcaataggtggtgtttaagctgagacccaagtgatctgaaggtagccatgtgaggaggggaaggagcctgtcctcttaaccggaaagtaatttccagctgccttcagtgatttgctttatccgctgctcctgtcactaggaagtcagctccatgaggactgggtcttttttctttctcatccactgctatattcccagcacctatcaggtgcctggcacataggagatgcacagtaaaagatttctgggtaagtggggccggggaaaggccaggaaaatgagtaaaggggagagtggcaccaagtgaggtgagacaggattcccatcactggaggccctgccggccatctggaggtttgagttttattctgaatgctacgaagttcagaagtgtatttttccggatatgttcaatttgagatgtttgtgcaacacctaagggcatatgtccattacgcactgtggatattctagcctggaattcaggcagaggccagggccggagacgataagtgaggcatcttgtgtgtcaagatgctatttaaatccatgggaattggggcagtcacatagggagagggcggaaaagaaatgcagtcccaggactacagtctcttctctgaggaacccaggttggactgaggaaaaggagccaaaaaggattcaagagtggccagtgagtagcgatggccgctccttggtgggctctgaaaacatacaggagaggtaatgaatacaggggccggttaggacgggaggctgtatccaagtctgaaggcataatcctagatagactaagccttaaagggcctggatgctcttccaggtgacagggttggacagggccttttattccttatctcaaggtaatgagatatggaatacaaaatttactaaggactcaaatcttagaaacatgtctgagaaatgcagttgcattgaaacacacacggactgcagaacagtatttgtattatgatgccgtttgtagctaaataaagtctgggagcatgagtgtgtgtgaggaagtggtgtttcccatcgtagaaaatgattaaatatttaaaaacgagaagttaaaaagaaaatcactccgaaaaggctatttcgttattttcctatacatttttttcttccatagttaaaactatatttcagggggatttgttttggttttgctgaatactaaaagcttcatgaacacctttttaagacggctagacagtatttcataatggaatcaaataattaactattcctttaatggtctgcgttcatttccagtatttcaaatttatacatactgctttgaaacgtttatgtaattttttacatgaattttttaaggagatatcaaatggccttctgccagttttcgttatttgctctaagatttctgctttaggttgtttagaacaatcatggatgcagcgtcaagaatgggtgggggaggggggtggagaccaggtgggaggcccctggagtcgtcctgcagcttccttactaacgtgtccttctcctcccggcccccacccgccaccaggccgagctcaggagcttggcaacaacatgggaggggagctcgggtccccttacagacctacccaatcccaatttacattaaagttgagcccaggaggtctagtctgcagtgagccgtaatcgcgccactgcactccagcctgggtgacagagtgagacctcatctcttaaaaaattccaagtccagctcccccacccccgacgattcgtaagcccctttaagtgagaagcactgatgtggaccggtggtttccgctgtgccgcacattaggatcagctgggagctggatagcacaggccacaccccacaccaaccagtcggaatcccggcgactgccccaagccagcggaacctctccagccatgcccacgtgcagccgcttccgaagcccggagctctagagggagcggtgtcggggggagactaaccatggcccacggggctgcggtagctgcggaaccgtacccgacaggcagcgtccccggctccctaggtccccgctgcccgtgtcggatctcgcagtgtgcgagtgctgccgaagtaagacgtctccaaagcgcaaagtcctggccgacgtcttcccgagtgaaggcgccaaacgggcctggcgaagggaagggggcgccggacactgccgaggatccgggagcacgcgcgctcgccccgccccgctcctcgcgcttggggccgggcctagctttggggcgcaggcgcgctggccgccgcggcggggggtcggccgccagtgacgtcaggacgccgtgcgggttccgtcccccaacaagccccggcccccaagtcccgcgcgggccggccaggggcggggcgtcgggccagctgagctatcccgtcagaccgcgccagtttgaatgaaagctctacaagatggcggcggtcggggccgaggcgcgaggaggtgaggctggagcgcggccccctcgccttccctgttcccaggcaagctcccaaggcccgggcggcggggccgtcccgcgggccagccagatggcgacgtggcggttccccgcccgccgcgaccccaactccgggacgcacgctgcggacgcctatcctcccccaggccgctgacccgcctccctgcccggccggctcccgccgcggaggtgggcactgtccgagcctggggcacttcggaagtggagcgtggcctctccgcccgctcggcccggccccctccgcgtctcccgtggcggcctcgggcttcgaggccgctccccggcagtccccggttggaggtccggggggcacggctgcgactggctcctttgtggtggttcgagcgcggcgtgcggcatgcgcccgggcctttgaagtgggaggcgggaagcgacgcccgccggcgtgaacatgaccttaatatcagagggggagagtaaatcggggcgcctgtgtgctaagaaaggggataagcgaggaatcccccccaaggcggacacgctaggaggttgagtgcctcgttggagaatcgcccagaaagtgggtatttgaggttgcagcctctggcttacggtaactctttcacccaccgggagcttggtgttatttctgtggacgctggggaattgggcaccggggaactgggcaccgagcgcgcgtgggtgtgggcgtcggggggtgttggtgtcgcgcacgctttgagagcctggaacttttccgtgcgttccggaatgtaaaggtgttttcaagctcgtctcctctccgctgggattatgacctcattatccctgaatttttctccttggagaatgtcaggggttactgtgaaccagcggaaggtgtttgtggtggtcatgaactatttaattttgtcagtgaaatctttttctgcattactggagactgtcgagagattgtctttctttttttaaccacgtgtttgcagtttttcatgttcacttttttttt

SEQ ID NO: 3590 - DNA, 6000 bp, Homo sapiens
caaaggggcctggtcctcctcttccagatctgcccatgctcatccagtcaatcaatctgcagacctatctatctatctatctatctatctatctatctatctatctatctgcatatatatatatatctatatatacaatttttttcgagatggagtcttgctctgttgtctaggctggagtgcagtgccatgatctcagctcactgcaacccttgcctcctgggttcaagtgattcttctgcctcagcctcctgagtagctgggactacaggcatgtgccacattcccagctaattttttagtatttttagtagagacagggttcgccatgttggccaggctggtcacaaactcaagtgatccacccaccttggcctcccaaagtgctgggattacaggcatgagccaccgtgcctggcctgaatgcagatatttcttgagcgtctactactatgtgtgaagcattgttctaggttctgagtatacagcaatggataaaacagacaaaaatcccaccttgtatagcttgcattttagtcagagcagacaggcaaaagaataaagaagtgaaatagaaggtggccagatggtgaggagtgccgtggggagaggatgggagtgttagggagtgctggggaggggcagtcggtaaggctgcatggaggcggtgctatgtgagaaaatctctggaggaggggaaggagtgagtctccagacatttggggaaaaagtcttcaggcacagggagcagcaagtgcaaaggccctggggctggatgatggttacagggggcaagggggagagagaggcaggggtatcttgtgcagggccttataaaccatgggagggctttgagccttactctgagcaagatgggaggcatgcaatgggatttctgtgtgtcaggggtccctagagggctgtgtttgttgctggaagattccgcggttggatggcatcctgatgaacgtggagctcatctgtccttcagatggggggcagcagctgccgtgagtgctgtcctggacatggtctcagctctgtgtgtcatttcccttctctggacctcatcgtccccagctggaggctgagtggtggaggagaactggctcgtcaccagcccccgtttaaccacaagacttctttctggggacccctggacagcatgggtgagccactcacaatccccaccttcaaagccattgcctgctgagcacctgctctgctggggcactgggatcacagaggggcagcaggagacaacgggtctcagcttgatcctcaaagcccagcaaggaggtgtggggcagtggggggtggggggagtgagtgaaggagggtaggaaggggtccccttataacccgattgggaagaccggctctctgagcaacaaaaatgagcgacattataaatatcagacatacaatgtcaaaagattgttacaacggtaacgatgaccagcaattatggtgtgctactcaatgagggtaaaattagagtttggggtcagactgacacctgaaggggagccctggtcacacagattacaggattcagggactggaaggcaaacagcagcagccggaaagtgctacagccccgacccttcccaccaggctccccgtccttctgtccccctcgtctgtctgtcaggtcacagggctcctggttcagaaatcagagacccctcagaggtgggaggtgggaggggccctgggctgcctccctgatctccgtcttcctctggcttcccagggcactggtctgtgggtagaaagaatctttagaagaaggagaacaacgggctgttttgggaagtctgcctgggaccccagctcagcttcgtggcagggatgtgtgcctggcagccccaggggccctgctgggcctctcagtgccctgtcttatgaagggaggtcttggcttcccacaggtaatcctcagctctgacggcaggtggccctaggggaggggcctggaaggggactccctcaccacactcgggagcattccactggcctgttttatgttttggggcttccccatgaattccaatttaggaaaggattctgtagctttaaaaaaaaaagccatacatggccgggcgcggtgactcatgcctgtaatctcagaactttgagaggccgaggcaggcagatcgcaaggtcaagagatcgacaccatcctggccaacatggtgaaaccctgtctctactaaaaatacaaaagttagctgggtgtggtgatgcacgcctgtagttccagctactcgggaggctgaggcaggagaatcgcttgaacttgggaggcggaggttgtagtgagccgagattgcaccactgcactccagcctgggcgacagaacaagactccgtcttaaaataaataagtaaataaataaataaatggccacatatgatccagggggctcttccccataatgaccagtcctctggtgctgggatttaggggcttggtcccacctcctggagtgtgctgtgggggtgccgctggcttaattgcctggggaaggtgctttgcaaatggggcccgggcgccgagtctctgagctttaatgggcttatcttgcttcctgttgttcttcatggcagttctggggtgaataaaatggaactttgtggttgtggtcttccaacccctgctgtttaagcagatgcttctaaccagtaggaaggggaagatgagggtcctctggcaggggctgctgctggaggaggttgtccccctgaacccttctcttagtccaaggaaagacctccctaaatggtgtcttatgagccacaaaatggccttgggacaagatgaggcacctgacggtgaaggctgaggtcccacacggtgttggcaggtggccctcaagcccattgtcttctgcccgcatgcccaggaccgccacatccttcctgttccactgacgtcacccatttcccacctgggatgcctacctgggctggctttgaaatgacagctaggcttcaccacttccttcttcctggtgtctcctgaacaaaaagctcacaaaccttattttctcaggatcttttctgctaaccaccatgggcaaaagatgcagtcaaaacaacaaaaacggggaggttacgcagttcagaaaatcccacacattctcaagaagggtgtccccgccaagctgagagatacctgggacatcatgctttcctggaggggaaggctccctgcccccattcctgtacagccgggagagtcgctcctgttcgtcatcccatcttctcgctctcatttgctgggctgacctctgctggtatttcaagactgtttggtgccaccctctctgagagatggcctccctcatctgatttagatgcttttctttaccttctcatagcagcttgtactaatacttgctaccccctgttgaaattgtcaccaggcaggtctgtctctaagaccagacagtctgcttttgtcttggaaggacacttattaccccttcctgttcacaggtatttagtattcttaccatcatctttccctgctgtgctcccggcagacaattctaatctgtcatgacactctgatgatcccagacccagctgcattatcattctcagtccaacactccaggaaccaagggatcacaatccacttctaagaggaatccagcatgtgcctggtcttgggcattccctggtaggtgagtaaacctgttctctcgtcacccagtgcttatcagttgctgatctggcagtaggaggatgaaacacagtgagcctattctgtgttcctgttctactcaaggggtgaagaggcacctggaaacaacaggaagagttgtaggattaaaaaggacatccaagattaaatgtaactttcatctggatgaagccaaaggcagacttccagccctaaattctgactggtggctgacacaggacatgggttcatggtacccttctagaatgcagcatagactactgatgaacagtgcatggcaaagaagccaagtgtcatttcatggcctcagcctctcagctgagaagcagggcacagctcacccaggctaggaaaacagaggcaagtcctggaaagctgtctgcttttaaccaagagttactggccatcaagtgtcttggttaaaaaataagtgtcaggcaaccttcttggtagagtgtgttggggggcattatcagagtctggtaatgacttctgagggtcccaaagagtgaagtgatatttacatagcaaatccaaggagggggattgtgtgcaatataggtggaggtgggggcaggttttgtgggtttgccaagctccaagggtcatacaatgtgcatgtcaaggacaagaaatcaaagccatgtgaaatggttggaggtggttcagtttgaggtcatgtgtttctcagctcctgttgtggaattagtgtgagacccagaagactgtggccaaagctattatggacccatggtctccgtggaatcatccctcatgacttctgctctctgatcacatccacactcatgtcatcctcgttcttccaaggtgaggttactagtactgcacaggggctgatgagagcatgtcctgccaggaaaaaccatcccagagatgctttcccccttggcactgtgtcctgtatttgctcagcagcccacatcctgttcttccccaaaccttggggcagacttcccacaggtgaatttgaactccccaagattaaaatcaagcccgtattcaggaaacacttgggagtccttgaggttcaccgagagggaagttggaaatttttcacttatgtcagtgcgtttgcagttgggcaacagccagattgttcatatggcaatcaatcaaacacacctaagttttttccacatattagccatcgactgttagcaaaagccctcacttcctttatattgatttatagcagcagtagaaatataccaccctagaggacacacctccttttagctaggtacctataaatgtccaggattttctattcaattgagaagaacccagcaaaatggggatctccacagtcatccttgaaatgtgtcttttatggggacaagttctatctacaggtattacgtttaattattatattcattaatttctctcctgcagacccaatcatggcaaattatatctactactttccattacaagggaagttttatatcaaagagtgggtagcactttgctgataattgtaattgtttgcaggtattcaggaggaatggctcttttttgttttatttctggctgagaaatataaatggttgtagttagaaaaagccagtcattaagtcaatgttttcagtaagtcattcaactaaaggaatgattgatttgtcttagaaaaatccctgaagtttaggaaaggtggatgtgtattattaagaggcccttaaactttgcaacaattggttaaacacacaatttgtgtgctatgaaaacgggcagaaaggattcccactgcaaatgccctttatgtggcttctttctacaggtgtgtctggcttgatggctaatatttgccgagcaaaatcaggtcaagtaattgagcgcagacaagatcattaagattccaagtttgtcttggaattccaagtttctctgtcatgcacagctttaaacaaacacttgaagcccagtcactcaagcatagctgtatgttcttagagagtcagatgataaacgtgagagagccgtcggtagcgcactctgattgctgcatctcaatggcattttgcagagatactagaggaacaagtgattctcagtttgcctattttgtctctctcttcctgtctctctgcctctctctctctctctttctctcttatctattgtgtagttattatcatcttttctctcccctctctctccctctgtttctgtctgtctgtctgtgtttctctctctctctgtatctttctctttttcccatcttttgggcagatatcaccttttcttcctcctcctccctctgt

SEQ ID NO: 3591 - DNA, 6000 bp, Homo sapiens
tttatgaagaagatgggattaagagattaaagtaaagacaggcataggaaatcacaagagtattgattggggaagtgataagtgtccatgaaatcttcacaatttatgttcagagattgcagtaaagacaggcgtaagaaattataaaaatattaatttggggaactaataaatgtccatgaaatcttcaaatttatgttcttgtgccatggcctcagccggtccctctgtttggggtccctgacttcccgcaacacagcacagtgctttgaaaacacacataggattcaggaggcctctgtcttcttttcaacccctctcagctttcatgaaacagtttcatactgtcccagtggacagcccttacaggttcaggaagtggccccatgtttaatgagttttggtccttttatattcaggactcacatatagtttcgaaaattgagggtgtcaccctctgacctgttcaaggcattgtcagggcaggctcgatacccccatccatcactgctggaaaaattctgagattatgatggaccacatttgtatccagaagaggcagggtttgtgcttgggcagggaaagggataataaaggtttgtagtgtctctgcttagccagaaacctgattcctgattgtcccctgggcagcccctggttcccctaacattttatctgccagtgtctgagcctcagcaatggcatctgatgtcctagtcagtccatgcatcagcagatgtgggattgcatggtggggggcatcctctaacagatagaaagataccccaggattagagaaatggagggctcagtctggtctccagcaggacctttgttcatggatgagttcacagcagaggagacctgggaagacacatgggaagcaagtggcaggaacaggaagtggaattgttgccaggttgattccccctcccagagaaccttttgttctgtgccttttcccttcaagtctaattctgtcttttttctttgttgctatttacagacacttggccaacctctcgtgcatcaacagcaggtaaacaatcctctcacccctccctagggctcactatctctggacatattttgtgtttgaaactgataggatgaggctcaaggtgggcccctctcttttcatgtccctgtgggttgggtgggaggaaggtggagtttctagggagtcagccctgggtttgatgtttgaggatggagggtgctggtgactgtctctcatgggaccctgttccaagtgttcaggaacgatcctcatccaggtgctcaggacgagcactggaaggctccctaatcctgctgggacctctttcctggccctctgaccacgcactgcagacctgcaagggtgggtgaaaatttctgtccctgcagctgtctggccaagtccttgccatccctggaaatttgccagaaaccagagaggaccatgtggatgccaccaaactcttaaacatggggccagcatgggcctgctctctggagctgtggagctccatcctgtgtgtgcccagagtagggagtggggcattcattcctgtcacttccagtggggtcacaggtgcttccccaaaatctgagcctccataaacccaggcagcatagtgtatcacctctcctttccctatgataaagctgaacctccggtagcagttgtatgcaattgtgactgcttgcccaggtgactctggccattaggaagtaccctgagtgtggaacttgccttagattgttgacctcctggtggggatggatgaagggttcttgtgttcccctgtaggatctgaatccactttggccctgagactggtgaatggaggtgacaggtgtcgaggccgagtggaggtcctataccaaggctcctggggcaccgtgtgtgatgactactgggacaccaatgatgccaacgtggtctgcaggcagctgggctgtggctgggccatgtcagccccaggaaatgcccagtttggccagggctcaggacccattgtcctggatgatgtgcgctgctcaggacacgagtcttacctgtggagctgcccccacaatggctggctctcccacaactgtggccatcatgaagatgctggtgtcatctgctcaggtgggctttcaagaccttgggctccctctcttaagttgaagtttgctcaggaagaaaatcctaattacattctgatctcctcactcaaagctttttctatgttttctatatttctgaagtcttgttagctctctgctaagaatctttatgaattttgctacagtacctggtgcagctgtggccacttaggccagggctccgaactgaaacaacaacccagactttatccccatcctgaggcagtgcaaggaagaggcagaagagaaaagtgctggctccccacggctccatttcttccctgctgagtagcactggttgagggtatcgtggacacagcacagatagcaggggcagggagggatcctctcactacaaggaactgtgaactaaagatgcttgtctggaagtgggttctcagctgagacccagtgaggaggtctggaaatagaggctcaagggttaggagtgcaaatgcatgtctgtttgtgtcaggcctgcttggagtccttgacctcaggtcctctaagaatgctgcagagcactgcctgtgccccaggtctggtgtggggagggcagcccccatgagtctggccaggcatggccttgttattgcctgtggtcggggctgtaagatcacacaaggcatttgggctggagtggcctcctcagccttgctgactcaggaactgccaaaacatccaagggagagtgttggttttgggtcaacctggtcaccctgggcagacacaaagttactcacctcggagctgacaatagtggccaggatctgcctgcaccccttatatggtgcatctctgtgggaatttacatggcaatgcccctccctctgtgatagggactaggatggactgagtgtcaggcttgcccagttccttctatctttgttccagttttgccattttctgtatagtgcatctgatctgaccttctcttctctttctcacagctgctcagtcccagtcaacgcccaggccaggtgagtccccagcatccttcatcgggatgtcccttctctttctgcccagttacctcttccccactccacagagctctcctgcttttctgtgcggatactgtggggcatattatttttcctcccaccactctgtaactgagaccccagcatagtgcttcaacagacatagggttcaggaggcttctgtcttctgttcaatttatttcaggtttcatgaagcagtttcatactgtacaatggacaagccttacaggttcaggaagtggcctcatgtttaatgagctttagctcatttatattcagagctgatacaacctttctgagaattgagagtgactgccaaagtcacctgggaaggcaatgtcagttcaagccttaaacatgacttctgccatgggcaagcaatgtcagtgcaggcctgatacctccgtccctcactccttcaaataccccagattttgcaaggccatatctgcatccagaaaaggcagaggccatgctcgggcagggagagggataataaatatttctggtgcctccacttatcaggaaacttgatacccctttgggcggctccttggttcccctaacattttagctcgaactgtcagagtctcagcaatggtgtcacatgtgcccatcagtccatgtgtcactggatggggcaggctaacccttcgtagctgagaagaggacatctcacacttcagaggtaggagggatcgaactggtctccagcaaggcctttgttcctggctgtgctcactgagctgaagacttgggtagcacttggagcaagtggcaggaaccagaaattgaatagttttcatgatgcttgcctggttcagagatttttttttgtagctttcctccctcaagtctaattttgtcctttctctttgttgcaatttacagatacttggctgaccaccaacttaccggcattgacagtaggtaaataatcctctcgcccctccctagggctcactctctacctctggacaaacgtttcttttgaaaatgaaagaatgaggctcaagctggcgcctctgtttttcatgtttccgcgagttgcctggggaggtagactccctgggaacctagtcctgggtcagatgttggaggctggagggtgctggtgacctgtctcccctgggattctgttttatgtagtcaggaaagatcctcagccaggtgctcaggacaagccctggagggctccctaatcctactgggaccttgttcctggccctcaggccacaggctgcagacctgcgaatagtggggaaagtgcctgtccccatagctgtctggccaatgtcctaccattcctggcactttgctagaagccagagaggatcatgtgggtgccaccaaactcctgaacgtgaggcaggtcttggcctcctatctggagctgtgcagcttcatcctgtgtgagaatggagctcagaatgaggagtgaggcgtccattcctgtcacctccagtggggtcacaggtgcttccccaatacttgagcttccatagacttgggtggagtaggacatcactgcttcttccactatcatgaagctgaacctctgtctgtattcatattcaaaggtgattacctgcacacgtgactttggccattaggaagtgccctgagtgtggaacattccttaaatccttgacctcataatcagtatggatgaagggttcttgtgttcccctgtaggatctgaatccagtttggctctgaggctggtgaatggaggtgacaggtgtcgaggccgagtggaggtcctgtatcgaggctcctggggaaccgtgtgtgatgacagctgggacaccaatgatgccaatgtggtctgcaggcagctgggctgtggctgggccatgtcggccccaggaaatgcccggtttggccagggctcaggacccattgtcctggatgatgtgcgctgctcagggaatgagtcctacctgtggagctgcccccacaaaggctggctcacccacaactgtggccatcacgaagacgctggtgtcatctgctcaggtgggccttcaagacctggggctccctctcttggggtggagtttgctccagaagaaactcctaattacattctgatctcctcactcaaagcttctcctgtgtttcctgtgtttttgaagacttgttagctctctgctaagaatccatatgaattcactgcctagtgttcctgtggtcacttaggacaggggaccaaactgaaacaacaacccagactttatccccttcctgaggcagtgcaaggaagaggcagaagaaaaaatttctggctccccagggctccatttctcccctactgagtagcactgggtgagggtatggtggacacagcacagacagcggggcagaggagggatcctctccttaggaggaggctcatggtaaggaaaggacatatgttggggtagggaattctcacttgaggccccagtaaggagcatttggattggaggcatatgggctaagagtgcaaacgggtatctgtgcatgtgtgacctgggtcttggtcagtttcagctccttccaaagaactgcagtgcattgtgtgtctagcaagcatggtgttgggagggcagctcccatgagatctgccaggcaaagccttgttattacgtgtggtttgggatggaagatcacacaggggatttttgctggagtggtatcctgagacttgctgacttggtgaattgctaaaacctgcaagggaaagggttggttttggttcaattggacatcacatccagacacagagttaattgccttggagctggaaatggtggacagaatctgcttggatcccttataaggagcgtctttgaatccagccaaagcactagcattc

SEQ ID NO: 3592 - DNA, 6000 bp, Homo sapiens
cctcttcccagcctgagcttctcttcaagatggccagtttctctgatacctcagcaaggcaataacctcagcaaatgttgttggcgtctttgaattttatgggtaggcactagcttctttcttatgtaggttcctatagcaaacaagggttcaatctactttcaggctgtaagaatgaattcttccaacatctttttttgagactaaccgttaaggtttatatctactattccactctcctggatgactcttggggagcatttctaagtgatgagatggggacaggcactcagcatttctctcgctcatcatcctgggcactgggactgactcatgttttcttcttttccttgcagccacccaaataaattctactacgacaggtgagtctgctacaccccagtccagcaatatttctcttgggaattccaccctctcttgtttccagaagtaggaggagtagggtagactccccctgggggggtaatttctctctgaggactctgatctttgttagggtgacgagctgagttcccactgccatcactctcatgtctggttcaccgtggagggcccctgtggcctcctgctattgcctgctgatagtgctaagtgctggcagagatgctgctgtggaaggaggctttggtcctcccattatttcagatgaaaataactgtctaaattaacccatggaaaattaggaccttcattttagaaacatagccaagtaatacttctgcacgtatttgtcaaataaagaatactttcactttgagggagccatccgcaaagcgtttttgtgccacagtgaaaatatcctgggccaaatatgttgggaggtgctacatactctagaccttactggccatgaacagtgtaaactggaatggtcaaggctctgagaagtcctgtactaaggaaaaggatttaactttgtcagtcaaacaaattactatggaatggaaaaattatctactaaaatcctaaacagcttcatttttttttctagattggtggcatccaacaactacaaccactgcaagtaggtatcacattttctacctgaaccataggtcatacatttcttatccccaagcttggctatccatgagcgaatgctctgccccaccccagccttcctcaatctgcacatagccctggcctgtcccactatacccttcacctcttcatttgaatcaatgagataagtattcttaaaataatagacttaaaggcttttattttggggggtatctccaaagctttaggaggaagaagggagacaaatagtaaatggataattttactacaaattatgcttttccatgtcatttttatttcaccatatggctatgtttcaatagattttcattgcttttaaaaaataatagggatacttttctgtgttattaaatcttttctcacaatcattttaagtccctgtattgtattctattatacagatatgccatgaattatttgacaaatcatcagatgctagatatttgtttgtatttcttcattactgtaaatgattttgtgatgaagaatatttttatagataatttttttgcatacctcactaatttttcctttaggatataaatgggtttactggaccaaagtcaatgtcattgtagtgcctggtacatagaatgtacttcatgcatattaacttttactgtgttaggtattttaagatcttgctgtgtgtatggtcaaactaccatcaagaatggttgtaaaattatggaatgatgtaagagacaaactgatcttcttcctcagagctcacaatattattttgtacacaacaaactagaaaattacagttgtgacaactgtttccaaggaaaagttcagtgtgcaaagaggaagtattagtagagatcttccttgattggggagttaggggaagttccttatggaagtgacatttaagctgggagttaatagaggagcaggttcatttgctgaagtgtcttctaaccagaagggatgctttgaaggccctagggtgggaaggagcttggctctttgaaggagggtggggtgcgggcaaggagggactgcaggaaatctgtcgggtgaggccagatcattcagggccttgtgggtgggttaagactcccatctttatcctaaaggtagggaggctgcagaaagattttaatcttgagaattagctaattggaaatatatttgcaaaagatcatgtttatcttttctgccaaactgcatttcctgaaggcaggggccatgtctgcctttttcataatgtatccttattatctagcattgtgtctgcctttcaagaactgtttattgaaggaataaatgagtgaatgaatgaatggataaattaatgaataaatacataattactgttggcattttggcatacattccatacactgtatacacacacacaaacacacacacacacacagtatggcatgctttatatcccattgtataacccatcattttcatttaagtgtatataatacttttttcatgaccttaaaattagcatttttataacattgaaattatttgtatagaagaaggtttaatgactatatgattttccactgtatagatatatcatcatttagttaaacggttactaattgtggggcaaaaacattgtttccaattatattttataatgttaagtgactatatacaatagcatattttataaccatttatatttaatgattagaaatatgtaactcgtatccttgtctctgaaagtttgactttatccttaattatttcccagtgtagaaatagaaagggagggcaggccacatgatcttcaagaaacactgtcttcccatcaaatgggagaacgtatttctatctcataagggacttgtatctaggatatataagtgactcttgtagtcaatgataaaaagtcaaataacccaactgaacaatgagcaaaagacctgaaagatatttctctacagaagattcacagatagcagagaaggcattggaaagatgctcaatgtcattagccgtcagggtcatgcaaatgaaacacccagtaggtgggctgtagtcaaaaagccagataatagcaagtgttgatgaggatgtggagaaattggaaaccttatgcacggctgcagggaatgtaaaatggtacagccactttgagaagcagtttggtggctcctcgaaaggttagacctggagtcaccatatgacccagcagttgtattcctaggtatatacccaggagaaatgaaaacatatgtccatacagaaacttgtatgtgaatgttcaggacagctttattcatagtagccaaatgtgaatgcaatgcaaatgtccatcatggtgaatcgagaaacaaatatgatatgtccatgcagtggagtattatttggcaataaaaatgaatttaatagtggccgggcgcggtggctcatacctgtaatcccagcattttgggaggccaagatgggcggattggctgaggtcaggacttcgagaccagcctggacaacgtggtgaaaccctgtctctactaaaaatacaaaaattagctgggcatagtggtgggcggctgtaatcccagctacttgggaagctggggcaggagaatcgcttgaacccgggaagcggaggttgcagtaagctgagatcgtgccactgcactccagcctgggtgacaagagcgaaactccatctcaaaacaaaacaaaagaaaaaaaagaatttaatattgatttatgctacaacatgatgaactttgaaaacacattgagaagtcagtcaaaaaaactaccatattgtacaatttgttttatatgaaatgtccacaataggcaaatctatagagacagaaaagtagatcagtgggtgccaggaatggagggtgttgagaagaaatggggagtgattgctaatgagtacagggtttctttttggggtgatgaaaataatctaaaattgactgtggtgatttcagagctctcagtatgctaaaaaccatggacttatccccttagaaaaagtaaacaaagagttatgaaaaagaaaaaaaaagacgttttaatttctatcactgagtgtgcacatgtttttaaaaagtttttattactataaaccaaccaacaaaatgtttgaccacttaatatttatccttttctgataaataacaatagctaatattgctgggtgcttatgtgcctggcactctctaagagtttatatagacatagaaacctatcttatgtttatgtataaatgttcatatatacatatcttatttaataccctcatcagacagatgaggcagatgccattaccactctcatttttctgatgaggaaactgaggcagagaggttaagtaactggctccagatcatggagctgatagaggcagagccaagatgcaaacccaggcttcttgttgcagaaaccctgctcctaacccaacgttgtgctacttgtgaattggcagagtcctgtgctcatggaagacgctagggaacacactgtgttatggagtgctctccacgggtcagcactgtgttcagccaggactatcccacgtccctgtctgtagctgattgaacaatgatagctgtcactttgttgctttcttggcatttttgctagaggtgacacatgctccctctgaagcttgggtcacctcctcgcagagggttgctgtccaggcctaacagggaaagcagggacttgaatcaaagcttctaatgttgggccacctagaaccaggcccaagagaggggacttgtttacagggaaagttaagtcttgttataaagtgcagaagatgaaactggatgatacttacacagatgattccttgtcacaaaatacctgaagacctggtacaatggagatgtcccctctctcctctctaggaccctcttcaaattgtggtggcttcttattctatgccagtgggacattctccagcccatcctaccctgcatactaccccaacaatgctaagtgtgtttgggaaatagaagtgaattctggttatcgcataaacctgggcttcagtaatctgaagtaagtaatgcctggtcatctggtgaggggtgagttcctctgcagcacacccactggtttagactgtgtcctgggctgggatgcttttcactctcatgtgccatggacaagcttttggtggctttgattcctaccataaagcatcagggaacactgatgtcctttgacttaattgaggaagagctagaagaaaaacctgtattcaatggcatccctcgtaaagtgcaaactatttataaaatggaggggcaataggaatttcaatgttgacttgaatacattttctccatacagattggaggcacaccataactgcagttttgattatgttgaaatctttgatggatcattgaatagcagtctcctgctggggaaaatctgtaatgataccaggcaaatatttacatcttcttacaaccgaatgaccattcactttcgaagtgacatcagtttccaaaacactggctttttggcttggtataactccttcccaagcggtaagtgcacactagaccatgcctatgaggcttggtggatttacccagctgcctctttgggggcaccatggttccccaaggaaatcaaagaagggcctcagcgatgcacggcccattctctttctcttggcactgactgtgtgggcaggcccttgggaaggcagcaaagggtgcagactgggggttccacctggccttgggtctgccaccaactctccaggggacctggtgactctccttcagagccacccctctccgtctggaggtgaggggatctgagcttggcgatgtctagagcccctttcagctctgcatggagcggtccagtacctccaccccagcttttccacatttctatttggcgactttagaggtgggaaaaggcctgtgggatgcttggcctttgaggtttgttgtgggacatttgttg

SEQ ID NO: 3593 - DNA, 6000 bp, Homo sapiens
tgctctctgcagcttgactgctgtggctccagcacactgactgctttgaccacctcagtgctcaagaacaatttgtgtccctcgggcagcaacatcatcagcaacctcttcaaggtgcgcgaggccggtggggccgcgcctgaccccccgcatgtcccgcccctgggtggggtcctaggggtgggcaggtcacacggcagccccacagggagcgaccacactgggtggcatggcccctgtcagggctgctctgctgggagggttggggtgggaccgcatctggcccacgaggaaggcaggcgccctgtgctgcgcattccgggtgaagaaggtggaggctctggggggtgggaactcacctgcacccccagctccacgtgtgcactcgtgggtgtggacgcccctgacagcctgtagctggcagggcctgcaggccatatagtgccctgtggaagtttcctgctgaggcctcagtggaagtcgtcatcagtgatgctttaggggtctagtgacaccaatgaccgtgatctcagtggaaaagggcacagtgtgtcccaggcatttcgcgtttatgttaaaacgggtggaagatagcaagccggcagaggccgggccgctgcacccgcctgttccgaggtgggtagggggtggggggctgttcccaggattcccctctacgctttctgtggtgaccacggattactgcgtgacaacgggaagccgggagccgaggcccggtccctgaccacgcgtgcctggccacccctgcaggaggactgccaccagaagatcgatgacctcttctccgggaagctgtacctcatcggcattgctgccatcgtggtcgctgtgatcatggtgagcgggcgggggcggagggcctgctctctgggctgccccttccgcggggccttgtgctgactgcgccccccaccaccctcctgcagatcttcgagatgatcctgagcatggtgctgtgctgtggcatccggaacagctccgtgtactgaggccccgcagctctggccacagggacctctgcagtgccccctaagtgacccggacacttccgagggggccatcaccgcctgtgtatataacgtttccggtattactctgctacacgtagcctttttacttttggggttttgtttttgttctgaactttcctgttaccttttcagggctgacgtcacatgtaggtggcgtgtatgagtggagacgggcctgggtcttggggactggagggcaggggtccttctgccctggggtcccagggtgctctgcctgctcagccaggcctctcctgggagccactcgcccagagactcagcttggccaacttggggggctgtgtccacccagcccgcccgtcctgtgggctgcacagctcaccttgttccctcctgccccggttcgagagccgagtctgtgggcactctctgccttcatgcacctgtcctttctaacacgtcgccttcaactgtaatcacaacatcctgactccgtcatttaataaagaaggaacatcaggcatgctaccaggcctgtgcagtccctcagtgccagtggtgtctgagacctaggggttggccggagggcaggggaatctgacatcggtggggcttggctctgtggactctgtggggtccagggtgagggtgggtgggtcgggatccctggtgttcaccaaaggagtcactctgtaaaatttggggagttatttattctgagccaaatatgagcaccggtggcctgtgacacagccccaggtcctgagaacttgtgcccaaggcggtctggctacttaattgtatacattttagggacataggacattgatcattacatctaagatgtacgttggtttagtcggaaaggtgggacgatttgaaggggagggactttcaggtcataggcggattaaaagatgttctgattaataattggttgattttatctaaagacctgaaatcaatagaatggactatctgggttaagaggagttgtggagaccaagattattatgcagatgaagccgccagattgtaaatgtttcttatcagacttaaaaaggtaccagaatcttagttaattctctcctggatcaggaaatagacctggaaagggagggggattctctatagaatgtagattttcccaagagacagctttgcagggccatttcaaaatacatcagagaaatatattttggggtaaaatacttcggtttctttcagggcctgctgtcacgttggtatcttattactacagagtctgttttgtgagtcttaaggtctttttatttttagacagagttttgctcttgtcacccaggttggagtgcaatggcgtgatctcagctcactgcagcctcccctccacctcccaggttcaagcgattctcctgcctcagcctcctgagtagctgggacaacaggcatgcaccaccccacccagctaattttgtatttttagtagagacggtgtttcgccacggtggccaggctagtctcgaactcctgacctcacgtgacacaccaggttttgggattacaggtgtgagccaccacaccggactaaggtctctgttttaatgtgaatgctggtcagctgtgcctatgaggcatgttcggccacccacagtcatcatggcctcaacgagcttttcaggtttactttagaatgcatttggccaagaggtgcccattcagttggttggggttgcttagaattttactttgggtttaaaccagggagcaactccaggtagcaagggccctttttgggagcgttctctctattctcttttgggagaggccctgtgttgcctgcagccacttccaccctgccccttgggcacacaaggggcacacagtgtaagcaggtgggcaggaggggtcgggcagccagggaatgcagtgagatgggcttggggtaggggctgggtgcgctgcaggactcctcttcctcctgagggatggtaaaggatggacacactgccccctcccgagcatttgagggtctctgccctgcccatctgttacctgtaaatgttcctttgaggagctgatggctcaggcctgagccacatctcagagggtctggaggggaagaaagacctcatcctactagggagcccccccagcccaccagcgagcggtggttgggggcagacaggctgtggggctaaggagcccctgcactcccccgtccttttccctttgtctgagcacctccagccagtgggcttggtctagactctcctatctttccccacatcgtggggtggggcttgctctgggttaggctacttttccctagttgtggggaggggggtgctggcacatttcactgttccctggaggaaatgagtgcctgggaattcatatctagggctcccagcagcctctttgcaggccaatttggaaactgtccccagccctgcattttagggggttacagagtctctcagcaggccctcctcccctgctgctcccaacttgcaagcctgcactggttgggagaacataatggtccaaggagccccctctctactttccgctgtgttccctgtggggagggaagagcagtttaagaaataaggaatcccaaaggcgcacagcagaccgggggccgaggagtgggtcctgcttcccctccttttttctaggctgagccacagcaggtccttgaatcctatttcccagcggatgccaggacagcaggccctgggggagttctctctcgagcctttcagagggaccagaggtctagcagccaaggagaactcagaatccttgagtgtgtggggcaggaactctcccagctgagaaggggcacaaggtgccaaccatctagggcccagtggccaaggaagacgcggcttgtcgcagggagaatctgggccctggtcctccctttcagggcgggcagctgacctgccccctgctgcggacaggcgaggccaggctgctggctcgcaagcatggcggagcccaaaccttccctgctgccgcccgcccagccacggctgacttggaagcttgaggagcgttcagcagcctccatcctgcccgggaggaccggggacctggaagggcctggccctcgcttccctgcagcgccctagggggacgtctcagtgcctcccggagcccggaccaatgcaccagagctgagggcccaagggtgtgagggtggccgggcagtggccccgaggacggcgccccacaagtttgcggccagggcccagcaaacccctaggggtgggaaagcgtcggcccagctagcgggtccagcagggctgcccccttcaccgtggcccagcggtcacgaccccacgtcctcatcgcgggctgggactgcctctgcgtctggcctgagcgggaccgtgggatcctggggagccccgcctcggtgcactgacagagcccagaaggagtgacggttaccgcttccggtcaggaccggaagtgccgggaacggcattcgtcctccgtgcgagatgacgcacttcctgcctgaggcggccgctgttctcgcggcttccggcaggtggcgctgagaccacgggaagccagcctggctgtcggttagccctcgagcattctgggaattgcaggcctggcccctcctcttcctgttcttggtcaattccggtcttgtttccccaacaaatgccgtcgtttccggggctgcttccgagccggacccaagggccggggcgtggaggagtagaggggcgagcgcatgcgcacaggactacacgtcccgacaggcgtcgggagcggcggcccagttccttgtgggagctgtagttctgcaggcgcggaagccgtggtgctcggccggcagagcactcggtttcccagagggctgagcgcgccgcacggaggtgcggcgccgaccaagatggagactgccgagcagccttgagccggtaggtttgtggtgagggaggacgggccgcgcgggccggccgagcctccgggaggtcaccgagcgcagctttaatacctgagctcgaaggccccgctgtgctcgccgacccccgtacctcgcggccgggcccttgggacccacagcatccttgtgaggcccggaggcctgtccagcccgactggacagtgccgaggggcaccgagagccagcttggcaccgagagttcgtttgttctctggcggggaggtcttgctggcacatatagtggagaaaggccgggctctgcgttcatgtggagaaagagacggcttccttcagcctacggacatgaaggagtcaactctaccttccactcgttgccggctttcgccgagaaccccgagaaacggactaccggagtccctatcttgcagcccgatccccgctacccgtcggagtgccccgctgaccaggctgcttctggccgcggcggcgttccgctgcagaggacgggagtgcgaatctgggaagcagggttctggttgaactccagcttcgtctgcaacatactgtgtgacttgggcaaattatttcccccgccccgttcctgccagctttaaaacggtcatcagtggggggtgctgcgtatcccctttcactggggtggcttcttcactgaggagagtcgcgcctcagaggaactgaggtcctgcctgtgttcgacctggtggggggcactaagagcccctgatagtacccctgaccccatccttattgggtgcacaagacacaggtcactctgggcgggcaaggagttttggtagcaggagaggagtcggtggatggatggctgaggacagtgcagaagggtgtggctgggccgtctttttttgcctggaaattcaagttctgaggcacccagtcactccagcactaaatgggtgcaggaggcagcacttgtctgcccagctggaaaggcagggtatgtgctgagtgttacaggtggaaggccactggaggtcgctccaggagccgcggggatttacctctgcctaacagggctgctcaaggtgatgg

SEQ ID NO: 3594 - DNA, 6000 bp, Homo sapiens
cactctctgccttcatgcacctgtcctttctaacacgtcgccttcaactgtaatcacaacatcctgactccgtcatttaataaagaaggaacatcaggcatgctaccaggcctgtgcagtccctcagtgccagtggtgtctgagacctaggggttggccggagggcaggggaatctgacatcggtggggcttggctctgtggactctgtggggtccagggtgagggtgggtgggtcgggatccctggtgttcaccaaaggagtcactctgtaaaatttggggagttatttattctgagccaaatatgagcaccggtggcctgtgacacagccccaggtcctgagaacttgtgcccaaggcggtctggctacttaattgtatacattttagggacataggacattgatcattacatctaagatgtacgttggtttagtcggaaaggtgggacgatttgaaggggagggactttcaggtcataggcggattaaaagatgttctgattaataattggttgattttatctaaagacctgaaatcaatagaatggactatctgggttaagaggagttgtggagaccaagattattatgcagatgaagccgccagattgtaaatgtttcttatcagacttaaaaaggtaccagaatcttagttaattctctcctggatcaggaaatagacctggaaagggagggggattctctatagaatgtagattttcccaagagacagctttgcagggccatttcaaaatacatcagagaaatatattttggggtaaaatacttcggtttctttcagggcctgctgtcacgttggtatcttattactacagagtctgttttgtgagtcttaaggtctttttatttttagacagagttttgctcttgtcacccaggttggagtgcaatggcgtgatctcagctcactgcagcctcccctccacctcccaggttcaagcgattctcctgcctcagcctcctgagtagctgggacaacaggcatgcaccaccccacccagctaattttgtatttttagtagagacggtgtttcgccacggtggccaggctagtctcgaactcctgacctcacgtgacacaccaggttttgggattacaggtgtgagccaccacaccggactaaggtctctgttttaatgtgaatgctggtcagctgtgcctatgaggcatgttcggccacccacagtcatcatggcctcaacgagcttttcaggtttactttagaatgcatttggccaagaggtgcccattcagttggttggggttgcttagaattttactttgggtttaaaccagggagcaactccaggtagcaagggccctttttgggagcgttctctctattctcttttgggagaggccctgtgttgcctgcagccacttccaccctgccccttgggcacacaaggggcacacagtgtaagcaggtgggcaggaggggtcgggcagccagggaatgcagtgagatgggcttggggtaggggctgggtgcgctgcaggactcctcttcctcctgagggatggtaaaggatggacacactgccccctcccgagcatttgagggtctctgccctgcccatctgttacctgtaaatgttcctttgaggagctgatggctcaggcctgagccacatctcagagggtctggaggggaagaaagacctcatcctactagggagcccccccagcccaccagcgagcggtggttgggggcagacaggctgtggggctaaggagcccctgcactcccccgtccttttccctttgtctgagcacctccagccagtgggcttggtctagactctcctatctttccccacatcgtggggtggggcttgctctgggttaggctacttttccctagttgtggggaggggggtgctggcacatttcactgttccctggaggaaatgagtgcctgggaattcatatctagggctcccagcagcctctttgcaggccaatttggaaactgtccccagccctgcattttagggggttacagagtctctcagcaggccctcctcccctgctgctcccaacttgcaagcctgcactggttgggagaacataatggtccaaggagccccctctctactttccgctgtgttccctgtggggagggaagagcagtttaagaaataaggaatcccaaaggcgcacagcagaccgggggccgaggagtgggtcctgcttcccctccttttttctaggctgagccacagcaggtccttgaatcctatttcccagcggatgccaggacagcaggccctgggggagttctctctcgagcctttcagagggaccagaggtctagcagccaaggagaactcagaatccttgagtgtgtggggcaggaactctcccagctgagaaggggcacaaggtgccaaccatctagggcccagtggccaaggaagacgcggcttgtcgcagggagaatctgggccctggtcctccctttcagggcgggcagctgacctgccccctgctgcggacaggcgaggccaggctgctggctcgcaagcatggcggagcccaaaccttccctgctgccgcccgcccagccacggctgacttggaagcttgaggagcgttcagcagcctccatcctgcccgggaggaccggggacctggaagggcctggccctcgcttccctgcagcgccctagggggacgtctcagtgcctcccggagcccggaccaatgcaccagagctgagggcccaagggtgtgagggtggccgggcagtggccccgaggacggcgccccacaagtttgcggccagggcccagcaaacccctaggggtgggaaagcgtcggcccagctagcgggtccagcagggctgcccccttcaccgtggcccagcggtcacgaccccacgtcctcatcgcgggctgggactgcctctgcgtctggcctgagcgggaccgtgggatcctggggagccccgcctcggtgcactgacagagcccagaaggagtgacggttaccgcttccggtcaggaccggaagtgccgggaacggcattcgtcctccgtgcgagatgacgcacttcctgcctgaggcggccgctgttctcgcggcttccggcaggtggcgctgagaccacgggaagccagcctggctgtcggttagccctcgagcattctgggaattgcaggcctggcccctcctcttcctgttcttggtcaattccggtcttgtttccccaacaaatgccgtcgtttccggggctgcttccgagccggacccaagggccggggcgtggaggagtagaggggcgagcgcatgcgcacaggactacacgtcccgacaggcgtcgggagcggcggcccagttccttgtgggagctgtagttctgcaggcgcggaagccgtggtgctcggccggcagagcactcggtttcccagagggctgagcgcgccgcacggaggtgcggcgccgaccaagatggagactgccgagcagccttgagccggtaggtttgtggtgagggaggacgggccgcgcgggccggccgagcctccgggaggtcaccgagcgcagctttaatacctgagctcgaaggccccgctgtgctcgccgacccccgtacctcgcggccgggcccttgggacccacagcatccttgtgaggcccggaggcctgtccagcccgactggacagtgccgaggggcaccgagagccagcttggcaccgagagttcgtttgttctctggcggggaggtcttgctggcacatatagtggagaaaggccgggctctgcgttcatgtggagaaagagacggcttccttcagcctacggacatgaaggagtcaactctaccttccactcgttgccggctttcgccgagaaccccgagaaacggactaccggagtccctatcttgcagcccgatccccgctacccgtcggagtgccccgctgaccaggctgcttctggccgcggcggcgttccgctgcagaggacgggagtgcgaatctgggaagcagggttctggttgaactccagcttcgtctgcaacatactgtgtgacttgggcaaattatttcccccgccccgttcctgccagctttaaaacggtcatcagtggggggtgctgcgtatcccctttcactggggtggcttcttcactgaggagagtcgcgcctcagaggaactgaggtcctgcctgtgttcgacctggtggggggcactaagagcccctgatagtacccctgaccccatccttattgggtgcacaagacacaggtcactctgggcgggcaaggagttttggtagcaggagaggagtcggtggatggatggctgaggacagtgcagaagggtgtggctgggccgtctttttttgcctggaaattcaagttctgaggcacccagtcactccagcactaaatgggtgcaggaggcagcacttgtctgcccagctggaaaggcagggtatgtgctgagtgttacaggtggaaggccactggaggtcgctccaggagccgcggggatttacctctgcctaacagggctgctcaaggtgatggtcgacaccccactttcctgagagcttgaccctcagatgccagggccttggctgcagattccttgggagctcccggggatcttccagcaaataggagcaaatcttttccccgtggatcaggaaggtgcacgctctttgtggaatacgactgctcaccccgcacagcaagcagcttataagtggccctcctgcctgatttcagccctgggttcaagccctgggtggctgcttactaccaaaatcgctcagtagctccaagcctgcctgcagagggttggcaccattaaatgaggtaacgagtcaaaagtccctaccctgggtcctagcctgtcaggggctccgaaaacccaggctcaggtcggtcctgcccggcacctgtttcacacatgtacactccggtctgaggttggtcctctcccccaccccacccacctgcagttgagcagctgaacagaggccatgccggggcactccgaggcctgagacgaccacgcctgtgccgctgaggaccttcatcagggctccgtccacttggcccgcttggctgtccaatcacactccagtgtcaaccactggcacccagcagccaagagaggtgagaggagggcttggagggggaggcgggactccaccctgtgtgggacagttctgtcagttgaccctccacttgtccaggggcagtggatctgcagggggaactcattctcaatactgttcctcctgagaaacaaattttctgggctgttttggtttaggtgtggcgtggccctggggacgcatggctgaggcaggaacaggtgagccgtcccccagcgtggagggcgaacacgggacggagtatgacacgctgccttccgacacagtctccctcagtgactcggactctgacctcagcttgcccggtggtgctgaagtggaagcactgtccccgatggggctgcctggggaggaggattcaggtcctgatgagccgccctcacccccgtcaggcctcctcccagccacggtgcagccattccatctgagaggcatgagctccaccttctcccagcgcagccgtgacatctttgactgcctggagggggcggccagacgggctccatcctctgtggcccacaccagcatgagtgacaacggaggcttcaagcggcccctagcgccctcaggccggtctccagtggaaggcctgggcagggcccatcggagccctgcctcaccaagggtgcctccggtccccgactacgtggcacaccccgagcgctggaccaagtacagcctggaagatgtgaccgaggtcagcgagcagagcaatcaggccaccgccctggccttcctgggctcccagagcctggctgcccccactgactgcgtgtcctccttcaaccaggatccctccagctgtggggaggggagggtcatcttcaccaaaccagtccg

SEQ ID NO: 3595 - DNA, 6000 bp, Homo sapiens
ttggcctcgtggggtggtgggggtggtttccggagtctgcagttaggacagtgccctgtgcgtgttttccctttttatgtccccatagcagcccaatctgaatttctgggacctgactagggaggccagagggaaatacagaggaaaatactctctttctgttagattctggtgggtttccttttccttccctggggacaggcccgagagtttggagctccccacaaggcttcagggggtgtcttattgctgaactcagaatggcagtttcccgtcttgcttaggactgatcagtggctcggacttcctgggagccgtctctctggtcttggcccagcctgtgctctgtggggtgaaggatgactctgaccccgctggatcaggctcctgcaggcatgcaggaatggagctgttgggaggcagagagcctagtgctcatctccatcttgggtcctggtgattggactggagtcctgtctgtcataggtggagggccagttggccccaagacaaacatgtctgtctgtgaacagtggactcgaatgggggttgtggagggtttgctggcctcctgcctacactaggcatgatgcctgaggagctggggtggggtactcccaaacatactgaggtttaccttgctaacttgcagaaaaggagttcggaaagaaagttactgccttgctgcttccagggctgctatttcccgcctgtcccatctcacatctgcccctggaagatgctgctattctaccaggccttatgtttgcattctgagcctgacacttaaaaatgcacccaaggaagcagcttgttaaggaattatgtggagtggcctcggcgcctgagctgcattcctgcagattcccactcccatcagctagcctgggctgagggagcgtttccaggaacttcagtgggatgcaagccggggaccgggccagtcagcctggactgcaaagtcttttgagcctccactctctctggttgcttcccttatttgcccccaggctgggaaacagtaaggagcagagggcacccactgggatggaggttgcagtgggaaacaaaacagccaagaggtgcagcccagggaaggtgccggggctgtcgagaaatggtgtcaaggcttggagggtgggcaacagccagccccttagaggccccagtctgatctgttgccagggagttgggctcttatcctggccctttctgtcctgtgtgagagagggaaaaaggctgagaaccaggagaaacagctggttggaaccggacggaggttgttggggagggaagctgcagacccaggaccctagtaatgggtgtggtccaggaagcttaggactgtgtttggagaaattctcagtgcctgtgcgtatacacacacccctttcctaactggtttttccagttaggttggggctgggggagtgctgtatgtgtggttaagaccaaaggagttatggggaggagtgaaaggttgtggagaggagtgggaggttgtagggaggagtgggaggttgtggggaggagtgggagcagggcccagaggggctggattcttcctttaagaggatttgtgtgacacctttgggctctgataatccccttttagaagagtgcaaagcagaaattctcggtgatgccttttgtcccttatttcatcatccaagctgggaaaggttgagacctctggcttctccagctgggcttgctgagggccaggccttcagggaagagggtccacctcttcgtccctctccaagggtcatgtggactgtcccaagaaagctgtgtgggcaggaatgcaggtagaaatttgcagtctgccaggctccctgtctcccattcatgcccctgctgaatctcccattcagccttagctcctttagctctgtcctccctaggatgttctgcacaccatttcccagcctaccgtctcctccaactctgagccattcctttgatacttatttgctctcagctggttcagtttagtggtccaggactcagggtccacttgtctctgtacatctccatcccctggtcccctgtccacctggagagatgactgggagaatctatttgagacagctcctccggggcagtcaggaatggtccaggaagctgagagatgagttagggcagtgaagggaccaagctgaggctggggaggcagcgtgtgggctgcagccagccgtctatttgctggagaactgattagtggctttgttacattagacaggatgttaaacattgctggagaagagaggctggcacaaggggctggggaggagcaggccttcctgaaattgagtttccagagacaggacctatcttgagaacctgatgttgctggctgttttcccctgggttgtcagtgatgtgcaccaggcttgtacatctattacttccctgggcctcagtatcctatgtctttttcttggagctttggattttgtatcaatattcaaagctcttactgtagggaaaagaaggaaggaaggagggagtgaggtgaaggagggaaggatggaaaaaaaagagggctagtcttgggactcatgtcacactcagaagccattggaagtttagaaagctctatctaaagcagtggttctcagttgggggacaacttcactcttccctccctccattcctgcctccctccctctctctccctccttccctctgtccgtcccagagagcatctggcagtgtctggagacatttttggctgttatagctaaggagatgctaatgtctcctggtggatagaagccaaggttgccactaaacatcctaaaaatggacaggacagtctaccacaacaagaattattcaaccccaaatgtcagtggcttggagaaacccctgggattgggacaaggcttcctataggttggggatgacaataaaggccctggctgatcatgcagtccaaggcagtttcgatttgttgagcttggcataaatgttctccctgccgtgatgtggacagtgatgctctggtcctgttttaggggatcagaagactgtgtcctggcattctcccttcttagttcccccacctcctcactcctgcagggcatatgttggggaaggatcaagaagtagagaatccatccccaacacctccctaagtgccccacagtggggtaggctggagaaaacatgcagggggtgccgggtttgctatttggcttcttgcgacagggctgctgggccagctccgcttagtcagggctctggaatggagacaagtcattttaatagcatgactgtgttacaggaaaaggtctgttccattgctggggactctgcttggagttgggaatcacttaatccagtcccaaatcccagtgacccatctttgactcataagtttacagagatttatattgctcccactgcagtctatttagctgtcactgaaatccctccttcacacccacaccctaactctgttagagcatttcctaaattcgttgtggttctgcataagtagatgccacaatgtggagggagctccactttggaaatggaggaatctgcaagcatatagggattggctcttctcccgtgtcctctctaggaaagcttcactctcagcagcctttgttcctcgtcctccagctccttcttctgcctgcttcctgaggagtggggtctgagttcctctggggcgtaaggcacattcagacatctgtagaacaagtgtgggactcagtggcacccaggctcaatcctgctgctgagcagaggtgctggagtgagtcctgctctgcagcaggaaaatagggaaaggggtgcagagagggctgtgttctgagttccccagggacctgttcaccccacggattctgccaccaggattgagctaggactgacccggcccatggtgttactctattttagaaaatgtgtgtgttggaggggtgggggcaggagatacagcttgtggaaaggagtgccactcaacatcttcaagggcagggattctgttttggacttttctgagattttctggtaatgccaatacaatgcccgctgccagagattttagaactagtcctgagaagcaagaactcccctcacccccaccctttggcccagactccttccaagcctttcacacctcccctgtgtcacagcaggagagtttgttccaaaaggggagtgttgatggttctctttttgctgagatcagcggtagagggaatagacactacagtaggagagtcatcgaacagatcattactgaacacttcctccttgctaatcactgttccgttccgaggttgcctcagtgaacaacacaaaaccctgccctaaaagacttgttgaacggcatcgtaggtgagaagggggcctggcgaagccctgctccctacggttctgtgagttcctccatgcccaccctccaaagtaggtccccagggagatcccctgagagttgggtgaagggacagccatgtgacctgaaaacccttcctaccttgaactgtgttatctctggggtgtttgcagcagagggaagggagccaaggaaagactcttgttgctggctttgtcctctggctgggcacaggcaggggtggctgagccagtcttgtgcaatccctgaatttataaagcagaggccaggctgagctgggctgggggtggggggttggggggggtgggggggtgggtctgcttctggacttggagccaggatctgtttgtagcctccccactgcagacgggcagctgcatgactcatgagctgaggggccaggcagaagccattctctttggttcacaggaattctgcttgtttatttgtgtgtgtgtgagttcgtgtgtttccttcttcccttctcccccttctctaactcttcctcctctgcaggagatctgcccaaggagaatccatatgaggatgtggacttaaagagccgaagagcaggacgaaaatcccagcaactgtctgagaactccttggactctttgcacaggatgtggagtcctcaggacaggaagtacaacagcccgcccacacaggtaactcagccctgacatcggcctgtagggttagcgtgagggccacagtgggggcctgctcttccaagacttgggcccagcttccactcaggcttttaccctcactagtacttgataaagggtctacggccataccaccctgaacgtgcccgatctcgtctgataaaggaggtctcctcagcaaaggactgtgcactcaaggatgtccaccatgttgaaacctctgtggacaattggcacctgctctgaggggcatcctgtcctatcttctttcccttcctacacaagctctgagctgcaaaactcagccaggagcccttgcagtctcctctctgattatttatcaccctgtgggaaacaggaagacagggccctagtgggagtcttggcattctgcaactctgccagaagtcatctcagtactggcattagggggctaggtgtaggtccccaaaccacatttggagagccagacaggtgtctgtgacacctggagccagtcctgtgggagagagtaagcatgaatctttaaggaatggatggggagaaggcagaatgacaggaaaggtgaaaagccaaaggaagctcttggacttcagctccttctgtccttgtccaggatgtcaggaggcaggtggagaggcttctctgacctccccaggtaactctaattctctttgcaaatggaaggacctggatattatatagcattggccagataatataaaatgataatataaaaatgatttcttctgcctttggaataaggtgtttgtttttataaaagatttaccccatagctgggagtggtggctcacgcatgtaatcctagcactttgggaggccaaggtgggcagatcatctgaggtcaggagttcaagaccagcctggccagtgaaacctcatctctactaaaaatacaaacattagctgggcatgatggcgcacgcctgt

SEQ ID NO: 3596 - DNA, 6000 bp, Homo sapiens
ttttgtatttttagtagagacagggtttcaccgtgttagccaggatggtctcgatctcctggcttcatgatccgcctgcctcggtctcccaaagttctgggattataggcgtgagccagaagcctggaatcttatgaagagagggccatctgttccctcatttgatctgagccattggtttcacagccgtttccttaccacttgctgggccattgtttctggggagacagcagccatgctgggatgtgcagggacactgctttcccaggaacagagcgtatagtatgtagccatgcaaaactgggtcacagcaggaagactgtgggaatgaggtccctagaaccgcaaaagagtttggggagggaggccctttcccttaccactggggaaaagacagctttgtacctataggccacccagagcagaggtcaagagctaggggcatcagaacaaaagatccagaagccaggtgggcagttaaggaagatgccccaactgcagcccataccccagttctactcagccacccaagaggcagccagtgctgttcctgtatttctcacctccttatgcaagactaacatcccagagtggaagaaagtcctcccgaatgagtgagtaggcagaggcctagacacacttgccctcctctttcccttctctcaaacctgacctaagaaggcctggggaacagctgtgttgcccagaacagttcttccaaaattctgccccccaaacattgccccaaaaaatcctgaacagagccctggatggtggaactctggacagagagaaatggttgaagccgtccctttctcaaattatttcagttcagatgatccaagaacgtatccccacaggaaatccttgtcagataatagagaatgggaggaccacaggattgccagcacccagcatagtcaagggacatcagaaaaacacagccctctctgcccacggcagcagccacactgggtgctcccagggtcctgggcagcaaactgacacattgcagtttctgccaaactagaatgtaccctgcaacaggaggtagggagggggtggggcaacagagctgcctccccactcattagggaggactctcttccactctgggtgttgcatgaggagttaaaaaaaatatgggagcaccttggctgcctcttgggtggctgagtacagctaggggtcagcgctgtgtgggcagaaggtagaggtagctgctcacctggcttctggatctttggagcacttagagaacagggaaagaagagagggggaggatgcaggagaaagggaggggagcgacccaggcaccagtttgggaatatactgcatcggatgtttaggttttgctttggcctcgtggggtggtgggggtggtttccggagtctgcagttaggacagtgccctgtgcgtgttttccctttttatgtccccatagcagcccaatctgaatttctgggacctgactagggaggccagagggaaatacagaggaaaatactctctttctgttagattctggtgggtttccttttccttccctggggacaggcccgagagtttggagctccccacaaggcttcagggggtgtcttattgctgaactcagaatggcagtttcccgtcttgcttaggactgatcagtggctcggacttcctgggagccgtctctctggtcttggcccagcctgtgctctgtggggtgaaggatgactctgaccccgctggatcaggctcctgcaggcatgcaggaatggagctgttgggaggcagagagcctagtgctcatctccatcttgggtcctggtgattggactggagtcctgtctgtcataggtggagggccagttggccccaagacaaacatgtctgtctgtgaacagtggactcgaatgggggttgtggagggtttgctggcctcctgcctacactaggcatgatgcctgaggagctggggtggggtactcccaaacatactgaggtttaccttgctaacttgcagaaaaggagttcggaaagaaagttactgccttgctgcttccagggctgctatttcccgcctgtcccatctcacatctgcccctggaagatgctgctattctaccaggccttatgtttgcattctgagcctgacacttaaaaatgcacccaaggaagcagcttgttaaggaattatgtggagtggcctcggcgcctgagctgcattcctgcagattcccactcccatcagctagcctgggctgagggagcgtttccaggaacttcagtgggatgcaagccggggaccgggccagtcagcctggactgcaaagtcttttgagcctccactctctctggttgcttcccttatttgcccccaggctgggaaacagtaaggagcagagggcacccactgggatggaggttgcagtgggaaacaaaacagccaagaggtgcagcccagggaaggtgccggggctgtcgagaaatggtgtcaaggcttggagggtgggcaacagccagccccttagaggccccagtctgatctgttgccagggagttgggctcttatcctggccctttctgtcctgtgtgagagagggaaaaaggctgagaaccaggagaaacagctggttggaaccggacggaggttgttggggagggaagctgcagacccaggaccctagtaatgggtgtggtccaggaagcttaggactgtgtttggagaaattctcagtgcctgtgcgtatacacacacccctttcctaactggtttttccagttaggttggggctgggggagtgctgtatgtgtggttaagaccaaaggagttatggggaggagtgaaaggttgtggagaggagtgggaggttgtagggaggagtgggaggttgtggggaggagtgggagcagggcccagaggggctggattcttcctttaagaggatttgtgtgacacctttgggctctgataatccccttttagaagagtgcaaagcagaaattctcggtgatgccttttgtcccttatttcatcatccaagctgggaaaggttgagacctctggcttctccagctgggcttgctgagggccaggccttcagggaagagggtccacctcttcgtccctctccaagggtcatgtggactgtcccaagaaagctgtgtgggcaggaatgcaggtagaaatttgcagtctgccaggctccctgtctcccattcatgcccctgctgaatctcccattcagccttagctcctttagctctgtcctccctaggatgttctgcacaccatttcccagcctaccgtctcctccaactctgagccattcctttgatacttatttgctctcagctggttcagtttagtggtccaggactcagggtccacttgtctctgtacatctccatcccctggtcccctgtccacctggagagatgactgggagaatctatttgagacagctcctccggggcagtcaggaatggtccaggaagctgagagatgagttagggcagtgaagggaccaagctgaggctggggaggcagcgtgtgggctgcagccagccgtctatttgctggagaactgattagtggctttgttacattagacaggatgttaaacattgctggagaagagaggctggcacaaggggctggggaggagcaggccttcctgaaattgagtttccagagacaggacctatcttgagaacctgatgttgctggctgttttcccctgggttgtcagtgatgtgcaccaggcttgtacatctattacttccctgggcctcagtatcctatgtctttttcttggagctttggattttgtatcaatattcaaagctcttactgtagggaaaagaaggaaggaaggagggagtgaggtgaaggagggaaggatggaaaaaaaagagggctagtcttgggactcatgtcacactcagaagccattggaagtttagaaagctctatctaaagcagtggttctcagttgggggacaacttcactcttccctccctccattcctgcctccctccctctctctccctccttccctctgtccgtcccagagagcatctggcagtgtctggagacatttttggctgttatagctaaggagatgctaatgtctcctggtggatagaagccaaggttgccactaaacatcctaaaaatggacaggacagtctaccacaacaagaattattcaaccccaaatgtcagtggcttggagaaacccctgggattgggacaaggcttcctataggttggggatgacaataaaggccctggctgatcatgcagtccaaggcagtttcgatttgttgagcttggcataaatgttctccctgccgtgatgtggacagtgatgctctggtcctgttttaggggatcagaagactgtgtcctggcattctcccttcttagttcccccacctcctcactcctgcagggcatatgttggggaaggatcaagaagtagagaatccatccccaacacctccctaagtgccccacagtggggtaggctggagaaaacatgcagggggtgccgggtttgctatttggcttcttgcgacagggctgctgggccagctccgcttagtcagggctctggaatggagacaagtcattttaatagcatgactgtgttacaggaaaaggtctgttccattgctggggactctgcttggagttgggaatcacttaatccagtcccaaatcccagtgacccatctttgactcataagtttacagagatttatattgctcccactgcagtctatttagctgtcactgaaatccctccttcacacccacaccctaactctgttagagcatttcctaaattcgttgtggttctgcataagtagatgccacaatgtggagggagctccactttggaaatggaggaatctgcaagcatatagggattggctcttctcccgtgtcctctctaggaaagcttcactctcagcagcctttgttcctcgtcctccagctccttcttctgcctgcttcctgaggagtggggtctgagttcctctggggcgtaaggcacattcagacatctgtagaacaagtgtgggactcagtggcacccaggctcaatcctgctgctgagcagaggtgctggagtgagtcctgctctgcagcaggaaaatagggaaaggggtgcagagagggctgtgttctgagttccccagggacctgttcaccccacggattctgccaccaggattgagctaggactgacccggcccatggtgttactctattttagaaaatgtgtgtgttggaggggtgggggcaggagatacagcttgtggaaaggagtgccactcaacatcttcaagggcagggattctgttttggacttttctgagattttctggtaatgccaatacaatgcccgctgccagagattttagaactagtcctgagaagcaagaactcccctcacccccaccctttggcccagactccttccaagcctttcacacctcccctgtgtcacagcaggagagtttgttccaaaaggggagtgttgatggttctctttttgctgagatcagcggtagagggaatagacactacagtaggagagtcatcgaacagatcattactgaacacttcctccttgctaatcactgttccgttccgaggttgcctcagtgaacaacacaaaaccctgccctaaaagacttgttgaacggcatcgtaggtgagaagggggcctggcgaagccctgctccctacggttctgtgagttcctccatgcccaccctccaaagtaggtccccagggagatcccctgagagttgggtgaagggacagccatgtgacctgaaaacccttcctaccttgaactgtgttatctctggggtgtttgcagcagagggaagggagccaaggaaagactcttgttgctggctttgtcctctggctgggcacaggcaggggtggctgagccagtcttgtgcaatccctgaatttataaagcagagg

SEQ ID NO: 3597 - DNA, 6000 bp, Homo sapiens
ttgttagtgggggaaggagaggcattcagataaaggtaacagcatgagccatagagggagggagaggaaaatgcaggcagtgttcaaagaaccaggcagtgcactgtggttgtgcctgtaatcgggtggttggtagcaggggaggtgtgggcaagagatgaagccagaggatttcagatttgggtgggagcgtaggccagaagagggaacgttggatgtagtcacactgctgttggtgttacttagaccttcatttttccaccagactgtagtgttcaaaattctttttagtaagagaaccctttttttctgaactttttacaaccatctccaaattatgaaacataagacttttttttttagtaaaaatgtatttttttacaagcacagtgtcttgcaccatggaggggagaggaggtgttttgtccttggagctgctggcctgagagaaccttgtcatcgtgggagctgggccattcctacacagtggtctggcaatgacccggtggtggtggaggcctgtgagtgggcactggtaatgggagcagctgtaaaaccctggagggcagccccaggagagtgaccttaccaggaaagttctgggaaacaaaccacagggaggctttacaggaatttttggttgtgcccacaggcaaggcacatgaggaaaagaaatgtaattatagtttgtaagtcgatgaaaagaggcaatgagtgacatgaaatagctgctctaagtttcttcttcctgtcggacaggaagaaatggggttttatgcatttcattcagcagatatttattgagtgccagctgtgagctgggccctgcacaaagtgcagggaatattggtggttagcaaaatagtcaaggttcgtatcctaaggaactcttctgagggaagactgagattaagcagataactgtataaatgcataattacacagcatggtgagtgctctgaaggataagtgtggggagcctcatttagattggaggattgtgaaagtcaagagacaggagagtcaaggtgaggcaaggtgagtaagagctatccaggcaaagactgcttggtaggggagtgtcccagcaacgggaaacaacctggaaaaaatatgacacctcaggggaactaaaagcagttgtatgtggctgatgcacagacagggaagggcaggaagtgtgctgaaagaaggcaggaggagaatcatgctgggccttgtaggtcctggtaagaagttagattttatcttaagtgtagtgggaagtcaatgaagtgtgttaagcaggaaatgacctgatctggtgttaaaaaaaaaaaaaaaaaaggtgattcagacagctctaatgactttgtgaggggagagtggaagctggggcaattaggaggtttttgcaataattaaggtgagagatgggtagcatcagaggtggagaaaagtggacagataaaagatatattttggaagtagaattgtttgcagttgggaaatgggttggatgtgggcagaaataagaagggagagttgaggatgtctcccaggtttctggcacatgtatgcttgcaggcctctcagtagacagcagagagcttatataaggttgtcaaatccttatccttcagaagggtcaggtaggattggtctaaatccagccttgcagaggcagtggtgggattcagctgtccctgactctgcccagttcaaggagtgtgtacacagtagcattacccaagcagggattccagttctctcagtaatggggcccttcctttgtcccttcccccaggacaaggccctaaggaacctccataactccagcatgccactagggggagcatggcccgcattctgggtctggtttggagggcttcttaagtttggattacttcaggaactgacttgtatcagttctagtactcagtcctgacccctggcccctcatactgcttaaaagaatgcctggcatatggtaggtgctcaacaagtgttaactgatgttactactgtattattaatattatcttattatagaaaggggtgggatcaccccttctttctcaggatggagactgggcaagtggaatgtgcattttgaggatcaggaggagagcagagggatgccttttggacaaggaagaggcggaaatttagtgatttgatgatactgcatttgcccttctgtcttgtctttctttgtctttctttgtagacttgggattcttcagctggggcttgggtggggttggggatttatagtgggtgattaggttcactccctttcaagctctgattgcttcactaaagcagtagtgccccccatttaggatttgtgccattctgtcatttcctgttggattttataacactttcctaccttaacttctggtatatatttaccttttaaactcaagtcaatcagaatcttgttttgagaatgttgtgatatgctggaaattaatgaaaaaaacccactagattctgcataggatgttgcattaaagattctatcaggctgggtgtggtagtacacacctataatcccagctactcaggagtctgaggtgggaggattgcttgagctcaggagttcaagaccagcctgggcaacataataagacctcgtgtcaataaataaataaataaataacatcaggaccttttttttgggagcactgtttttgggagcagcattggaaaatatcctccttaagcctcagtgtcctcatcctggggagggtattaactgtcccagtgttttttgtttgtttttggtgaggagttgtcaagaggagtaaagttcttagttcagttcctgacttgagagtgctttcacggacagcatctcttccgatgctcagtcccagccctgtcagtaggctctgtaggtggaaagggggaagtcatgggacttgcccaatggcacatggcccgttagtggtggagtcaggcactgccaaggtcttctgacccctggtgctgttgcaaccactgtgcttaatgtactcaagagacttgaaaggcttggggattgtttctagattttatttcctggttccatgacctggggcaagtaattttacttctgttgtagaattaaaaaaaaaaaatctgttaaattagtataataatgccaatcctaactttcagacctgtcatgttgaacagacgagccaagattttgagagtcgtttagaaaagtgcaaggtcacatatagctgtagggtagggctttttctccgagctgtgcatcaggacgttttacatcttagagatgctgtcttaaggtctttaggctgaaaggatggtagtcagcctatctcgccacaacttacaaggattctccaccttcccttgggagcccagcgttatctcataaccagttatcaaaaagttgacagtttttgaaatcaggtggcaatatactttagttgaaagtgtgctggactagggcgaacttggctgatctcttagttctttgactgcctaactgtataagtgcagatcaaatgtttaatctctctgagtctcagtttttccatctataaaatggtcataaggccagtatgctggctcacgcctgtaatcccagcactttgagaggctgaggcaggaggattgcgtgaagccaggagttcaaaaccagcctgggcaacatagtgagaccctgtctctataaaaataaaaattaaaaaagtagccaggcgtggtggtgcatgcctgtagtcccagctacttcagaggctgaggcaggagggttgtttgagcccaggagtttgatgatgtagtgagctatgattgcaccaatgcattccagcttgggcaatggagcaagatcctgtctctaaaagaaatttaagaagaataataaataaacttgaaaaaatggtcataaaaatatctgtgcagtgtatttcaaaaggttatgaggatcaaacaaaatgatacatgtaaaaagaatgttacaaagcagaaatgtatgctgggtaggggggagaggaagggacaggatggggatggggatgggactaaacttagggggtctgccgtgtcccagggactgtgctcattttctgacaggagcaatattattaccgactgtgacagcagctcccactaagcctgcaccttagctgcagatccttagcagggcagagagacaaggctgtatttgtatcaggtttgtcgtctgggttgtgactctcgacttgcccaggattcttcctggtcctgaccgagttgtctttgctctccatttcaggaagatgagagactgcttaggcgccaccactagtaccatgagtccctgcactggttaaagccatcgccacaacctggacaggcagcaaggtaagcagagaggccagtccaggcgagctcctgggatgtgagtgcatttccgccccaactgctgcccggaaaaatcccaagtgcacaaacaagtcaaggcagcgcatcagggtccctcctacccgagctccaggacccagaggaagctgggtccccttcaagcgcttcagctagctccctcccccctggcagggattcttccaagttataaaaaatgagacactggaggggaagaaaacaagtccactcactgtcttctcccttctcccctctgagctgttcaagcaagttcccaggagcagttcagagcccctgttggactggaagggaggtaggaggagtggaatgcatgcaaaaaccgagctgatcaaaagacagtgctgtttcatggaagcctcccagaactgagagagagagagagagagagagagagagagagacagtgagaaagaaagaaaaagagagcgcccttgtgcacgcgctaggccaagagcgcgccgctgtgcgcgcgcccgcctagcgaggacagggtctccatgacaaccggcctggccggctagcagtgctctgctcacttggctgcgaggagcgccacgaaaggtcagaggaaggagctgtgggaagctcgcagcaggtatcggagcttaagccagtggatttgggggccctgggctccctagccggctgcggtgtgagaatggagtgggcaggaaagcagcgggactttcaggtaagggcagctccgggctgggatcatttggcctcctttcctggcccttctctccggctgttttctgggagtcaggcgagtgtctgtagtctctgctcggggtttggggctcaggaatgatgtcatgctccaacagttggattctattagcttaaggaggagggaaacagccaattttcttgactttgcaaatctagctgatctcactcttgctgaatctgaggtgtttagacttcactctaaaaagcatcattttacttttatttagcacaaaggcacaggatatttttacaggaagaatcttttatatggaaaaatctgagttaacatcactcccgtggtgtttgtagttcttacagggaaactccagtgccttttgagccgcttgttcgtcctagtgaacactgtctgttttgtctcttggtgctgctatgtctgacctgtaatggaaaaaaaaaaaaaaaaaaggctaattaagctcagccaggagcctgtggtgagttccaagtccctctagagcatttattaggacagagggactgtcacagggatgcctgagctggggttttgcactctctctcttccaggcagcttggtaagaatcaagctgtcctcccacatcaaaaggtcgatcacagactttcctaagaggtggaggagggggctggcttggggttggggggcctgcaaacaggtttctcatccagatgtcccagagtgagctctcagcagcagctgctaagagctggggaacatgaggcactgtagttgtgccgggtggattcctttggttacattttgaccaaatctcagggcacgcagtgtccacgctgtgcactcctacactgattgtcctaagttttggtaaaacttgttctgacctagaggagtggtacatggtgagctgtgtggccttggaaagg

SEQ ID NO: 3598 - DNA, 6000 bp, Homo sapiens
ttcagtttacttattccttatatattttaagaaaatgaataatttatttttaattttatattaaaacctcagtaatacttgaaatccaaatgagatttaccagcttgacaagattaaagtatatatatgtactttagtataatatagagatggggtcttgctatgttgcccaggctggtcttgaactcttgggctcaaacgatcctcctgtctcagcctatcaaagtgctaggattacaggtatgagccaccatgcccggcctatagtatatcttaattcttctcttaagatcttgattaataaccctgtaacttatgttaatgatattaaccaggagtactacatttatttttctcctttaattctgtgtagatctaaataaaataataaagtgttgaatatctcatgtaatttattgaatactgtaccgaaactgaaaaacagaatgctgtatggggactcaacgtatgctttctactgaaggaatattggttttgcaccatggtaaagtcaaaagattgtaagttgaaccaccatatattggggatcatttatatatttttaaactgtttctgaagtttttacctggtgtatatcttacctacatataaaaaattttttttaggtcaaaatgtcagctaggtgtggtggcttatgtctataatcccagcactttgggaggctgaagtgggaggatcacttgaagccaggagtttgagaccagcctgggcaacacagtgagactcctatctctatagaatagagatttttaaaaatctctattttaaaagattagccatgtgttgtggtatgtgcttgtagtcccagccactggggaggctaaggtgggaggctgcagtgagctctgattgtgccactgcactccagcctgggcaacagagactctttctcaaaaaaaataagaatagtaaaattaaaaaaaaaaatcacagtgtcaaaaatttttgcatgcaaattttggtttctgggcttcctactcagtgcaatttagaaaatttagtagttttttttttttttctttgagactgagtctcactctgtagcccaggctggagtgcagtggcgcgatctgggctcactgcaagctctgcctcctggattcacgccattctcctgcctcagcctcccaagtagctgggactacaggtgcccaccaccacgcccggctaattttttgtatctttagtagagacgaggtttcaccgtcttagccaggatggtctccatctcctgaccttgtgatctgccctcctcggcctcccaaagtgctgggattactggcatgagccacggcgcccggcctagaacacttaaagtcatctaggctaaccacctttcccagttgtctgctttagagaaaactggttgtttggatcatgaagcataaataaggccccacagccccaataccttttctttgagacagggtctcactttgccgcccaggctgaagtgcagtggtgcaatcataattcactggagccaggacctcctgggctcaagcaatcctcccacctcaatgtcttgagtagctgggactagaggtgtacataaaccaccatgctcagctaatttttttttttttttaaagactggggtctcactatgttgctcaggctggtctcaaactcgtgagctcaagaggtcctcctgccttgacttcccaaaataatggcattataggaatgagccactgaacccaaccctcactgcccctttaatgaatacatataatattacaggcagagtacctaggaagaaatcattgtttcgtgagtgctagacctgcaaacctgaaaatcttcctagaaaatcttaacccttctgtccttcaaaggaaaaaacaaaacatgccaaagcaaaatccatgaaccagaaaacccagacaactcaccatgcttaagtgcaggatttaaaatagcaaaaggaagtaaagctcatctttgtgatgtcaagttctattttggtatataacaaagtagttgaattataaggctctcaaggttaaaatattaaacagacccttagctacaagatgtgttgccaggcatctgtatggaatataaccatgtaatcagggcatattgtacttctctgcacaaagagaaccaaagctactgcttctaaagattaggaaactttcattagactgacagaagaccgtacagaggaaatggcttgcgggtggaggagacgtatgagagaggatgaaaggaacagtattcataactatccaaattagagccaggatgtttatgctcaaatcttgtcttggctctgtgttgatgggactgaataatggaacatgggaaagtatatctcagacccctaaattaggcagtaaatttaccaaattcctcctacaagcgcttcctattttcagcagtctctgcacatttctcaatatatgctgtgattaaagtccaaagctggctaatgctaatgatcccttcctcttttttgttgctagtatccttccatggcgatttcattctgttgtttataagtcacatgtctctacaacaggattgtaaccttatgaggagtgtttttatttatctttcatttattcagacagcatatatttactgtgcgcttatttcatgctgggcactgtgctaggcagataggatgtaattattagcaagacaggctaggttgctgtcctcaaagagcttgccatctcttatacatagtcgaccttgtttgtcaagtgatgtgaacattacgttaacgcaaattactaaattactactatttaaaatatagcattaacaccatttctgatgtcagtgtctctaataaatatttggccagtattaagatgaactaatagtcacatatatgaagtttagactcaaggctatatttagactatatttagacaatttaagggatgttaacttttctttctgagagagcagatctaatgaagtttttttcctaagaattaaaacagttccatgcataacttacaatggaattggccaacaaaaagaacaagtatttatatctaattattgccctcttacattgcttcagcacatataagaggcagcagcagcagctgccaatgatgaaaataattattgtcctgggtctgattagagaaaatcttgatgctgtctgttgagttgtctttccttagagatgttacaagaaaaacgggactttagtagtagaggttctaatagttttgaaagtgggagacttaagaacctccttacagagctcagagagctgcaggtagaatttacctggaggctggctaaattctgtggcttgcctttacattcatgagttctcttgttccacgtttggggcagaaccatcctaatttgagattggagagattggaaaagactggagagggctaagttcatccaaatatggcccaggtctcctgaggtgttcaagcacttcagtgaactagagtagaaactcacttagattgtgagtttggagaaaaacttgttctgattaaagtaaaactgttctgatttttggagtaaaacctgtgctgatttttggcctttgtgttttcaatgtgcctcaacaacagctgaaatcttgggctttcctaatgtagaagcaactcaacgaggaattgatttatttttcatgcgcagactgcatcacaccgcatataaggccttctgctagaaaggccaaactgtcctttggcctcagtattttggagacaaagagttaatactagtaattcctgtgtaatatccttttttggcaaaggaacagtagactttatcagtttggttcttgccattacttgtgttcgatcttgaccaagttaaattatttccaggatgtatctttttttttctttttttttttttttttagacggagtctcactctgttgcccaggctggaatgcagtggtgcgatcttggcttactgcaatctctgcctcctgggttcaagggattctcctgcctcaaggctccctagtagctgagattacaggcgcctgccaccactcctgctaactttcgtatttttagtagagatggggtttcaccatgttggccaggctggtcttgaactcttgacctgaagtgatccgcccaccttggcctccaaagtgctgggattacaggcctgagccaccgcgcccggcctcaggatgtatcttaaactcattatttttgatgcttgccctgcagctgagtaaatacctctttaggatatgtgacaattgaactggcttggattttggaacatgtcctggccttggagcctgcttatgttcatacacactggttccttagaaatgtaaatttgtaaagtcaatgtaaaactgaaacttcaaaagtcaattttcattgctgctgttgtgcatttctattatcaaattttatttacagtgatttacgtgagtaaaaaatggattacacgatttcctaacatctcactaagtatgggtttggatcttaagtaatttacatttttcttttccaagttgattgttatactgggctaatgatttccttcaaattccactaataaatcacagattctcagtgctgttattccattgctttattattaaatggcacccttttctagtttttgtttttgcaaaccagtggagtatttaaagtaaaatttcagaatcccttttggagctttcggttgagaccaggctccttggaaccctagtgctttgggagttctgctgctgctgcagtaccaaaagtagcttctttgaatttcatttgggttttgtagggctcccccgaggcccgagaactgggagaagggaaagagctcatcggtttgtttgaaggccggcgggcggtgcaggcagcttttcccagactctcccagctccggcttttcacgcataccagaagagccgcttttttcctccagtgattgaaaccatctggactccaggggggtcacgtgtgtatgagaaaatgacataaagtttcagaccccgttgtgctttgctccagacccagacaactcttggtcggatggtgaggaggtgagggccgtccagtttgggggccaacttctcctccctgctgcccccggcccccgcctccctcacccctgtcccccaccctccctcgcacactctcggcgcggctttctcgctgcctccggcgcctccgagcgctcccctccgccgggctccagcagcccaccctctctgtcttgggtggaggcgcacatcctccacgccccctccactcaaatctgcgctccctcccctctctctccctgcagcccggccgcagcccggggcgcggatgcctgcccgccgcccgccctctctgcaggagcggctcctcctccgggccgcgcggctcccggcgagaccccatccaggcgccgcgcccggcccggctggggaacgcagaggtaagcgcctccgggccgggtggccccggttcccgcgtgcgcgcccggtcccgcccctgccctcccagcccttttccctctgctcccgactcccggccccggcagcggtgtccagctccgtgagtacgcgcgtgggggccgccgcaggcgcagaggagcggggctggtggggtccgccctcccgggcggtcagtagccgccggctctgctttccggcccggcgggggccgcgcggttgggggtggggaacctcgcggccagagtccggcggtgaagagctgcctggtgccgagcggagacccgatctcgggacgtcctgggagctggctctgcgcaccgccttgcctctcggtggcggcattcgagctcctacctggagctgttgcagcttgtatgcaggctccttgaagaacgcgcgcgcgcgcgcgcacacacacacacacatacacacgcacaacacacacagacacacggaactcaaacaaaggaaaattaactttgcatgctattactgcaacaagttaaactatgtttatttgtggatggttcactttttgcccttgtgcagacacgcactaagtattaaag

SEQ ID NO: 3599 - DNA, 6000 bp, Homo sapiens
tactcggggctgaggcagaagaatggcgtgaaccagggaggcagagcttgcagtgagctgagattgtgccactgcactccagcccgggcaacagagcaagactgtgactccacaaaaaaaaaaaaaaaaaaagaaagaaaaatacaaaaattagctgggctggtggtgtgtgcacgtagtcccagctacttgggaggctgaggcagaattgtctgaacctgggaggcagaagttgcagtgagccgcgatcgcaccactgcactccaccttgggtgacagagtgagactccctctcaaaaaaaaaaaaaaattaccaaagacatgacagttatcaccttatagtaaaaaatgtaattattaaaaatcttttcccccagcctgggcaacatagcaaaaccccatctctattaaaaacattaaaaattagctgggtgtggtggcatgtgcctgtagtcccagctacttgggaggttcaggtgggaggatcacctgcccaggaagtcaaggctgcagtaagccatgattgctccactgcactctagcctgggtgacagagtaagaccctgtctcaaaaaaaaaaaaaaaaaaaaaaagaaaaaaaaaatcctatccctagatgtagaagaggatatttagagctcttttaaaaaaaaattagagaaagggtctatgttgcccaggatagaatgcaggggatagtcacaggggcgatcattgcatacaccacattccaggcttggaagctcttttctttaaacctgctggagaatcccatggcccaggactgcaggttcaactaaagatcctacagtggcatcaatcttatatttttgacaacctcctatttcatgttcattgctgtaagttctctaaggctatgaatttacacatttctgttaagcactgtaatgccaagtcacacgggcatccagtgacacaaagtctagcaggggctcttgaatatagggtgtcatatcttggtagactgaaggcatggtgcaggacagttgagtacacttacctgaccattccctatgtccaagcacatgtgcagcttcgactcgcctctgtgataacgatagacatgggttgcccctccttcctctggcacagatgaataatatttctagagacgtaatgtcaaagatgttagctaaccaaattgtcttgtcaaattttcaaaaaaccctgatatttgggcaaagtgcagttaaggagggaggcaagagagcaaaggtgaattacctgccctcttgacaggcctctgaagtcatgcaacaaaccttagcccacccaaagtggctgcagagaaagaaatgcatttggcatccccgtgctgccacctgctgcctccatagggcaagaacgctggctaactaaaggtgggcaggaccatgctctctgccaggttaaacaaatttcacatctttgcccccatgtccaatgcacatatcctttcatttcctcccctaaaaaatgtggatgaacggttccatgtttattgtctaagtctcagaccaggacacgggaagagaggggtacattttcctgagatttagaaacacagcaggaaatgaaacaaacccaagagctgctctgcagcccttttctctgtgcttcctgcgcgtgggggagtggagggagaagtctctaatttaagaagaatcttccgaaagatcggaaaacagttacatttctcttgtctgcttccttcctccccctcaaagttagccttagacttgcccttgataatgactaatgacatcacagccctgcttgttttgaacagggtaggcacactgtctaaaaaacatgtgaccagaagaacgagaagctggggaaagcacttgaggacacagacctaaagatgtgttttagtggctgcttcaaactgtggagacaaacccagtacacaattcttaattctatctctagaaagccaagaggttctgaggctccatttcataacagagacttgaactgaagcatgaactgaaaacaaaaatgaagaacagcaatttgctaaacctcaaaccaaagacaaatattattccttttgctgaaccatgaaccaagggtttaatcactttacagtagagttgaggctattgatttttgtaaaaccactgaacaacacaaataagataaaaatattccctgaagtattcctctttggttggaatcctattcttggagtcagggattcttataaaagatgtagaaagattagagttttttgagatcttaacatatgaaactgaaaagcagggcagaaacaaggtattctcttccatctcctttgtggatcagcctccttaaaaccatgtaggactcaccaagtgttaagactgcatgaggccagagcctgctgtaattcctagaagacagtgccttccatgcaggtaatttccttgaatgttttctggcctgccctcaacattccctaagtatcgaaagatgacttggctgggtatggtggctcaagcctgtaatcccagcactttgggaggccaagatgcgcggatccctcgaggtcaggcgttccagagcagcctggccaacatggtgaagccctgtctctactaaaaatacaaaaattagccaggcatggtggcatgtgcctgtagtcccagctactcgggaggctgaggcaggagaatcgcttgaaccaggaggccaggaggtaggggttgcagtgagccgagactgagccactgcacaccagcctgggtgatggagtgagactctgtctcaattaaaaaaaaaaaaaaaaggtcgggcacggtggctcacacctgtaatcccagcactttgggaggctgaggcgggcggatcacgaggtcaggagatggagaccatcctgggtaacacagtgaaaccccgtctctactaaaaatacaaaaaaaaaaattagctgggcgtggtggtgggcgcctgtagtcccagctactagggaggctgaggcaggagaatggtgtgaacccaggagggagagcttgcagtgagccgagatcacaccactgcactccagcctgtgccacagagcaagcctctgtctcaaaaaaaaaaaaaaaaaaaaagttaaaaaaaacccctaatatttaacttatttgctatgaaattcggcaaataagctattttccccccactagactgaaagatcactgagggcagaagaccttttctgacttttcattgctatattgtcagctacagggttaggcattcaataaacatttattgggtgaattctaacttggatttaccccctggtttaagtccttgactgattacaatctgaccgtgaaggctgggcaggagaaacaggtagtgtccagattctccgtaaattccagaaagatccaaatgtggtccatcagcaggtgatggggcatagttttggttcacaccaacttaccccacactgacttgaagtatagtccatgaattcagccattgttctgaaggaagcactaagggttgggggtctctcttctctctatttgaataaatggcacgtcacaggttagctctaggattccctactggagaatgaagccattttggaaatagtctcctttttacttttggaaaggctctgcaagtttatgtcagaaagaacgatgttattgagaaagaattccaactctaaaagatagacatgcaatttatccaggatctaagagacaggcttgcaggctttcctctactatcagatgatagctgtaagattttttttttttttttttttttgagacggaggtttcgctcttgttgcccaggctggagtgcaatggcgcgatctcggctcaccgcgacctccgcctcccgggttcaagcgattctcctgcctcagcctccctagtacctgggattacagacatgcgccaccacgcccggctaattttgtatttttagtagagacgggatttctccatgttggtcaggctgctttcgaactcccgacctcaggtgatccgcccgcctcggcctcccaaagtgctgggattgcaggcatgagccaccgcgcccggctaatttttttttttttttttaagtaaccaaccagggctgaacactaccgttattctacagctacccaacaagaatctgtcaaatgtaaagcgttttgaaaggacttttccattcattgttctgatcctttccagcttccgctaagggaaggtttcctcagctgcttctgcgctgcgcacccctggctcccagcgggctaccgcggcgcgaaggactggggcggcccccggcacagcgaccctcacctctcccgggagaacgcgctgcgggccggctgccggctgtttctctaggtggggcgcctcccgggcaaggacccccatgcagcctttgggacgctccagggcatgccagtccaccgccctcctcttggccctctccagcacttctagagccagccttgctgaacgctgcagggaacgtcggtccaccccattcagcgctgcggccgccaaacagttgtccatggctccctgagtgggcacacaacgtacaaacgccggcgggtcagctgggccgcggcgaccctgctccaaatccgggtgggagccccagcctcgacctccctggagaccaccgctcctggtccgcccccaacgcacactccagcgggagcccagccaggactaggcctagcgcgcccgccccttccattttcatctaccccttccgctacttagggagccccctcacccggctcactcgtcaaggcgcatgcgcgcaacgctattctaggaagagggaccaggcctagcgctcccggcggcgccggcgcagctgggccattggcggaaggcgggagaggcgggagaggcgggagaagtgggggaggcggggcggctgggcggccaaacacgccttctgcgtcccagccttggcgtctgcgcgcgagttgcctggttaactgctgagcgctggaggcggggcgccgggcgctgggggccgggggtcgggggtcgggggccgggggtcgggggtcgggggctgggggctgaggactgagtcgagccagcagcccagggcatctgtccacgctgtcagaggagcctctgggcgtggggctggcccttagagggctactgcgctgcttaacttggtgggtataaaggcaggtctcctgttgagctaaaaaattatggggtaccagctaggtaggcaacatagcgagaacccgtgtagacacacacacacacacacacacacacactagccaggagtggttatggggtaccagctaggtaggcaacatagcgacaacccgtgtccacacacacacacacacactagccaggagtggttatggggtaccagctaggtaggcaacatagcgacaacccgtgtccacacacacacacagtaggaggagtggtggcgcgcatctgtagtcccaggtactcgggagggtcgaggtgggaggatcgcttgaacccgggaagcggaggttgcagtgagacgagatcgcgccactgcactccagcctgggcgacagaggaagacttcgtctcaaaacaaaaacatcatggggaataaggcaagtgcctcccgcgcctctttctgcttggtctacattttggggtgtcgctactcttgtttgaggaggtgattaggccaaactgtgtggctgccaaggtggcctttggagaagggaacagctcgggattgaggcgagacggaggcggggctgtctgcagatgttcctggcccccggggcagggggcgcctgagaagttgtagggtctctcataatccctcagcgcagctctctctcccctccagtgggaagtacggattcacatatttttggagacctgttctcttggggtctgactccatcttttaggaagactgcaccatgtttaagtaaggaactgtgaatgcttacttaaaccatgtttaagtaaggacctgtcactccactccgctggttatttggtaggagatacagcccaggctctcactgctaat

SEQ ID NO: 3600 - DNA, 6000 bp, Homo sapiens
ggatggtctcaatctcctggcctcgtgatctgcccatctcagcctcccaaagtgctgggattacaggtgtgagccaccgcgcccagccaagaagtcttcaaaaaaaaaaaaaaaaaaactctacataaatttcaactgtttatattaaatatcttccaaatactattcctttgatctctgacttttaaaaatgacaagatttcaatcattcctgctctgcaaccaatttttttaactcccagtcaattttaaacagattgtgaaagttaattctcagaagtttgattcattttctttaatctacatcatcaagatgacaattttgataatgagtttctttcattcccccaataacccagtgagatgatgtaatcaggcaaaatgaatgatctaatgactcagtctgtaatactaccttacaaagctgtgatgattccaaagctcttaagtctgctggagaaataacaataccatttgtcaaataaaatgatttatacagtttctggtatgtacagtataaatcactgtctaactctggcacagtacccacttttgcatcctgggtttttaaccctttttggcccccttcacataaagaaaaggaatttacattgctcttcactggacttgttttttctcctcaaaaagtcccaaatacagcaccagtctctttccccatttcacaattaaagacctcttccaacgcatctcctccaaaacatagaaccctgacaactaactttcatctgttctcattagtgaatttacccttgtgaagatagaagtcattaaaaactcatatcaatagtttatttttctgtcaatactgacagtctatttccctgttgaccaggcacattcctaattagttgccctctctccatttacaattccattttcagttctcaccagtggctttcatttggcgtgggctatatttgatccacaaggggcctgatggtaggtcatgttctatcattattcccagccaatcttaaaaaagataaaaaggaatctctcaagtctctcaatctgtggtttacaggatgaatctttaaaattataaatatgcacatataaaaatatatttacaaatatatttacaaatagaaaaataaaaacaaatgcaaagatttaatttagagtcttttggtttcagtttcatttcaagcatcttctttcccataaatttctaaatgttaaattctgagaaaatgtagttacaattgaatattcattacattcattaaagttcatgtaggtaggtgtttttttaatagaaaagccaactcttttttttcttaagataggttcttactctgttgccccggctggagggcagtggcacgatcatagctcactgcagcctcaacatcctggactcaagcaatcctcccatctcaacctcccgagtagctaggactacaggtatgagccaccatgccaggctagttttttaattttttaaaaaatagagacaggggtctcactatgttgcccaggctgctgtcaaactcctggcctcaagtaatccttccacctcaacctcctgaacttctgggattacaggtgtgagccaccacaaagccacctctttatgtgggctaacagaagtctatttaacttaaaaattaaatcagagtaatttcaacaaatggctactgaacacccgctacttaacaggtcctggaatgtttagggacaaataaggaacagtttctgccttcaaggaattgaaaggctattgggagagaagaaaccataactacacataatttaaattagattggaaaagtacacacaaaaaatttttttaaggctatggcaacagaggtggcaactgggaaccactgggaaaagtttcaaagagctgacctgacaaaaagaaagtagtgcctcaactggaatgactaaaatagaatggggaagagagacaaatgagatgaggtgtggctatgatactgggtaagtgagagcatattttgggagaccaggctgaagcttaagataataatactagctaatatttattgagcacctactatgtaccaagtactataaatgcactttatagatattaacttacttgatattcacaataaccctatgaggaatgtgctaaaaccttgaaatccataaaaaataaagaggaccaaattctgtcccactccaaccacacttattgtaaaagcagttaacgggtatcttatctacctcttctctcactgattcctaggccatcaggcctagcttgaaaactacattctctgcaaaacctttcttgatcctcccagctgaacatagtctcctaagcttgatagcattttatctgtgtcaatcttatggcatgtccgaatattttgttcttggtattatagattttatgtgcattctttcctcttttttattctcctttagtctgatccacattctgttctccacaactcctagggcagtgcctggcacatactaatgctagctaagtctatggagcacttatctttgccgggcactgtgctaagcattttacaggaattatctcacagaatcctaatggcaacccaattcacacattcaagggctatttttagtccttactgtgacagacaaaatagtaaatactagatgcaccttaaactctaaacactacagatacagtcccttccctcaagaagctcagtctaaagaagttagtactattggaatccccagatatagagatgaggaaaagtgaggctcaaagaagtaatatgtttgcccagaaccacagagcaaaaaagtggcagagagcctgggcaacatagggagaccctgtctctacgaaacatttaaaaaatttgcagggcgtggtggctgaagaagaggatcgcttgagcccaggaggtcgaggctgcagtgagccgagatcgtgccactgcacttcagcctggctgacagggtgataccctcgtttctttattaaacaaaaaagaagaagaaggaagaaggaagaagaggaagaagaggaagaggaaggaggaggaggaggaagaaggagaaggagaaggagaaggagaagaaatggaaaaaaaaagatggcagagccagaattcaaaccagctctcccgagtggatatacaggaccccatgcacgtacaaccactatgttctaaaggaggcacttgataaacccttattgaaggaaatgttttggaataccaataaaatgaaaaaaaaatcatctcaagaataatgtagggtttcactcactgttattcttttttataaggggaaagcaggaaatttgcaaaagttaagtagcatagaaggaggtcgtattggtcggctactactcacctggtacctgataattgctcatcaagccatctgttgagactaggtgaggatggagtttctctcctttttcatgaaccacagaggagacttaaaggaggatttatttgtgttccttaaagtgacccccactgagcgtgtccctcaaagtggaccttcctaagcatcggcgctttgctttgcgctgggtggtgcggctgagtcactaattagcagtgagagcctgggctgtatctcctaccaaataaccagcggagtggagtgacaggtccttacttaaacatggtttaagtaagcattcacagttccttacttaaacatggtgcagtcttcctaaaagatggagtcagaccccaagagaacaggtctccaaaaatatgtgaatccgtacttcccactggaggggagagagagctgcgctgagggattatgagagaccctacaacttctcaggcgccccctgccccgggggccaggaacatctgcagacagccccgcctccgtctcgcctcaatcccgagctgttcccttctccaaaggccaccttggcagccacacagtttggcctaatcacctcctcaaacaagagtagcgacaccccaaaatgtagaccaagcagaaagaggcgcgggaggcacttgccttattccccatgatgtttttgttttgagacgaagtcttcctctgtcgcccaggctggagtgcagtggcgcgatctcgtctcactgcaacctccgcttcccgggttcaagcgatcctcccacctcgaccctcccgagtacctgggactacagatgcgcgccaccactcctcctactgtgtgtgtgtgtggacacgggttgtcgctatgttgcctacctagctggtaccccataaccactcctggctagtgtgtgtgtgtgtgtgtggacacgggttgtcgctatgttgcctacctagctggtaccccataaccactcctggctagtgtgtgtgtgtgtgtgtgtgtgtgtgtctacacgggttctcgctatgttgcctacctagctggtaccccataattttttagctcaacaggagacctgcctttatacccaccaagttaagcagcgcagtagccctctaagggccagccccacgcccagaggctcctctgacagcgtggacagatgccctgggctgctggctcgactcagtcctcagcccccagcccccgacccccgacccccggcccccgacccccgacccccggcccccagcgcccggcgccccgcctccagcgctcagcagttaaccaggcaactcgcgcgcagacgccaaggctgggacgcagaaggcgtgtttggccgcccagccgccccgcctcccccacttctcccgcctctcccgcctctcccgccttccgccaatggcccagctgcgccggcgccgccgggagcgctaggcctggtccctcttcctagaatagcgttgcgcgcatgcgccttgacgagtgagccgggtgagggggctccctaagtagcggaaggggtagatgaaaatggaaggggcgggcgcgctaggcctagtcctggctgggctcccgctggagtgtgcgttgggggcggaccaggagcggtggtctccagggaggtcgaggctggggctcccacccggatttggagcagggtcgccgcggcccagctgacccgccggcgtttgtacgttgtgtgcccactcagggagccatggacaactgtttggcggccgcagcgctgaatggggtggaccgacgttccctgcagcgttcagcaaggctggctctagaagtgctggagagggccaagaggagggcggtggactggcatgccctggagcgtcccaaaggctgcatgggggtccttgcccgggaggcgccccacctagagaaacagccggcagccggcccgcagcgcgttctcccgggagaggtgagggtcgctgtgccgggggccgccccagtccttcgcgccgcggtagcccgctgggagccaggggtgcgcagcgcagaagcagctgaggaaaccttcccttagcggaagctggaaaggatcagaacaatgaatggaaaagtcctttcaaaacgctttacatttgacagattcttgttgggtagctgtagaataacggtagtgttcagccctggttggttacttaaaaaaaaaaaaaaaaattagccgggcgcggtggctcatgcctgcaatcccagcactttgggaggccgaggcgggcggatcacctgaggtcgggagttcgaaagcagcctgaccaacatggagaaatcccgtctctactaaaaatacaaaattagccgggcgtggtggcgcatgtctgtaatcccaggtactagggaggctgaggcaggagaatcgcttgaacccgggaggcggaggtcgcggtgagccgagatcgcgccattgcactccagcctgggcaacaagagcgaaacctccgtctcaaaaaaaaaaaaaaaaaaaaaatcttacagctatcatctgatagtagaggaaagcctgcaagcctgtctcttagatcctggataaattgcatgtctatcttttagagttggaattctttctcaataacatcgttctttctgacataaacttgcagagcctttccaaaagtaaaaaggagactatttccaaaatggcttcattctccagtagg

SEQ ID NO: 3601 - DNA, 6000 bp, Homo sapiens
cttaagttactaatgtttcttgtgtaaaatcctgttggtagtaatagtaaagcattgtatttcccttcttcaaattaattacctaccaaaaaatggaaaagaattttacatgcactttaaaatagtaaaatggaaagtgaatttttaaaatatatgcattaaaagtttactttaatttccagtgggacttcctttatgaaattttccataacctcttcctggagtattacaagatctccaacatctcataaactaattgtgatattagtggaaccataagcaaatatatatttttagtggaaatagattatgaatgaaagccaagcaccttactttaaagccaaaatatgagattttcattaaaaacattggtcataatagggagaggttttttatttgttctgagcaaatcctttaacctctcctgatgatacagttcagagtacacacactttggtgatggatcaagagcaatattttcttatgtgaaagatagcttattattactattgtgacatacaactaatagtaacagttaacatcaacacttcatatataccaggcagcatgataagcactttattattttactgaatcctcacaacagaccactgaggtagggactattgccatcatcattttataaaaggaaattgaggtttagtcctcaagaagtcttggctattaaggggcacttatccatacaacctctactttttctaggcactaaaagggggaaaaggcttaatagccaaaatagttatcaaaagaccctaaagctggggtcctgtacaccatgaaaggattactttcattctcatgtaagggcatgcttttataaaaaacaaacatgggctaggcgcagtgactcacgcctgtaatcccagcaccttgggaggctgaggcgggcagatcacgaggtcaggagattgagatcatcctggctaacatggtgaaaccctgtctctactaaaaatacaaaaagttagccaggcgtggtggcaggtgcctgtagtcccagctactcggaaggctgaggcaagagaatggcgtgaacccggtaggtggagcttgcagtgagcagagatcgcgccactgcactccagcctgggcgacagagcaagactccgtctcaaaaaaaaaaaaaaaaagtttaaaaattagccaggtgtggtgatgtgcacctgtagttccagctactcaggagggtgaggcaggaggatcacttgagcccagaagttcaagattgcaatgagctatgatcatgctactgcactccagcctaggcaacagagtgagaccctgtctctaaaaaaataaaaataaagcaagcatataataggttaatccagatggagttaggagggtttataagggcagacacatcctagtaaagaggaaataggcaaactaatgctgttttagtgtaataaggaatgcttataatgatgaactttagtcataaagaaaaggtgaaattatattcagtaacccatgttaggaaagcagaaaactatttaatatgcttggaaagattccaaccagagttaactgaataaaaaccttggacatttgaagagaaaagcatttagttctatctaatttcaatatgcacgtgaattagttcatgttactctaacaatgtattcttactgtccttttttatgaaataggaaagtaaaactgaaagaactatttcttgtgtttttaaaactagccttttctaatatttgatatctaattaaagttagataatatgtaatatgcttttgaacaataatctaaccagaaaatattgtataataaattaccaagaaatcattacattaattataaaaggaacatgtcaatacaacaaatgtttatttaacacctactgttactccaaatactgtgttagaatttgactattcgaagatgaataatagtctttgccctctggaaggccacaatgtagaagtaattctctgtatcagatatttccttgagtgttaagtgtattagtaatcatgttgtaaatcccagtgtaagtcaagaagcaatatcaccaccaccacctccctatgattttgtgataatttggcattttcaatgcttgttaactttcatgttttcatttttatgaaatcatgcagagcttgttataatttttagtggggtttggattaaaatgcttttttgatgtagcagaagatacattttttcccattttacattgttttccttaaatattaagaataatgagtaaaataaactgattttaaaatcaccaggagatgcttcatttattaagtgaaacattcagattaaggaatttttttcatataattcacacagtacccaggatatttagttattttgtgtaaaatgaagagactagattttatcattttcaaacttttaaaaattatttttagcaagaaaactttttaaatctttttgtttttgagccaggttctcactatattgcccaggctggactcaaacttttgggctcaagtaatcctcctgcctcagccaatggagtagctgggactgcaggtgcaccatcagcttatttgtgttttcatctgtgataatcggaggatttaaaattctccactaatatacgtgaggatagaaatcaaaatgcctaatgagtggaaaaaaactcatctttagtgttgaaatggcaagcaactttcaaaagcatttcaactactattaccttcacattaaaaaattaactgattttgcatatttctaaaaccacaaagacattttccccacacacattcaatcctccatggttccaatgaaatagataagaagttaacactttatattgaggtatagtgttgaccctaaaagattgcaaaagactgatagtaaacatgcagcaagaaagcttttttaaacaatatattgctgggcacagtgactcacacctgtaatcccagcactttgggaggctaaggtgggaggatcacctgagcccaggagttctgaggccagcctgggcaacaaagtaagacctcatctttacaaagaaattaaaaattagctgggcatggtggcacacgcatgtggtcccaatatacatgggaggctgaggcaggaggatcacttgagccagggaggtcgaggctgcagtgggccatgttcacatcactgcaccatgacctgggcaacaaaaatatataaatgggctgggcgcagtggcttacgcctgtaatcccaacattctggcaggctgaggcgggtggatcacctgaggtcaagagttccagaccagcctggccaacatagtgaaatcctgtctctactaaaaatacaaaaaattagctgggtgtggtggtgggcacctgtaatcccagctactcgggaggcttaggcaggagaatcgcttgaacccgggaggcagaggttgcagtgagccaagatcacactatcgcactccagcctgggaagcaagagcaaaactctgtctcaaaaaaaaaaaaaaaaaaaaaaaaaaaaaatatatatatatatatatatatatatatatatatatgtaaaatttattttaatatttataaatgttgcatttataaaatatataaataatatatattacctggcattcctccaactcacaaaggtacagttgctctaattaaagggactcctggttaagccgtggctttaagaacagtttgaaaaccttcttgcttttaaaagacataaaacagcaagtaaaatggaaggacagacagacctctagtttggtttgactggagctgtatgcttaactaaggagctgaaaaacagaggcggaggttgcagtgagccgagatggtgctactgcactccagcctgggcgatggagtgagagtgactcaaaaaaaaaaaaaaaagaaaaagaaaaagaaaaacaatacctattaatagcctttatttgtgcgtgttagcaacagtttataatgatgcttccacatgctttcagttaggccctccttgtgaatgtgaccttcacttagacgccaactttgaagggaatcaatactacggccttgttctcattagggctgtactaaaataattgaaactgtcacacatcatcaaactcaaaattttacaataccttgaatgacactgtgcttacaaaactgacggtgatgtgtaatgatgactaatgtaagtcaccatgaagaatttttatgggaagtaaaaattcaattaagatggaagtacctacccttgcattgtgcaaggcaatgaagatctgaaggaagcctgccttcaagggcttggattttgacagcggacaggtacacaaatacagcaccaggtaaaatacggcctgtattatcatttatgggtgggtacagaggagaaattctgacttacggaatgatttcctggagaagaaattactatctggcttcttgtgaaacaaaggctctacactttacccttgccaacgtatagtatgaaggtctttaagcttaaaaaaaatcattaattagaggaccactgggcatcatctaaggcaagtgtatgactttagagtcgggagaaatttgcgcctgagctagaaatgcactagcctaccattatcacaagagcaagtcagtgacagaacagttctctgaccgccagtgcagtgccctcccacttgatcaatcagtcattaaggctcactggcaagcccttcgtacttcttccctctccggcactagcttccttaagtcgactctgtgaaatacctgctaatcttatcctgaaccagagtttcgaccctcggaacagtcttgcccacatctttgggacccgattcgtcctgctgattccggcactcgaggggcgggttggttggaacccaccccaccaggcccctctcaatcccacacggtgtccacccttgcccgcaggacggcggcccggaagtgacgtagtggaagcggaagtggtgtagtggtgccgacttcctgttgtttgaggccgggttgggggtgtgcgattgtgtgggacggtctggggcagcccagcagcggctgaccctctgcctgcggggaagggagtcgccaggcggccgtcatggcggtgtcggagagccagctcaagaaaatggtgtccaaggtgaggctgcgacgcgctcgcctcccagggcgcgcccaccgctcccttccgcgccctgtcgagtccgtcccggcccagccaagcaagcttcccagacgggccggaagccccggtgcagtccttagcgacctcctcagaaccccgccccgaggcgcctgtcgcctggtgcgggaatccccgtacgggagctgggagggtgggggacggcgacagtcaacaaaggcgtggagcggaggctacctgacacctgccgcccacccgccctcctctcttccactgagtttggagctgtctgtggggcagtgtagtttttcgtttgtttttataaacacaaacaagggatcatacttagttgtagatctgaggcaatcctctactcctgtcccaatctagggatcctccagtcttagcctttcttttgccgacccgcagagagtgtggccttttcagttttgtattctccagaaaagaagcgaaaataccagtcccttactgccccaggtgaaatacataccattaccatttcagggattttctaagagtaactacttttaagtgtatgcttcttataacgcgtatttatttgctttgagcttaatttatgatcttcacggctcaagactagtgttttttttttcaatttttaaaaaagcagttaagcattttgtattttaaagccatgatttatttatataattacttcaaacgtggcacctcacaccagagtggaatggcttttgttatgttttgttgtaattttccaaaactatgtaaaatgattgagagttgagtcttgaccagttcaacgtgttagcttgggatagttttgtcaaagcaagaatggtagcaatcagcggtttaagcggtttcaatttttaataaaacacactattatgt

SEQ ID NO: 3602 - DNA, 6000 bp, Homo sapiens
cactggcgaaggccaagaaggggaggtggggggagggttgtgccacaccggccagctgagagcgcgtgttgggttgaagaggagggtgtctccgagagggacgctccctcggacccgccctcaccccagctgcgagggcgcccccaaggagcagcgcgcgctgcctggccgggcttgggctgctgagtgaatggagcggccgagcctcctggctcctcctcttccccgcgccgccggcccctcttatttgagctttgggaagctgagggcagccaggcagctggggtaaggagttcaaggcagcgcccacacccgggggctctccgcaacccgaccgcctgtccgctcccccacttcccgccctccctcccacctactcattcacccacccacccacccagagccgggacggcagcccaggcgcccgggccccgccgtctcctcgccgcgatcctggacttcctcttgctgcaggacccggcttccacgtgtgtcccggagccggcgtctcagcacacgctccgctccgggcctgggtgcctacagcagccagagcagcagggagtccgggacccgggcggcatctgggccaagttaggcgccgccgaggccagcgctgaacgtctccagggccggaggagccgcggggcgtccgggtctgagccgcagcaaatgggctccgacgtgcgggacctgaacgcgctgctgcccgccgtcccctccctgggtggcggcggcggctgtgccctgcctgtgagcggcgcggcgcagtgggcgccggtgctggactttgcgcccccgggcgcttcggcttacgggtcgttgggcggccccgcgccgccaccggctccgccgccacccccgccgccgccgcctcactccttcatcaaacaggagccgagctggggcggcgcggagccgcacgaggagcagtgcctgagcgccttcactgtccacttttccggccagttcactggcacagccggagcctgtcgctacgggcccttcggtcctcctccgcccagccaggcgtcatccggccaggccaggatgtttcctaacgcgccctacctgcccagctgcctcgagagccagcccgctattcgcaatcagggtaagtaggccggggagcgccccctacgcgcggggcagtggcgccagggactctccgctctaggacacccccctctcctaccccttttgaccgcagctcttacccagctgcttcccaagggccgtgaggatagcggaagcggcggctggggaggaggccggagagtgggagtgcacgcaggcactggcccccgacatcctccaaagccaggcagagctaggagcctgactgttcgcaagagccgggagggcgtctggggccccttagagtccgagagattccgggactgctagtccccacgggagtggaaccaggagaccggcgcagtgtctggctctgccttggggagagttttgttaattaaggaaacgccaaattgtcaccaagcgtagcgcttttcagacgtctggactctggattcggagtgggaccagcgcgggggtgagcgcctgtgctgtgctgcctccgcagcgctaaaatgtccaggagcacctccagcccttataatacggtgttggcacacacttaggtgcacattaagtatcgtagagaactagaatgagcacatgcacctccagtaactaaatggctttctggaacagcgtcgtgtccgtggatagctcccgcgtatggtaatacagaagtggatcttcactgggcttcgctcaggcggcggccacgcaggttctggggatggaagagaacttgacttatccgagtccaagctatgcgggaccaggttctaccgcaggcagtggaaggaggcacgagctttggcctttctttcagcgcatctggggcgcctcttcatcttgtaaacgcggggctcagctgggacagtatttcttcaagacctggggttagaacaaggacagggttattcgctgtgcttagtcaggatacaaggagggaactcggcacacgataagtatcaggttggtttctcatcccgcgccgatgcccgcccacctctctttcgcctgggcggcgcggacccgaacctgcggagcccctgtagtttgccctcttcatttattttcagtggatttccacgctattgagaacctaagccagttcggtttgattcggtaatttagtaaacgctttactaatacaatggcggatgcttttcctggagcaaaattactcgagggcctagggaccgggatgtttttggaatgcgtgggaagcagagtgtatcttttgcaggaggtaccttcgcccaaggctcgggagaagggctctgcccttgttgcccgccttcacccgcgccttctaaacgcgcgtcttcaggccgctcctaccttagcctaaccaggagcacccggcccccgcgaagccttggagaaatcgaaaccgcccttttcttcgggagaatctgggatcactgtcctgtggaggaaccgcaagcagacccaagggttgcctccactctatgcttttagttagtgaaattagtgttttgtactcaaggggcgttgggacaacttactggtcgctgaggcttgtgttctttgatcagatcgcgccacctttgtttagcaggctggtgttacttttggggagtttctaggtctcagtgtccccgtctataagaggacagctgagatgggcaacctggagattgggtccggcttgaagttatactccatagatgcagaagcgctacccaccaccctcttggggctttaaatatggaactcggcaacccatctaaacatctgtgactgagaaacaatgaatccgagagcactgtctgcatgtgtgctatttggaggcggttgagaaaccatcgaatccatgcccctggggcacaaaatactactacgccattatctttttagtacttctaggggatttttgaaacctgggttctgtcgcttcgtttgggtcccttgtccagcccttttcagggcaggtctggtgcctgggatcttatcacatgtcgtggggggtgggactgtgggttttgcagccagcaggcattacacttctggaaaatatctggattcttctgtaatatacaggcgtggctgccatggagaaaaagttaaaaggggaccaggactagtaggtgaatgtatccttcttctccaccctggagaaaaagcccaatggagagagggccctagattcaagtcatatagcctggaagcaccatctccaggtttaagttttgtcttgcagtgaaaacagatgggtccatcttacccagcccttgaggctcattgggcagcttggatgtgagaagcgctccggctgctatcctggagtgggcaagggtggccctcgagattctgggtttattctttggatttccagggttcctgctgcttccccaggaatgcagggcctggcccaagacttgggctgtgagaggcaagggcatcaactctcaaaaatgtggaaatggccatcagagcgccaaggccaaaccccaggggagaggaatcaaggccgtctctggatccctagggcagtctagccatggtgcacaggcaggggcaattgttggtacccactcacaaccgcccaaaacttcacaagcatgttcatattttaaattcttaaatattatatcttgcatcctaatcttgtaaacattaatttagcaaacatcaatcgcctacttggtcaggcactgggttctgaatattaattaagacaatggcctcgagaacctttgcaagaagctcaccagctaatcctggagaggccccttgttttggatgaggaaatccaggttctatgagattaggtggcagaggtgggatttgaacccagaccatgctagggtgtttctactccttttccagggatcttggccccaccgttgagatggatttcttctggcctgcgggaggggcaccaaactcttagtccatgtgtgggggttgacgggtttgtgagggcagatgtggggtgaggacttgagtagccccagactagatgcaaggcttaaggaggaggggaaaaaagcttgcttgggccggacgcggtggctcgaggcggttggatcacctgaggtcaggagtttgagaccagcctggccaacacggtgaaaccctgtctctactgaaaatacaaaaaaaaaaattggccgggcttggtgacgggcgcctataatcccagctactcgggaggctgaggcacaagaatcgtttgaacccgggaggctgaggttgaagtgagctgagatcgcgccactgcactgcagcctgggcgacagagcgaaactccgtctcggaaaaaaaaaaaaaaaaaagaggttgcctgctagtccactgatcccgcagccccgcaggctcgcagaaccctaaggcatgattaggcctgggatcatcaggccaccctagggtcaggtgcggaggcctgcgacgcccgagggccaaaggctccctcttccggtcacacaggagagggtattttgttgggggacaggttttccccaatcacagtgcagctgcagtcatcgttttcagccttctgagcaccttcctggctgagcctgctgtccatttcacccctcagctctcacggcccggccaggccaggcggttcccggcttctctgcagccgccggcgggggaggagggcacagagcgcgtctcgcctcttagcgcacggtcaaggttgcgctcccctcccgggccgggactaaccgtgggaaaggcgctaccttggccactcgattctctccctccaaggcctgtacaaggagcctttgaacacgctgctccttccagccggcagctttacctcccctggcccctgcccccgcactctccgcgccaggccaagcgctgggcccagggacagcgcgctctaatcaaacccgtgtccgataagcttctaattaaaagagacctccctccgctccgcaggcgctttcaccactgcccctcccggggggacctgaaggagagggtttgaggccggtctttgcccgccgaggtctgcgtgtccggtctgggaggaggcctaggagggctcgcgggccacgggcatccttgggcccgagttctggggtgcggacggacgtctcgagagtgggtgccgcgactcgggacccacggccctcgccgggcacggacagttgcggagcagggctctgaggattgtgcagtgccctgggtccctgcctactcctgggctcaggaatggagaagggttcgtctagagaaaacttcttcgtagcttctatttcgtctctctctctctctctctctctctctctctctctccctccctctctctctctctctctgtgtctgtctctctttctctctctctctttttagtgtcctttcagaaattcggccttcactccgggcaatagtgggtgccctgagccaaatttcgtttgtaagctcatctataggcctcaaagaaggccaggcctcaggtttcaaaaggaagtctgtggaagcccaaacgtgctcgcccatgcaggagagctaacggggccgggggttatctttgcccacttagcaggagagaaatggaggccctcgaggtcatatgataaaagctagtggcttctcaaatccccagtgtgtggtgctgagcagtgtgtgagacttaagcctggacctgtactatccgggagttaggatttgccccctccttccctcccttgcactctgccacaccaccctccaggctcatgcctctgttgccccagagaagctttttttttttctttttctttttttttttttctgggcggggggtggtggtgtgtgtgcatgagcgtccgtgtgtgtttcgaaaatggaggtaacgatgccctgggtcctgctcatcggctgagtcctgcttaagtctttggaggcactttggtcaaatagtgcaagagtgggagaatgggtgctgtttgacccaat

SEQ ID NO: 3603 - DNA, 6000 bp, Homo sapiens
gattaagctggaatggcggtcaaaaaagaaaagggaaaaaaaattcctagatgcaggtagatttctataattaagccatttctcaaaggggaagtaaatgtgacagaatatttagcaagcaaatttactgaggaatattttgttcctatataattaaattcaacactgaggtaaaactgacaactattaaactgagggcagttgggagagggaaaggggatgagataaaatccagtctataaaacattccattatcttttataggttaaaaaacacaaaagaaatacttggaaagaattgtctaagacggaaagattttaagattgtgtgactttttttttttttttttttttttttttttttttacaggtgcagaataattttttttccctctctcgtggtttttcttttccccatttttttcccctgttgtttgcaaagttgaatctggggtcaggagttctaattgtaacctcagactggaattccagatggtgcgctcaggactggaagcaactctcagttcatcaatttcatgggcctacgtatctgctctggccacggcctggcctccatccccactgtggcattaatgcagaacaaattgagacatatcctctatataattagttccagaatttaaaaagatttacggtataataatagaggcagtgccgcggaatcctttcactgaggactctcggggagctcggggaccatctcgcggtggcatcagaacagacgagtaaccccagcggctccaggcactgcgaactgggggagagggggaaattttgcaccgcattcggcagtacctaacggttccgggctcccagatagggtcagcgaggagagttaggacagtaagtggggactggttaaaaaaaatcgacttaattttgaaatgatcagaagaagctgggagtagttatcacaaagcccctcccttgcccccccctttttttaattgaaggaatgacgttgaaattttcaccgccagcgcggggctgggaaccatcctaaacacttgccctgcagccccgagtgggcagattccgaagagttggagtcggcggggaggggaggaacagctgttgggctgtcttgcgcgtggggctcggggcgcgggccccggggagaggcgctagtcgaaagcttgttcctctcccgcgacaggcagcagcgaggtcgagccactctttattacggcctgcgggccccgcgcgcagtgtggctgtccccgcccttgaccgaccgcagcgctttggggtgtttattcagttgtccgcggccgctgggtgactcccggagggcggcccaggcgtgcgcactggtccctggggttgcggctgtagcagcccagctccgcgctctgtcagatgcagtggacagcgccggggtgaaagtaagggttgagaaatcctcactgccctgctcctacccagcctcgattttttcatattgcaataattatgcaccttcgaggccgggatgcctgcgctttgccagtgtatcaacgccacatggttttccaggggctgtcctcgcctctgcatcccattagctctgaagaggtagaggggtggtgggtaaaacctccaactggacgttgagagacccgggtttcagctcggcgttgccactaacttgtttcctgtccttaaacagtagtagtaacaaaaactgtaaagttgattgagtcaaaggcccacactgctctcctatctaatcctcagaacaactctatgaggtgggcgctagtatcccattatcccgtttgaccagtaaggaaactgaggctcagagagactgcggaactcgtctagggtcacacagctgttggttacctggcagagctgaggttccattctggggccaccaaccccttgctctttaccgctgcgctccatagactgcctctccttcggctgtctgggcctcagtttccttctctgtaaaacgagaagtttaatctgcagctttctttgccaatcggtggttcagaccaggaacctctgctacagatctcggcgctgacaggggtaagaaggtgggtgaaagaagggggcgcccagttttccacagcctgcttttctctgggacctcgcgaagggcgggcctcgcgagctaaaggaggtacaggagagcgcctatcgtccgcggcgggtgaaggtgctacctgccttcgtgctaggctgtgagtcctggtgcttagctcagggcgccaaggccagtgtagctggcatgtcccccttggaaaacctcaggtctcccgcagagaacgttacccacaacaaagaagaggacagagaggcatggagcgccctgcgactgcaggagtacgtcagttccccagcgctggcttagtgtcgcctgggcttccgggcatgtggatccgttggggtcgtacggagacttcctgtcgggtccctggggtcctccgactgcggctcctcagcttagcactttcttcttggccccgcaggctgcagggaactcctcccacctctttagtcggagaagtccaagtcgggcgagggggcaccccggggttcgcaccggtgctcttcccctccccgcccccacaaggattctgagaaaataaatggcagaggagagaggagttctacatttgcttggctctcctttcctcctatccacccctacatccctcaccccggggcaaaaacttatttttgaaaaatgttggcagagatttacgtgtctttgccttacctgggtttcacaaacacaacgactcacattcaagccagcctcccttcagataacctcctctccccccgctaaaagtgccaaggatggtaaaagaagaaacaatctcaatcttttcgtttggaaatgaaagtccccggcttttcataaagggctcctcgcccctcacagttgagtcctagttaagaaaaacgacttccaagtagaaataataggcggggagaaggaagggagatacagggatctggggggttcttagggcaactggcagtgaattttgtctcgagagtcctttctccactcaaaaaaccaaacgcgcgagccccgcgaaaggtttagggatagatcgtgtgggagaggactgagcagagagcgtgggggcagtgtcttgtagaatctttcttttcttaataataattttaaaagcttctgagtggagacgacgcaaagtcaagcagcaaaggtggcctgggaggcaagcggagggctcaagtgccgcatctttaccctcagggtctcctgcgcctacgggatgcgcattcccaagaagtgcgcccttcgagtaagtcctgggcccgcacacacttcgggtccgcagccagaatttaatggcgacaacgtttatgcaatgcaagctaaaaaccaaagcgtaaaaaattactatgtcatttattgaaacgccattctttgtcaaactgcaactactttgcttcacataagtttggctggaaagcttgcagccccagcccgggccagccaggtacaggaggccggactgcaaccggttgcttccctcccgtcgcgcctggccgtcccacgctgcgccgtcgctgctgcctcctggcgcccctgggattttatacgcacctctgaaacacgctccgctccggcccccggttcttctccttgcctaggggttgtttcccaatagatactgactcctttagaagatccaaaaaccaaaccaaaacaccccctacccgccccaaacacctgctctggggcgcgggggctgccaaacagagactagacgaagggagtcagatttagcgaagctcttcgagctcccaaagattcgaacactaactcgcgcccgtgggccgatggaggttctccctactccactccttggtccccttaactggcttccgcctcctggtcaatcactgagcaaccagaatggtatcctcgaccagggccacaggcagtgctcggcggagtggctccaggagttacccgctccctgccgggcttcgtatccaaaccctccccttcacccctcctccccaaactgggcgccaggatgctccggccggaatatacgcaggctttgggcgtttgcccaagggttttcttccctcctaaactagccgctgttttcccggcttaaccgtagaagaattagatattcctcactggaaagggaaactaagtgctgctgactccaattttaggtaggcggcaaccgccttccgcctggcgcaaacctcaccaagtaaacaactactagccgatcgaaatacgcccggcttataactggtgcaactcccggccacccaactgagggacgttcgctttcagtcccgacctctggaacccacaaagggccacctctttccccagtgaccccaagatcatggccactcccctacccgacagttctagaagcaagagccagactcaagggtgcaaagcaagggtatacgcttctttgaagcttgactgagttctttctgcgctttcctgaagttcccgccctcttggagcctacctgcccctccctccaaaccactcttttagattaacaaccccatctctactcccaccgcattcgaccctgcccggactcactgcttacctgaacggactctccagtgagacgaggctcccacactggcgaaggccaagaaggggaggtggggggagggttgtgccacaccggccagctgagagcgcgtgttgggttgaagaggagggtgtctccgagagggacgctccctcggacccgccctcaccccagctgcgagggcgcccccaaggagcagcgcgcgctgcctggccgggcttgggctgctgagtgaatggagcggccgagcctcctggctcctcctcttccccgcgccgccggcccctcttatttgagctttgggaagctgagggcagccaggcagctggggtaaggagttcaaggcagcgcccacacccgggggctctccgcaacccgaccgcctgtccgctcccccacttcccgccctccctcccacctactcattcacccacccacccacccagagccgggacggcagcccaggcgcccgggccccgccgtctcctcgccgcgatcctggacttcctcttgctgcaggacccggcttccacgtgtgtcccggagccggcgtctcagcacacgctccgctccgggcctgggtgcctacagcagccagagcagcagggagtccgggacccgggcggcatctgggccaagttaggcgccgccgaggccagcgctgaacgtctccagggccggaggagccgcggggcgtccgggtctgagccgcagcaaatgggctccgacgtgcgggacctgaacgcgctgctgcccgccgtcccctccctgggtggcggcggcggctgtgccctgcctgtgagcggcgcggcgcagtgggcgccggtgctggactttgcgcccccgggcgcttcggcttacgggtcgttgggcggccccgcgccgccaccggctccgccgccacccccgccgccgccgcctcactccttcatcaaacaggagccgagctggggcggcgcggagccgcacgaggagcagtgcctgagcgccttcactgtccacttttccggccagttcactggcacagccggagcctgtcgctacgggcccttcggtcctcctccgcccagccaggcgtcatccggccaggccaggatgtttcctaacgcgccctacctgcccagctgcctcgagagccagcccgctattcgcaatcagggtaagtaggccggggagcgccccctacgcgcggggcagtggcgccagggactctccgctctaggacacccccctctcctaccccttttgaccgcagctcttacccagctgcttcccaagggccgtgaggatagcggaagcggcggctggggaggaggccggagagtgggagtgcacgcaggcactggcccccgacatcctccaaagccaggcagagctaggagcctgactgttcgcaagagccgggagggcgtctggggccc

SEQ ID NO: 3604 - DNA, 6000 bp, Homo sapiens
cgggtgaaggcgggcaacaagggcagagcccttctcccgagccttgggcgaaggtacctcctgcaaaagatacactctgcttcccacgcattccaaaaacatcccggtccctaggccctcgagtaattttgctccaggaaaagcatccgccattgtattagtaaagcgtttactaaattaccgaatcaaaccgaactggcttaggttctcaatagcgtggaaatccactgaaaataaatgaagagggcaaactacaggggctccgcaggttcgggtccgcgccgcccaggcgaaagagaggtgggcgggcatcggcgcgggatgagaaaccaacctgatacttatcgtgtgccgagttccctccttgtatcctgactaagcacagcgaataaccctgtccttgttctaaccccaggtcttgaagaaatactgtcccagctgagccccgcgtttacaagatgaagaggcgccccagatgcgctgaaagaaaggccaaagctcgtgcctccttccactgcctgcggtagaacctggtcccgcatagcttggactcggataagtcaagttctcttccatccccagaacctgcgtggccgccgcctgagcgaagcccagtgaagatccacttctgtattaccatacgcgggagctatccacggacacgacgctgttccagaaagccatttagttactggaggtgcatgtgctcattctagttctctacgatacttaatgtgcacctaagtgtgtgccaacaccgtattataagggctggaggtgctcctggacattttagcgctgcggaggcagcacagcacaggcgctcacccccgcgctggtcccactccgaatccagagtccagacgtctgaaaagcgctacgcttggtgacaatttggcgtttccttaattaacaaaactctccccaaggcagagccagacactgcgccggtctcctggttccactcccgtggggactagcagtcccggaatctctcggactctaaggggccccagacgccctcccggctcttgcgaacagtcaggctcctagctctgcctggctttggaggatgtcgggggccagtgcctgcgtgcactcccactctccggcctcctccccagccgccgcttccgctatcctcacggcccttgggaagcagctgggtaagagctgcggtcaaaaggggtaggagaggggggtgtcctagagcggagagtccctggcgccactgccccgcgcgtagggggcgctccccggcctacttaccctgattgcgaatagcgggctggctctcgaggcagctgggcaggtagggcgcgttaggaaacatcctggcctggccggatgacgcctggctgggcggaggaggaccgaagggcccgtagcgacaggctccggctgtgccagtgaactggccggaaaagtggacagtgaaggcgctcaggcactgctcctcgtgcggctccgcgccgccccagctcggctcctgtttgatgaaggagtgaggcggcggcggcgggggtggcggcggagccggtggcggcgcggggccgcccaacgacccgtaagccgaagcgcccgggggcgcaaagtccagcaccggcgcccactgcgccgcgccgctcacaggcagggcacagccgccgccgccacccagggaggggacggcgggcagcagcgcgttcaggtcccgcacgtcggagcccatttgctgcggctcagacccggacgccccgcggctcctccggccctggagacgttcagcgctggcctcggcggcgcctaacttggcccagatgccgcccgggtcccggactccctgctgctctggctgctgtaggcacccaggcccggagcggagcgtgtgctgagacgccggctccgggacacacgtggaagccgggtcctgcagcaagaggaagtccaggatcgcggcgaggagacggcggggcccgggcgcctgggctgccgtcccggctctgggtgggtgggtgggtgaatgagtaggtgggagggagggcgggaagtgggggagcggacaggcggtcgggttgcggagagcccccgggtgtgggcgctgccttgaactccttaccccagctgcctggctgccctcagcttcccaaagctcaaataagaggggccggcggcgcggggaagaggaggagccaggaggctcggccgctccattcactcagcagcccaagcccggccaggcagcgcgcgctgctccttgggggcgccctcgcagctggggtgagggcgggtccgagggagcgtccctctcggagacaccctcctcttcaacccaacacgcgctctcagctggccggtgtggcacaaccctccccccacctccccttcttggccttcgccagtgtgggagcctcgtctcactggagagtccgttcaggtaagcagtgagtccgggcagggtcgaatgcggtgggagtagagatggggttgttaatctaaaagagtggtttggagggaggggcaggtaggctccaagagggcgggaacttcaggaaagcgcagaaagaactcagtcaagcttcaaagaagcgtatacccttgctttgcacccttgagtctggctcttgcttctagaactgtcgggtaggggagtggccatgatcttggggtcactggggaaagaggtggccctttgtgggttccagaggtcgggactgaaagcgaacgtccctcagttgggtggccgggagttgcaccagttataagccgggcgtatttcgatcggctagtagttgtttacttggtgaggtttgcgccaggcggaaggcggttgccgcctacctaaaattggagtcagcagcacttagtttccctttccagtgaggaatatctaattcttctacggttaagccgggaaaacagcggctagtttaggagggaagaaaacccttgggcaaacgcccaaagcctgcgtatattccggccggagcatcctggcgcccagtttggggaggaggggtgaaggggagggtttggatacgaagcccggcagggagcgggtaactcctggagccactccgccgagcactgcctgtggccctggtcgaggataccattctggttgctcagtgattgaccaggaggcggaagccagttaaggggaccaaggagtggagtagggagaacctccatcggcccacgggcgcgagttagtgttcgaatctttgggagctcgaagagcttcgctaaatctgactcccttcgtctagtctctgtttggcagcccccgcgccccagagcaggtgtttggggcgggtagggggtgttttggtttggtttttggatcttctaaaggagtcagtatctattgggaaacaacccctaggcaaggagaagaaccgggggccggagcggagcgtgtttcagaggtgcgtataaaatcccaggggcgccaggaggcagcagcgacggcgcagcgtgggacggccaggcgcgacgggagggaagcaaccggttgcagtccggcctcctgtacctggctggcccgggctggggctgcaagctttccagccaaacttatgtgaagcaaagtagttgcagtttgacaaagaatggcgtttcaataaatgacatagtaattttttacgctttggtttttagcttgcattgcataaacgttgtcgccattaaattctggctgcggacccgaagtgtgtgcgggcccaggacttactcgaagggcgcacttcttgggaatgcgcatcccgtaggcgcaggagaccctgagggtaaagatgcggcacttgagccctccgcttgcctcccaggccacctttgctgcttgactttgcgtcgtctccactcagaagcttttaaaattattattaagaaaagaaagattctacaagacactgcccccacgctctctgctcagtcctctcccacacgatctatccctaaacctttcgcggggctcgcgcgtttggttttttgagtggagaaaggactctcgagacaaaattcactgccagttgccctaagaaccccccagatccctgtatctcccttccttctccccgcctattatttctacttggaagtcgtttttcttaactaggactcaactgtgaggggcgaggagccctttatgaaaagccggggactttcatttccaaacgaaaagattgagattgtttcttcttttaccatccttggcacttttagcggggggagaggaggttatctgaagggaggctggcttgaatgtgagtcgttgtgtttgtgaaacccaggtaaggcaaagacacgtaaatctctgccaacatttttcaaaaataagtttttgccccggggtgagggatgtaggggtggataggaggaaaggagagccaagcaaatgtagaactcctctctcctctgccatttattttctcagaatccttgtgggggcggggaggggaagagcaccggtgcgaaccccggggtgccccctcgcccgacttggacttctccgactaaagaggtgggaggagttccctgcagcctgcggggccaagaagaaagtgctaagctgaggagccgcagtcggaggaccccagggacccgacaggaagtctccgtacgaccccaacggatccacatgcccggaagcccaggcgacactaagccagcgctggggaactgacgtactcctgcagtcgcagggcgctccatgcctctctgtcctcttctttgttgtgggtaacgttctctgcgggagacctgaggttttccaagggggacatgccagctacactggccttggcgccctgagctaagcaccaggactcacagcctagcacgaaggcaggtagcaccttcacccgccgcggacgataggcgctctcctgtacctcctttagctcgcgaggcccgcccttcgcgaggtcccagagaaaagcaggctgtggaaaactgggcgcccccttctttcacccaccttcttacccctgtcagcgccgagatctgtagcagaggttcctggtctgaaccaccgattggcaaagaaagctgcagattaaacttctcgttttacagagaaggaaactgaggcccagacagccgaaggagaggcagtctatggagcgcagcggtaaagagcaaggggttggtggccccagaatggaacctcagctctgccaggtaaccaacagctgtgtgaccctagacgagttccgcagtctctctgagcctcagtttccttactggtcaaacgggataatgggatactagcgcccacctcatagagttgttctgaggattagataggagagcagtgtgggcctttgactcaatcaactttacagtttttgttactactactgtttaaggacaggaaacaagttagtggcaacgccgagctgaaacccgggtctctcaacgtccagttggaggttttacccaccacccctctacctcttcagagctaatgggatgcagaggcgaggacagcccctggaaaaccatgtggcgttgatacactggcaaagcgcaggcatcccggcctcgaaggtgcataattattgcaatatgaaaaaatcgaggctgggtaggagcagggcagtgaggatttctcaacccttactttcaccccggcgctgtccactgcatctgacagagcgcggagctgggctgctacagccgcaaccccagggaccagtgcgcacgcctgggccgccctccgggagtcacccagcggccgcggacaactgaataaacaccccaaagcgctgcggtcggtcaagggcggggacagccacactgcgcgcggggcccgcaggccgtaataaagagtggctcgacctcgctgctgcctgtcgcgggagaggaacaagctttcgactagcgcctctccccggggcccgcgccccgagccccacgcgcaagacagcccaacagctgttcctcccctccccgccgactccaactcttcggaatctgcccactcggggctgcagggcaagtgtttaggatggttcccag

SEQ ID NO: 3605 - DNA, 6000 bp, Homo sapiens
gtcaggctggtcttgaactcctgacctcaggtgatctgcccggcttggccttccaaaatgctgggattacaggtgtgagccactgctcccagccaagcttctttttaataaataactttaaaaactctaattctgacaatataatcaagggcaaaaaatttgttctcatctttggcaaaataaaaaaatattaaggaactttaagaggaatcacagtctattcctttcattcctcttttagatgaggaaagatcttaaaaaaatcaaggaatttgcttcaagctccataaatagtggcaaaattaacatgagaatttttgcctccaaattcctagtttggtgcccttcctatacatgtcattctattttcattttatatctggatatgaaacaatgaagaaaaactttaaaccaattaaacagttgtgattaaagtcttccagtttcttataggcctatttttatattgtatttagacttgaatagttgtacaatcctcttttaaaatggacaaaaactctaaatatttaaccaattaaaaataatttttgatgccatgttgttgtaattatcttctgttttttactgactgccaatagaattttagaaccactacagaattaagtattttgaaaagatcttcacataaatttggaatacttaacattggttcattactattatctaacatgtagctatatccaaattttctcctaaattttcctttttgttgttgttgttgttgtccaggctggagtgcagtggtgcaattatggctcactccagccttgacttcctaggctcagatgatcctcccacctcagccccacaagcagatgagactacagcctcaggccaccgtgcccagctaatttttgaatttttttttatagagataggagtctcactatgtggcccaggatggtcttgagtcttgaactcctggcctcaagtgatcctctcaccttggcctcccaaagtgctgggattataggtgtgagccaccatgccaggcaaattttcctttttagcaattcatttttttggtctaggattcagtccaggatcacacattgcattaattgtcatgtcatttactttaatttggaacagttatttctttagcctgtctttgtctttcatgacactgacattttttgaacaatataggtcaattgttatgtaaaatttaaagtttacttgatatgaattgaaagctattattaatttagaagacaaagagtcttctaatatatatgataaagaatactttctattcttttggagggatacaaaaacactgcccattttgctgaaaagataagtaaaatgatcgttatcataaaagaaagtaacatgatcgccaccttgagcttgttcatagaatttgaaagtgtgaatagtgataaataagtatcaatttctaatagcctgtttagcatctgctgctttttttttttttaataagattgtttctacgcctactcagccatacttactgggaagataatcagtactttttatttcaatagggatgctgagcttctattatgcaaacaattatggcctttatgaatctttctgaagctttatcaatgtgctattatcctcaattggtaagcattttattttattaacttcaatttaaagtgttaataaaaatagttgaatttaaaagccagttacactgtttctatttgggtagccatgtggatctgttaactctgtgactcagcgtaaactataggacttcttgcctctggaaataatgtgaagacactggtatctgcctcttgcttaagaaggaaatactgaaaaatgaagctgacctatgtgaaacttcttgtattctttcgaaggaccttagaaatagcatcattaggttgtttatgtaaatgttaaattaggagaccagacaattgccacagactgggaagacatgacagctaaatgcaatgtggtaacttgactggatcctgcagcagaaggaaaacaccagtgggaaaactgctgaaatcaaagtctggagtttagttaatagtcatgaaccaatgtcattttcttagttttgataaatctactatggtaatacaagatattaacaatgtgggaaattgggtgatggatatgtgggaactctctgtattaacctttgcaacttccctatacatctaaaattcttccaaaataaaaggcttatttaagaaaataggcagccatttgcttgacccattgttaaaataataatatagaatgtctagtgatgaattaaataatttcacttagtacttaccatggatgttgtagcctattacacttagtgatacaaagatagtagccaagtaatccaaaaataaccaaaaatactccagcagcaattaatccagtcagaaggcccataacatctattttctctctgttgccatcttaaaataaatcattaaaataacataaatataacaactatatagcatcacctatgatttcaacaaatttaatcctggttctaaacacattatacagcatctaatcattgatgttgacttctttcaagtctttgtgctagagaatctacctgaaaaaaatttaaatgacacttctaatagccctagttatggttattcttttatttattaaaatataaatatatttatttatttaaaatatatatattttttaaatatttaaaatatactacttatattttaataatatttaaaatatactatttatattttaatagtattcaaaatatatttatattttaataatattcaaaatatatctatattttaataatattcaaaatatatttatattttaataatattcaaaatataatacttatattttaataatattcaaaatataatacttatattttaataatattcaaaatattttgttatttaaatttatttatttaaaaattatttatttaaaaatatttgaaatatccatttattaaatggataatattcagcattaagtgggataaacatattcactgctcaactagacatactttggtattaaccactgagataatatttattaagcaactcagggtagctatgcaacataacctgccatggagggggccctacctaagaggaatgaaagaatagctggcgaaaaaaacacctgactaaaatgcagctagagatgatcaatacagatgagataaagatctcccctctctacaagttacttaattcgatccaacaatcttaatttatctagcataaatgttccatctgcctttaatggtaaaaaagaaaaaaagttaaaatagcttacatcttgaaatgaatagaatctgcttttattctgtgcaagtcttgacttagctgagctgtttaaaacagctttaagcccattatctcattttcctagtatctcaccaaacttgattttcagtgtattaaatagatgaatctgtccttttctgtctgagatagcccggtgcatagttgagaaatctccttggatttataaggtatgtatgttgcgcaacaaccaaactcaaacaataaaactaaaatgtattacaacagagagaggatgagaaaagcattaaatttgatcaattcttgttttacctgattttgtggttggtcctttagctgaatattcctgccaaaatgcaatctaaaaaaaaggtaaaattcccaagtttattcaatatctttattatcacatttcatttggtcctaatgacctagactaggggtagtaaactcttggcatgcaccataggtaggagaccagttcattcaagctggagggtgtgactcactctaattaaatcactaccacccacagctgcctctgccatctctctaattgtcaagggattactgccagtcccagctctttactactgtgcctactattttcccttcacctgactggagcccccactaaagcattgggggaaattattgcattagagagtaggtgaaagtaccaaaggtagaagttgaggctgtggacccactatcatgattgaacaggagactgaagttttctatgggaggtaagccctcagtttgtctcaggagatttttttttttttccggacaggattactctgttgcccaagctggagtgcagtggtgtgatcatggctcactgcagccttgaccttccaggctcaaacgatcctcccacctcagcctcccgagtagctggaactacaggcgcctgacaccacgcccaggtaattttttcttttttgcagagatggagtttcatcgtgaagcccaggctggtcttgaactcctgggctcaagtaatcctcccacctctgccccgcaaagtgctgggattacaagcatgagccactgtgcccttctgggagatcttattgaaaggtatttattgatttgggaagacattgttgagacaattttaagttcagtgctacttgagagaatagaaatgaattttaaggaactatgataaaattataaaagatttgtgaaaaacagaataaaattccaacagacacaactacacagtatatgcttcgttttcctccttaatagaaacagcaaatacttgtagggaaggatacctggggaggttcttattgaacaaaaagtaaaataggactcttaagaaagggaaaaaggagctagggttatgaaatctacaaaagtaaagaatttagggccaggcatggtggctcatgcctgtaatcctagcactttgttaggccgatggagatggactgcctgagctcaggtgtttgagaccagcctgggcaacatggtgaaaccctgtctctactaaaatacaaaaaattagccaggcgtggtggcatgtgcctgtagtcccagctgcttgggaggctgaggcaggagaatggcttgaacccgggaggtggaggttgcagtgagccgagattgctccactgcactccagcctgggcgactccgtctccagataataataataataataataataataataataataataatcatcatcatcatcatcatcatcatcatcatcatctcagttagttaacatttttcaagactatgccagattatcacaggcacaatgccatctgttttgtaccttatcaagattaacagaatttagttatattctaagaaagaacttttaaaaatgtttccctcaaattacactgatagaccaaataatatacttccgaatacaagggctatatgttttgtatcctcaggttcaaggagaatacctggcacatagcagacttccagtaaatacttgaaatacaaatatgggtcatcaaaaaaggtaaggtcaccgataggacaaattactcagtcataaatgattgaagcctgagttagagcactaaccataaaatcttggagttaaattcactccgccataaatgattgaagcctgagttagagcactaaccacaaaatcttggagttaaattcactctgccccatgattacttttaaatataataaacattaaacacacaaaatcacaacagtcaataatttactaactactatgaaaccagttaattaggtgtaaagccaagtctaaataggttaattaccattttaaggaagtagaaagagatagcaggtacataatcctgattgtgtttaaggcataaaatctctaataactgaaagtgccactttcttaagtacaatttaacatttccagccaattaacataatcaaccacattaccgttttatcttcatccacaaaaatctctctggcttcctcataattgcaaagttcttcattgcactctctttctaggttgccgggagtgaagagctccagatcaaatctattatacagaaggcgtctatgtatgaaaaagtttgcttcttcttttgatgtaaacactaataaagtaatgaaaaagacttaaacattgatcaaatatagtcaaaaaattcctgttttaattgtggaaaaaagtgaatagttctcttgatgtggctaaattataccaaacttttttgtaaag

SEQ ID NO: 3606 - DNA, 6000 bp, Homo sapiens
acctacgccacctcctcaccttggttcacattcttatctttgactggatcccaccccctcactcctccatctccacttccatctcaccctgtcaaaatcctcaccattatttagaaagagcctcttcaggccgggcacggtggctcacgcctgtaatcccaacactttgggaggccgaggtgggtggatcacgaggtcaggagatcgagaccatcctggccaacacggtgaaactgtctctactaaaaatacaaaaaaactagctgggtgtggtagtgcacacctgtagtcccagctactcaggaggctgaggcaggagaatcgcttgaacccaggaggcagaggttgcagggagctgagatcataccacgcactacagcctctgtcttaaaaaataaaaataaaaaggctgagagagaatcagagaaagggaggctgcagagtatactggttaaggactgggtttgggagccagatagctctgagtttaaatcctactcctgcattaacttttctgatccagaagggacacatggccctaagaagggctgcatggccctaagaagggttgtggctgccctaggttggcttccagccttccccagctctcctgcggcatccctgtgtggctcatcccacccttaccatgcctcttgtcttccccatagtcttggggcccaagcttttcaagctggtgaaggagagagttgtgatcccaagaagcggagtgagcgagcggggaaatgagacaaagagaggaaacagaataaagtgcacagataggccgggcgcagtggctcacacctgtaatcccagcactttggggggccaagatgggtggatcacgaggtcaggagatcgagaccatcctggctaacacagtgaaaccccatctctactaaaaatacaaaaaaaaaaattagccgggcgtggtggcgggcgcctgtagtcccagctactcaggaggctgaggcagcagaatggcgtgaacccgggaggcggagcttgcggtgagccaagatcgcgccaccgcactccagcctgggcgactgagcgagactccgtctcaaaaaaaaaaaaaaaagcgcacagataccagtgggttttcaccatggagaacttaactctgctggagtctctctgagtctgaaacatgacctggaattgggaattggaatgctcccatcgagggaccagaaagctggggtatttacccctaactctggaccattggctgatggttgctctgggggtattaactctacagccctttgggcctgccccacactaactcccatagctgaaaatgccctcaggagggacacaggaagtaggcgcctggtcaggaactgtctgtgggtgccctcctggtaggcctggaggtgtgggtgggccactgacagcatctactacactcagtgaaaggaacctgctattaaaattattgttgttggctgggcaccgtggctcacgcctgtaatcccagcattttgggaggccgaggcaggtggattacttgaggtcaggagttcaagaccagcctggccaacgccatctctactaaaaatacaaaaattagcctggtgtggtggcatacgcctgtaatcccagctactcaggaggctgaggcaggagaatcacttgaacccaggaggcggaggttgcagtgagccgagatcgcaccattgcattccagcttgggtgacaagagtgaaactccatttcaaaaaataaaaataaataaaaattattgttgtttattagctgccacgtggtggcaggctgacgggggaggatcacttaagcccaggctgcaatgagccaagatcgtgccactgcactccagcctgggtgacagagtaagaacctatctcagccaggcgcagtggctcactcctgaaatcccagcattttgggaggctgaggcgggcggatcacctgaggtcaggagtttgagaacagcctgaccaacatgcagaaactccatctctactaagaatacaaaattagccagggtggtggtgcatacctgtaatcccagctactcaggaggctgaggcaggagaatcacttgaacctgggagcgggaggttgcggtgagccaagattgctccattgcacgccagcctgggcaacaagagcaaaactccatctcaagaaaagaaaaaagaacccgtctcaatttatatatattttaatgttaatttttttaactttttttttaagtgatggggacagctgggcgcggtggctcacgcctgtaatcccagcactttgagaggccaaggcgggcggatcacgaggtcaggagttccaagaccagcctgaccaacatggtgaaaccccgtctctactaaaaatacaaaatattagtcggacatggtggcgcgctcctgtaatcccaggtactcaggaggctgaggcaggagaatcgcttgaacccgggaggcggaggttgcagtgagccaagatcgcagcattgcactccagcctgggcaacagagcgagagtctgtctcagaaaaaaaaaaaaaaaagagagagagagatggggtctcactctgttgcccagagtggtctcaaacttctgagctcaagcgatcttcccaccttggcctcccaaagtgctaatatcataggcgtaagccaccatgcccagccatacccgtctcaattaaaaaataaataaaataattgttgtttaagaccagcctgggcaacagagtgagacctcgtctctacaaaaaattttaaaaaaaattagccaggcatggtgacctgcacctgtagtcccagctacctgggaggctgaggtgggagaatcacttgagcccgcaaggtcaaagctgcagtgagccaagatcataccattgcactccagcccaggtgacacagcaagaccctctctcaaaaataaataaaattgtggctgcaaaacaagagaggagggagcagggactataaccagcctagggcttttctctggatcctgctgccacctcttcttaactcccattctggagcccacccatctgccttacacccaccagctcatggcatcatctttctctatatccctttcccagtggcttcctccctatcccagtcccctgatgcaaatcctgatgtcatctgccccagccacccatctctacctcaaccctcacttctctggtgagaactcttgtggatccagggagtgtcaaatcccagcctgaaccaaacctcaactgagattatattatcctataatataccttctcccctcccctcccctcccaccattggaatcaccctcaggagagcagctccactcttctcatccagaaggggcccatggccctaagaagggccatagattgccataggttggcttttggcatcccccagctctccttcgacatccctgtgtggctcatcccacccttaccctgcttcttgtcctccccacagtcctgtggcccaagcttttcaagttggtgaaagagacagttgtgatctgacaagggctagacaggtgcttcaccctctgtcaccaaataccctcattatccagcccaaaacacctccattcattcctttctattctggcacatattcgttaattcattccatcattcacctaacacccttgaagcagagccaatcacctctaccaacatcttcctagagacaaatagattaactggggtggggtaaactttgagagctccaaaaggaaagctccagaggacgggggttctgcaggggtccaggcctctcagggaccacagagcagacctgcagcagaggcagaattagagcccatggctctggagtcaaccagggccaggcagagggcaccagctcttggctgctgaaagtagagctcttcaaaagtcatccactcagtcagcatctactgagtgccaggcagtgtcgtcacctctacagccgtcaggggagagaacagcagcctagagaaagggagtctgagcccccatcccacgggctcgaagcccagagtagaggccagcactagtgcctctggtgagtattaccatgggaagaccgctgttcccagcccgggtgccctgctggactcttgctagcctggccccagcgaggcagggcatcagtttccctctccagaggcctttcttccccacctattgccctctcaatcctgtcccttcttgcaggagcaaccttcccagcagaaaattccattctgccccaaggactctcctccttactgcccctcaccccggggaacgcaggctgcccctctgatgcctgcagactcccttctccctctttcctaaccgaccgtgggcattttccaatttggaggtgaggaggaaaaactaggttattttcagctcttcctttactggcaacattgacccatttatccttctcttccttcagacctctcccccaaggccacttagcttggacatctgtcccagccaaaatctcaccttccactgtccttgcagcccaaaggctagtccagcctctgagtccagctctagccctctctccccacactaggaaggaagctggactgtagagcgctctgggccaccccgcgttagctgctgcctctggcctcagtttccccaactgctcagattaatgatgcctgctctctagacccagaggacgaagctctaaggaggtcacagatgaggaagggtccagtgctcggcgcagactccgtgcggagcccctaggccccgcagctcgcccctccctctcccctactcccctcctctccccctcccgtctctcccccgcctcttcgctctcgctcggctccctctctagctgaccttccctttccctcacgcctccccacgcccggcccctggccccagcaccctgtccgctgccgcctcagagccgggaaaagcagccggagcccccgccgcccctgccgcagcgcgggcggtcagcgcgcagcccggcacccgcagcctgcagcctgcagcccgcagcccgcagcccggagccagatcgcgggctcagaccgaacccgactcgaccgccgcccccagccaggtgagggcagctgaggggaggcagggagccgaggttccccctttactggaagcgagggctggggaggcgcggggaaattgggtcctttttccttgaaaggaggacctgggagccttttcgtgaaacaggcacaagggctttcattccaaagggatggatggatggagggaaggtctcgggggagagggattggtttttgttttttaaaaataaggattaattggcttctgtgaaagtgggacttcttggaaggatgaggggctttcaaggtaggttggggagggggctctggcagggcttgagggaagggttaactggtgagtggcagggcaagggggaactctgcgatcccctcagcctgacatcgctgcacctcccgccttggctccggggctctgggtctctccagctctgtgtcccagtttttctctttgaagatgactattttgaaccccacctggacagagccaggaacagccatttccttccctggagctatgacacccacctgacacaccctcccacacctctgacctgctcagggaagggggttcagggaaggacgaggatccagggatctgggaattgggcagtgtgggtgaaacggaggctgggtactgggtgcacaggaagacccttggcactggtggggtgcaccagccttggtcaggaggttgctgggcagctgcttctggggcaggacccactaggaaagcagcggtatggaaaagctgagctgttttccgtgttcccagaagacaaaacactagagaatgtgtttgcttgcttttgtttggttttgctttctgtcttcctcaccctggatcccaagactcattcctctgatctcctctcctagttttgcaaaaaggtaaactgaggcacagaacaaattggctggacatacctgtgtctaggagggaagagtgacaggaaggcatacggaatttgagtc

SEQ ID NO: 3607 - DNA, 6000 bp, Homo sapiens
ccagggcccatcagtccatcgatgctggctcctgtgattgtatttgtagcactcctcagcctcccccagttgtaggcggctgaatgaaggccccagcagcgcagcccctttttcctagcagacacaggagcctcaaagcagcaccgtgatggtttaaggagaacacagaacatgcaggtgtggaggaggaacatcctagactgggagtgggtagcccggcactcctccctctatccccacctcaccatccctgcctcctgcccactgtccaagtgtcctggccacatctcgcacaggtcagcacaggggagaggtaaacaaagcctgcctgccctctagagcaagctgccctgcctgagctgctgctgacgagaaacaggcctaggtatcagggcagcatggaaggagcaaaggccagggaggccagaggaagagactcgctctgcctggggtgtgggcccctccaggggccggggccaggtctgcaggaatggcaggagcttctagatggaaagggtgaaagggcccccaggtggagggactggcctgggcaaagggtggagaggggtaggggggtgcaaggcagggacacagggtgattgcttgagtgtgggtttgccaccacagctccccatcaaagctgccacagctccccatcaagcctggcctcgcccagctgcagttgacttcatggtgggaggaggtggggatgtgaatttcttcccttccctccaccccacctcatccacaggactgggggtgtacctcatcatttgcacttgttttgggcggaactgtgtcccccaagatttgtatgttggaaccctactcactaggacctcagaatgtggctgcaattggagctagggtctttcaaaggcgattaaagtaaagcgaggtctgtggaatggccccagtccaatctgactggggtccttataagaagaggtaatgaggacacaggcacacacagagggacgaacctgtgaggacacagggagaagatggcatctacaagccctgttggctgctctgcctggagcccgatgccaggcactgacaggcacaggctgccctcggtgttgtggggaagaaaaagagcagctggaggtgtctgtccctgggccagggggccctctgctccctcctctcctctacccagagagaatcctcctttatgtctcagcttggggctccaaaatagccaagtagccaggaaataaggcgaacatccatccatggatgaaaaataaacagcatgtggtctgtgcacacgacggaatgccactagggcagaaaaggggaggacacactggcacacgccacaccgtggatgagcctcaaagtgctgcgcaggccccactgcggggagatgtgccttccatcccacccctgcctgcgggggctcctaactttgccagaagcaaagtgccagctttgccccagagggacttagaggggcaatggtttccctctccccactgctcgggtcctgggtcccgtagccagaaggggcattccagtcttctcgcctcatctcctggctgtgtgaccccgggcaagtcacttcacctctctgagcctccctttctcatctgtaatgtggggctgatcagggctgctcccagaatttcagggacccatggtctcccagtgacacaggcaggctgggtctctctcccactgctcttggggacaaggatggggtaagaggatgggggggcaggcaacataattagagtgagtttggggctgggagtcagcatcacatctgacagtccctggccagccacctgcggccacaccataggaccctgttctctgccctctctccaccccagctctctctccaggggaagaggctaggggcagactcaggtaccagatagggctgggggtgctctgggggacagggtcccagtgcagaggttcgggggatgctggtaggagcacttctgctgggcctggggtgtccagcctgggctctggaagagaccaattagtcaaatgactacagttgaccatttggaagcaattaacagggtcgctattagcgcatggtgcaccccccgcctggctccgaatgggagggagaggggcgaggttgccattatgtgggtgcctctgccccaccccacacacaagactttgtggcccagccccctgcccctgccgggcagatgtggaggaatcaggttcccctcccttggctgggcctgagggtcccagagtcccagggtgggggtctggggggcttcctgggctggaaagatcaacaggtttagatgaggaggaagaactcaataggtgggtgagcaagggcctggaggcgcagcccagaagatgtgggaagtgaactagaggtccacgcgggtgggtgagcatccccagggttcccccaacactacggcatttgtcagaggggctggggcagctggagaaggcagctttgggctccagaccacttcccgtgactgcagggtggaccgcagatggaaggaccgggctgaaggctgtcgccagcgaccggaggagagaggaaaacttggcccagagagcttggctgcctcggaaaagtcatgcttaccagaacagcagacagtgagccagggccaccaggagggacctcaggcagggcaccggctgtcctggtataactgcaaattgcgccctctttcactctcaaaggcagcagggtttgcgtcataaactgtggtcccctgcggctggagcatgccctgcgctgatgggaggccagaggctttgcagaggtaatgccactcagtttccggccctacctttggggcatcacacacatgagaaaccagtatctcaggagcgacactacacagccaaggcctcgtggcaggaagtggccgaaccattcattcattttaggagtatgcactgagtggctggtgtgtcaggttctccctaggagctggaaacctcttgcccatcccctgagcttccctcctatagaggggtcacctttggactcctgcttcagggcagcagcccctgccctcatcttgggttctcgggcacacggcaacctggcagtgggcagggctggagaccagagcccgggagtttccctgggaactgctgggggccccaggtgtagagcaggaggggcatggacacccagattgccttggtcagatttttctggctcctcccagtcctccagagggggtcctgccaaggaggcagccggagccttgacaggaaagggcatcggaagtcccctggccccagcaggctgctcttgctctctctctcttaaaacattattgtgtcctctctcctctctctgtcagactgtgccccctgactgcacccctctctgaatttcttgtgcaccccccacccccgccactacatctcctctcttcttggccaggtgtcaggaggtagcagagctaaggcatttagagcagcgacctccttcctgtgcctcttccatgcctcttagggagcccaggtgaccacacatcccagcccaggcctgcacagggctgcactggacaagctctcctcttgctgctgtcctttggggctttcctgtcaccagcctctgacccctgtaacacagtctccatcaagagtctgaggctccagtagttcagtggctggcctctggcctgttcaaggactctcacaagctggccctggggcagcggctaggagaccctgactaagactgaggtgctcggggatggcttgggggcgccctccttcaggatggccacctggaccctgtgcacgctggagtgggctcacagaggacacactgccctgtgtgtattgggccatgggagctggacacgtcccaggggtgtgtgctcactgccacagctcatggtgccctgcacacttgcctgaccccaaaccctgatgcagatggcaggctggggaatgtcagcccacccaactcaccccagagcccctggtcaacttggagccaaagctgtggcctagacccctggactccacagcgtgccctcctctggggcagggttgagagaagcaaatcccctgtgctggcccctgcttcctgctggccccaggaccctgggggacagaggaccaggaagcaagagaaatgggtggggacatggcttttcccgatactttttgaagcccctcttcactgggccccctgagatacaccttgacccccacacagtccaggggaccacctgggcatctgcactgattcagatcctccaggccaggactcccccacacccattcccagcttctaccgggttcctcttgtcatcacccacccgctgtggctaccagactccctgtgcttttctctgggtgttctccgcggctctgtcttctttccatctcccctgcctcctctttttggcgatctctgtcattcacattttccatgtctttcccgtcctttcctcctccgtttctgtctgtctctatctgcatctctttctctctagggctctctgtcggcgcccacttctctggctctcgcgtccctcctcccgcctccccaggcccctctctggaccgtcactgggacgggatcctccgaggcctgccagacgagagctaaccccaccactccgggtgcccagttggtgtgcgcaaaaggagatagcatctccagacccggcctgccccgcgccttgcaaggctgaggacagcgccactgctcctgcaggaagcgccgggcgcagacacaaacccggagctccccacgcgtgcccgcgccccggagcctccctgccgccgccctccgcggtccccttcattatgcgccgcctttaatgggcgtttgtcagctcgacttccccgcaagttgttttcacggacatcagtcatcggcggcggccccattgtgcagggggattgatggggagcgggagggggtgacagggcctggggcggcctcctcaaggcctcggtctataattttcggaggcataattggtctgggggagggggcgggggaggggcgggtaggggacctttcagagccaggagggctttcgggggcgtggggcgcgctgcggagcggagccgcggctcgacggcggtgcgctggcggcgagtgtatgcagacggcgcccggcccgaaccccgagccccgcggggctccccacccgccggcctcccgcccctcccgcgcctccgcctggggaccacgtcggccttttgttggcgaaccgtcctttctttcagcgctttgcgcagcaacggaaatttcattgctcctgggtggaaattaaagggactcgcgttccctctctccctctccctctcccactctccctctctttctctctctcgcccacccttcccccttcttcccccacctttcccgcgaagccggagtcagcatctccaggcgcgggatcccgctccgagcacctcgcagctgtccggctgccgccccttccatgggcgccgcgctcgcctgcagccgccgccgccgcggggcgggcgcgatgccacgatgggcctaatctggctgctactgctcagcctgctggagcccggctggcccgcagcgggccctggggcgcggttgcggcgcgatgcgggcggccgtggcggcgtctacgagcaccttggcggggcgccccggcgccgcaagctctactgcgccacgaagtaccacctccagctgcacccgagcggccgcgtcaacggcagcctggagaacagcgcctacagtgagtgccggacgctgcggggccccgggggaagcggcgccgggaggggtcgggcccgggagaaggcgcgctgcggggccccgcgggggaggcggcgccggggaggggtctggcccgggagaaggcatggtgcgcccggggtgtccgggaaaagaccgtctgcctcccgctgccagaaggggaatgccagggtgccctcctcaacctacacgtccgggagaagagcgcgcgctggggttcgagcagaactcgggggcatgggcgttcacgtccgaagagggcgccggcg

SEQ ID NO: 3608 - DNA, 6000 bp, Homo sapiens
catccccaggcctgccacagtgcgtgacacacagtagatgctcagtaaatatttgttgaattaaatctggagaattcaggtgagaaccaactctaggtcttgaatgccacgaaacaataaacccagcttccacttagtgtttgctgcaagccaggagcatggatcatctcgaatcctcacaatggtcctgggaggttgataccattattaccctccttttcagatgaggaaactgaggttcagagaggttagatgccttcctcaaggtcacctaaccactaattgatagaacctggaatctgtctgctcaggtctctgtatctcatggaagaggagggctggcctggtgtggctggaggacaggagagacagcctgagcacccagagtcacatgtagtcactcatgaggctggactaatgttccttagaccagccctgggaaggggatccagatcccagatgagtgaggagagtcaaagccagaggccatctcctcttcaagggagttctccaggtggtcccttgggtttgggacaggggtcagggtttagctagaccatctatctaatggaaaagatgaggcacagagagggtcaggaacttacctgaggtcacacagaaaggcaacattgaggctgggggtagctggggaggagagcccaggcaggaaggtttcctgtggtcagaaaagccaggaaatgacccttaaagccaggggaggcagaaggctagacgagctggcctccaggggccccgtcacacacctcaaaccagcctcagcactgggctggtccagagggcttggagggagcaagtctggctaaggccttaccttaaaccttctgggcagggcctggggagggcatgggggaccccagggcttgaactcaagctccagcccaggctctcggcactgtgtgatgccaggcgagtgtctgtccctccatagacctggatgacctctgtgagccctttacatcttctgcatgcctgccaaacaccaagtctgtgtcctcacagaccttaagccacaggccaggttgcaggaaacggcaaggggaagtctattttaggcccaattatagccaatgaggagtcctgcctggcaaaggcaagtgagctggcatcccaagctgggtcagaggtagtttgctgggctggactggggagggagatagtgagcaggcatcagggataaatcgggcagagcccctgctgcccagggcaaacagtgcaccaagggaagggagaggagagagagctcctgagcccagcgtcctggaagaagctggtgcccccgatatgaggtctcagcagatcctcataacacgcttggatgggcgagttctcagagaggtgaagtcacttgcctaaggtcacacagcctggcaatggcagaagtgggacttaaccactatccatgtgacaccaaagcatatattcttccattttcccctagatttctcttctccaggctccttaatctcagatgcttcagcaagccacctgcctccctgggcttggctcacactccctagctcttgacctgctcatgttctgggcccagagggtaactggactgcaagtctcaccctgacagtccccagggtccccaccagccccattgtctgcagttcatggctctgggttcctctctcagactcaccatgggaacaagaaaaccctacacttgcctccctgagcaccagtcaggtgggcaatagaacctgggatggatggaactgagagtgctgggcctcccatgagggagccagtgaggcagtcaccaaagacttgacacctccaccccagtgggattccagacccaggccagggtctggacctaaatgcaggttgaacctggtcctcagacccagacagccccagctcagcttctggcctggccccaggctgagccctatcctggcctcctagcctcagtttcccctcagactgagcccaccctcccctggagctaagacacaaacacaggacagcagcccaccttcttagggttaggacttggcccgctgggggttagcctaggatggagcattgaattttatttttttttttttgagacgcagtctcgctctgtagcccagactggagtgcgatggcacaatcttggctcactgcaacctccacctcccgggttcaagcagttctcctgcctcagcctcccaaataggtaggattataggcgcccaccaccgcacctggctaatttttttttctttgtatttttagtagagatggggtttcaccatgttggccaggctggtttacaactcctgacctcaggtgatccgcccacctcggcctctcaaagtgctgggattacaggcgtgagccaccgcgcctggcctggagcattgaaatttaagtatgagcctgctgttcctccaggcttgtactgtatgtacttccttttggaattctagcacagccagcaagcagagtggcacccactacctttggtccatgactccaaggcagtcatctactcagacccctgcatacagccacactgtggtggctctgattctgtgacccaggatccccaccccaggcagggcctggctggggcatggcacctgtacccctgcctccaggtccccatcacagctcgtcccagtttactgggaccttgtgctgtgtacctacaatgaggtgcacacattctctgggcccacttgcccagctgtaccatgtgaagttcaacaagatggtctctgaggtccctgagctcagggattccagtgctgactccatgggttcagttgagatgccaggattttataaagcctgtgattctgagagtcctttgttctcaagcctgtggttccccaagctccataaaaagcgagtctaaatctttcctgtggcttccacaactccttccctgtctactcactgtggagcaacccagatgctggtagactctcagggaggagcccacgtcacagtggtttcagggtcagagctggctgcaggaggagctggcgcatccacccagcagtaaataataattaggctccctcctaacctgggggttgcaggagcgagaagtgtttgggctgtggccccaggagacctactctatggagctgctgccagggcagccaggtagccgcctcccacagagaacttcaggcaacatgtctggcaccccagttttcagatgaggaaactgagttgggggtggatttgatgaaaacctcacagagagctggtggtagagaggggcctggaccctctctgggatgtctgattaatagccagtgctccaaaaagcatttccccatttagtttattgattgagacaaggtctcactctctcacctaggctggagtgcagtggcacgatcgcggctcactgcagtctcaacttcctgggctcaagtgattctcccacatatttttgtagagactgggcttcatcatgttgcccaggctggtctcgaactcctgggctaagtgatcctcccaactcagcctcccaaggtgctaggattacaggtgtgaccactacacctggccttccccatttggtttattgagtgacgacacctgaaattgccaccatttgaactctagaacctagagctggggtgtagatggtccccttacaaagaaaacatttccaggagtggaggcattctggatgctctggccttccgtaggctgggatgtgggaccctggaagaacccctgccccagccctggaggtctccattgacatatgagggtgctgatgtcatgatcctgacatcaatgacctgtagctccttatgcccttcccccacaacctgagcatgacccagggaaatgaaaactcatcccctgctcccctccccatgcggtgtccagttcgcctcctggaatctcctggaccctggggacctgaccttttccgtctcctagcccctgggttcagattctatgactgtttagaaccccacccccagccatctatccccagctgacttatttaccttcctttctccatctctgtcatgggctgtgattatcctgaccccagccaggcctctggcccagcactaggtcctccctggtgtctcagtctcccatcagccctactgtcccaggaggaccgcctgagatcccctgaatagtactgagagggggaacgggccactgagctgctccctccagtcctggcacaccctgtagcacaactccaggggacacgattcggagtcggaatacagtgtgaatactgcctggagtttgtgatgactggcattggaaactggcagggtgggatggctgtagtagggaggggggcactgagtcacctgtcctgctggagggaaactaactaccctggcacagagaagtggtgcggggagtaggggagtggaggcaggagacgcctcctggaggatttcactaggccttgaaggatgtgccgaagcccaccgtgtgggcttcctttatagactcaccttcaccaggccttttcgccaactaggtgagggtttccagggttgggcctgggcctcgtcaacaaagcaaagtgaggttattcttcctggccaccaactggcaggaggaagatgaagcccagaaaggggcagaggtggctctagttacactggcaatgctgagaggacccagaggagtatctcagtctccagtctctttatcttgcttcgcacaactccttgcttggttcagagccttgaagaggcggatacaagaggccctctgggcaccgccgcccagtcccgcgcagccccctgcagttcccaggggcgcgagagagggcgacgtagagcagcaccgcccagcggcagagcggcgagcccctccgcggctcggggtgagtcgggcgcggggcgcagaccgcgctctgacgtcgggggcggagcggccgtgacgcgcgggggcgggtctgcgcaccttcccggcccagccggcgattcattcaaaaggcgcgcaggctgcgcggctgtccgggcgctcgccgagccgggccgcggcgccgagtcgaacggggagccgagctggagctgccgcggcgcagccaggtaaggagggcgcgcggagcgcccatccagagtctgctctccgcggccgggccagcgggatacggaccctagtggcgccccctgcctccccgtgtctctgaggaagttcgcgggctcggcggatgcggcagcccggccgcgcgcccccccaccccactcctcccgcctcgcgtcctgtcccggcgccttccgcgcaccggccaccgccagtctccgagccccgtgacctgcaggtcctccggccgcgactccgggccggccctgcgtggtggctgtcggggggcgcgcggggaagcagcggaacttgcggtgtgaggggccggcggggcccggagcggtccccggcccgggaaacttggaccgagaccaggttgtggtgcgggctggacggcggcgcctcggcgcggctgcggcgcggggcggccaagggggggtctggatggtgtcagcccgtgactgtgggtgacacggcgcgtgaggcggcctggccgggcgaacgtgtggctgggacactgggcggtgacgccgggccgagcgggcgacacagaggggctctgtgtgtgggagacaggcagcgtgtgtgcgtgtgttgtgtgagggaaagacccggggtcactggggtcacgaagtgcgtggcttggggcgtgaccggcgcagggccagggccacccgttactgtgagtgtgaaatagagggagaggagcccaagtgactgagaacgagccgagctcgctggcgccatggtgtgcgtgtggggtcaagtggtgtcagtgtgtgtgtgtgtgtgtgtgtgtctgcgcctagggtgatgatgagtaagaggcaggaggaggagggaccggacctaggacaccttccggcagatgtggggcgatgaggaagttggggagccaggagacaagggtctccaggactgtccccacgagggcacccctcaggagtt

SEQ ID NO: 3609 - DNA, 6000 bp, Homo sapiens
gaggaaactgaggttcagagaggttagatgccttcctcaaggtcacctaaccactaattgatagaacctggaatctgtctgctcaggtctctgtatctcatggaagaggagggctggcctggtgtggctggaggacaggagagacagcctgagcacccagagtcacatgtagtcactcatgaggctggactaatgttccttagaccagccctgggaaggggatccagatcccagatgagtgaggagagtcaaagccagaggccatctcctcttcaagggagttctccaggtggtcccttgggtttgggacaggggtcagggtttagctagaccatctatctaatggaaaagatgaggcacagagagggtcaggaacttacctgaggtcacacagaaaggcaacattgaggctgggggtagctggggaggagagcccaggcaggaaggtttcctgtggtcagaaaagccaggaaatgacccttaaagccaggggaggcagaaggctagacgagctggcctccaggggccccgtcacacacctcaaaccagcctcagcactgggctggtccagagggcttggagggagcaagtctggctaaggccttaccttaaaccttctgggcagggcctggggagggcatgggggaccccagggcttgaactcaagctccagcccaggctctcggcactgtgtgatgccaggcgagtgtctgtccctccatagacctggatgacctctgtgagccctttacatcttctgcatgcctgccaaacaccaagtctgtgtcctcacagaccttaagccacaggccaggttgcaggaaacggcaaggggaagtctattttaggcccaattatagccaatgaggagtcctgcctggcaaaggcaagtgagctggcatcccaagctgggtcagaggtagtttgctgggctggactggggagggagatagtgagcaggcatcagggataaatcgggcagagcccctgctgcccagggcaaacagtgcaccaagggaagggagaggagagagagctcctgagcccagcgtcctggaagaagctggtgcccccgatatgaggtctcagcagatcctcataacacgcttggatgggcgagttctcagagaggtgaagtcacttgcctaaggtcacacagcctggcaatggcagaagtgggacttaaccactatccatgtgacaccaaagcatatattcttccattttcccctagatttctcttctccaggctccttaatctcagatgcttcagcaagccacctgcctccctgggcttggctcacactccctagctcttgacctgctcatgttctgggcccagagggtaactggactgcaagtctcaccctgacagtccccagggtccccaccagccccattgtctgcagttcatggctctgggttcctctctcagactcaccatgggaacaagaaaaccctacacttgcctccctgagcaccagtcaggtgggcaatagaacctgggatggatggaactgagagtgctgggcctcccatgagggagccagtgaggcagtcaccaaagacttgacacctccaccccagtgggattccagacccaggccagggtctggacctaaatgcaggttgaacctggtcctcagacccagacagccccagctcagcttctggcctggccccaggctgagccctatcctggcctcctagcctcagtttcccctcagactgagcccaccctcccctggagctaagacacaaacacaggacagcagcccaccttcttagggttaggacttggcccgctgggggttagcctaggatggagcattgaattttatttttttttttttgagacgcagtctcgctctgtagcccagactggagtgcgatggcacaatcttggctcactgcaacctccacctcccgggttcaagcagttctcctgcctcagcctcccaaataggtaggattataggcgcccaccaccgcacctggctaatttttttttctttgtatttttagtagagatggggtttcaccatgttggccaggctggtttacaactcctgacctcaggtgatccgcccacctcggcctctcaaagtgctgggattacaggcgtgagccaccgcgcctggcctggagcattgaaatttaagtatgagcctgctgttcctccaggcttgtactgtatgtacttccttttggaattctagcacagccagcaagcagagtggcacccactacctttggtccatgactccaaggcagtcatctactcagacccctgcatacagccacactgtggtggctctgattctgtgacccaggatccccaccccaggcagggcctggctggggcatggcacctgtacccctgcctccaggtccccatcacagctcgtcccagtttactgggaccttgtgctgtgtacctacaatgaggtgcacacattctctgggcccacttgcccagctgtaccatgtgaagttcaacaagatggtctctgaggtccctgagctcagggattccagtgctgactccatgggttcagttgagatgccaggattttataaagcctgtgattctgagagtcctttgttctcaagcctgtggttccccaagctccataaaaagcgagtctaaatctttcctgtggcttccacaactccttccctgtctactcactgtggagcaacccagatgctggtagactctcagggaggagcccacgtcacagtggtttcagggtcagagctggctgcaggaggagctggcgcatccacccagcagtaaataataattaggctccctcctaacctgggggttgcaggagcgagaagtgtttgggctgtggccccaggagacctactctatggagctgctgccagggcagccaggtagccgcctcccacagagaacttcaggcaacatgtctggcaccccagttttcagatgaggaaactgagttgggggtggatttgatgaaaacctcacagagagctggtggtagagaggggcctggaccctctctgggatgtctgattaatagccagtgctccaaaaagcatttccccatttagtttattgattgagacaaggtctcactctctcacctaggctggagtgcagtggcacgatcgcggctcactgcagtctcaacttcctgggctcaagtgattctcccacatatttttgtagagactgggcttcatcatgttgcccaggctggtctcgaactcctgggctaagtgatcctcccaactcagcctcccaaggtgctaggattacaggtgtgaccactacacctggccttccccatttggtttattgagtgacgacacctgaaattgccaccatttgaactctagaacctagagctggggtgtagatggtccccttacaaagaaaacatttccaggagtggaggcattctggatgctctggccttccgtaggctgggatgtgggaccctggaagaacccctgccccagccctggaggtctccattgacatatgagggtgctgatgtcatgatcctgacatcaatgacctgtagctccttatgcccttcccccacaacctgagcatgacccagggaaatgaaaactcatcccctgctcccctccccatgcggtgtccagttcgcctcctggaatctcctggaccctggggacctgaccttttccgtctcctagcccctgggttcagattctatgactgtttagaaccccacccccagccatctatccccagctgacttatttaccttcctttctccatctctgtcatgggctgtgattatcctgaccccagccaggcctctggcccagcactaggtcctccctggtgtctcagtctcccatcagccctactgtcccaggaggaccgcctgagatcccctgaatagtactgagagggggaacgggccactgagctgctccctccagtcctggcacaccctgtagcacaactccaggggacacgattcggagtcggaatacagtgtgaatactgcctggagtttgtgatgactggcattggaaactggcagggtgggatggctgtagtagggaggggggcactgagtcacctgtcctgctggagggaaactaactaccctggcacagagaagtggtgcggggagtaggggagtggaggcaggagacgcctcctggaggatttcactaggccttgaaggatgtgccgaagcccaccgtgtgggcttcctttatagactcaccttcaccaggccttttcgccaactaggtgagggtttccagggttgggcctgggcctcgtcaacaaagcaaagtgaggttattcttcctggccaccaactggcaggaggaagatgaagcccagaaaggggcagaggtggctctagttacactggcaatgctgagaggacccagaggagtatctcagtctccagtctctttatcttgcttcgcacaactccttgcttggttcagagccttgaagaggcggatacaagaggccctctgggcaccgccgcccagtcccgcgcagccccctgcagttcccaggggcgcgagagagggcgacgtagagcagcaccgcccagcggcagagcggcgagcccctccgcggctcggggtgagtcgggcgcggggcgcagaccgcgctctgacgtcgggggcggagcggccgtgacgcgcgggggcgggtctgcgcaccttcccggcccagccggcgattcattcaaaaggcgcgcaggctgcgcggctgtccgggcgctcgccgagccgggccgcggcgccgagtcgaacggggagccgagctggagctgccgcggcgcagccaggtaaggagggcgcgcggagcgcccatccagagtctgctctccgcggccgggccagcgggatacggaccctagtggcgccccctgcctccccgtgtctctgaggaagttcgcgggctcggcggatgcggcagcccggccgcgcgcccccccaccccactcctcccgcctcgcgtcctgtcccggcgccttccgcgcaccggccaccgccagtctccgagccccgtgacctgcaggtcctccggccgcgactccgggccggccctgcgtggtggctgtcggggggcgcgcggggaagcagcggaacttgcggtgtgaggggccggcggggcccggagcggtccccggcccgggaaacttggaccgagaccaggttgtggtgcgggctggacggcggcgcctcggcgcggctgcggcgcggggcggccaagggggggtctggatggtgtcagcccgtgactgtgggtgacacggcgcgtgaggcggcctggccgggcgaacgtgtggctgggacactgggcggtgacgccgggccgagcgggcgacacagaggggctctgtgtgtgggagacaggcagcgtgtgtgcgtgtgttgtgtgagggaaagacccggggtcactggggtcacgaagtgcgtggcttggggcgtgaccggcgcagggccagggccacccgttactgtgagtgtgaaatagagggagaggagcccaagtgactgagaacgagccgagctcgctggcgccatggtgtgcgtgtggggtcaagtggtgtcagtgtgtgtgtgtgtgtgtgtgtgtctgcgcctagggtgatgatgagtaagaggcaggaggaggagggaccggacctaggacaccttccggcagatgtggggcgatgaggaagttggggagccaggagacaagggtctccaggactgtccccacgagggcacccctcaggagttcagcttggtgaggagatggaccctgagggataggccctggctgagggagaaagccgaggctgggcaacatctggtggggtggcccagatggcagcagggtaggggccctgtggtagtctcagcttccccccgcccacctgcatccacacactcacgcatcgaagtccctacacctggcaaagttctgcccctgtgtaatctgtattctcagcggacccggacaca

SEQ ID NO: 3610 - DNA, 6000 bp, Homo sapiens
tccctctgtccccaggacatcccaccgtgtcctgaaccactatctaaagagcagaatcagggagtggcagggagaagggctaaccgaggaagaaattgagagactagacctctgggcccagctctgccaccaccttgctgtgtgccgtgaggaagatcacttcccctctctcacctgtttcctagtctgtaacatggatctcctgcctatctccccatgagtagatgctacaaggataaatgtgcaggtgctaggaaggtcagagctccctgggacatcagaggagcctttttgaccacatggtcaccagtttgggggttgagaaaataggactgcaaggcccaggcaagctcctctctggctgaccctgctcttggagcctccctcacccccaacctggcttcttgcagggtttgtggaagggtgcctccccccacgctcaacaccaatgccagccacctcctggtggtcttcgtctctgacagcagtgtggaaggatttggtttccatgcctggtaccaggctatggcccctgggcgcggtgagtgtgttcccacctgcctgttgagtgtccactttcttcccctccacccactcccagtcctgtcaaaggggtggagactccgggcctccctgactcctggtgcccacatccagggagctgtgcccatgatgagttccgctgtgaccagctcatctgcctgctacctgactcagtgtgtgatggttttgccaactgtgctgacggcagtgatgagaccaattgcagtgccaagttctcgggtacgggccaggcatgggggtcctctcttcaggcgtctgatctgggttcaagctgggctccccagctctggtccagcctcaaaccgggccctccgtcagcatttcctgctcagtcattctttggcccagaacttgtttcccatgggcatggccaaaactctcgctctgtaatcaccgccagccctattggatggaggcacagatcctagcaaactcatgagcccttccacctctctacagggtgtggggggaatctgactggcctccagggcactttctctactcccagctacctgcagcagtaccctcaccaactggtaagcacagtgctccatgcagaacgggaggggcacacacggaagcacctgatccccaagttagtgtaatgggaatggcatggtagacactaccttctacttgggaaggtcagagatcaagcagacgggggatgggggaatattattaagtgcctgctgtgtacccagatgttcccacactgggtcaactcacctctgaaaccaggtaaattaaaggtccttaagaaccaccaatgatgaaagcaccaccccatccccccagccagcagtgggggaagaagacccttctgggtgcccgggatgagacaggagaaggggccatgaattgctccacctatgccctcccccagctctgcacctggcatatctcggtgcctgccggacacagcatagaactacagttccacaacttcagcctggaggctcaggacgagtgcaagtttgactacgtggaggtgtatgagaccagcagctcaggggccttcagcctcctgggcaggtacaggagccagggaagagccatggataactccatcctcactgtctgccacccccggcttccatgtcggcccagcacattccattctccagcttcattttcttctgctactccaggccgggggtctcttcaccatcaccctaaagacagctctcacctcaaaaccttcaccccacactctccctgtccccaggaggtccttccccaaacctctccctgccccagttcctccccaccggcaggggccacttccacctcccctacaaaccctcattgatttttctttttcttctttttttgaggcagagtgtcactttgttgcccaggcgggagtgcagtagcaccatcatggctcactgctgcctcaacctcccagcttcaagtgctccttccacctcagcctcctaagtagctgggatcacaggcacatgccaccacgcccagataatttacttttttaatttttttgtaaagacaaggtctcactatatcgcccaggctggtttcaaactcctgggctcaagtgatcctccctactcagcctcccaaaatgctgggattacaggtgtgagccacaatgccaggctgcttcgctgatttttccccatctagaagtggctcgagttcagacagtttgtttaatgctttccctgttgaatatatgtgtctttctcgccagaccctaaccctgtgtcttccatcacctttggcatcatccagggctcccagctcagagccaggcctgtgggaggctgcagtgccccctcagtcagccagggctggtgcccagaacagctgtctgctttgggcaggttctgtggagcagagccacccccccacctcgtctcctcgcaccatgagctggctgtgctgtttaggacagatcatggcatcagcagtggaggcttctcagccacctacctggccttcaatgccacggagagtaggtgcccctgggcaagtgggtgggggcagtagaggcacctccagggggacagacaagggctctggaccctggtcaggacactctgggggtactgggggtgtaggtatgtccccgggcactgccatgccccttgtgcctgcagacccctgtgggcccagtgagctctcctgccaggcaggagggtgtaagggtgtgcagtggatgtgtgacatgtggagagactgcaccgatggcagcgatgacaactgcagcggccccttgttcccacccccaggtgagaagcctgcccctggggaccctgagcaggctgggtgcccacctcacagaaccctactgccgtactgcacagtgtcccatcccaacctccctgagggggcggggccagctggcctcaccatcctgactctgggaccacttcacagagtcctggaagacagtcggctggtggtggcaatagtactgagtgtcaccccaagggaaatgggaatctgggaatcattggtggggcttcaagaaccagtcccttctgtcacccagagcccctttccacagcccacaccaaagatgaaggcatcctcttacacagagcagggggtttcttccagatgcccaagcagtccctgcaaacgcgggtgccccatgttccctgagattaaagacgtgcctgcatgatgcccagggctggcaagcgatgctggagcaggctctcagggatggcagggatcctcagagtgtgtacagcctgtctctttgttatcctcttgcttcctcacaaccacccccattggacccatgtacacacaggaccgagcgattcggtgacttgccacaggccacagagccagtgagcagtccccacagtggccctcccctccacccctgcagagctggcctgtgagcctgtccaggtggagatgtgcctcggtctgagctacaacaccacagccttccctaacatctgggtgggcatgatcacccaggaggaggtggtagaggtcctcagcggttacaaggtcttctgggtggagggaaggagggcgggcctgggaggggaggagcctgggagcaggtgcctgaaggccactctccctccgcagagcctgacaagcctgccctgctaccagcatttccggaggctcctgtgtgggctgcttgtgccccgttgcaccccactaggcagtgttctgcccccttgccgctctgtctgccaggaagcggagcaccagtgccagtctggcctggcactactgggcaccccctggcccttcaactgcaacaggctgccagaggcagctgacctggaagcttgtgcccagccctgaccctgaagccggcccctgccctcttcctgcccgtcctcttttgccggtcagggctggcacgcaggggaacaaaggaaggagcatcagcagggtctctacccatccttctctggggctcccagggagggggaagagaagtcctcagctggggctcatgggaccctaccaccctccctgctccttcctgtccctttaccggtcccaggctgctgactggccccacactgtgccaccggacaatcgagaccacttcccatccaggcctcttcccctttccatctgctttttcagcttctccatcgcctgccttctgaccttttccttgattcaacaaaaatgtactgagcatctattcatgtggcaggcccctgtcctaggccctagggatccaactggctgtctgcctctagaactctccaccctcatctctctgcgtatttctccctgaaatggggtctggtccttggtctctgccactgccctgcctctcctctggccctgggaacaggaggtgccctgtgtgtccgtctctcgaagttctgcctctctgtgcccagctcaagtctctctccccctcctttctccccctaaactttggccggccgccgggcgacaccacgagttatttcccagctatttcccggtccgggagctcttggcccctgaacaactggtttcctcttggagtctgggaggaggaaagcggagccggcagggagcgaaccaggactggggtgacggcagggcagggggcgcctggccggggagaagcgcgggggctggagcaccaccaactggagggtccggagtagcgagcgccccgaaggaggccatcggggagccgggagggggggtgagtctggcggaggaggggaaaggggctggggaggggactgtgggaaaggctggcgcgggccggcggtgggagggagggctggccgctcccaccctctcgcgcctgcctgtgctctccggatgctcggccctgcgagcgctcagcctcaggggcacggcagtggggtggggaccgactgggccgcgccggggtggggagagaggcaggtcccaggattctgggtcccgactccagtcctgcctggtccacagactgcgagaggaccccggcgtccgggctcccggtgccagcgctatgaggccactcctcgtcctgctgctcctgggcctggcggccggctcgcccccactggacgacaacaagatccccagcctctgcccggggcaccccggccttccaggcacgccgggccaccatggcagccagggcttgccgggccgcgatggccgcgacggccgcgacggcgcgcccggggctccgggagagaaaggcgagggcgggaggccgggtaagaaggcaccgccgcggctatcggtggcgatgtccgagcaggcgcggccgcagctccagctcccggtgtccgggactcgggtctcccgccagggggcgccactccccgcgctttgcagccctgagcgggggaggggcccaggcggcgggagcccccttggccagccccccagatctgccctgcgggaaggggtggaggaggtacccgtgcgggaggaggcgctggccgaagctcaggcaggggcggggaggggtacggtgaccttagagtcgccgccccgctgcgggctgagccgccgctactctcaccctgccgccccgcttaccccgcaggactgccgggacctcgaggggaccccgggccgcgaggagaggcgggacccgcggggcccaccgggcctgccggggagtgctcggtgcctccgcgatccgccttcagcgccaagcgctccgagagccgggtgcctccgccgtctgacgcacccttgcccttcgaccgcgtgctggtgaacgagcagggacattacgacgccgtcaccggcaagttcacctgccaggtgcctggggtctactacttcgccgtccatgccaccgtctaccgggccagcctgcagtttgatctggtgaagaatggcgaatccattgcctctttcttccagtttttcggggggtggcccaagccagcctcgctctcggggggggccatggtgaggctggagcctgaggaccaagtgtgggtgcaggtgggtgtgggtgactacattggc

SEQ ID NO: 3611 - DNA, 6000 bp, Homo sapiens
tggtcacaccagtgcactctagcctaagcaacagaacaagaacctgtcacacacacacatgcacacacacaaaaaaaaaaaaaaaaacgaaggaagaggggagagagagaggaaaggaaagggagaaaggaaagaggagaggagaggggaggggaggggaggacagaggaggggaggggatgggatgggtgggtgtctggcacatagtaggtactcaacaactcaacaaacttccatttcccccgctcaactcccatttccaggactataccatcaaagctccactgagattctcatggtgggtgatcctcagcaaatttttttttaaaccaacactgtccctatttagcaaatatttaattcctctcatctctctggatgcttctatcttctcttccttaacaatacacttgatgtatgtaagtatagcattgcccaaactaaacagagtgcccgttaaatagggattccaaaatcaaggaattggcttttccaattttctgatatttgggggcatctgcctcttggaggtagtaatgggattgagctgctatctctcatgcttctaaagactagggaagcctatggccgaggcaggagaattgcttgagcccaggagttcgagacctggcaacatagggggatcccttctctacaaaattagtcaagcatggtggtgcacacatgtagtctcaggtacttgggaggcttaggtaggaggattgcttgagcctgggaggtggaggctgcagtgagttgtgatcacactccagcctgggtgacagagcaagaccctgtctcaaaaaaacaaaaacaaaaacaaaaaaaagtggaaaccaggactccaacagccccagctctgcaacccagccctgcccctgggcaactgtacaactttgggcaaaggcacttaacttccaggagccttggtggcatccagaaaatgagaagaaaacacctacctccctcctcttgccaccggggctggaataaggatgacgtgaggcaatgagctgaggggtctgcagtggatttcactctcagtgtgttttaggtgtgccactccccaaccctgagctggcccctggctcccctcctttcctccagaaaccccttcataacgcagacagttgcaggagtgcctgtgcccacagaggcactctgcggcctctactacatcctgggtgtagtcgaggatggccgtgggtaacagcaaagcagagagaagcttcctggtcttccaggcctccccttggcctcccttctgttgtctccccactcacaggaatagttctgagacccagttgtgaccaagctcctcaggccacagtgctaagcctctcctccttcctggaattccctaaccaacccccaagttctgcctattcaaatccttttcaaccctcaaactttagactaaaggctcatctcttccaggaagtcctcctgctggccccatcagaggaagtcattgtttcttcggattacccagcatttaatctccagacttacggcccagtaaactgtcttcatctctgtccagtgaaccacacttctcaaaagactccctcacattctttttttcttttttttttttttttttgagacagaatcttgctgtgttgcccagcctagagtgcagcagcgcaatctcggctcactgcaacctctgcctcccgggttcaagcaattctcctgtctcagcctcccaagtagccaggactacaggcgttcaccacgatgcccggctaatttttgtatttttagtagagatggggtttcgtcatgttggccaggctggtcttgaacttctgacctcaggtgatccacccacctcagcctcccaaagtgctgggattacaggcgtgagccaccgcacccagctgacccccttacattcttttttctttttttttttttgagacggagtcttgctctgtcacccaggctggagtgcagtgacacgatctcagctcactgcaagctccacctcccaggttcatgccattctcctgcctcagcctcccaagtagctgagactacaggcgcccaccaccacgcctggctaacttttttgtatttttagtagagatggggtttcactgtgttagccaggatggtctcgatctcctgaccttgtgatccacctgcctcggcctcccaaagtgctgggattacaggcatgagccaccacacccgacctcccttacattcttaaaaattatggagaaccccaaagacctttgctttatgtgggttctatctattaatatttaccaaattaatattaaagccgagagaaatttaagtattttcttactaatttttaaacaataaattttaatataatgaaccctttacaagctaaagtaagacggagtctcgctctgtcgcccaggctggagtgcagtggcgcaacctcggctcactgcaagctccgcctcccgagttcacgccattctcgggccttagcctcccaaggagctaggactacaggcgcccaccaccacgcccggctaatttgttttgtacttttagtagagacagttttcaccgtgttagccaggatggtctcgatctcctgacctcatgatccgcccacctcggcctcccaaagtgctgggattacaggcgtgagccaccatgcctggccaataatgtttttaaaccatataatcccatcactttgggaggctgcggtaggaggattacttgagtccaggagtttgagaccagcctggccaacatagtgagaccccatctctactaaaactgtaaattaaaaaaaattaaaaaaaaattttaaaaaacctcctatattttctgaaacaaaaaaaaatttagtaagaatgggccgggcgcagtggctcactcctgtaatcccagcactttgggaggctgaggcaggtggatcacctgaggtcaggagttcaagaccagcctgaccaacatggagaaaccctatctctactaaaaatacaaaattagctgggcatggtggcacacgcctgtaatcccagctattcaggaggctgaggtgtgagaatcccttgaactcgggaggtggaggttgtggtgagctgagatctcgccattgcactccagcctgggcaacaagagcgaaactccgtctcaaaaaaaaaaaattagtaagaatggcagtgtggctttatatttgtgcaaatctctttagcatctggcttaatagaaggcagctggactcgcgtctccttcagcattcaccccaatgtcatatcacatgtcacggagcgtctggaaaacatgaatgagtgtgaaaaaggcacatcatgtcttagtgttattatgagcctagttctaagctctcaagtcctctaaaaaaaggccccgggccccactttgagaactgtcacagcagagcaggggctccttgagacgagggcaccttgtctcagtcggctccatgagcccagtgcctggccagaccccggcacagcaacctctctctcaatgatcacagcgaacgagcagcttcagaggagcagacccaagggcgtggctctcccagctcatcattctcaaagctcagcgcagggccactctgtccaggaagctgcccctgtggccaggctcttaacacacagtgtggcaggaatcctgctctgtcttgatccacccagaatgagaagtactttgtggtcagggactgtctgatcctctccaagagcacctgtccctacagctcccaaaaagtctcttccctaaagaccatgtaccattagacttccaagggtctaggaaacagcttgaccccctagacaaaagcaaactaagaccctccagggacgaatggagaaaaacttgtgggtggaggcatctcctttcctgagtgcaaggagggcagcctgtcctctttgcttccatccccaaggggttcctcactctgcccccatgtcactctgatccctctgctcccccagcatgcctcagccccaatgtggggtgaaagaggtacatcatagaaaacgtgagcctaagatctatccattcctaggctcaactctcatctctgtatcttaccagctgtgtgaccttgggaaagtgacataacctctcagaggccagcaccagcatttgtaaaatggtgacgctacctcatagttatgaaaggagagaaactgcatgtagccctcttgcccagacattctacaaatagtagccagaaatatgaggctctctccccacttccctccctgccaaactctcagcctaagcatggctaacacaaaacagattaccaatccctttcctttctccctgaggacagcagggctaggctgggattttccaagaggacttcgcccatggagaaacaggcatgaagtaatcttgtttgcagggtgtaggtttcctactgtgcaacagccccagtggctagactccacaccccaaccctccccaagacctgggcaccttctcccccttccctgtcctttctcctgcgggcttaggggtcccaggaatgagcagccagtccccctgctcatgccatgttcttctctcttgtcctggtcacaccggtgatctaccaggggccttccaaagacccggcctggccaatacccctgtcaccctggtggggaggaaaggtgggcagctggctttgtccaccccctacaccctgcttctttctcagaccacctaaggctcccttctgcctgcaacttctctcccctcccagcgaccccctaagtgctcactcagtgccttgggtgatggggtggagagctcccctcgtcacatccccgcacagagcacctagtttcctctgctgggtgttctcagccaccgcctgtgcctttaagaactgccaccctgtgccaggggcttgacctcagcatcctcagctgagttggattaagggaccatttcgtgcctttgtgaattcctcctggctgccatcccttcccccacacagagacagagtagcccataggccaaaccactctaccaaggacagcccaagaactggtctagcctggcagccttttccctcgggtagtagaggctgcccctctgacagggagtttgtggtcagcgagtgggcccttgggggtcttgggctgtcacagggactccagaaagccatgcagagccttgtgccatgaaggacttctcagatgtcatcctctgcatggaggcaacagaatcgagcaaggtaaggaccacatagaatcgtgctcctaagacccagcaccagtggtcactgctgccctcagccctcaagtatctcccccttccagaccgagttctgcaatcctgccttcgagcctgagtctgggccaccctgccctcccccagttttcccagaggatgccagctacagcgtcccagctccctggcatggtaaccatcccagggggtgacctgggggaggacagagaggcccaggagccaaggacagcatgaggaatacccaacagaaggggctttcaaaaccccacctgccaacccgcaggtcggcgtcctcgagggctacggccagactgccgcttctcctggctctgtgtcctcctgctctccagcctgctcctcctgctgcttgggctgctggtggccatcatcctggcccgtaagtacccggggacagcttgaaacgagggctttggaatgaaactccatgagccgctctcccagcctcccaggacccagctcctctgaacgccaccctccatcttctcgcctccagagctgcaggctgcacccccatctggggcgtcccatagcccactgcctgccggaggccttaccacgaccaccaccacccccaccatcaccacctctcaggcagctgggacccctaaagggcagcaggagtcaggcgtgagcccctccccacagtccagtgagtactgggggcagatcttccgggagaagggcccaagatgacggggtggggttgaggggagggtgaggaagaggcaccttgagaataaaggacctcactccttttgacctctg

SEQ ID NO: 3612 - DNA, 6000 bp, Homo sapiens
gggaaaaggagaattagacaggttccaaacatgttttaaaggtagaaccaactgattggtgatttgtttgtgtgtttgttgtttgtgggtgggtgggataaggaaaggagaggtcagtgatgtcttctagaactggttgactaaatggatgaggaagccctttgctaagatagctggatccagagtagcataaacaaatgggtgtttgtggcacacaaacccgctctgctgctgcaaaaggaggggtcatcttctcccctatattcctagaacatcatcttttgtttagagatggggtctcacttatgttgcccaggctggaatacagtggctattcacaggtgtgatcacagctcactgaggcctcgaactccagggctcagagatcttcctgcctcagcctcccgagcagctggaaccacaggtgcctgccacagagcctggcctgctagagcgtcgtctttcatctcagagctgaatgagcatcttgcccacagaagtgctcagtgctggcatttgaatgctatccatatgcaatgcatcagctgcaaattcagatgaagaggaagccacgcagaggccaagcccttccccctaggaccgctgtgccgcaccagctcatggaagtgcaggagccaggaggaagcgtagccatcaactatcacatcagacccatttggtttaatcctcatgaaattatgatatgctggccgggcgtggtgggtcatacctgtaatcccagcactttgggaggccaaggcgggtggatcacctgaggtcaggagttcaagaccagcctggccaacatggagaaaccccatctctactaaaaatacaaaaattatctgggagtggtggcacgcacctgtgatcccagctacttggaaggctgaggcaggagaatcacttgaacctgggtggaggttgcagtgagccgagatccgagattgtgccattacactctagcctgggtgacaagagcaaaactctgtctcaaaaaaaaaaaaaaaaagaaagaaaagaaaataaaataaaaaaaagaaattatggtatgcttttgtttctaaactcggtgaagagacccagtagcagacagcttacttgacggacactgatcagctccacagactgtcctcgctcactgtctccaaacagcattttcagtgctcttatgtgtatcaggaagatcaaaatacactataccataagtcctaagtgacggaagagattagttattaaattctggggaaagttaatcatattcactttgaaactttagctgaatttggatctcactaaggggaaggggccaagtcatcggggatggggtgggaaggaccgtgcaggaaaaagcagcattacctcaaggatactaaacacctggcgtttagaaagtgcattttccccatgaagcatgtttgacagggaagcatgagggctgtgccaagacaaaagcagaagtggttctaggtgtcgaattcatataaaccttgttgtttcagaaggtttaggtacatttatggatgccagctccataaccggttcatttgactttattctgttcattctcaacctctaccacacctctttgctgtttgcacttttcttctttattgaaggagcatgagtcgcctgcaggcctggcacaagctgctctggtctccccgccttggatggtaccagagcactggctgtttcacacttgggctgggcctacctcacatggccctactgtctcccacattgtcaccagcttcagccagtgtcctttagcctgtgggcaggtccacatttgcacaccttctaagtggtcccggccacaaggacataggggcttgttggacatgcccttgagggggtcccagggacacagatgtaactttcccagcaggcagtcctggaaccaggaagaggatggctccctggagaggagcgatgacagctttgcagtgctggggccggggaagggccagtgagggggtggtggagaaggcacagtgggtggtgaaggttgggtcatttggtcatgagtcactctttctatagcagagaaatgacacggacctcaagccaaaatctgggcttgagttggatttgttccttgtgagtgtgagaatctggtcctgttctggaggctgtctgctcttgggttccttcacttaccatttaggaacaaaagcactgacatttcataattttttgaggattaaaccaaatgggattcatggaataacatatggttacactgcctcctccaacccaggagtgcacatagggtgcatgcagcaaggtatccccatgcagccatcctaggggaagggtcttgtcctgcatcgctttctcttcatctgcactagcagtcaatgcattgcattcatacggcatccaaatcacgctgagcgcccagctctacgagataaaagatgaggccctaggaagtggggagacaacgtgagtcactgcgtttgcagcagcacagaaggtctgtgtgtcaggagtaccatctcatttacgtcacattgaatttggcttactttccatcactcacactagttgaagaatgctgtgccattggtaatccaaaggaaaatttatttttatatattttctttttcttttttttcttttctttttttttttttttttttgagagatggagtctcgctccaggctggagtgtagtggcatgatcccggctcactgcaacctccacttcccaggttcaagcaattctcctgcctcagcttcccaagtagctgggaccacaggcatgcaccaccatgtccagctaatttttgtatttttagtagagatggtgtttcactatatgttggctaggctgatttcaaactcctgacctcaggtgatccacccacctcagcctcccaaagtgctggaagccaacgtgccagccttttagaaatattttctgtttagctttggaatgctttatgtgatggaaggcagcagattcattcttctttcaattaaattgacccaatatattgtgttagtcattgtgctaggctttgagggtgcaaaggcagttaagacacagacagaaaatgcaacgaaatggtggtgagctccatgagagaggtacaaacagagctagttctggttgagagggaaggaaactcctggggaggaggtagcatatcagtcaggaagcgtgaggtttgcagcaataacaaacaaccctcagctctcggtggcttaacatcccaaaagctgactgactcctcattcatgctacatatccagtgtgtgtcattgtagccacttagggtcacaggtcacagagttaaacctctcagaagagagcagggcattgtgcagtgcctccttatgctgctatgtacaagtggtgtgtcctctcattggacattttcttggttaccgctagccatactgccatacctaacttcagagaagagagagtaacaccctggcctgtgcccagaaggcagagagctaaaaacattcaatgaacaacactaaaaaaccccatcggtgtcttcgacccaatatgcggaaggagtatgaaggagaagagcttccaggggatgaaaagctttatgaaagctgccaagatcagaacgcctggctggagagaggggctccaaacaggaatgcttggaggcacggtgttaagggaggacagggcagagtgtgaagctgggctaaggaggttggatttgatccgggagacacggaaagtcataaaggagctgtggtttcagatttacctgactgctttgtgtaggagagatcagagggtggcagcccagaggcaggagatctttcttaaccaggcaaagggctctgaggactcgaatagcggtcttctaatgcgcaggaatggaagggctatgcttgtcagcagagtcttgatcagatttggaactaattggatatgagatgtaagcagggtggagaatcaaagatgattccaggatttgagcctgggagaatgctgccattagaattagagaaaacagtggaaaatgggcaagtcagggaaggaagatggggcttgttgatctcaaagcagggatttttattttgttcactcctgtttccctgtacccaggacagtgcttagcgcctagtgtgtgcttggtaatgttcattggctacagaatacagtagaacataaatggagacgtccccaggcgaccgctaaggcagaactggcactccttggtggtgtctgtgctgggagggaggtcttcctgtctgaagtcgtaagatgagacgtgctgccaagagaaaaagcttagagaagaaagggatgaaactgaagggagaactttgggaatcatgacatttaggactagaaaggaggaccggaatccagggaaagggggcatttgaggaagcatcagatgctgcaagtgggcgaggggcgttgggatggctcagagggcatctggtggcacagctcatgtcactgggcctccccagggtagccgggcgcaggccagcaagcgcctcccgcctggagaacaggaggctgcgtagccgacggggagcctgggccaggggcggttctggtttctgtttggttttggggggttcataaatgcgatttagtcctgtagcaaagtgagcaaggtgaaggggagagaccggaggcgcatgagggaggagggaaaagatggttggcatcaaggaggtggataaagggctgccctcccggggcagggcccctggagggccggaggggtggtgaacgccgtcgtggtgatggtgagggccttagcgaccaccacccgagtgaggccccctcaccttcaggcccagagccgaggggaggagcctcccccagggccggcgggggcgggcaggtgagccgggcaggtgcgcaggcgagcgcggcgggctgggcgggccgaggccacaccctgaaactacctgcgtgggccgggccggagtgtgagagcggagctgcagccggagaaagaggaagagggagagagagcgcgccagggcgagggcaccgccgccggtcgggcgcgctgggcctgcccggaatcccgccgcctgcgccccgcgccccgcgccctgcgggccatgggagccggccgccggcagggacgacgcctgtgagacccgcgagcggcctcggggaccatggggagcgatcgggcccgcaagggcggagggggcccgaaggacttcggcgcgggactcaagtacaactcccggcacgaggtgagcgcgggccggggacccggggcgctgggaagctcctgcccgcccgaccctgcagcgcggcgctgggctcggccggctcccctggcgtgtccgtcggtggccgagctctgggcgcacaggtggaatttcctgttcagcgggtgccgggccgcgggcgggcggggctggccggacctttggtaccggaccggctgcgccccgccagggggaggcgggaagcccctgggccttcctgcgccctcggtcctttctttccctgagttgaaaaaaggggctccgtctcggcccctccatgactctcgcgctgttagtgaacatctggaagaaaccaggggcttggagtggggttatttgggaggaagtgaaatttcaggagggtttggagtctcagccatccttggcctctgcagaaagtttctttcgtctctctccttccccgtcaaaaggcgctttgggacctcgcagaggacaactgggaggccagggctttggctgccatacgggctggagctaagaactccagagttgggcttgcctgggcttctcgagaggggatggagccctttgggaaggcggctgtatgggaagggatgtgggaacacacatgtcttgagccttttgcgaagtaccgaaacaggaagctcttctttggcagaaagaacaatgaaagacctattgaaagatctcaaaaagattacatgttcctgtatggagttggggatgggtcgctagtcacttcattgacggacccacctaggtggtagtgcccgggcgggacca

SEQ ID NO: 3613 - DNA, 6000 bp, Homo sapiens
aaatggtcatgtggaagggtgcgcctaccaagctggaggagaggtgctgcaacttctttctgcctttgtatcattcagacacactgtgttcactcatcagtggttctcaaaaggagaggagcacaccagactcttaagtaagggtgtgtgtgcttgtgtgtggggaggtggggggatggtctgaaaactctcccccggagataaatatattcctaccaggggtgctgtctcctcacctccctctttgggaatcactggcttctactagagtggaagacagatgtatcattagatcgatcagttgatccatatttatctgctcccagtctggaggtctggttctgggagctgagaggacaccaggggaggataagacactttctgaccaagacattttttgatctctcatcttataaggttcgtggtcactttggggagatcatatctgtcacccaacataaccatattatgataagagccaaaagtagatagggtcagttcacgtgcttcgagttcacagggactatgggtctaaggagccggggtggaggaaacagacatcgtcaatggtggcttcacgggagggagatgggatctcaactgggcccttggaggagaagctgccacgacctcccccaacaccttgacattaaatgaacagacacatgaatgagggggaaaggaagactaattgggtccctgcaaggtggctggatcggggtcagaccacaaggccgatctcagcgtcgcctccccactctgcagccccagcacaggaagtcacactttaaagcctcctctggcggaaattgtgggggagttggaggggtgttgggccaccccctcaactgtctctccacaggcaccccagcttcctgcccttctgctccaggctggagtctgggcctaaagagctcacctcctgtttctcctgttttgcttcatttacgcaactgctgaggactgggcttactggggccagctggtgccagcagtggtgcccagtggtggggagtctgagggccctggctcctagggatcagagagggctgacctggagcattctgggggccaggggaagcctaggaagcagggctggttcttccatccggcatcccttcttgcctgctccctcgttcctggaagtgggtgttcagggctctggaggctttcctgtattgccagtgggcttggggagggtctgtggagactcagaactggccttgtttcctaaggattgtctggggaccccagggaggcccccaaacccagcacaactggtcagaaccagccaggctgtgggaatgcggtgaacccagggtgggagggcagccttggcttgcttcctgctgggactggggagtgttgggggatggagtgagagctcacggaatgggtttagctgttggagacttgttgaactgggaggaggagctggggcggggcctcagctaaaggccgctgaggggctaggaggagccaagtggccctcagggaagggagggcacagacctgatgggcggaagccagggtcgagggagacttcccttcgggatggaatggggagagggaggcatttcccggaacatgtgggccaagtgggacaagggtctgtggcctggctctttgcatggggaggggatggatgggggttgagtggggatgggaaggagggacttggccataggaagaagggattagatggagtcccacttgcatgcaggctggtgccttctgcctttctgctgactcatgacccttgaggagctggggaagctgctagttccctctcccctccctaggtctccctccctctggcctgagtcactggggcggagttgctgggaaaagatttccctttcccggatctgacttaacccccagagtgctggaaagagaagggaacacgtggcctgagaaagcctctctccctccctccctccagggaggctcatcccccactggccagaggtccctgaaaagctccctttaaggctgtctggggctggcgtcccccagttcttcatcatgactctgcctcaagccccctggatgggattcaaagtaccagtgaccttaggtgctccagtggcttcttcggggaaaggaaccacactttcaggactgggaagttcttcccatcaccaccccaaacccttcctgttgccctggaagccccagtcctgttctcagcagaggtggcacggtgttggctggtgcgggcaggggaaggttgttgtcctctgagcaggggcacacgcctccacctgcgggggctgctgttgtgtttctgtgtgtggcttcccctgtttgcggctgaggcttgaacttccgggcctgcacagcttacagctgcagcgtctccccgtggctgactcagggtgactggcctcctgctccgaaatgtggagttggtgaggctgggtggctgtgggctgcctgaccctccttccctgccctagggtttctgtgatctggtgagtcagttgctccccagtgtttaacagacattgaggacaccctcttatctttacacaaagtgtctcttatagtagaaaaaaaaaatgaagcccagggaaaaccagaaatgaagctggcagagatcaaagtccaagttagagctaaatattcactcctggctttgctttcctggcactgatgccggaacaggacaagccatttagctgctgtggggttggcctgagactgcaaagcacaccttccagaatgccatggtgtgcagggggctccaggactccccagcacgccctcagctctgacctgacagtcatccaagctgggtcgctagccttggccagctctatttgcctatgtcctgcacacctttgcccactcctgcccccgtctcaactttgtcccccgtctacccatgcaggatccccaacctttcccttttactctcctccccatttgtccttgccaaccccgggtgtttgtaaattttgaggtggaggggatgggccagggaatgtgagggcggaggcagattgaggtttgatacaaacatgtaaataaacttccttcttctgtccactccccaggagtggtgctcacgggaacatcactcgcccccaccgccagctgactttttcagaaagcttttcatggtgtaacatattcctgggatgtgcatagatcctcattgtttacctctgtgaatgttcgcaaagcgatcacacggtgaacccagcacccagatggagaaacaccgccccaatctttagggctgcttgttggaagaaggggccatcactgaagtaacctgccaattcccaatcaaaaacacatcctttcaacatctgccctgtgtccagcactgttagctgctgtgggggatttcacagtaaggataaaatacagggctgggctcacgcctgtaatcctagcactttgggaagccaaggtgggaggatcacttgagcccaggattttgagaccagtctgagcaacgtaacaagaccctgcctctactaaaaataaaaaaaaattagctgggcatggtggttcacggccgtagtcccagctattcaggaggctaaggtgggaggactgcttgagcgtgggtggtggagggtgcagtgattgcatcactgcactccagcctggacaacagagcaagatcctgcctaaaaaaaaaaaaatacagcttagatctggggcctactagctttgagttgagggaacaaaaatgaacacacaggacaactagagaacaattaagcatcagattgtatggccccaactgtctaagtttcaaggaagaactctaaacttagtgagtggcgtggcctgggcggaatgtttcactgaggaaggacttgagccagggaagttttagatctgctacccctaagcttcccatccctccctctcttgatggtgtctcctctatctgattcttccccaggtgctcctggagctgttggtgggaatatacccctcaggggttattggactggtccctcacctaggggacagggagaagagagatagtgtgtgtccccaaggaaaatatatccaccctcaaaataattcgatttgctgtaccaagtgccacaaaggtaggggcaagtggaaacggtgaatgccctcaggtctggggtgctgcttctttctctgcttcttccagttgttcttccctaactttgctgtctctcctgggctgggattttctccctccctcctctcctagagacttcagggaatcggccctggctgttgtccctagcatggggctccttccttgtgttctcacccgcagcctaactctgcggccccattcacaggaacctacttgtacaatgactgtccaggcccggggcaggatacggactgcagggagtgtgagagcggctccttcaccgcttcagaaaaccacctcagacactgcctcagctgctccaaatgccgaaagggtgagtgtgcacaggcaggagagtcaggcgggtcttgagtggtgtgtgggtgcctgtctatgtgcaggctggtgggtgtgggcaggaaggtgtgtgttttggtgggacactgcatggatgtgagtgtgtattacagagacacacacttaggggtatgtcaggaaggggatgcagggacaggaggatgcaggactcataccccatcttctcccctcaccagaaatgggtcaggtggagatctcttcttgcacagtggaccgggacaccgtgtgtggctgcaggaagaaccagtaccggcattattggagtgaaaaccttttccagtgcttcaattgcagcctctgcctcaatgggaccgtgcacctctcctgtgagcgcagctctcctgaggccaagccctctccccaccccaggggttggccccttccccatgcggtggcacttcctttccttccccctcctgtattctgtgggtctgacaaccaactcctctctggccgcccccaccctgtccctcgtcacttcctctgtcctgtggggtgggggtgcaggcgcttctcctttagctgtgccgcacttctccctacaggccaggagaaacagaacaccgtgtgcacctgccatgcaggtttctttctaagagaaaacgagtgtgtctcctgtagtaagtgagtatctctgagagctgctgggcactggatggtggcatgggttgggacgggtgactggtgggaaccattagctgggcaacagatgccaggatgccccagagtgctcagggtcctactggctgagtaggagacacttcgttaagacaccaggcagtccttccccttgctcttcaaatctgaagaagtctttgaggatggaagatcatgccccaagggctggcagcccttccaactcagatatgtagattcttggatctacgatagctcattggttctaggacatacactcttatagctctgaaatcaaacctcctataactggtgactcatcatggttgaattggcagctctgtttgcgtctgggtagtaatgtaaagaaaagtgccttttattcttgatggcgtcttaggtttgatgcaatatggtatttcctcattagtcactgtccaggcctccttactcctggctccacagaggctgttcttgtcactcacttgcaaagaataaactctgagggctctcagagtttgaaccccagcatagccacttactggctatgtgacgttgggcaagtttcttaacatctctgagcctgacttttcttttggtgttttttttttttttttttttttgagacagggtttcactctgtcacccaggctggagtgcagtggtgcaaccgtggctcagcctccacctccagggctcaagccatcctcttgccttagcctcctgagtagctgggattagaggcacacaccactacacccagctaatgttttactttttgtagagacagggtcctactatattgcccaggctggcctcggactcctgggctcaagcgatcttccgcctcagcctcccaaagtgctaggattacgggcatgagc

SEQ ID NO: 3614 - DNA, 6000 bp, Homo sapiens
tcgggagtggaaaaaccatgttgagaaacactaagaaatgtgaatgggagaattagagggagtgggggagaggatggaggaagagtgttgaatatggttccaggtggaggaattcattcattcgtttattcagaagctgttctcctagggcacattctgtgcccagactgtgattagaagtgaggtgaggcatctcagatgggtgctgtggttcatgcctgtaattccagcacttcaggaggccgaggtgtgtggattgcttgagtccaggagttcgagaccagcctgggcaacacagcaaaaccctgtctctacaaaaaatacaaagattagcggggcatggtggggcgtgcttgtcatcccagctattcgggagactgagctcgggaggacggcttgggcccaggaggtggaggttgtagtgagccctgaccacaccactacattccgtcctggtggtgaaggttgcagtgagctatgattgtgccactgcacttcaccctgggtgacagagtgagaccctgtttcaaaaaaaaaaaaaaaaaagtagtgaggcatctgtggaagtcttcagatcatttccatgaccatggaaatgctgtttggagccaggccctggagatggagaggaaggttcacacacttgtgcgtgcaagttaaagcctgaatgaagatttaaaaagtgtgtaggacggatgggagcaggagagaggctagaagacacttgcaataacccaggtgtgaggcaacccaggaatgcggagaggaccgagagatcacagggggaggcctcgcaagatgaactgacacatgggatggcggcagggatagggatggggccctggggagagagcgtggcaagttctcagcattcgtccgggaagtcgatggtgtgtcatttgtctaggtgaggagatggatgaattccgtctggggcatgttaagggtcagggaaatggtcatgtggaagggtgcgcctaccaagctggaggagaggtgctgcaacttctttctgcctttgtatcattcagacacactgtgttcactcatcagtggttctcaaaaggagaggagcacaccagactcttaagtaagggtgtgtgtgcttgtgtgtggggaggtggggggatggtctgaaaactctcccccggagataaatatattcctaccaggggtgctgtctcctcacctccctctttgggaatcactggcttctactagagtggaagacagatgtatcattagatcgatcagttgatccatatttatctgctcccagtctggaggtctggttctgggagctgagaggacaccaggggaggataagacactttctgaccaagacattttttgatctctcatcttataaggttcgtggtcactttggggagatcatatctgtcacccaacataaccatattatgataagagccaaaagtagatagggtcagttcacgtgcttcgagttcacagggactatgggtctaaggagccggggtggaggaaacagacatcgtcaatggtggcttcacgggagggagatgggatctcaactgggcccttggaggagaagctgccacgacctcccccaacaccttgacattaaatgaacagacacatgaatgagggggaaaggaagactaattgggtccctgcaaggtggctggatcggggtcagaccacaaggccgatctcagcgtcgcctccccactctgcagccccagcacaggaagtcacactttaaagcctcctctggcggaaattgtgggggagttggaggggtgttgggccaccccctcaactgtctctccacaggcaccccagcttcctgcccttctgctccaggctggagtctgggcctaaagagctcacctcctgtttctcctgttttgcttcatttacgcaactgctgaggactgggcttactggggccagctggtgccagcagtggtgcccagtggtggggagtctgagggccctggctcctagggatcagagagggctgacctggagcattctgggggccaggggaagcctaggaagcagggctggttcttccatccggcatcccttcttgcctgctccctcgttcctggaagtgggtgttcagggctctggaggctttcctgtattgccagtgggcttggggagggtctgtggagactcagaactggccttgtttcctaaggattgtctggggaccccagggaggcccccaaacccagcacaactggtcagaaccagccaggctgtgggaatgcggtgaacccagggtgggagggcagccttggcttgcttcctgctgggactggggagtgttgggggatggagtgagagctcacggaatgggtttagctgttggagacttgttgaactgggaggaggagctggggcggggcctcagctaaaggccgctgaggggctaggaggagccaagtggccctcagggaagggagggcacagacctgatgggcggaagccagggtcgagggagacttcccttcgggatggaatggggagagggaggcatttcccggaacatgtgggccaagtgggacaagggtctgtggcctggctctttgcatggggaggggatggatgggggttgagtggggatgggaaggagggacttggccataggaagaagggattagatggagtcccacttgcatgcaggctggtgccttctgcctttctgctgactcatgacccttgaggagctggggaagctgctagttccctctcccctccctaggtctccctccctctggcctgagtcactggggcggagttgctgggaaaagatttccctttcccggatctgacttaacccccagagtgctggaaagagaagggaacacgtggcctgagaaagcctctctccctccctccctccagggaggctcatcccccactggccagaggtccctgaaaagctccctttaaggctgtctggggctggcgtcccccagttcttcatcatgactctgcctcaagccccctggatgggattcaaagtaccagtgaccttaggtgctccagtggcttcttcggggaaaggaaccacactttcaggactgggaagttcttcccatcaccaccccaaacccttcctgttgccctggaagccccagtcctgttctcagcagaggtggcacggtgttggctggtgcgggcaggggaaggttgttgtcctctgagcaggggcacacgcctccacctgcgggggctgctgttgtgtttctgtgtgtggcttcccctgtttgcggctgaggcttgaacttccgggcctgcacagcttacagctgcagcgtctccccgtggctgactcagggtgactggcctcctgctccgaaatgtggagttggtgaggctgggtggctgtgggctgcctgaccctccttccctgccctagggtttctgtgatctggtgagtcagttgctccccagtgtttaacagacattgaggacaccctcttatctttacacaaagtgtctcttatagtagaaaaaaaaaatgaagcccagggaaaaccagaaatgaagctggcagagatcaaagtccaagttagagctaaatattcactcctggctttgctttcctggcactgatgccggaacaggacaagccatttagctgctgtggggttggcctgagactgcaaagcacaccttccagaatgccatggtgtgcagggggctccaggactccccagcacgccctcagctctgacctgacagtcatccaagctgggtcgctagccttggccagctctatttgcctatgtcctgcacacctttgcccactcctgcccccgtctcaactttgtcccccgtctacccatgcaggatccccaacctttcccttttactctcctccccatttgtccttgccaaccccgggtgtttgtaaattttgaggtggaggggatgggccagggaatgtgagggcggaggcagattgaggtttgatacaaacatgtaaataaacttccttcttctgtccactccccaggagtggtgctcacgggaacatcactcgcccccaccgccagctgactttttcagaaagcttttcatggtgtaacatattcctgggatgtgcatagatcctcattgtttacctctgtgaatgttcgcaaagcgatcacacggtgaacccagcacccagatggagaaacaccgccccaatctttagggctgcttgttggaagaaggggccatcactgaagtaacctgccaattcccaatcaaaaacacatcctttcaacatctgccctgtgtccagcactgttagctgctgtgggggatttcacagtaaggataaaatacagggctgggctcacgcctgtaatcctagcactttgggaagccaaggtgggaggatcacttgagcccaggattttgagaccagtctgagcaacgtaacaagaccctgcctctactaaaaataaaaaaaaattagctgggcatggtggttcacggccgtagtcccagctattcaggaggctaaggtgggaggactgcttgagcgtgggtggtggagggtgcagtgattgcatcactgcactccagcctggacaacagagcaagatcctgcctaaaaaaaaaaaaatacagcttagatctggggcctactagctttgagttgagggaacaaaaatgaacacacaggacaactagagaacaattaagcatcagattgtatggccccaactgtctaagtttcaaggaagaactctaaacttagtgagtggcgtggcctgggcggaatgtttcactgaggaaggacttgagccagggaagttttagatctgctacccctaagcttcccatccctccctctcttgatggtgtctcctctatctgattcttccccaggtgctcctggagctgttggtgggaatatacccctcaggggttattggactggtccctcacctaggggacagggagaagagagatagtgtgtgtccccaaggaaaatatatccaccctcaaaataattcgatttgctgtaccaagtgccacaaaggtaggggcaagtggaaacggtgaatgccctcaggtctggggtgctgcttctttctctgcttcttccagttgttcttccctaactttgctgtctctcctgggctgggattttctccctccctcctctcctagagacttcagggaatcggccctggctgttgtccctagcatggggctccttccttgtgttctcacccgcagcctaactctgcggccccattcacaggaacctacttgtacaatgactgtccaggcccggggcaggatacggactgcagggagtgtgagagcggctccttcaccgcttcagaaaaccacctcagacactgcctcagctgctccaaatgccgaaagggtgagtgtgcacaggcaggagagtcaggcgggtcttgagtggtgtgtgggtgcctgtctatgtgcaggctggtgggtgtgggcaggaaggtgtgtgttttggtgggacactgcatggatgtgagtgtgtattacagagacacacacttaggggtatgtcaggaaggggatgcagggacaggaggatgcaggactcataccccatcttctcccctcaccagaaatgggtcaggtggagatctcttcttgcacagtggaccgggacaccgtgtgtggctgcaggaagaaccagtaccggcattattggagtgaaaaccttttccagtgcttcaattgcagcctctgcctcaatgggaccgtgcacctctcctgtgagcgcagctctcctgaggccaagccctctccccaccccaggggttggccccttccccatgcggtggcacttcctttccttccccctcctgtattctgtgggtctgacaaccaactcctctctggccgcccccaccctgtccctcgtcacttcctctgtcctgtggggtgggggtgcaggcgcttctcctttagctgtgccgcacttctccctacaggccaggagaaacagaacaccgt

SEQ ID NO: 3615 - DNA, 6000 bp, Homo sapiens
aaaggggcccttggaccggcagtcgggagtctggggttctctgttggctctgcctcctggcacattgggtttctggacctcagttttctcctctataaaaccgggcagttgggtgggcacggtggctcacacctgtaatcctagcactttaggaggctgaggtgggcagatcatttgggcccaggagttcaagacctgcctgtgtaacatggtgagaccctgtctctacaaaaaatacaaaaattacccaggcgtggtggtatgcacctatagtcccagctgcttgggaggctgaggtgggaggattacttgaacctgggaggtcgaggctgcagtgagctgcgatggtaccactgcactccagcctgggaaacggagcggaccctcaaaacaaaaacaaaaatgaaaaacaagcaaacgaagaaataaaaaaacctagggggttgtagtcgatgatctgtaaggtgagttataattgatgtattggaatatttaggaaaagggcactgggaatatgctaggaacacctgatggaggtatctttatttccacggcagcttcgtggatacgtctcattgattctcatggcatcactttccccatgtaggtgggcagacattgttacccctgtttaataaacaaggaaccaacagaggcttaggagaggagttgcctgatgtcgcatgattggtggcagagccaggatcaacagtggggcagggtggggggacctggccaggcagagactggatgagacctggggtgaggaatggcaggcacccagtcagggcagaaaacgagggttgggacttactttgagttttggattggatcagtaaattcccaagaaagagggagactaggaggctagtgaagaactctggagtaaaggggaggattactaagggacatggagtacctatcatgtgtcggacgcttatctatatctctcccatctgaacaaatccttacaggaaccccaggagacaggttatctccactctgcaaattggaaaacagatccagacagtttcagttatgtgtctgagaagttcatttatgtgtccaagacacattcttagctaaaaagctaagcattctgaattggaacccagagaatttgactcccagactctggatcttttcactgctgtgatccatctgggaaaggctagtgatgtgggcaaggggcttattgccccttggtgtttggttgggagtggtcggattggtgggttgggggcacaaggcagccagatctgggactcctgtgcttgtgactggactacaaagagttaaagaacgttgggcctcctcctcccgcctcctgtggcctcctcctccagctcttcctgtcccgctgttgcaacactgcctcactcttcccctcccaccttctctcccctcctctctgctttaattttctcagaattctctggactgaggctccagttctggcctttggggttcaagatcactgggaccaggccgtgatctctatgcccgagtctcaaccctcaactgtcaccccaaggcacttgggacgtcctggacagaccgagtcccgggaagccccagcactgccgctgccacactgccctgagcccaaatgggggagtgagaggccatagctgtctggcatgggcctctccaccgtgcctgacctgctgctgccactggtgagaccagggacaaagggaagagtgggctggtgggcgaggcaccttccggctggcgtgggccctctccgggagggggccgagcctctcctgcccgggcctggtcctggcgccagcctcaggcctgcaggtcctaacctcagccactgccagtgtggggttccccattcatccgccttttggagtaggggctgcgctgaggcaggggaatgggagaagtttgaaagggagagagtaaaaggaagccctggcccctgacagcggtggaagtttgtgggcggccaagggaatgtgggcaggagataggcccagggtggggcagatttggcggggaaaagaagggagtgggagtaggaagattagtgctcggggagtccagacggttctgaattctgtccctccggtcagctggctggcctggagggtgttgggccgtggggaggcgaggctgcctgtggaacttggtggagcacaccctgtagggcaggattttggcggctggtgaagtgggggagtgagttgaggagtggggatgggctggtgtggtgggtttgggatgctcatggtgggaggtatttgagaatgggctgggacactggatggggcagggcaacccagtggacagtgtccccagtgccctggccaagccccggcctctcacctggggacattctttacccttttgcctgctgctaggcaggtagccgctgtgggactgagccttcccagggagctagtcctacccccacctggtcagtgtccctgggcctgtcctccagcttcccctccccgctgcttctcacagacctaaacaacaatcccttggtttcttattctacagttcagtttggggaagttggtagaaagttgttttcgtcactggaaaatgtccctttctctggcctcagccttgtttcaatgtatccttgatcgtcctccacgtcttggtccgggaatcatcctgttcagatgtcctgggcccatctagtcaggcagattttccctgccctgcccggcctctgaaggctgcgcctacctcccctctctttagtgccttatactcttcctctcctaccattcctttcttccagcaatctccccagactctcctcagacttctcagagcctctttttttgaaatcttttctcgctaatcctccttcccctcctctctgctccgctctggtcccggccccaggtccccaggcagcacgtctctggtcagggtctcactcttcttcttctgcctcctcctgcctccttagtcccacccgctcttcccttcttcccactgtccttcccccacggtctccccaccagccagctgccctgacatcctgcttctgttttctgtttgggggcggcccctggctccctcacatacctcctgcatgaacaagagcagcttatataacctaaccttccatgccttcgtttctttatctccaaaatgggtgtcacagtcttgacctcatactgttgttttgaagattgaatagactgatacatgttaagtgttcatttgatttattaagtgtgcgctctgggctagacactgtgataggtgctgggattacagcagagaacaaaatccctgcccacagctttgacagtccatcaggggaataggttgtagcaaatagaaagcactcaataaagtttttatattgctgtgactagtagtaattactgggtggctacctgtgttgggaaaacagagggtaaaggtagcctgaacaggtaaagggaagtgcctgcgtcctggggtgcttcagcccaggtgggattatgtctcctaagggacagaagcctggcctggagctggaggaaagggaaaacaaagggaatgcaacatccttctgaatttctcaccattcagtgggcaatgcagagctcacagtgtgtgtgtgtgtgtgtgtgtgtgtgtgtgtgtgagagagagagagagagagagagagaagtggggtaggggagtagggaagaatgatacaggagagactgtggcaaagcaaacaggattttgctgctctcaaagagcttacagcctagtaaccaagatggcttacagtgaaaaatgatttcagagcaatcccgaggaaaatatccacaaatgcattgtgatgtggtgtcctggagcaccagttgggaggaggaggaactggggaaggaggtgagccttagtccactgcctttccttgcttagcaggtctcagctcctgcgctcagctccagaaaattcaggagcttccccacgctgcttcagtgtccttcactgtgcaactgcagcactccctgtatagatctcagtgcctacaactgactgtctttgactcaagtgagagctcttgagagcacgagctgtgtattatccacctcagcatccctagcacccatacgggacctgtcacattaactgtgccccttaactatttgctgaaggaattaaggaacaagagatgtgtcagatgggatggcggagggaaagcctcatagaaaagtggatgtggagctgacatctgaagtcactgcctgtcagggtagctataaaggagggaagcagagttggatactgatgtgaggaagaggagaggaatggagagatgggattttgtgttgatgggcagggtggcaggaagccagacaccttggttcgggagtggaaaaaccatgttgagaaacactaagaaatgtgaatgggagaattagagggagtgggggagaggatggaggaagagtgttgaatatggttccaggtggaggaattcattcattcgtttattcagaagctgttctcctagggcacattctgtgcccagactgtgattagaagtgaggtgaggcatctcagatgggtgctgtggttcatgcctgtaattccagcacttcaggaggccgaggtgtgtggattgcttgagtccaggagttcgagaccagcctgggcaacacagcaaaaccctgtctctacaaaaaatacaaagattagcggggcatggtggggcgtgcttgtcatcccagctattcgggagactgagctcgggaggacggcttgggcccaggaggtggaggttgtagtgagccctgaccacaccactacattccgtcctggtggtgaaggttgcagtgagctatgattgtgccactgcacttcaccctgggtgacagagtgagaccctgtttcaaaaaaaaaaaaaaaaaagtagtgaggcatctgtggaagtcttcagatcatttccatgaccatggaaatgctgtttggagccaggccctggagatggagaggaaggttcacacacttgtgcgtgcaagttaaagcctgaatgaagatttaaaaagtgtgtaggacggatgggagcaggagagaggctagaagacacttgcaataacccaggtgtgaggcaacccaggaatgcggagaggaccgagagatcacagggggaggcctcgcaagatgaactgacacatgggatggcggcagggatagggatggggccctggggagagagcgtggcaagttctcagcattcgtccgggaagtcgatggtgtgtcatttgtctaggtgaggagatggatgaattccgtctggggcatgttaagggtcagggaaatggtcatgtggaagggtgcgcctaccaagctggaggagaggtgctgcaacttctttctgcctttgtatcattcagacacactgtgttcactcatcagtggttctcaaaaggagaggagcacaccagactcttaagtaagggtgtgtgtgcttgtgtgtggggaggtggggggatggtctgaaaactctcccccggagataaatatattcctaccaggggtgctgtctcctcacctccctctttgggaatcactggcttctactagagtggaagacagatgtatcattagatcgatcagttgatccatatttatctgctcccagtctggaggtctggttctgggagctgagaggacaccaggggaggataagacactttctgaccaagacattttttgatctctcatcttataaggttcgtggtcactttggggagatcatatctgtcacccaacataaccatattatgataagagccaaaagtagatagggtcagttcacgtgcttcgagttcacagggactatgggtctaaggagccggggtggaggaaacagacatcgtcaatggtggcttcacgggagggagatgggatctcaactgggcccttggaggagaagctgccacgacctcccccaacaccttgacattaaatgaacagacacatgaatgagggggaaaggaagactaattgggtccctgcaaggtggctggatcg

SEQ ID NO: 3616 - DNA, 6000 bp, Homo sapiens
tttcttgtacatttgtgtctcccttcccaactagactgtaagtgccttgcggtcagggactgaatcttgcccgtttatgtatgctccatgtctagcccatcatcctgcttggagcaagtaggcaggagctcaataaatgtttgttgcatgaaggaatgtctggagagctggatggggcatcatgaagagggtagggggtggatacaagtcatcacccaagcttctgggaggtcctggggctgggagagggtacagactcccatgccccttggctgcaccatggaagtgaccattcttcacggggtcttaagagggacaaacgttctggtgaattcctccatgggtgttgctgagcgtctgctatgtgcccatggccatgttagggtggaagggggaagacatgatgccaccccttcaggggacctacctcacagtgtttggggagacttgccctctccactgtctgaacctccttttccttctctgctttagtcaccatcatcactaacctccccatcccccactccacttgctgagtcccacttaccacctggcggcaatgaaccctcatctgcctgcctcccatcagctgtctggtggtggtggaggatgatgaggctcaggccagtttctcctggaaatgcaaagccttatatggtcttattggtacatgattgcagagaggggcacagggaatcctcccagctttagtaaaggagagactgaggtccagggaggggctgaaggatgtgcgagtggaactccagctctccgatccttgtttctcccccactccagcataagacctggaatccagaagtgaccctttctcaccatctttggggattctgtccctgccaccttagtcttattcatcttaattgcagtctccctgttctgaggagccaaaggaggaagagactttcggggaaagaggagaaggagctggtgacaggggtaggaaggtagacagggtcatgacctgaaacggtgtgacgactgctgacttccctttcctggacttgagctgatgaaggggaaatggtgttgcagtctcctctgtcagagccctcaggtgcagacggcacttgtctgccccctcagcctcagccttggcccacctggtccccagtgccctctcctctggctggggcaggaggacctgccggacatagccagatgtattacggatgactgcagtcagctcccccaggctcctgcttctcttgcctcctgcttttttccccagagctgtctccttatctccattcacttgtctatgggttactcctggaccctggggttaggagttggaatcaggctgttagcgataaaagggttcaagttgactcattttccttatcaggcttagtagttgaagtgacttgctgagcttcataattcttagagaacctgccatgaacccagctccctttctatgactcaccctgccaccctgtgacacatagagtctgaatggcaggtctggggctagaacccacgtcatctggacttggagtccagtgaccctttgggttaagcatgtgtgtgtgtgtgtgtgtgccatgatgcgggaggaaggtccctgctctctgtagctgttttcttcatcctttgctctacaagccctaacagccgattctgtcatccctagtctgcccctctcctgtttctccatctcctctgaccatgatttttttctgtccctggagggatgatggtctcattctcacctcctccacgaaacgtgttagcttttcatattcctagatccactcacttctcatcatctttttttttaaacaaaattttattgaaaaatgtaatatgacgtgtcaaagttgtaaagttattgagtaaataagcatgtatcctaaatattgaaaaatattctccttttgtaccaggctatgtgtcacggctttggcgctttgcacagactattagaaataccttataacattaaaaataggacattgaggccgggcgtggtggctcatgcctgtaatcccagcactttgggaggccagggtgggtggatcacctgaagtcaggagtttgagaccagcctggctaacacggtgaaaccccgtctctactaaatacaaaaaattagccgggcatgatggcacatgcctataatcctagctactcgggaggctgaggcaggagaattgcttgaatccgggagtcagaggttgcagtgagccgagattgtgccactgcacttcagcctgggcaacaagagtgaaactctatcaaaaaaaaaaataggacattgaagttggtttctttttttgatacagagtctcgctctgtcacccaggctggagtgcactggcaggatctcggctcactgcaacctctgcctcctgggttcaagcaattctcctgcctcagcctcctgagtagctgggattacaggcacgcgccaccacgcctggctaattttgtatatttagtagagacagggtttcaccatgttggtcaggttggtctcgaactcctgaccttgtgatccgcccacctcagcctcccaaagtgctgggattgcaggcgtgagccaccgcactctgctttttttttttttttttgccgccctctcacataccatactcccctgtatcacttatccttctgaagttgttattaatcattaatacaactagctgggcatagtggtgtgcgatggtagtcttagccactcggaaggctgatgtgggaggctagcttgaggccagtagttctaggttaggtgagctatgattgcaccattgcactttagcctgggtgagagcaagctcctgtttcaaaaaaaaaattaattgctaccacttactaaatgcttaatatatggcaaacacttgccaaacactttatatgcttgatttaagcatcaagctagctctgtgaagggtaccagcaggtttcccattttttagatgagcagaccgaggttcttctcgctgcttcatactggaaacttgcacttgattctgaggctcctgcttcttcaagaacactgctttgggttcgcttctcctgtccctggggtctccctttgtgatggtggtgagctgcttcctttctgaatccagcttcaaccctacagttctccagaagctggacgatggggtggagtaaagtcagctccccccgcagtgagggacactgaagctccattctcatctgcggatcacagaggggaagccaggaagagccaggggacggtggacttggggctgggaggtcatctcagagggataaggggtgaggagctctggtttcaagttccaaagccctaggacctccctcttctctgtctgcctgcatttctagcagcctcagcagctgcaggcccttgggcggggctggatgtagggaaggtcattgtaccaagaagatagttgggtaaatgtggtacctttgttgtaggattctcttgggagatgtctgcatcaatgaggatggcataaagtaaccagagtcaggatgtggggtctgactcagtgacagaaaaagtggcagtgtgtctctcatagccaaaggggcccttggaccggcagtcgggagtctggggttctctgttggctctgcctcctggcacattgggtttctggacctcagttttctcctctataaaaccgggcagttgggtgggcacggtggctcacacctgtaatcctagcactttaggaggctgaggtgggcagatcatttgggcccaggagttcaagacctgcctgtgtaacatggtgagaccctgtctctacaaaaaatacaaaaattacccaggcgtggtggtatgcacctatagtcccagctgcttgggaggctgaggtgggaggattacttgaacctgggaggtcgaggctgcagtgagctgcgatggtaccactgcactccagcctgggaaacggagcggaccctcaaaacaaaaacaaaaatgaaaaacaagcaaacgaagaaataaaaaaacctagggggttgtagtcgatgatctgtaaggtgagttataattgatgtattggaatatttaggaaaagggcactgggaatatgctaggaacacctgatggaggtatctttatttccacggcagcttcgtggatacgtctcattgattctcatggcatcactttccccatgtaggtgggcagacattgttacccctgtttaataaacaaggaaccaacagaggcttaggagaggagttgcctgatgtcgcatgattggtggcagagccaggatcaacagtggggcagggtggggggacctggccaggcagagactggatgagacctggggtgaggaatggcaggcacccagtcagggcagaaaacgagggttgggacttactttgagttttggattggatcagtaaattcccaagaaagagggagactaggaggctagtgaagaactctggagtaaaggggaggattactaagggacatggagtacctatcatgtgtcggacgcttatctatatctctcccatctgaacaaatccttacaggaaccccaggagacaggttatctccactctgcaaattggaaaacagatccagacagtttcagttatgtgtctgagaagttcatttatgtgtccaagacacattcttagctaaaaagctaagcattctgaattggaacccagagaatttgactcccagactctggatcttttcactgctgtgatccatctgggaaaggctagtgatgtgggcaaggggcttattgccccttggtgtttggttgggagtggtcggattggtgggttgggggcacaaggcagccagatctgggactcctgtgcttgtgactggactacaaagagttaaagaacgttgggcctcctcctcccgcctcctgtggcctcctcctccagctcttcctgtcccgctgttgcaacactgcctcactcttcccctcccaccttctctcccctcctctctgctttaattttctcagaattctctggactgaggctccagttctggcctttggggttcaagatcactgggaccaggccgtgatctctatgcccgagtctcaaccctcaactgtcaccccaaggcacttgggacgtcctggacagaccgagtcccgggaagccccagcactgccgctgccacactgccctgagcccaaatgggggagtgagaggccatagctgtctggcatgggcctctccaccgtgcctgacctgctgctgccactggtgagaccagggacaaagggaagagtgggctggtgggcgaggcaccttccggctggcgtgggccctctccgggagggggccgagcctctcctgcccgggcctggtcctggcgccagcctcaggcctgcaggtcctaacctcagccactgccagtgtggggttccccattcatccgccttttggagtaggggctgcgctgaggcaggggaatgggagaagtttgaaagggagagagtaaaaggaagccctggcccctgacagcggtggaagtttgtgggcggccaagggaatgtgggcaggagataggcccagggtggggcagatttggcggggaaaagaagggagtgggagtaggaagattagtgctcggggagtccagacggttctgaattctgtccctccggtcagctggctggcctggagggtgttgggccgtggggaggcgaggctgcctgtggaacttggtggagcacaccctgtagggcaggattttggcggctggtgaagtgggggagtgagttgaggagtggggatgggctggtgtggtgggtttgggatgctcatggtgggaggtatttgagaatgggctgggacactggatggggcagggcaacccagtggacagtgtccccagtgccctggccaagccccggcctctcacctggggacattctttacccttttgcctgctgctaggcaggtagccgctgtgggactgagccttcccagggagctagtcctacccccacctggtcagtgtccctgggcctgtcctcc

SEQ ID NO: 3617 - DNA, 6000 bp, Homo sapiens
tttttgacattcatgcaaattaatctacatggctacatgcaggtggttcatattcattcctctaaagcattccattgggtgaatatacaacaatttattatccaactaccgttctctccttccttcctccctccttccctcccttcttttcctcctttctttctttctctttctttctttcttcctttctttctttctttctctttctttttccttccttccttccttccttcctcccttcctcccttctcctttcttttcttcctttcttttgcagtggcgcgatctcggctcattgcaacctccgcctctcaggttcaagctattcttatgcctcagcctccagagtagctgggactacaggcatgtgccaccacgcccggctaatttttgtatttttagtagagatgggggtttgccgtgtagcccaagctggtctcaaactcctgggctcaagccatctgcccgcctccatctctcaaagtgctgggattacaggtgtgagacaccacagcagcttgcttgcttgcttgctttttcttttggaattacaaacagtagtgcttgaatatttttgcatatgtctcctggggcacaggtacaagcactcttagtgcatttacctactgatgaaaatgatggattttgctggtttaattttttataaggaggtgatatgaatattgcttttataattaaatttcaattttaaaaaagaagagaaagcagttgggatgggctcatagagtgaaagggcagggaacggtctatgagaccagaagaagacaggcaggaagggcggctgagccatgcctgcaggctgagcatggaaggtactgtgagtacacagtcagatcggcacaggaaatgagcacctttgaggcgtccactctgtaggggctcgtcaacagtagactggggttcaggagacctgggttctctcccagctctgccacacagggaaagtcatttcacctctgcaccccacggttctgatagctgtagagtgagagggtaaagccgaaggttggaatcattttccagccctgctggcttgaaatcctaagctggctggagcagtaagatgggggctccccataggcccacaggaccttctacctagaagccaggaggaggggacaggagcccagataggaaagaactctgtctctccaagacccaaaaaatgactaaaagtaatgactgggcctcaccccagtaagtcagtagtggtggtgcggtggttaacagccagctctcggagtgggaagcccttgatctatggcgtttgctgatgtatgtggttgtaagtattcctactatggccagctggccaatttcaagctaccaacgagtaacctcacaaaattcctgaaaatgtaaggatcgggctttggctaggcagtactagcaggctccagcacggccctaggaaggaagctgccctaagagctcaggctcagacaccgcaccacggactagcaggggaaacaaaggtcttaggtccctctcagggctcacagtcatgaggctcagaaacagctggggaaagtggggcgtgcctccctccccgccacagggaggatcaccagactggctccatgagccatttccctcatctggtgagcaagggaagtcactcagaagagcaagaatggcccagccacccagcacggtggctcacacctgtaatcccagcattttaggaggcaaaggtgggcagatcacttgagctcaagagttcgagaccagcctggggaacatggtgaaactccatctctacaaaaaatacaaaaattagctgggcttgcagggcacggtggctcacgcttgtaatcccagcactttgggaggccaaggctggcggatcacctgacatcgggagtttgagaccagcctgaacaacatggagaaaccctgtctctactaaaaatacaaaattagctgggcgtggtggcgcatgcctgtaatcctagctactctggaggctgaggcgggagaatcgcttgaacccaggagggagaggttgcagtgagcagagatcgcgccattgcactccagcctaggcagcaagagcggaactccatctcaaaaaaaataaattaattaattatctgggcttggtggcgcatgcctatagtcacagatattttggggggctgaagcaggaggattgcttgagttcagaaggtcgaggctacagtgagccgagatggtgccactgcactccagcctgggtgacagagcaagaccctgtttcaaaaaaaaaaaaaaaaagcgagtagaaaatgccaggggcagttgggcacagtggcttacgcctctaatcctagcactttgggaggccaaggcgggtggatcacctgaggtcaggagttcagaccagcctggtcaacatggtgaaaccccgtctctactaagaatacaaaaattagccaggagtggtagcgcatgcctgtgatcccagctacttgggaggctgagacaggagaattgcttgaacctgggaggtggaggttgcagtgagccaagatcttgccactgcactccagcctcggtgacagagtgagactccatctcaaaaaaagaaagaaaaaaaatgccaggggcccaggagcctactgtgagaggaaacgtcccgtcgccttgtgaaatcatgattctgcgtgatgaagaaccgagtatgaataatacatacagagcagacatatcgcctatgcacagcttgttcaatttagtgagtcgttctgtctctttcacactcctttggtttcgttcccaggttaactagctgttccctcaaccccatttcttgggacttgcagcctcaaataccaaggaagagagaggaggaatgaatatttattgagtacccaaacaagacaagaccagacatttcatttctattgttacccttaattgtcccaacatgctgcaaagtgcacgacactatcctcaagcagatgaggactcagtcaagaggttgtgggacatgctggacatgatgcgggtagtagccggcagagaggcatttggaccaccaacctgtctggttgtgaaagtcaagctctctccacctatcccaggatcctcctgtctcagtgggtttgggccctggaaccacccttcagttccaggtcaagactgctcccttcatagcgacatctttccctcactgtttctccccttgcctggtatctgagaaattccttttataggtcttgcccttccctggctacatagactgagagtcagaaaacctcagtagtcagcactcaaaccttacacctaacaatttacataatatctgatttcagaaattagctttacctcagatcaaaattaatcctataaatcacagatcacgtaaaatcacaagtgtgacaagtcccaaaaaagaaagtgtgaccaggctcacgccttgtaatcccagcacttcgggaggcaaaggtgggaggattgcttgagcccaggaatttaaggccagcctgggctacatagcaagactttgtctctacaaaaagataacaaataaaaaaaaaaattagccaggtgtggtcccagctactcgagaggctgaggcaagaggattgcttgagcccaggagattgaggctgtattgagctgtgttgccactgcactccaacctaggcaacagagggagaccctgtctcaaacaaacaaacaaacaaaaaaagaggctgggcatggtggctcacgcctataatcccagcactttgggaggccgaggcaggcggatcacgaggtcaggagattgagaccatcctgatgaacacggtgaaaccctgtctctactaaaaatacaaaaatattagccgggcgtggtggcgggcgcctgtagtcccatctacttgggaggctgaggcgagagaatggcctgaacccaggaggcggagcttgcagtgagccgagatcgcgccactgcactccagcctgggtgacagagcgagactccgtctcaaaaaaaaaacaacaacaacaacaaaaacataactataggtctgtgctcggccaggtatgggggtaaaatttatattacccacgtggttgggaaacctcctttatccccaagaaaagaacatgaaaactggtctcaagccagtgacatccctggggcgtctgacaaaagcaactgcaaaaacactgaagggacatgtactcaacccaaccaccaaggtggcccacagaaaaagcctgttgaatatgcactttctttccctctctctctctctttaatggagatggggtcacactccgtcaccggcactggagtacagtggggtctcactgtgttgcccaggctggtctcaaactcctggcctcaagccatcctcctgcctcagcctccccaagtgctgagattatggtgtgagccactgtgatgggcttgaagatgcacttttgattcaaaattagaaaacacacctgaaacagtctgacctagagaaactttttcatctaagtcagtcataaaaatcaaatatttgtgcttagactcagatcaatctatataaagtgttgaggaaagttttttaataacaaaacacattaaatcatattgctcttactaaatatattactgttaatgttttattatattgtggaaaattttgttacctattaatattttaatgagagcaactagatcttttatgttgcaaataagtaaatgtgatatctttaaaaattgtttttcctatccttatctcattgtttttattttacttttattattttgttgttgttgcccacactggtctcaaactcctgagctcatcgatcctcccacctcagcttcccaaagtgctgggattacaggcatgagccactgcatctagccaatctcatcctttttatgtttctgtatgtgactatgtaattcgatctcatcctttagaactttagaatgtctacatatacttacatagaacctatttgagtatataatatatgattaatttatttaaaatattgtggggagtcgagccagcgtcgccgcagtgatgtcgttggagagcaagcaattcctgacggagctgaccagactctaccagaagtgccggacgttgggcagcgtctatatcaccttgaagaagtatgatggtcgaaccaaacccattccaaagaaaggttctgtggagggctttgagccctcagacaacaagtgtctgttaagagctatcgatgggaaaaagaagatgagcactgtggtgaactccaaggaagtgagtaagtttcagatggcttattcaaacctactgagagctaacatggacgggctgagaagagggacaaaaagagcaaaaggaaaaagaccaaagcagcagcacagtaaagggcacaaattccctgctttcaccaattaaccactgaattgctattttttcctttggtttttacttttggccacatagctaggtttctggttcccccacagtaggtgttttcacataagattagggtcctcttggaaagaatagttgccatgtttacagggtagttgtggtaagaatctagtttattttacatgtgactaattggtctgtgctgcatggttatatactcctggattatagattagaagtctccgaagtcacctctgtgaaaagcaagctatcattaaacatgtctgtttatcaatcaatcaataaataaaatattgtttatttggggatacatgctgaaaatcattttattgatggggtacaaaataaaaaaaaaaagcagagactactgaattagaaatatacattttttcaggcacagatggaacatttacaaccacatactaggccatagagcaaatctcaaacaaatgccagaggattcatatgtattcattttctacagctgctacaacaaattaccacaaacttagtggttgaaaacaacccaaatgtattatgttacagctctacaggtcagaagtctaaaacaggcctcaccaggctacaatcagtgatggcaggtacagctgcc

SEQ ID NO: 3618 - DNA, 6000 bp, Homo sapiens
tgtagctaaagtagatcttcaagggaagtttatagccttaaatgcatatattagaaaataagaaatttctaaattaattaagcatccaatacattagaaaaagaatggcaaagtatgccgggtgcagtggctcacatctgtaatcccagcactttgagaggccaaggtaggtggatcacttgagctcaagagttcgagacaagcctgaccaacatggtgaaaccacgtctctactaacaatacaaaaattagccaggtgtggtggcgcacacctgtaatcccagctactaaggaggctgaggcaggagaatcacttgacctcaggaggaggaggttgcagtgagccaagatcatgccactgcactccagcctgggcaacagagcaagacagcctaaaaaaaataataataataacagtgaaacagctacacacaagcaaatcaagttctaccaggctttcaaggaacagattatccctattgtatataatctgtatataaaaaaataaaaaatagcacttaaaaaacaagtggtcaaagcaaggaaaatagaatcgtgtcacagaaaccaagggaagtaataattctcatgtaggtggagagctgccagatcccacatatctctgttaaactttgcttcctggatgaggcactccctaccccttaaatccccctattaggggtatagacacctatattgcaccccaactctctccttcatagcaataatgaccattactaactaattttaattttgttttgttttttgggttttgtgagatgaggtcttgctctatctcccaggcttgagtgcactggcatgatcatggctcactgcaacctcgaccccctgggctcaagtgatcctcccacctcagccttccgagtggctgggaccacaggcacgtgccaccacacccagttaatttatttttattatgtgtagagacggggtgtcactctgttgcccaggctggtcttaaactcctaggctcaagcaatccttccgcctcggcctcccaacgtgactgggattccaggtgtgagccgcctcacctggccaattttacatttgtctttgagattatatgatcgatgtctgactctcacactggtgtgtcaactccgtcagggcagaaaccacatatttgtctgtttgtttttcatctttgtgccccattacttggctggttcctaacacaaaatgaatgtgcaaaaaacgcttgtcaaatgaatgaggaggtctaaggggccttgagccctctgacgtttccattttataattgtggacagagccgctacagcacaaagctgagctggaccatccaatgtttagccagtgccttacgtgctaggagacactgggagctgtgctgggcttctgaggagtgggcagaggctggaaatacccatagttggtcagtctcctgtgtcacccagactggggaggtgcagaaatgaaaattacagagctgcgaggacccagaacctcattaatgagcttaactcactgtcctgaccaggtggcctctcaaagccttgctgggaaggaggctttaaggtggtgggggcagcagtgctggtggtggtcatcgaagaaagtgggagtcggggaggaagcaatggggagcaggggacaaagagggccagacaaactcagagcttcaggtgatgagactcaggaagcctaagtcaggaacagtgattgcggacatctttgtcccataacagaacttcctcctaaggaaaggtcttgcagagactggtcctgctgagcgctttaacaggttattgattcataaaaattggagaaaaaagacaaagtctgccacacctaacagccttctgtttagagctggtttagaggaaactttaagcaagtcttgtgtccaacaatttgggcctgaggcagggtacaggtaagggaacagacaggagacacggaggcaagaacaagactttagctgaaagagaaatcagagccagaggcagccacaagaacacccaacctactggaactcatgcaggtggacagcctgcccaggacttgccctgagtgggaagcaaagagcatcttatctagattttaaggagcagggtgcccctggctgacatctaggctacagtcactgggccaggtggagggttggtcaggccctctcaaaagtcatgagaggccaggcacagtggctcacgcttgtaatcccaacactttgggaggccgaggagggcagatcacttgaggccaggagtttgagaccagcctggccaacatagtgaaaccccgtctctactaaaaatacaaaaaattagccgggtatggtggccggtgcctataatcccagctacttgggaggctgatgtataagaatcgcttgaacctgggaggcaaaggttgcagtgagctgagatcatgccactgcactccagcctgggcaacagtgagagaccctttctcaaaaaaaaaaaaaaaaaaaagaaccaaaaaaagtcatgagagtcctcagagttctcaagaagggctgctgtgggcctgtttctggaaaggaaagaaaagcagggagctgttgagaaaataccatatgtttttatgccccagccaggcatgggggagaggctgaccccaaaagagaaagtggttgtgtgagatttcaaggaagatgtcagcgggctgcatcccagggcctctagacaaaaggaagggcccagccaggcatggtggctcgtgcctgtaatcccagcactttgggaggccgaggcaggcagatcacctgaggctaggtgttctggtccagcctggccaacatgacaaaaccccatctctactaaaaatacaaaaaataagctgggcgcggtggctctcccctgtaatcccagccaaggtgggcggatcaacttgaggccagcctgaccaacgtggcaaaactccatctctactaaaaatacaaaaattagctgagcgtggtggcacgcacctgtcatcccagttactcaggaggctgaggcgtgagaatggcttgagcctgggagacagaggttgcagtgagctgagattgcatcattgcactctagcctgggtgacagagtgaaatggagggaggaaaaaaaaaaaaaaggaaggtcccgtccagggagccagcctaggatggggaaggctcaccagaagtggatgcaaagagtgctggagatgagctcattctatttgcctaggaaagaaaaacgtccagaaacctggccttcctcctcttggccgaggccctccaggaaagccaggcagaccctgctcctgctctgaccccctggagaagtgatatgtagaaaagaggagatgggctttggcccagaggacagcagcgttaggctagtgagcagttcccagtcggttcaaggttgctaggctcagcgaactgcaagtccctgttcgacaagtttcttcctaaaggtccccagttcctcatgattcttctgagggtctcatccaccctcccagggcctgcagtcagctagccaccccactgccccatgcctgcagtgaacacatttaccacaacctggaaatggctggtgacagaaaagtcctcacggccacaacactctctgcggtgggaattcaggtgccttgcctgatggtgacaaagctggttttgcataaacagctctctgaatcacacccaaatgtggcttctgacttgagtggacccccatgaagagctgcagagggggctgggaaaagacaagagaatggagaaaatgaggagaaaggaaactacagagtgagatagagaacatatctgacaggtgtgaccacagcagtgtgacatttatgaacagtgtggaaacaacggcaaagcccctaaattaaaaacttcctggggaaataagccactccacatatcggttgctgaggaaagagtggaggaggctgttgacccgtgtgtgtccccatgactcaaagagggaaaagtctagctgtttccaatatcccgaaatcagtcttgctgggagaactgggaaaataaaaaagagatgacccccgtaggaagctacctttaatcccaagtgcccaaggctaggagagaagatgctccaggcgatccaggacaccagtgactgacacagccagaggtgggaaaggggaggataaagatggcacaaaagtgaggagtgagcaagggtctgagagggaaggccatgtgggcagtaggtggcacccacatcagagactgacatgaggattaaaggagagcataggtgatcggtcagagtgtgacagaagagaggcagctctacaccccttgcttgcaattctgagcattctgtagcaaactcgtttggccatcaaaccagacctcaattgagacaaggctatttaagcttcctcccagttggtgtaaatattcaatagttttgctgcagaaatgttgcgtttgattatgagactaccccaactccccaagggtgttttgtggtgctggtttctgtataaacctgaaaaattctgaattccaaaacttatctgacccccaaagtttcagataagagcttgtggacctgtgctcaattctggttctccttccttctttcaactgttgtctgtgaaaggagggatgcaggtatgggagacaggagtcctgcgaattcgtctgtaaactgtggacgggggggtgggtgggggggggtaacgtgggcacctttgtgcacaagtgcatgaataggaggggtgagcaactgtgtgtccatcacctttttgtcaaagaagcaggagtcagtgggctacgtgcttcatgagcaggagaggcggaaactaaggaaggctcatgtgttggaggaagcatgtttgaagagcagcaggtctcacagagtttgctctttaatactctccccagcacacggaaggggaagggggtggaggttgctgctatgagagagaaaaaaaaaacagccacaatagagattctgccttcaaaggttggcttgccacctgaagcagccactgcccagggggtgcaaagaagagacagcagcgcccagcttggaggtgctaactccagaggccagcatcagcaactgggcacagaaaggagccgcctgggcagggaccatggcacggccacatccctggtggctgtgcgttctggggaccctggtggggctctcagctactccagcccccaagagctgcccagagaggcactactgggctcagggaaagctgtgctgccagatgtgtgagccaggtaagagggggccttggtaagggccaggtgagtggcgaaagagagaggactggggttaatacagtaaataggcgcagggtgagactgagctcaagcaaggagggaaatcctgcagctgtggggaggcaccaccttgaagagggcagagaaccagcccttctcaggccttgatcccttaccctctcctcccaggaacattcctcgtgaaggactgtgaccagcatagaaaggctgctcagtgtgatccttgcataccgggggtctccttctctcctgaccaccacacccggccccactgtgagagctgtcggcactgtaactctggtgaggtgggcaagggtgtgtaggtggggacgatggacaagcatctgggggagcaaggctggtgacgggtttgggggtgcaaggaggatgacggggccaaagctttggccttcttcaaggctcacagcaagtggagccaatgctgggaaatgcggcaccctaggtggggcatgaattaacgtgggcagacatctagtattccaggaaagggataaatagaatttgagggattggtgagaacgggtctatggataggatcaagacaataaaatgagagaagtggctctatgaccccagatttcgggcaagcaacccccaaccaataaactgactgtgttcccagagtgcacatgtgcaggttggccattgggaatttggaatacatctttctaaggaaataacaaagcaacccaataggtaacaacctttttttgcacaaa

SEQ ID NO: 3619 - DNA, 6000 bp, Homo sapiens
tcattctggagctagttttgatttgtccattatgatatctgcaaggatgaggataggaagtgataatgtgaaaaattctaagggaaagcctcagaggaaaataaaacctggatggcaccaaaaaagaggggatagaacaaaagttgattgtgatactttgccctatagggatggatatgggtaaggatgaattccatgacacagcagaatagaaagaactaatcaatagcattctcagaagttgaattattcagatctctctctcgtattcacagggaggagtagaagatgaagtgaccctctccgcctatatcaccatcgcccttctggagattcctctcacagtcactgtaggtaccaccccattcctctgctgaaggagagttctggatgcaatgaaactgctgacctgctgtctgaaatactatcctattaaaagcaaagcatcagctttctttctatgcaatgccagtgcttcccagatctacagagaatttggtcagcccattaagaaaggtttaaattttcccagtaattcccctaggctatttaccaccaccactcaaaaaagaatcttaaagatgtatcttttgaatgtgagaataacagataaaaataatattatatctattgataagaatgaggaatcgttggaaaaatgcgtttgaaaaacttctgtgctgtgatccgtgtatttgcctgggaatgctaatatgcctgtttacatagcttagttcccttcttgttctgccttcacagcaccctgttgtccgcaatgccctgttttgcctggagtcagcctggaagacagcacaagaaggggaccatggcagccatgtatataccaaagcactgctggcctatgcttttgccctggcaggtaaccaggacaagaggaaggaagtactcaagtcacttaatgaggaagctgtgaagaaaggtgagagcacacctgagatccttctcctggcccatcctctgtatcaagaactgcatggcaaaaatccctcactcctacctcctgtgatccctgtctcctctcttcttttctatatatcatatatattttgtccatattgcatcttataaaatctaggatttcttaatcaaatcagaaatcagaagacaagaggccgtgcagatgcttctcaattacgatggggttatatcctgacaaactcattgtaaagtctaaaaaatcttaagtgggaccattgtaagtcagggaccatctctatagtatgctggtaagaagagcattctctggagactagctccaaaatgtgctacctatgtgagcttgggaaagtcattaacttccttgtgtttcagttccttcatcagtaaaatggggataataatagtatttacctcacagagctgttgtaataaatgaattggtacacgtaaaacacttagtagagtacatgtcacatagcaaatcctataaaagtactagttattacaattaacatatcagttctcaatatatgcccaacccttacctggtacattatataaccttaaacataagaaaataatcatggaagtaactccttgaatgaattctggtattttaagcccatttcataagaccaataatgttgaccaatctactcatattcacacagtacttctacatataccatggtctatatgagcggttgaagaaatagaaaataaaatgcaaatcacaagatgtccattaaaacagtctacctttttcctttgacagccattaattcttcttaaaatgtattgagaaatattttataatagatatacaaaagggcataagctataactagaaaacactgtacaactctctcatagattaagaaatagaaaattaccgacatgggaaaaataaatcccttgtgtatcactaccacctccagaggcaatcattatcctgaatttgtcgttacaattccatggatttccttatatttttgctgcatatgtatccctaactaatatttagaatcttcacatgtgtttcatcttgagagaaacaagatttttatttctctcttattcaagaaacaagagaaacatttttgaatatttcagcagcttagttttttgtttgtctgctttttattttctaagttcaacactatgttgatgaagacccctatacaagtatgtgcagagtcagctcattaattttcactgctgcataatatattacagtctataaattagtcataatttacacatcgagtttctcctcatggattttttttatgttttgctattaaaaaaaatgctgcaatgaatactcatgtgcctgttttcttgtgcatctgtgtttctccaaattatgctttgagaagcataatgactgattagtgggctaagcacatcttccccattgctgaatattgccaaagagcagttggcttcccacagcagtgtatattggttcccattgtttcacatccatgtcagcctttggtatttcaaggattactgtattttttttttcaatttaatgagtagaaactctactatttcatgtgatctgtgatcctcacaagaaactgataaagacacactttataggaaatgtaacaaactccagctatagtctaatataacatcataaataggaaatagccagactcaatgagacaactgctgtgccatttctttctcccaccaacccgactatagcaacgatttgaaaacatagataggcataggcttctgactccagcatcaatatctgccttagctgggctaaaacacaccaaattcagatttacatgaagggaaaagcatctacatacagtacaggggattataatgggcatgcaattctcatttcagcactggcttgggtactttcaccttgaattaaatataaatatgtaggcacttataaatatctttttctcatctttaagacaactctgtccattgggagcgccctcagaaacccaaggcaccagtggggcatttttacgaaccccaggctccctctgctgaggtggagatgacatcctatgtgctcctcgcttatctcacggcccagccagccccaacctcggaggacctgacctctgcaaccaacatcgtgaagtggatcacgaagcagcagaatgcccagggcggtttctcctccacccaggttggtgatttgccaaaaccttttatttcaccttcaggtagcaaaagatttgaatgaaaaagaaacaaacacatccaagaagaaaaaaatacagatgacagtaacttgaaatgaggaaaagttttcagtatccaaggataatggaaataaaagcaaatcaaagtcaaagagggccaaaaggaaatgctcagaatcccggcaccccatcgctgtgttattatccatctcctatttcccataacaacactgccttcctcaagcagcagtggagcaccagcagaatgaaggagatgtctcctgccattctcctgaaagctctagggtctctttcaaactgttcaaaggaactctactcaaaatccaacaacctctcctcgcaaatctctccattcttaggtcccctttaataggcttttctcaaaactacacattttgtgcttcccctattcaccttttttttttttttttttttaagacagagtcttgctctgtcacctaggctggaatgcagtggtgcaatctcggctcactgcaacctccatctcccaggttcaagcgattctagtgcctcagcctcccaagtatctaggattacagtcatgtgcaatcatgcctggctaatttttgtatttttagtagagacgaggttttgccatgttgcccaggctgatctcgaagtcctgagctcaggcaatccatccgccttggcctcacaaagtgctaggattataggtgtgagccactgcgtccagccccctattcacctcttaatacacaaacatttattcatcaggagcataaagaactgtctttattcatccaacctcctaaatctagctatataaccatgtatctgaacaattcattgatatgtacacagcagaaagttttatcttcagagaattcggatgtttgcttatataccctaaaacggaaaaaatgtgacaaaatggcattccatcctatttccattgtattaatcttttatcatatgaatgaaaaaaactaagtaattttgttaaaggttatcattcatttattagaaacatattatttgaaggaggccaagcaggtttaatgttgttgaggatacataccagcagacattcactgggaacaggaaatcatccaataaaaagggaaagccaaataaaaatgtcattaaatccagaagataattataatactcatcttttatttcttttggagaaactgaagcatgactctgctcatggctgcaaagaaccttgggttctctccaggacactgacctcagcaactgagcaaagtttaatatgggagagagccagactgaactttgcttgagtggtggcagatatgagcatagttgtcaagaaagacatgttagcaaatagctgatgccaataactgattgccattcacatgttttccacattccatgtcccacatatacttacagagagaaaaggatcaattttctgataaataaaataaacatgtagggcatacagtccaaggtagatatgtgaatgttatggttcttcaactatctaaagattataatcaatcttgaaattacagctcctatatttaagtagtgagggaagtaggaaatcaaagtccctcacatgggtctttgaaaaatatctcagccctcaaagccttataatgcccaatgggttctctcactcatctgtctctaacaggacacagtggtggctctccatgctctgtccaaatatggagcagccacatttaccaggactgggaaggctgcacaggtgactatccagtcttcagggacattttccagcaaattccaagtggacaacaacaaccgcctgttactgcagcaggtctcattgccagagctgcctggggaatacagcatgaaagtgacaggagaaggatgtgtctacctccaggtgagactcttgggcaggtgaggacaggacagatgaggacagcagctgttctctctgagaagtcctaactcagaaaacaatgggacagatcagagaaagggttagggacgtggacaggaattctgggaaagggcaaaaaactgattttgtctttgatgttctatagacatccttgaaatacaatattctcccagaaaaggaagagttcccctttgctttaggagtgcagactctgcctcaaacttgtgatgaacccaaagcccacaccagcttccaaatctccctaagtgtcaggtaagaccttctgactctatcacctaatcctaagaataaccaccagtcttctttcgggaactcctctttaagtaaagcagtgcaacagtagatatttgcactattcacaaaaaatgcaatgtattctcttaagttgatataatttctcaatgatggggtttacattgtccatccaggatctactattgtgcaacctcattgtttaaagggtaataatttccctcaataacaactaagtaaatattacccattgcctctgacctgaattccttgttatgtaatgaaatcctatattattcttgctttattgaagatagagatgaagaattattgaaaagtttgaatagaaggaagtagtgactccttagttagaattcctactggcaataataaatctcaggttatatatgatataattaatttggggggaagatacacttatatgcatcaatatttaaatagctgcagatctgataaaaaactctctctccacaaacatattattacttggttggagatactattcaggaaaaaagttaggacaaaatacatgtaacaaataactggcacacatcaaaaagaatgagatcatgacctttgcaggaacatggatggagatggaggtcattatccttggcaaactagcacaggaatggaaaacca

SEQ ID NO: 3620 - DNA, 6000 bp, Homo sapiens
ccagtaggtttcagttacttatgaatattatgatacattagcttagctcactatgatagctgctatgatagttaatttcaaggaaactatccactctccaacctccaataaaatatttaaggctcagaaactcctaatctatgacaacaaaatttaagaaatgtcacaagagaagccaaggtacttttagtaatttctccaccctcagcatgcacattaatccattgtgctgtttcgttaatcttcctttccaggttaccagagacagttgaactacaaacactatgatggctcctacagcacctttggggagcgatatggcaggaaccagggcaacacctggtaaggaaagaacaattttttgagcttctttttgtgtgccagctcttttacatgtattacctcaattatattcacagcaacactatcagatatgtattatcagaccgatggtttgttatactagataaatccaccaagattagcaaggtaatcagaagaaaacctgatatccaaatacatgttatgttaggcttgtttccaaaatggatcctattaataatgtaccaaggttttctttctgaaatggctattctttctaaagtagctaccataaccatgagttttaaaatgatattgccagtgaacatatataacttccagataaaccatgttaacttcagcttatattgtcacattctaagtcattcagcttgacttggaatgaattcattaataagaggaaacaattgagaaggaaacagtaatataaaacatttttttaaatccctaaagtaaagcaatattaaaatttactgcatgtaagagctgcatgtgagaagattctgtcatctgcagaaggaaatctctaaagataagagagatttaaagccttactcaagtaactaacaaaaataagtacattcaaattacttgaatgtaaatttgttcaaccattgtggaagacagtatggcgattcttcaaggatctagaaccagaaataccatttgacctagtaatcccattactgggtatatacccaaaggaatataaatcattctactataatgacacatgcacatgtatgtttatcgcggcactatttacaataacaaagtcatggaactaacccaaatgctcatcaatgacagactggataaagaaaatgtggtacatatacatcatggaatactatgcagcaataaaaagaaatgaaatcatgtcctttgcagggacatggatgaagctggaagccatcagcctcagcaaactaacacaggaacagaaaaccaaacaccacatttctcactcataagtgggagttaagcaatgagaacacacggacacagggacaggaacaacacacaccagggcctgttgggaggtgtggggtgacgggagggaactaagcggatgggtcaataggtgcaagaaaccaccatggcacacgtatacttatgtaacaaacctgcacgttctgcacatgtatctcggaactaaaataaaattaaatatactaagactccctgtggcaaagagagagttagcaaggaaatactacatctagcagattaatcaggcagactaaagattaatcaaggagataagctctctaagtacacaagaattttgttagctaactcacatcatatgaagcctgttgctgtgaagtggttataaaaccattttgacaacataaacatcatgattgcttcctccctggtcaggctcacagcctttgttctgaagacttttgcccaagctcgagcctacatcttcatcgatgaagcacacattacccaagccctcatatggctctcccagaggcagaaggacaatggctgtttcaggagctctgggtcactgctcaacaatgccataaaggtgaatcattctggagctagttttgatttgtccattatgatatctgcaaggatgaggataggaagtgataatgtgaaaaattctaagggaaagcctcagaggaaaataaaacctggatggcaccaaaaaagaggggatagaacaaaagttgattgtgatactttgccctatagggatggatatgggtaaggatgaattccatgacacagcagaatagaaagaactaatcaatagcattctcagaagttgaattattcagatctctctctcgtattcacagggaggagtagaagatgaagtgaccctctccgcctatatcaccatcgcccttctggagattcctctcacagtcactgtaggtaccaccccattcctctgctgaaggagagttctggatgcaatgaaactgctgacctgctgtctgaaatactatcctattaaaagcaaagcatcagctttctttctatgcaatgccagtgcttcccagatctacagagaatttggtcagcccattaagaaaggtttaaattttcccagtaattcccctaggctatttaccaccaccactcaaaaaagaatcttaaagatgtatcttttgaatgtgagaataacagataaaaataatattatatctattgataagaatgaggaatcgttggaaaaatgcgtttgaaaaacttctgtgctgtgatccgtgtatttgcctgggaatgctaatatgcctgtttacatagcttagttcccttcttgttctgccttcacagcaccctgttgtccgcaatgccctgttttgcctggagtcagcctggaagacagcacaagaaggggaccatggcagccatgtatataccaaagcactgctggcctatgcttttgccctggcaggtaaccaggacaagaggaaggaagtactcaagtcacttaatgaggaagctgtgaagaaaggtgagagcacacctgagatccttctcctggcccatcctctgtatcaagaactgcatggcaaaaatccctcactcctacctcctgtgatccctgtctcctctcttcttttctatatatcatatatattttgtccatattgcatcttataaaatctaggatttcttaatcaaatcagaaatcagaagacaagaggccgtgcagatgcttctcaattacgatggggttatatcctgacaaactcattgtaaagtctaaaaaatcttaagtgggaccattgtaagtcagggaccatctctatagtatgctggtaagaagagcattctctggagactagctccaaaatgtgctacctatgtgagcttgggaaagtcattaacttccttgtgtttcagttccttcatcagtaaaatggggataataatagtatttacctcacagagctgttgtaataaatgaattggtacacgtaaaacacttagtagagtacatgtcacatagcaaatcctataaaagtactagttattacaattaacatatcagttctcaatatatgcccaacccttacctggtacattatataaccttaaacataagaaaataatcatggaagtaactccttgaatgaattctggtattttaagcccatttcataagaccaataatgttgaccaatctactcatattcacacagtacttctacatataccatggtctatatgagcggttgaagaaatagaaaataaaatgcaaatcacaagatgtccattaaaacagtctacctttttcctttgacagccattaattcttcttaaaatgtattgagaaatattttataatagatatacaaaagggcataagctataactagaaaacactgtacaactctctcatagattaagaaatagaaaattaccgacatgggaaaaataaatcccttgtgtatcactaccacctccagaggcaatcattatcctgaatttgtcgttacaattccatggatttccttatatttttgctgcatatgtatccctaactaatatttagaatcttcacatgtgtttcatcttgagagaaacaagatttttatttctctcttattcaagaaacaagagaaacatttttgaatatttcagcagcttagttttttgtttgtctgctttttattttctaagttcaacactatgttgatgaagacccctatacaagtatgtgcagagtcagctcattaattttcactgctgcataatatattacagtctataaattagtcataatttacacatcgagtttctcctcatggattttttttatgttttgctattaaaaaaaatgctgcaatgaatactcatgtgcctgttttcttgtgcatctgtgtttctccaaattatgctttgagaagcataatgactgattagtgggctaagcacatcttccccattgctgaatattgccaaagagcagttggcttcccacagcagtgtatattggttcccattgtttcacatccatgtcagcctttggtatttcaaggattactgtattttttttttcaatttaatgagtagaaactctactatttcatgtgatctgtgatcctcacaagaaactgataaagacacactttataggaaatgtaacaaactccagctatagtctaatataacatcataaataggaaatagccagactcaatgagacaactgctgtgccatttctttctcccaccaacccgactatagcaacgatttgaaaacatagataggcataggcttctgactccagcatcaatatctgccttagctgggctaaaacacaccaaattcagatttacatgaagggaaaagcatctacatacagtacaggggattataatgggcatgcaattctcatttcagcactggcttgggtactttcaccttgaattaaatataaatatgtaggcacttataaatatctttttctcatctttaagacaactctgtccattgggagcgccctcagaaacccaaggcaccagtggggcatttttacgaaccccaggctccctctgctgaggtggagatgacatcctatgtgctcctcgcttatctcacggcccagccagccccaacctcggaggacctgacctctgcaaccaacatcgtgaagtggatcacgaagcagcagaatgcccagggcggtttctcctccacccaggttggtgatttgccaaaaccttttatttcaccttcaggtagcaaaagatttgaatgaaaaagaaacaaacacatccaagaagaaaaaaatacagatgacagtaacttgaaatgaggaaaagttttcagtatccaaggataatggaaataaaagcaaatcaaagtcaaagagggccaaaaggaaatgctcagaatcccggcaccccatcgctgtgttattatccatctcctatttcccataacaacactgccttcctcaagcagcagtggagcaccagcagaatgaaggagatgtctcctgccattctcctgaaagctctagggtctctttcaaactgttcaaaggaactctactcaaaatccaacaacctctcctcgcaaatctctccattcttaggtcccctttaataggcttttctcaaaactacacattttgtgcttcccctattcaccttttttttttttttttttttaagacagagtcttgctctgtcacctaggctggaatgcagtggtgcaatctcggctcactgcaacctccatctcccaggttcaagcgattctagtgcctcagcctcccaagtatctaggattacagtcatgtgcaatcatgcctggctaatttttgtatttttagtagagacgaggttttgccatgttgcccaggctgatctcgaagtcctgagctcaggcaatccatccgccttggcctcacaaagtgctaggattataggtgtgagccactgcgtccagccccctattcacctcttaatacacaaacatttattcatcaggagcataaagaactgtctttattcatccaacctcctaaatctagctatataaccatgtatctgaacaattcattgatatgtacacagcagaaagttttatcttcagagaattcggatgtttgcttatataccctaaaacggaaaaaatgtgacaaaatggcattccatcctatttccattg

SEQ ID NO: 3621 - DNA, 6000 bp, Homo sapiens
gtgggcttcctgagaagtgtctttgaatacttgagaatcttgatgtctacccctggttctcttccccgctgtagaaactgtgaccccagggaactcctctctatctggcattgtgctaacctaaaggagtgggaacaatgacatggtcaaagtgagaccattcttcctactcttctaatttgtcttcactcagttctatgaacaatgtaggtgtcctagacttgtttccaagtattggggttttcaaaatagattttctgatctgtggatagcagctagttggactttctgtggagggaggaagatcctgagactttctagtccatcatcttgctttattctgaattttaattgaactacaaaacgaaaatcctcctctttattacctaaatgcatttatacttccaccaggatacatttccatagtgttatatttgccatcatctgttaccatcaaagtttttaattttaatttttgccaaaaatttagaaaaaaaaattttgctgttgttttaatttatattttcttaattacaaggatgaccttatttttgcatgtttattaattgcctttataatctttggctatttgtcttttgagtagtttttttctgactcagttgtatgacactaattctttatctgttgaatatgttgcagatattttctttcacttggtcatttttttaactttgtttatggcatctgtttttttacaaaagttttaacattaattttatgagaaagggaagataactgctacatttttcatttgtatataattcaccaatactaaaattgtagtaaatgtatgttcatcagtagcagttattttattttcagtgagtcaagcattttattttgcttagccatttgtcctttaactatgcttatggcttttttttaagaaacattttaatatgaattttatgaggaagggattcagtatgaaaataaataccatacttctctcattttcatttcatataatttaccaagattaaaatggaagtaaatgtatgttcatgagtagtaattattttattttcaatgcatcaaatactgttcgtcttcacttccttaccctcaattttctaggttttccataaaaatactatctttgtatatgaaatttgaagaaagaacatagcattattatagaattcaggaccttttgtgggtaattttacttatgtatacttatagggctttgttgttggtgttttctccatacaactgttgagtaaggaagttggtggtgggaactaaatagatcatcttgtgataaccgtcttgtgtcagccatcagatgacagcaactgaatcacaacatcaccaggctcttacaatttgttgtcttatttggcatgcgattctacataaattactgaaaagatcattgaagaagaaattctgaaaatcacaggaaaccagtagcccatttttaagatatttatatattactgttgtattaaaggcggacaacttttcaggaggagtttaggtataaggcatagtcctagcttctgggtcatagagctgtttagaaagatataatgcagaaataattttcatatgtctgatttgcttatttctctaggtggtgaggtttctgaagaattatccctgaaactgccaccaaatgtggtagaagaatctgcccgagcttctgtctcagttttgggtgagtctccagcccctagtggatccgggcattaacagcttctattatactatttttatttcccataaatatttactaaaaataatactataattttaacttctttcttctcttcttctttgggcttgtttattgctttcaatcatacttctatccctggaagaatcatccttcctaaaaattctcaatttctaagctcaactaattatttctgcttaatgactttgatagatgataatctccaagctttatgacttcccatctctcccattctctaggagacatattaggctctgccatgcaaaacacacaaaatcttctccagatgccctatggctgtggagagcagaatatggtcctctttgctcctaacatctatgtactggattatctaaatgaaacacagcagcttactccagagatcaagtccaaggccattggctatctcaacactggtgagtgattacttgagtaagggaaaacttgaatgttatttcaactggatttcccagtaggtttcagttacttatgaatattatgatacattagcttagctcactatgatagctgctatgatagttaatttcaaggaaactatccactctccaacctccaataaaatatttaaggctcagaaactcctaatctatgacaacaaaatttaagaaatgtcacaagagaagccaaggtacttttagtaatttctccaccctcagcatgcacattaatccattgtgctgtttcgttaatcttcctttccaggttaccagagacagttgaactacaaacactatgatggctcctacagcacctttggggagcgatatggcaggaaccagggcaacacctggtaaggaaagaacaattttttgagcttctttttgtgtgccagctcttttacatgtattacctcaattatattcacagcaacactatcagatatgtattatcagaccgatggtttgttatactagataaatccaccaagattagcaaggtaatcagaagaaaacctgatatccaaatacatgttatgttaggcttgtttccaaaatggatcctattaataatgtaccaaggttttctttctgaaatggctattctttctaaagtagctaccataaccatgagttttaaaatgatattgccagtgaacatatataacttccagataaaccatgttaacttcagcttatattgtcacattctaagtcattcagcttgacttggaatgaattcattaataagaggaaacaattgagaaggaaacagtaatataaaacatttttttaaatccctaaagtaaagcaatattaaaatttactgcatgtaagagctgcatgtgagaagattctgtcatctgcagaaggaaatctctaaagataagagagatttaaagccttactcaagtaactaacaaaaataagtacattcaaattacttgaatgtaaatttgttcaaccattgtggaagacagtatggcgattcttcaaggatctagaaccagaaataccatttgacctagtaatcccattactgggtatatacccaaaggaatataaatcattctactataatgacacatgcacatgtatgtttatcgcggcactatttacaataacaaagtcatggaactaacccaaatgctcatcaatgacagactggataaagaaaatgtggtacatatacatcatggaatactatgcagcaataaaaagaaatgaaatcatgtcctttgcagggacatggatgaagctggaagccatcagcctcagcaaactaacacaggaacagaaaaccaaacaccacatttctcactcataagtgggagttaagcaatgagaacacacggacacagggacaggaacaacacacaccagggcctgttgggaggtgtggggtgacgggagggaactaagcggatgggtcaataggtgcaagaaaccaccatggcacacgtatacttatgtaacaaacctgcacgttctgcacatgtatctcggaactaaaataaaattaaatatactaagactccctgtggcaaagagagagttagcaaggaaatactacatctagcagattaatcaggcagactaaagattaatcaaggagataagctctctaagtacacaagaattttgttagctaactcacatcatatgaagcctgttgctgtgaagtggttataaaaccattttgacaacataaacatcatgattgcttcctccctggtcaggctcacagcctttgttctgaagacttttgcccaagctcgagcctacatcttcatcgatgaagcacacattacccaagccctcatatggctctcccagaggcagaaggacaatggctgtttcaggagctctgggtcactgctcaacaatgccataaaggtgaatcattctggagctagttttgatttgtccattatgatatctgcaaggatgaggataggaagtgataatgtgaaaaattctaagggaaagcctcagaggaaaataaaacctggatggcaccaaaaaagaggggatagaacaaaagttgattgtgatactttgccctatagggatggatatgggtaaggatgaattccatgacacagcagaatagaaagaactaatcaatagcattctcagaagttgaattattcagatctctctctcgtattcacagggaggagtagaagatgaagtgaccctctccgcctatatcaccatcgcccttctggagattcctctcacagtcactgtaggtaccaccccattcctctgctgaaggagagttctggatgcaatgaaactgctgacctgctgtctgaaatactatcctattaaaagcaaagcatcagctttctttctatgcaatgccagtgcttcccagatctacagagaatttggtcagcccattaagaaaggtttaaattttcccagtaattcccctaggctatttaccaccaccactcaaaaaagaatcttaaagatgtatcttttgaatgtgagaataacagataaaaataatattatatctattgataagaatgaggaatcgttggaaaaatgcgtttgaaaaacttctgtgctgtgatccgtgtatttgcctgggaatgctaatatgcctgtttacatagcttagttcccttcttgttctgccttcacagcaccctgttgtccgcaatgccctgttttgcctggagtcagcctggaagacagcacaagaaggggaccatggcagccatgtatataccaaagcactgctggcctatgcttttgccctggcaggtaaccaggacaagaggaaggaagtactcaagtcacttaatgaggaagctgtgaagaaaggtgagagcacacctgagatccttctcctggcccatcctctgtatcaagaactgcatggcaaaaatccctcactcctacctcctgtgatccctgtctcctctcttcttttctatatatcatatatattttgtccatattgcatcttataaaatctaggatttcttaatcaaatcagaaatcagaagacaagaggccgtgcagatgcttctcaattacgatggggttatatcctgacaaactcattgtaaagtctaaaaaatcttaagtgggaccattgtaagtcagggaccatctctatagtatgctggtaagaagagcattctctggagactagctccaaaatgtgctacctatgtgagcttgggaaagtcattaacttccttgtgtttcagttccttcatcagtaaaatggggataataatagtatttacctcacagagctgttgtaataaatgaattggtacacgtaaaacacttagtagagtacatgtcacatagcaaatcctataaaagtactagttattacaattaacatatcagttctcaatatatgcccaacccttacctggtacattatataaccttaaacataagaaaataatcatggaagtaactccttgaatgaattctggtattttaagcccatttcataagaccaataatgttgaccaatctactcatattcacacagtacttctacatataccatggtctatatgagcggttgaagaaatagaaaataaaatgcaaatcacaagatgtccattaaaacagtctacctttttcctttgacagccattaattcttcttaaaatgtattgagaaatattttataatagatatacaaaagggcataagctataactagaaaacactgtacaactctctcatagattaagaaatagaaaattaccgacatgggaaaaataaatcccttgtgtatcactaccacctccagaggcaatcattatcctgaat

SEQ ID NO: 3622 - DNA, 6000 bp, Homo sapiens
ccattaaattttgtgcttttgtgtttttgtattattaattaggggccttttgtttcagcttaaagaactcccttcagtaattcctgaaggcaggcctaatgttgacgactcccttagcttttagtttgtctgggaatgttttatttctccctcatttctgaaagacagctttgctggatgaagaattcttgattccatgttgtttttatttttgttttccttcagtactttgaatatattattccactctccctcagcctgccgggttactgctaaaaatccatggatagttgtattggaattcctttgtatgtgatatgtttctttatcaccttctgcttttcagaatttttttttgtctttgatttttgatagtttaattattgtgtcttagtgagcagttctttcatttgaatttcactggagacctctgtgcctcctgtacttggatgctagcatctatcccctaattagggaagttttcagcccttactgcttttttttttttctgattctatactcttttttttcattattgctttaaatgtgctttatagtctctttcttcttcttctggactttctttaatgcaaaggtttgatttcatgatgatgtcccataatttccataggctttcttcattcttttgtctttctgctcttctgcctggataattccaaatactctatctttgagctcactgattcttctgcttgatcaagtctgctgttgagcttactttgaatttttaattttagtcattgtattctttatttccaggatttctatttggtttctttttgattgtttctatttattttttattttacaatattagctaagttgcagataattgtttctatttcttttttttttatactttaagttctagggtacatgtgcacaatgtgcaggtttattacatatgtatacatgtgccatgttggtgtgctgcacccattaactcgtcatttacattagctatatctcctaatgctatccctcccccatcccctcaccccacaacaggccccggtgtgtgatgttccccttcctgtgtccaagtgttctcattgttcaattcccacctatgagtgagaacatgcggtgtttgtttttctgtccttgcaatagtttgctgagaatgatggtttccagcttcatccatgtcccaggaaacaacaggtgctggagaggatgtggagaaataggaacacttttacactgttggtgggactataaactagttcaaccactgtggaagtcaatgtggcgattcctcagggatctagaactagaaatacatttgacccagccatcccattactgggtatatacccaaaggattataaatcatgctgctataaagacacatgcacacatatgtttattgtggcactattcacaatcgtttctatgtcaaacttctcagtttgttggtgtattgttttgcaaatttcatttaattttgtatttatatattcttgtagtccactgaatttcttcaagaggattattctgaattctttgtcagtgatttcatagatctttatttctatgaggtcaattttttgagcttggccagtttcttttggaggtgtcatcattccttgattcttcataatcctgtgtccttgcattatttgtgcatttgaggagaaagccacttcttctggtttttataggtattctttggcagggataaaggtttgctatttagtctagcctataattctggaaagatcagttggtgacaaccttgagcaggcagagttttcatgggttccctagttggctgggccactgcctttgctcttatgtttggtagggccactggttgggccttgctctctggcaagatcactgttttgtctctgctatctggtggagctgctggctgggtactacaatggcctctggtcaggccagtcacaagatgtgttgcctggctggatgattctgctatttgggacctgaagttaggcagggtcacaatccgggctgtgaggttaggtagagttgttgcttgggatgggcagaaataaatactatacttcttagatgtgcataatagaggattgctaccccacccttgtgaatggagccatggagtgaggttttggctgagttgagctaccctttagactcccaggtcaagcatatttaacccctacacttctatgaaatacacagaggtggtgtctgctacctgggtggggtcactggcataacctctgaagctgggcttacagactggccatctggaaactcaagctaggttgaacttcccaacatgcttctgaaagtgaccagctcagttttgcagatgggctatgcagttggctggtatctctgaatgggtgccatagctggcagaaacacagaagcactaccaaaatccacatgctggtcactgtgagctctgtccttctttgtttctacctgacctcattacttcctgtgttcccggtgaaatgagaccagagtgggcttcctgagaagtgtctttgaatacttgagaatcttgatgtctacccctggttctcttccccgctgtagaaactgtgaccccagggaactcctctctatctggcattgtgctaacctaaaggagtgggaacaatgacatggtcaaagtgagaccattcttcctactcttctaatttgtcttcactcagttctatgaacaatgtaggtgtcctagacttgtttccaagtattggggttttcaaaatagattttctgatctgtggatagcagctagttggactttctgtggagggaggaagatcctgagactttctagtccatcatcttgctttattctgaattttaattgaactacaaaacgaaaatcctcctctttattacctaaatgcatttatacttccaccaggatacatttccatagtgttatatttgccatcatctgttaccatcaaagtttttaattttaatttttgccaaaaatttagaaaaaaaaattttgctgttgttttaatttatattttcttaattacaaggatgaccttatttttgcatgtttattaattgcctttataatctttggctatttgtcttttgagtagtttttttctgactcagttgtatgacactaattctttatctgttgaatatgttgcagatattttctttcacttggtcatttttttaactttgtttatggcatctgtttttttacaaaagttttaacattaattttatgagaaagggaagataactgctacatttttcatttgtatataattcaccaatactaaaattgtagtaaatgtatgttcatcagtagcagttattttattttcagtgagtcaagcattttattttgcttagccatttgtcctttaactatgcttatggcttttttttaagaaacattttaatatgaattttatgaggaagggattcagtatgaaaataaataccatacttctctcattttcatttcatataatttaccaagattaaaatggaagtaaatgtatgttcatgagtagtaattattttattttcaatgcatcaaatactgttcgtcttcacttccttaccctcaattttctaggttttccataaaaatactatctttgtatatgaaatttgaagaaagaacatagcattattatagaattcaggaccttttgtgggtaattttacttatgtatacttatagggctttgttgttggtgttttctccatacaactgttgagtaaggaagttggtggtgggaactaaatagatcatcttgtgataaccgtcttgtgtcagccatcagatgacagcaactgaatcacaacatcaccaggctcttacaatttgttgtcttatttggcatgcgattctacataaattactgaaaagatcattgaagaagaaattctgaaaatcacaggaaaccagtagcccatttttaagatatttatatattactgttgtattaaaggcggacaacttttcaggaggagtttaggtataaggcatagtcctagcttctgggtcatagagctgtttagaaagatataatgcagaaataattttcatatgtctgatttgcttatttctctaggtggtgaggtttctgaagaattatccctgaaactgccaccaaatgtggtagaagaatctgcccgagcttctgtctcagttttgggtgagtctccagcccctagtggatccgggcattaacagcttctattatactatttttatttcccataaatatttactaaaaataatactataattttaacttctttcttctcttcttctttgggcttgtttattgctttcaatcatacttctatccctggaagaatcatccttcctaaaaattctcaatttctaagctcaactaattatttctgcttaatgactttgatagatgataatctccaagctttatgacttcccatctctcccattctctaggagacatattaggctctgccatgcaaaacacacaaaatcttctccagatgccctatggctgtggagagcagaatatggtcctctttgctcctaacatctatgtactggattatctaaatgaaacacagcagcttactccagagatcaagtccaaggccattggctatctcaacactggtgagtgattacttgagtaagggaaaacttgaatgttatttcaactggatttcccagtaggtttcagttacttatgaatattatgatacattagcttagctcactatgatagctgctatgatagttaatttcaaggaaactatccactctccaacctccaataaaatatttaaggctcagaaactcctaatctatgacaacaaaatttaagaaatgtcacaagagaagccaaggtacttttagtaatttctccaccctcagcatgcacattaatccattgtgctgtttcgttaatcttcctttccaggttaccagagacagttgaactacaaacactatgatggctcctacagcacctttggggagcgatatggcaggaaccagggcaacacctggtaaggaaagaacaattttttgagcttctttttgtgtgccagctcttttacatgtattacctcaattatattcacagcaacactatcagatatgtattatcagaccgatggtttgttatactagataaatccaccaagattagcaaggtaatcagaagaaaacctgatatccaaatacatgttatgttaggcttgtttccaaaatggatcctattaataatgtaccaaggttttctttctgaaatggctattctttctaaagtagctaccataaccatgagttttaaaatgatattgccagtgaacatatataacttccagataaaccatgttaacttcagcttatattgtcacattctaagtcattcagcttgacttggaatgaattcattaataagaggaaacaattgagaaggaaacagtaatataaaacatttttttaaatccctaaagtaaagcaatattaaaatttactgcatgtaagagctgcatgtgagaagattctgtcatctgcagaaggaaatctctaaagataagagagatttaaagccttactcaagtaactaacaaaaataagtacattcaaattacttgaatgtaaatttgttcaaccattgtggaagacagtatggcgattcttcaaggatctagaaccagaaataccatttgacctagtaatcccattactgggtatatacccaaaggaatataaatcattctactataatgacacatgcacatgtatgtttatcgcggcactatttacaataacaaagtcatggaactaacccaaatgctcatcaatgacagactggataaagaaaatgtggtacatatacatcatggaatactatgcagcaataaaaagaaatgaaatcatgtcctttgcagggacatggatgaagctggaagccatcagcctcagcaaactaacacaggaacagaaaaccaaacaccacatttctcactcataagtgggag

SEQ ID NO: 3623 - DNA, 6000 bp, Homo sapiens
ttaaaaatgacttggtactaccattttgttgttttctggttgttttgcttctttgttcctcttttgctgtcttcctttgtggtctgatgttctgtagtggtatgatttgaatcttttaaaatttttgttctgtgcttctattaaagatttttgccttgctgttactatggggtttacagtcaatttcaagctgataacaacttaactttgcattctttcactcccccacacacattttatgtcgttgatgtcagaatttacatattttgtaatgtgtatttattgacaatttatttttagctatgcttgttattaatattttgtcttttaacccttgtactagagataaaattgctttaaataccatcattacagtcatagagtattttgaatatggctctatattacttataccattaaattttgtgcttttgtgtttttgtattattaattaggggccttttgtttcagcttaaagaactcccttcagtaattcctgaaggcaggcctaatgttgacgactcccttagcttttagtttgtctgggaatgttttatttctccctcatttctgaaagacagctttgctggatgaagaattcttgattccatgttgtttttatttttgttttccttcagtactttgaatatattattccactctccctcagcctgccgggttactgctaaaaatccatggatagttgtattggaattcctttgtatgtgatatgtttctttatcaccttctgcttttcagaatttttttttgtctttgatttttgatagtttaattattgtgtcttagtgagcagttctttcatttgaatttcactggagacctctgtgcctcctgtacttggatgctagcatctatcccctaattagggaagttttcagcccttactgcttttttttttttctgattctatactcttttttttcattattgctttaaatgtgctttatagtctctttcttcttcttctggactttctttaatgcaaaggtttgatttcatgatgatgtcccataatttccataggctttcttcattcttttgtctttctgctcttctgcctggataattccaaatactctatctttgagctcactgattcttctgcttgatcaagtctgctgttgagcttactttgaatttttaattttagtcattgtattctttatttccaggatttctatttggtttctttttgattgtttctatttattttttattttacaatattagctaagttgcagataattgtttctatttcttttttttttatactttaagttctagggtacatgtgcacaatgtgcaggtttattacatatgtatacatgtgccatgttggtgtgctgcacccattaactcgtcatttacattagctatatctcctaatgctatccctcccccatcccctcaccccacaacaggccccggtgtgtgatgttccccttcctgtgtccaagtgttctcattgttcaattcccacctatgagtgagaacatgcggtgtttgtttttctgtccttgcaatagtttgctgagaatgatggtttccagcttcatccatgtcccaggaaacaacaggtgctggagaggatgtggagaaataggaacacttttacactgttggtgggactataaactagttcaaccactgtggaagtcaatgtggcgattcctcagggatctagaactagaaatacatttgacccagccatcccattactgggtatatacccaaaggattataaatcatgctgctataaagacacatgcacacatatgtttattgtggcactattcacaatcgtttctatgtcaaacttctcagtttgttggtgtattgttttgcaaatttcatttaattttgtatttatatattcttgtagtccactgaatttcttcaagaggattattctgaattctttgtcagtgatttcatagatctttatttctatgaggtcaattttttgagcttggccagtttcttttggaggtgtcatcattccttgattcttcataatcctgtgtccttgcattatttgtgcatttgaggagaaagccacttcttctggtttttataggtattctttggcagggataaaggtttgctatttagtctagcctataattctggaaagatcagttggtgacaaccttgagcaggcagagttttcatgggttccctagttggctgggccactgcctttgctcttatgtttggtagggccactggttgggccttgctctctggcaagatcactgttttgtctctgctatctggtggagctgctggctgggtactacaatggcctctggtcaggccagtcacaagatgtgttgcctggctggatgattctgctatttgggacctgaagttaggcagggtcacaatccgggctgtgaggttaggtagagttgttgcttgggatgggcagaaataaatactatacttcttagatgtgcataatagaggattgctaccccacccttgtgaatggagccatggagtgaggttttggctgagttgagctaccctttagactcccaggtcaagcatatttaacccctacacttctatgaaatacacagaggtggtgtctgctacctgggtggggtcactggcataacctctgaagctgggcttacagactggccatctggaaactcaagctaggttgaacttcccaacatgcttctgaaagtgaccagctcagttttgcagatgggctatgcagttggctggtatctctgaatgggtgccatagctggcagaaacacagaagcactaccaaaatccacatgctggtcactgtgagctctgtccttctttgtttctacctgacctcattacttcctgtgttcccggtgaaatgagaccagagtgggcttcctgagaagtgtctttgaatacttgagaatcttgatgtctacccctggttctcttccccgctgtagaaactgtgaccccagggaactcctctctatctggcattgtgctaacctaaaggagtgggaacaatgacatggtcaaagtgagaccattcttcctactcttctaatttgtcttcactcagttctatgaacaatgtaggtgtcctagacttgtttccaagtattggggttttcaaaatagattttctgatctgtggatagcagctagttggactttctgtggagggaggaagatcctgagactttctagtccatcatcttgctttattctgaattttaattgaactacaaaacgaaaatcctcctctttattacctaaatgcatttatacttccaccaggatacatttccatagtgttatatttgccatcatctgttaccatcaaagtttttaattttaatttttgccaaaaatttagaaaaaaaaattttgctgttgttttaatttatattttcttaattacaaggatgaccttatttttgcatgtttattaattgcctttataatctttggctatttgtcttttgagtagtttttttctgactcagttgtatgacactaattctttatctgttgaatatgttgcagatattttctttcacttggtcatttttttaactttgtttatggcatctgtttttttacaaaagttttaacattaattttatgagaaagggaagataactgctacatttttcatttgtatataattcaccaatactaaaattgtagtaaatgtatgttcatcagtagcagttattttattttcagtgagtcaagcattttattttgcttagccatttgtcctttaactatgcttatggcttttttttaagaaacattttaatatgaattttatgaggaagggattcagtatgaaaataaataccatacttctctcattttcatttcatataatttaccaagattaaaatggaagtaaatgtatgttcatgagtagtaattattttattttcaatgcatcaaatactgttcgtcttcacttccttaccctcaattttctaggttttccataaaaatactatctttgtatatgaaatttgaagaaagaacatagcattattatagaattcaggaccttttgtgggtaattttacttatgtatacttatagggctttgttgttggtgttttctccatacaactgttgagtaaggaagttggtggtgggaactaaatagatcatcttgtgataaccgtcttgtgtcagccatcagatgacagcaactgaatcacaacatcaccaggctcttacaatttgttgtcttatttggcatgcgattctacataaattactgaaaagatcattgaagaagaaattctgaaaatcacaggaaaccagtagcccatttttaagatatttatatattactgttgtattaaaggcggacaacttttcaggaggagtttaggtataaggcatagtcctagcttctgggtcatagagctgtttagaaagatataatgcagaaataattttcatatgtctgatttgcttatttctctaggtggtgaggtttctgaagaattatccctgaaactgccaccaaatgtggtagaagaatctgcccgagcttctgtctcagttttgggtgagtctccagcccctagtggatccgggcattaacagcttctattatactatttttatttcccataaatatttactaaaaataatactataattttaacttctttcttctcttcttctttgggcttgtttattgctttcaatcatacttctatccctggaagaatcatccttcctaaaaattctcaatttctaagctcaactaattatttctgcttaatgactttgatagatgataatctccaagctttatgacttcccatctctcccattctctaggagacatattaggctctgccatgcaaaacacacaaaatcttctccagatgccctatggctgtggagagcagaatatggtcctctttgctcctaacatctatgtactggattatctaaatgaaacacagcagcttactccagagatcaagtccaaggccattggctatctcaacactggtgagtgattacttgagtaagggaaaacttgaatgttatttcaactggatttcccagtaggtttcagttacttatgaatattatgatacattagcttagctcactatgatagctgctatgatagttaatttcaaggaaactatccactctccaacctccaataaaatatttaaggctcagaaactcctaatctatgacaacaaaatttaagaaatgtcacaagagaagccaaggtacttttagtaatttctccaccctcagcatgcacattaatccattgtgctgtttcgttaatcttcctttccaggttaccagagacagttgaactacaaacactatgatggctcctacagcacctttggggagcgatatggcaggaaccagggcaacacctggtaaggaaagaacaattttttgagcttctttttgtgtgccagctcttttacatgtattacctcaattatattcacagcaacactatcagatatgtattatcagaccgatggtttgttatactagataaatccaccaagattagcaaggtaatcagaagaaaacctgatatccaaatacatgttatgttaggcttgtttccaaaatggatcctattaataatgtaccaaggttttctttctgaaatggctattctttctaaagtagctaccataaccatgagttttaaaatgatattgccagtgaacatatataacttccagataaaccatgttaacttcagcttatattgtcacattctaagtcattcagcttgacttggaatgaattcattaataagaggaaacaattgagaaggaaacagtaatataaaacatttttttaaatccctaaagtaaagcaatattaaaatttactgcatgtaagagctgcatgtgagaagattctgtcatctgcagaaggaaatctctaaagataagagagatttaaagccttactcaagtaactaac

SEQ ID NO: 3624 - DNA, 6000 bp, Homo sapiens
aatctatccatttttaaaagtgagatgttgaaattccctgatattactgcattgcaacatatctctcccttcaacctttaatatttgttttatatatttaggtgctccaatgttggatatgtatagatttacaattgttatatccttttgatgaattgacccttttatcattatataatgttctcctttgtctctttgtacagtttttgactttaagtctgttttgttgaatataagtatagctacccctgctctcttttagtccccatttacctagaacatctttttccttctcttcactttcagtctatgtgtgtccttaaaaattaggtgagtctcttgtaattagcatatgtttcggtcctgtttttttaaatccattcagtcactttatgtcttttaaatggggaatttagtccatttgcattcaaggtaattattaatttaaaaatgacttggtactaccattttgttgttttctggttgttttgcttctttgttcctcttttgctgtcttcctttgtggtctgatgttctgtagtggtatgatttgaatcttttaaaatttttgttctgtgcttctattaaagatttttgccttgctgttactatggggtttacagtcaatttcaagctgataacaacttaactttgcattctttcactcccccacacacattttatgtcgttgatgtcagaatttacatattttgtaatgtgtatttattgacaatttatttttagctatgcttgttattaatattttgtcttttaacccttgtactagagataaaattgctttaaataccatcattacagtcatagagtattttgaatatggctctatattacttataccattaaattttgtgcttttgtgtttttgtattattaattaggggccttttgtttcagcttaaagaactcccttcagtaattcctgaaggcaggcctaatgttgacgactcccttagcttttagtttgtctgggaatgttttatttctccctcatttctgaaagacagctttgctggatgaagaattcttgattccatgttgtttttatttttgttttccttcagtactttgaatatattattccactctccctcagcctgccgggttactgctaaaaatccatggatagttgtattggaattcctttgtatgtgatatgtttctttatcaccttctgcttttcagaatttttttttgtctttgatttttgatagtttaattattgtgtcttagtgagcagttctttcatttgaatttcactggagacctctgtgcctcctgtacttggatgctagcatctatcccctaattagggaagttttcagcccttactgcttttttttttttctgattctatactcttttttttcattattgctttaaatgtgctttatagtctctttcttcttcttctggactttctttaatgcaaaggtttgatttcatgatgatgtcccataatttccataggctttcttcattcttttgtctttctgctcttctgcctggataattccaaatactctatctttgagctcactgattcttctgcttgatcaagtctgctgttgagcttactttgaatttttaattttagtcattgtattctttatttccaggatttctatttggtttctttttgattgtttctatttattttttattttacaatattagctaagttgcagataattgtttctatttcttttttttttatactttaagttctagggtacatgtgcacaatgtgcaggtttattacatatgtatacatgtgccatgttggtgtgctgcacccattaactcgtcatttacattagctatatctcctaatgctatccctcccccatcccctcaccccacaacaggccccggtgtgtgatgttccccttcctgtgtccaagtgttctcattgttcaattcccacctatgagtgagaacatgcggtgtttgtttttctgtccttgcaatagtttgctgagaatgatggtttccagcttcatccatgtcccaggaaacaacaggtgctggagaggatgtggagaaataggaacacttttacactgttggtgggactataaactagttcaaccactgtggaagtcaatgtggcgattcctcagggatctagaactagaaatacatttgacccagccatcccattactgggtatatacccaaaggattataaatcatgctgctataaagacacatgcacacatatgtttattgtggcactattcacaatcgtttctatgtcaaacttctcagtttgttggtgtattgttttgcaaatttcatttaattttgtatttatatattcttgtagtccactgaatttcttcaagaggattattctgaattctttgtcagtgatttcatagatctttatttctatgaggtcaattttttgagcttggccagtttcttttggaggtgtcatcattccttgattcttcataatcctgtgtccttgcattatttgtgcatttgaggagaaagccacttcttctggtttttataggtattctttggcagggataaaggtttgctatttagtctagcctataattctggaaagatcagttggtgacaaccttgagcaggcagagttttcatgggttccctagttggctgggccactgcctttgctcttatgtttggtagggccactggttgggccttgctctctggcaagatcactgttttgtctctgctatctggtggagctgctggctgggtactacaatggcctctggtcaggccagtcacaagatgtgttgcctggctggatgattctgctatttgggacctgaagttaggcagggtcacaatccgggctgtgaggttaggtagagttgttgcttgggatgggcagaaataaatactatacttcttagatgtgcataatagaggattgctaccccacccttgtgaatggagccatggagtgaggttttggctgagttgagctaccctttagactcccaggtcaagcatatttaacccctacacttctatgaaatacacagaggtggtgtctgctacctgggtggggtcactggcataacctctgaagctgggcttacagactggccatctggaaactcaagctaggttgaacttcccaacatgcttctgaaagtgaccagctcagttttgcagatgggctatgcagttggctggtatctctgaatgggtgccatagctggcagaaacacagaagcactaccaaaatccacatgctggtcactgtgagctctgtccttctttgtttctacctgacctcattacttcctgtgttcccggtgaaatgagaccagagtgggcttcctgagaagtgtctttgaatacttgagaatcttgatgtctacccctggttctcttccccgctgtagaaactgtgaccccagggaactcctctctatctggcattgtgctaacctaaaggagtgggaacaatgacatggtcaaagtgagaccattcttcctactcttctaatttgtcttcactcagttctatgaacaatgtaggtgtcctagacttgtttccaagtattggggttttcaaaatagattttctgatctgtggatagcagctagttggactttctgtggagggaggaagatcctgagactttctagtccatcatcttgctttattctgaattttaattgaactacaaaacgaaaatcctcctctttattacctaaatgcatttatacttccaccaggatacatttccatagtgttatatttgccatcatctgttaccatcaaagtttttaattttaatttttgccaaaaatttagaaaaaaaaattttgctgttgttttaatttatattttcttaattacaaggatgaccttatttttgcatgtttattaattgcctttataatctttggctatttgtcttttgagtagtttttttctgactcagttgtatgacactaattctttatctgttgaatatgttgcagatattttctttcacttggtcatttttttaactttgtttatggcatctgtttttttacaaaagttttaacattaattttatgagaaagggaagataactgctacatttttcatttgtatataattcaccaatactaaaattgtagtaaatgtatgttcatcagtagcagttattttattttcagtgagtcaagcattttattttgcttagccatttgtcctttaactatgcttatggcttttttttaagaaacattttaatatgaattttatgaggaagggattcagtatgaaaataaataccatacttctctcattttcatttcatataatttaccaagattaaaatggaagtaaatgtatgttcatgagtagtaattattttattttcaatgcatcaaatactgttcgtcttcacttccttaccctcaattttctaggttttccataaaaatactatctttgtatatgaaatttgaagaaagaacatagcattattatagaattcaggaccttttgtgggtaattttacttatgtatacttatagggctttgttgttggtgttttctccatacaactgttgagtaaggaagttggtggtgggaactaaatagatcatcttgtgataaccgtcttgtgtcagccatcagatgacagcaactgaatcacaacatcaccaggctcttacaatttgttgtcttatttggcatgcgattctacataaattactgaaaagatcattgaagaagaaattctgaaaatcacaggaaaccagtagcccatttttaagatatttatatattactgttgtattaaaggcggacaacttttcaggaggagtttaggtataaggcatagtcctagcttctgggtcatagagctgtttagaaagatataatgcagaaataattttcatatgtctgatttgcttatttctctaggtggtgaggtttctgaagaattatccctgaaactgccaccaaatgtggtagaagaatctgcccgagcttctgtctcagttttgggtgagtctccagcccctagtggatccgggcattaacagcttctattatactatttttatttcccataaatatttactaaaaataatactataattttaacttctttcttctcttcttctttgggcttgtttattgctttcaatcatacttctatccctggaagaatcatccttcctaaaaattctcaatttctaagctcaactaattatttctgcttaatgactttgatagatgataatctccaagctttatgacttcccatctctcccattctctaggagacatattaggctctgccatgcaaaacacacaaaatcttctccagatgccctatggctgtggagagcagaatatggtcctctttgctcctaacatctatgtactggattatctaaatgaaacacagcagcttactccagagatcaagtccaaggccattggctatctcaacactggtgagtgattacttgagtaagggaaaacttgaatgttatttcaactggatttcccagtaggtttcagttacttatgaatattatgatacattagcttagctcactatgatagctgctatgatagttaatttcaaggaaactatccactctccaacctccaataaaatatttaaggctcagaaactcctaatctatgacaacaaaatttaagaaatgtcacaagagaagccaaggtacttttagtaatttctccaccctcagcatgcacattaatccattgtgctgtttcgttaatcttcctttccaggttaccagagacagttgaactacaaacactatgatggctcctacagcacctttggggagcgatatggcaggaaccagggcaacacctggtaaggaaagaacaattttttgagcttctttttgtgtgccagctcttttacatgtattacctcaattatattcacagcaacactatcagatatgtattatcagaccgatggtttgttatactag

SEQ ID NO: 3625 - DNA, 6000 bp, Homo sapiens
ttttaaattttttaaaagatacaatgtgacaaaaattaacaaacaaaaaggacatgtgagtcatacatattaaggttattgctcaaggtcatatagtaatataaactcaaattctagtaaatggaggtacatgtgttaggctgaaaggaaagagaaagtttccaagcgtaggattagtgtaaacagaaatagaaatgttcacacaacaacactacattctccatcagtcaggtaaaaaagctgttcaacttccccaaaacatcagccaatatttatgttggaaccacacacattcatcaatgacatgagctacttctttgatgaactgaatagtaatcaagcatttatttatagtcccatattgtcaaatcatgattgaggataagttgagtacagagaaaagagggtcaaaaatcaaggaaagcatttaaggagaatcagttggctctatggaattcactatgaagcctaccgcatattttattatttataaattatattgtataatcctttatcagtaagatatatagtaaatttatgcatgtataggtatatatatatatatatatatatatatatatatatgcacaatttttttttccagagagctggttgtgaaatattgaccagcacacccttaatagaaggtgaatagagtgaaggaaactaactgtaatcttctgacacgatagagaataaaaagtctttattattattaaacttttccctcctgtaaactgtttctcaaagccactgtcataacatgtgtgtcagtttttccttgctcctgcagaggagcacaccaatggaaacttggattcctgcccctcttcacggccttgtgtcataacactctccacttagcacagcggcagcagccacataggactccacagagtccttgtgccccacagacaatccaagcctctgtctgccaaagtctctatagcctctgcttatgaccctcctcccccagctcactcctagcttattcttgtttttttttgttgtttgtttgtttgtttgtttgtttgagacgaagtctcactctgtcgctcaggtcgcccaggctggagtgcagtggcgccgtctcggcctcggcctctcaaagtgctgggattacaggcatgagccaccgcgcccggcctctcctggcttgttaagtcaaccaacatatttcctcctcaaagaagctttccttgatgacccaagcgccctctcctccttcctctctatttcatcagacgatttgttttttgttttttttttttggtggcaactattacattctctcataagctttatctgtatgtttattgtaatgtcttcttcctcactcaccatagagtcagatgtaatgggaagaggccatgcacgcctggtgcatgttgaagagcctcacacggagaccgtacgaaagtacttccctgagacatggatctgggatttggtggtggtaaagtaagtaacttcctgcatatgcaatatgcaacaatagaggtccctgactattttcaactctttgctagtttttctgtttttattgttttatatgtttatgatgtacaacatgatgttttgatatatatatatacacatacacatagtgaaatgattactacagtcaagcaaattaacacatccattagctcacattgttacctatttttgtgtgcatagcaagcacacctaaaatctatcctcttagccaagtttcagtatccaatacagtattatcaactgcagtcctcatgctgtactttagatttctaaatttattcatcctacgtaacttcaactttgtaccctttgacctgcttcttcccatccctgcaaccccaaccacctttctactctctgttcctatgtattcaacttcttttagcatccacatacaagtaagatcacgcagtacttgtcctgtgtctggcttatttcacttagcataatctcccccaggttcatccatgttgtcacaagtggcaggatcttcttccacttaaggctgaataatattccattacgcatagccacaatttatttatccattcacccagacacttaggttgtttttatatcttggcaactgtgaataatgctgtaatgaacaccaaaacacatatatctctacaaggtgcttatttcatttcctttgggagtatacccagaagagggatttctgggacatatggtagtttccattttaaaatttttgaggtatctccatactgttttccataatggctgtggcaatgtacatttgcaccaaggggagtgaacaaattccttccagagagacactggaaacagagttttatccgtgaaacaagccagtggggcaggtggagagaaagagccggaatggccatatactccctttcaggctcctggagtcttgtttacttctccctttcactcccagatgcaggctgtttagaagcccaacccttaggagacagccagaaatgggagattttgcctgttctctctgtattgagccaaggggtggtgggggcgggtagccactggcattgctcaaaggcctatttaaaaccacctctgtgttcactgtggtctagggagactcctgattgcagagctccatctactcctggagctaggtgatttaggagccagacccttaggtacgagctgtaaacattggggtgcttgatgcatagacaaattattcccaggggtatgttcagacctggttttatccgtggggcgagccaggggaaggaggcatgggaagtgcccttactgcttttcagccttcctgtaagtctgtcgtttccctgctccttctgcttcccagtgcaggctagttagaagcccaacactcagtcagcaactgataaagtgggtagacgaagcccttccagggagaaactgggagctgttagctaatttttcagtactgaagtacttctttcaaacgcattgctaatttcaggagatgtttaacataaatacatcagctaagaagtcttactaatctaattgcatcagagctaaaaaattttgtgcaaatttaattctaagatttccagaaaatgggcataaggacctaatacaaccaaggactgcacagattgcctgtaagagatccctcactggttagcaatcctgagttaaatacagattcagtcaggcccactatacacaatagtagtagaatttaaaattataaagcagccctcagtgaaatagcattttagagaagagaacttaagaacaatctcaaactgcatgttaaatttataactatattgtctgtaaaagattatgctacaattctgatatactacaattaaaaacagttggaagaaaaggacttatattcccatctcaatccttgattatactctccattattggtatttctattgagtgtttttaagtcatggcagtagaatcattcctagggattctctccctagaaaggatgtatttaactgcttactttctgttcttcacttacactcctctccagctcagcaggtgtggctgaggtaggagtaacagtccctgacaccatcaccgagtggaaggcaggggccttctgcctgtctgaagatgctggacttggtatctcttccactgcctctctccgagccttccagcccttctttgtggagctcacaatgccttactctgtgattcgtggagaggccttcacactcaaggccacggtcctaaactaccttcccaaatgcatccgggtaaggatctctttcctaaattaaatacaaggtagccatcaagtaaattaaaagttgcattcctaggaatactgcaaactcttgtatgcaaaatatgcttactagatattcatgattgtaaaagttacaggttttgagatctccaaataccaaattgcaccataaagcaagtttctagcccttataacccttcaaagttagtatttgtgtggtatgaagaattctgacaggggtgacaaaagtcagtactctattctcatgacagattctacaaggtttcaacctctacgatctcatatatttaacttttcgtagctcattcattatattaaacctaattttaaaagtcgtttgtgagcatcttacctttgctgaaaccataactgtttataagtcttgtatcctctgccgggagatccgggggaatggtcaaagttccagaccaaagaggtagagcagcatgccatcattacctttcccttcctctggtcccatcatgtgaaagagcaggttgcttccaaaataactcagatttacctgtgtaaatctgatacattaagatccacttaaatatatttcaggtacttgatcttcatttatatcatctttaatgtgaggcaacctgaaatctaaccaattcctcaagatgctttacttcaaacccattctccctctgttctccttccctctctactccctttcttatgtgtggtttcaggtcagtgtgcagctggaagcctctcccgccttcctagctgtcccagtggagaaggaacaagcgcctcactgcatctgtgcaaacgggcggcaaactgtgtcctgggcagtaaccccaaagtcattaggtgagcaaaaaactgctagagataattctctactcaaagattgtatatggcagtgggaaccttatattgagtgctacttccttcaggaaaagaccactagatgctgcgatttttttcctttgccttttattctaagatgcctacaaggatatcctcaacatctccaccttgaattctcagtatcattcacctctcatttgcatgtttccgttcctgcttctgtgttttaataaaacaaaagtttacagagcattgaacatttctaaatcttgagtttggaggcatggaggaaggggaagatgctattcatttctactggccttttttttcaggaaatgtgaatttcactgtgagcgcagaggcactagagtctcaagagctgtgtgggactgaggtgccttcagttcctgaacacggaaggaaagacacagtcatcaagcctctgttggttgaagtaagtaaacctaaataatatatagtccacaataatatataatatatgtgggtaatataataatatatggatattttataatattattctcatgtatctctctgtcctatctctctcttgatttactttctgttttgttgggggtttttgtttttgtttttgaggcagagtcttgctctgtcatccaggctggagtgcagtggcaggatctctgctcactgcaacctccgcctcctgggttcaagcaattctcgtgcctcagcctcctgagtagctgggattacaggtgtgcaccaccacgcccagctagtttttgtatttttagtagagacaggatttcaccacgttggccaggctggtctcgaactcctggcctcaagtgatctgcccacctcagcttcccaaagtgctgggattataggtgtgagccaccatgcacagcctccctttgatttactttcttaatttttccttcatttgttcatgcatcgaactacctcctacgtatattgcttatatgtacagaattttcttagataatacagttcaaatccttctcttcactatccaaatatctgtggtccctccattaaaacacatgttctgaaggtcagtccattctcactagcttttctttcttttacctaaagcctgaaggactagagaaggaaacaacattcaactccctactttgtccatcaggtaagagtcaaccatcataatttaaaaaacattaaagtctaacatttaaagttcaaagaacatttatatattattcctacactttctctgtgatctaagacctgaagcaccatcaatgcatttgacaaatgtggaaaatagttcttaggaaggccaagtaatttgatcagaatatccctaggcctgcattctgagtcttgatcttttgcagcacctgtgcaaacaccaaatgactttctgaccagtgtatggtatgggcataggtagaaagtgg

SEQ ID NO: 3626 - DNA, 6000 bp, Homo sapiens
agatctgcgaaaagctgctgaactaagctggaactttttggagtattattcaagttttcttttttcacaggaattaattgctctgtgatgtttattaaaatcacatatacaaaataattactgttgaaagagtttaatgaaaagaataaaattacatccttaagtatataaatatcccttctacagatgtgaatgttaaaagtttaatttaagttaactggattgcttgtcaaattcaataaaaagaagtagctacctatgtatattttataatatatatttactgattagatgataattttctttgcaggacatgggcttaaaggcattcaccaactcaaagattcgtaaacccaaaatgtgtccacagcttcaacagtatgaaatgcatggacctgaaggtctacgtgtaggtttttatggtaaacaaaaaattaataaatatatattgcctaatatattcaccaaattttaaattttttaaaagatacaatgtgacaaaaattaacaaacaaaaaggacatgtgagtcatacatattaaggttattgctcaaggtcatatagtaatataaactcaaattctagtaaatggaggtacatgtgttaggctgaaaggaaagagaaagtttccaagcgtaggattagtgtaaacagaaatagaaatgttcacacaacaacactacattctccatcagtcaggtaaaaaagctgttcaacttccccaaaacatcagccaatatttatgttggaaccacacacattcatcaatgacatgagctacttctttgatgaactgaatagtaatcaagcatttatttatagtcccatattgtcaaatcatgattgaggataagttgagtacagagaaaagagggtcaaaaatcaaggaaagcatttaaggagaatcagttggctctatggaattcactatgaagcctaccgcatattttattatttataaattatattgtataatcctttatcagtaagatatatagtaaatttatgcatgtataggtatatatatatatatatatatatatatatatatatgcacaatttttttttccagagagctggttgtgaaatattgaccagcacacccttaatagaaggtgaatagagtgaaggaaactaactgtaatcttctgacacgatagagaataaaaagtctttattattattaaacttttccctcctgtaaactgtttctcaaagccactgtcataacatgtgtgtcagtttttccttgctcctgcagaggagcacaccaatggaaacttggattcctgcccctcttcacggccttgtgtcataacactctccacttagcacagcggcagcagccacataggactccacagagtccttgtgccccacagacaatccaagcctctgtctgccaaagtctctatagcctctgcttatgaccctcctcccccagctcactcctagcttattcttgtttttttttgttgtttgtttgtttgtttgtttgtttgagacgaagtctcactctgtcgctcaggtcgcccaggctggagtgcagtggcgccgtctcggcctcggcctctcaaagtgctgggattacaggcatgagccaccgcgcccggcctctcctggcttgttaagtcaaccaacatatttcctcctcaaagaagctttccttgatgacccaagcgccctctcctccttcctctctatttcatcagacgatttgttttttgttttttttttttggtggcaactattacattctctcataagctttatctgtatgtttattgtaatgtcttcttcctcactcaccatagagtcagatgtaatgggaagaggccatgcacgcctggtgcatgttgaagagcctcacacggagaccgtacgaaagtacttccctgagacatggatctgggatttggtggtggtaaagtaagtaacttcctgcatatgcaatatgcaacaatagaggtccctgactattttcaactctttgctagtttttctgtttttattgttttatatgtttatgatgtacaacatgatgttttgatatatatatatacacatacacatagtgaaatgattactacagtcaagcaaattaacacatccattagctcacattgttacctatttttgtgtgcatagcaagcacacctaaaatctatcctcttagccaagtttcagtatccaatacagtattatcaactgcagtcctcatgctgtactttagatttctaaatttattcatcctacgtaacttcaactttgtaccctttgacctgcttcttcccatccctgcaaccccaaccacctttctactctctgttcctatgtattcaacttcttttagcatccacatacaagtaagatcacgcagtacttgtcctgtgtctggcttatttcacttagcataatctcccccaggttcatccatgttgtcacaagtggcaggatcttcttccacttaaggctgaataatattccattacgcatagccacaatttatttatccattcacccagacacttaggttgtttttatatcttggcaactgtgaataatgctgtaatgaacaccaaaacacatatatctctacaaggtgcttatttcatttcctttgggagtatacccagaagagggatttctgggacatatggtagtttccattttaaaatttttgaggtatctccatactgttttccataatggctgtggcaatgtacatttgcaccaaggggagtgaacaaattccttccagagagacactggaaacagagttttatccgtgaaacaagccagtggggcaggtggagagaaagagccggaatggccatatactccctttcaggctcctggagtcttgtttacttctccctttcactcccagatgcaggctgtttagaagcccaacccttaggagacagccagaaatgggagattttgcctgttctctctgtattgagccaaggggtggtgggggcgggtagccactggcattgctcaaaggcctatttaaaaccacctctgtgttcactgtggtctagggagactcctgattgcagagctccatctactcctggagctaggtgatttaggagccagacccttaggtacgagctgtaaacattggggtgcttgatgcatagacaaattattcccaggggtatgttcagacctggttttatccgtggggcgagccaggggaaggaggcatgggaagtgcccttactgcttttcagccttcctgtaagtctgtcgtttccctgctccttctgcttcccagtgcaggctagttagaagcccaacactcagtcagcaactgataaagtgggtagacgaagcccttccagggagaaactgggagctgttagctaatttttcagtactgaagtacttctttcaaacgcattgctaatttcaggagatgtttaacataaatacatcagctaagaagtcttactaatctaattgcatcagagctaaaaaattttgtgcaaatttaattctaagatttccagaaaatgggcataaggacctaatacaaccaaggactgcacagattgcctgtaagagatccctcactggttagcaatcctgagttaaatacagattcagtcaggcccactatacacaatagtagtagaatttaaaattataaagcagccctcagtgaaatagcattttagagaagagaacttaagaacaatctcaaactgcatgttaaatttataactatattgtctgtaaaagattatgctacaattctgatatactacaattaaaaacagttggaagaaaaggacttatattcccatctcaatccttgattatactctccattattggtatttctattgagtgtttttaagtcatggcagtagaatcattcctagggattctctccctagaaaggatgtatttaactgcttactttctgttcttcacttacactcctctccagctcagcaggtgtggctgaggtaggagtaacagtccctgacaccatcaccgagtggaaggcaggggccttctgcctgtctgaagatgctggacttggtatctcttccactgcctctctccgagccttccagcccttctttgtggagctcacaatgccttactctgtgattcgtggagaggccttcacactcaaggccacggtcctaaactaccttcccaaatgcatccgggtaaggatctctttcctaaattaaatacaaggtagccatcaagtaaattaaaagttgcattcctaggaatactgcaaactcttgtatgcaaaatatgcttactagatattcatgattgtaaaagttacaggttttgagatctccaaataccaaattgcaccataaagcaagtttctagcccttataacccttcaaagttagtatttgtgtggtatgaagaattctgacaggggtgacaaaagtcagtactctattctcatgacagattctacaaggtttcaacctctacgatctcatatatttaacttttcgtagctcattcattatattaaacctaattttaaaagtcgtttgtgagcatcttacctttgctgaaaccataactgtttataagtcttgtatcctctgccgggagatccgggggaatggtcaaagttccagaccaaagaggtagagcagcatgccatcattacctttcccttcctctggtcccatcatgtgaaagagcaggttgcttccaaaataactcagatttacctgtgtaaatctgatacattaagatccacttaaatatatttcaggtacttgatcttcatttatatcatctttaatgtgaggcaacctgaaatctaaccaattcctcaagatgctttacttcaaacccattctccctctgttctccttccctctctactccctttcttatgtgtggtttcaggtcagtgtgcagctggaagcctctcccgccttcctagctgtcccagtggagaaggaacaagcgcctcactgcatctgtgcaaacgggcggcaaactgtgtcctgggcagtaaccccaaagtcattaggtgagcaaaaaactgctagagataattctctactcaaagattgtatatggcagtgggaaccttatattgagtgctacttccttcaggaaaagaccactagatgctgcgatttttttcctttgccttttattctaagatgcctacaaggatatcctcaacatctccaccttgaattctcagtatcattcacctctcatttgcatgtttccgttcctgcttctgtgttttaataaaacaaaagtttacagagcattgaacatttctaaatcttgagtttggaggcatggaggaaggggaagatgctattcatttctactggccttttttttcaggaaatgtgaatttcactgtgagcgcagaggcactagagtctcaagagctgtgtgggactgaggtgccttcagttcctgaacacggaaggaaagacacagtcatcaagcctctgttggttgaagtaagtaaacctaaataatatatagtccacaataatatataatatatgtgggtaatataataatatatggatattttataatattattctcatgtatctctctgtcctatctctctcttgatttactttctgttttgttgggggtttttgtttttgtttttgaggcagagtcttgctctgtcatccaggctggagtgcagtggcaggatctctgctcactgcaacctccgcctcctgggttcaagcaattctcgtgcctcagcctcctgagtagctgggattacaggtgtgcaccaccacgcccagctagtttttgtatttttagtagagacaggatttcaccacgttggccaggctggtctcgaactcctggcctcaagtgatctgcccacctcagcttcccaaagtgctgggattataggtgtgagccaccatgcacagcctccctttgatttactttcttaatttttccttcatttgttcatgcatcgaactacctcctacgta

SEQ ID NO: 3627 - DNA, 6000 bp, Homo sapiens
taacgaagtagtacttagtacttagatgagtacttagatggagtgtttggtttttcctaaaattgttaaacatcttcaaaatgaaaacactgtgtcaagaaaatgatccataccctctataaatcatcaaagcaatgagagcgctcaaagaaagacggatgttcattattcctgttcttttctccttgaacttaaaaaatgtcacaaaggccgggcgcggtggctcacgcctgtaatcccagcactttgggaggccgaggcgggtggatcatgaggtcaggagatcgagaccatcctggctaacaaggtgaaaccccgtctctactaaaaatacaaaaaattagccgggcgcggtggcgggcgcctgtagtcccagctactcgggaggctgaggcaggagaatggcgtgaacccgggaagcggagcttgcagtgagccgagattgcgccactgcagtccgcggtccggcctgggcgacagagcgagactccgtctcaaaaaaaaaaaaaaaaaaaaaaaaaaaagtcacaaataagtttgcctttttgtctttcgtatttgtacaggtttacaacctgctaccagaaaaggacctcactggcttccctgggcctttgaatgaccaggacaatgaagactgcatcaatcgtcataatgtctatattaatggaatcacatatactccagtatcaagtacaaatgaaaaggatatgtacagcttcctagaggtaaactccttatgttgcagatggtctgatcttaagcttcttaaaatattacacatggaaaagagtctgtatttgaatgccttcatgtcctagttgagggtaatgggatataaagaggtaagtggcttctctactaatagcagcagatctgcgaaaagctgctgaactaagctggaactttttggagtattattcaagttttcttttttcacaggaattaattgctctgtgatgtttattaaaatcacatatacaaaataattactgttgaaagagtttaatgaaaagaataaaattacatccttaagtatataaatatcccttctacagatgtgaatgttaaaagtttaatttaagttaactggattgcttgtcaaattcaataaaaagaagtagctacctatgtatattttataatatatatttactgattagatgataattttctttgcaggacatgggcttaaaggcattcaccaactcaaagattcgtaaacccaaaatgtgtccacagcttcaacagtatgaaatgcatggacctgaaggtctacgtgtaggtttttatggtaaacaaaaaattaataaatatatattgcctaatatattcaccaaattttaaattttttaaaagatacaatgtgacaaaaattaacaaacaaaaaggacatgtgagtcatacatattaaggttattgctcaaggtcatatagtaatataaactcaaattctagtaaatggaggtacatgtgttaggctgaaaggaaagagaaagtttccaagcgtaggattagtgtaaacagaaatagaaatgttcacacaacaacactacattctccatcagtcaggtaaaaaagctgttcaacttccccaaaacatcagccaatatttatgttggaaccacacacattcatcaatgacatgagctacttctttgatgaactgaatagtaatcaagcatttatttatagtcccatattgtcaaatcatgattgaggataagttgagtacagagaaaagagggtcaaaaatcaaggaaagcatttaaggagaatcagttggctctatggaattcactatgaagcctaccgcatattttattatttataaattatattgtataatcctttatcagtaagatatatagtaaatttatgcatgtataggtatatatatatatatatatatatatatatatatatgcacaatttttttttccagagagctggttgtgaaatattgaccagcacacccttaatagaaggtgaatagagtgaaggaaactaactgtaatcttctgacacgatagagaataaaaagtctttattattattaaacttttccctcctgtaaactgtttctcaaagccactgtcataacatgtgtgtcagtttttccttgctcctgcagaggagcacaccaatggaaacttggattcctgcccctcttcacggccttgtgtcataacactctccacttagcacagcggcagcagccacataggactccacagagtccttgtgccccacagacaatccaagcctctgtctgccaaagtctctatagcctctgcttatgaccctcctcccccagctcactcctagcttattcttgtttttttttgttgtttgtttgtttgtttgtttgtttgagacgaagtctcactctgtcgctcaggtcgcccaggctggagtgcagtggcgccgtctcggcctcggcctctcaaagtgctgggattacaggcatgagccaccgcgcccggcctctcctggcttgttaagtcaaccaacatatttcctcctcaaagaagctttccttgatgacccaagcgccctctcctccttcctctctatttcatcagacgatttgttttttgttttttttttttggtggcaactattacattctctcataagctttatctgtatgtttattgtaatgtcttcttcctcactcaccatagagtcagatgtaatgggaagaggccatgcacgcctggtgcatgttgaagagcctcacacggagaccgtacgaaagtacttccctgagacatggatctgggatttggtggtggtaaagtaagtaacttcctgcatatgcaatatgcaacaatagaggtccctgactattttcaactctttgctagtttttctgtttttattgttttatatgtttatgatgtacaacatgatgttttgatatatatatatacacatacacatagtgaaatgattactacagtcaagcaaattaacacatccattagctcacattgttacctatttttgtgtgcatagcaagcacacctaaaatctatcctcttagccaagtttcagtatccaatacagtattatcaactgcagtcctcatgctgtactttagatttctaaatttattcatcctacgtaacttcaactttgtaccctttgacctgcttcttcccatccctgcaaccccaaccacctttctactctctgttcctatgtattcaacttcttttagcatccacatacaagtaagatcacgcagtacttgtcctgtgtctggcttatttcacttagcataatctcccccaggttcatccatgttgtcacaagtggcaggatcttcttccacttaaggctgaataatattccattacgcatagccacaatttatttatccattcacccagacacttaggttgtttttatatcttggcaactgtgaataatgctgtaatgaacaccaaaacacatatatctctacaaggtgcttatttcatttcctttgggagtatacccagaagagggatttctgggacatatggtagtttccattttaaaatttttgaggtatctccatactgttttccataatggctgtggcaatgtacatttgcaccaaggggagtgaacaaattccttccagagagacactggaaacagagttttatccgtgaaacaagccagtggggcaggtggagagaaagagccggaatggccatatactccctttcaggctcctggagtcttgtttacttctccctttcactcccagatgcaggctgtttagaagcccaacccttaggagacagccagaaatgggagattttgcctgttctctctgtattgagccaaggggtggtgggggcgggtagccactggcattgctcaaaggcctatttaaaaccacctctgtgttcactgtggtctagggagactcctgattgcagagctccatctactcctggagctaggtgatttaggagccagacccttaggtacgagctgtaaacattggggtgcttgatgcatagacaaattattcccaggggtatgttcagacctggttttatccgtggggcgagccaggggaaggaggcatgggaagtgcccttactgcttttcagccttcctgtaagtctgtcgtttccctgctccttctgcttcccagtgcaggctagttagaagcccaacactcagtcagcaactgataaagtgggtagacgaagcccttccagggagaaactgggagctgttagctaatttttcagtactgaagtacttctttcaaacgcattgctaatttcaggagatgtttaacataaatacatcagctaagaagtcttactaatctaattgcatcagagctaaaaaattttgtgcaaatttaattctaagatttccagaaaatgggcataaggacctaatacaaccaaggactgcacagattgcctgtaagagatccctcactggttagcaatcctgagttaaatacagattcagtcaggcccactatacacaatagtagtagaatttaaaattataaagcagccctcagtgaaatagcattttagagaagagaacttaagaacaatctcaaactgcatgttaaatttataactatattgtctgtaaaagattatgctacaattctgatatactacaattaaaaacagttggaagaaaaggacttatattcccatctcaatccttgattatactctccattattggtatttctattgagtgtttttaagtcatggcagtagaatcattcctagggattctctccctagaaaggatgtatttaactgcttactttctgttcttcacttacactcctctccagctcagcaggtgtggctgaggtaggagtaacagtccctgacaccatcaccgagtggaaggcaggggccttctgcctgtctgaagatgctggacttggtatctcttccactgcctctctccgagccttccagcccttctttgtggagctcacaatgccttactctgtgattcgtggagaggccttcacactcaaggccacggtcctaaactaccttcccaaatgcatccgggtaaggatctctttcctaaattaaatacaaggtagccatcaagtaaattaaaagttgcattcctaggaatactgcaaactcttgtatgcaaaatatgcttactagatattcatgattgtaaaagttacaggttttgagatctccaaataccaaattgcaccataaagcaagtttctagcccttataacccttcaaagttagtatttgtgtggtatgaagaattctgacaggggtgacaaaagtcagtactctattctcatgacagattctacaaggtttcaacctctacgatctcatatatttaacttttcgtagctcattcattatattaaacctaattttaaaagtcgtttgtgagcatcttacctttgctgaaaccataactgtttataagtcttgtatcctctgccgggagatccgggggaatggtcaaagttccagaccaaagaggtagagcagcatgccatcattacctttcccttcctctggtcccatcatgtgaaagagcaggttgcttccaaaataactcagatttacctgtgtaaatctgatacattaagatccacttaaatatatttcaggtacttgatcttcatttatatcatctttaatgtgaggcaacctgaaatctaaccaattcctcaagatgctttacttcaaacccattctccctctgttctccttccctctctactccctttcttatgtgtggtttcaggtcagtgtgcagctggaagcctctcccgccttcctagctgtcccagtggagaaggaacaagcgcctcactgcatctgtgcaaacgggcggcaaactgtgtcctgggcagtaaccccaaagtcattaggtgagcaaaaaactgctagagataattctctactcaaagattgtatatggcagtgggaaccttatattgagtgctacttccttcaggaa

SEQ ID NO: 3628 - DNA, 6000 bp, Homo sapiens
attgctttgagctctcttgtgggctttcattggtaaggaattatatatatatatatatataactactcacttctgcagttaaaaaaataaacaaaatacaatatattgaatcaaataaaagaatttttaaaaggacaaaatgtgatgaaaattaacaaccaaaaaaggactcgttattcagacacgttaagcttcttgctcaagagcacatagcaatacaaattcaaatcttctgattgtgtcaggacatccgtatatgcaaggctggagagaatacagagcagattgtgaaaagtgctatatgagaagtgcagttatgcaaaataaaagaaaggattaactgagcaaccggggaagccgttcgaaaattatatatttaaaatgtaaaaagaccatacagtacccaaagtccttaaaatcccagagctccatgcaaccagtaataggagttgtcaaactagtttcaacatttcaaaaagcctaacaaaagtgatacatatacctgcactgaggctatacaggctaaatgaaatatcagatttccgtttttataagaattatggctgggcctggtggctcacgcctgtaatcccaacactgggaggccaaggcaggcagataacttgagatcaggagtttgagaccagtctggccaatataatgaaaccccgtatctactaaaaatacaaaaattagtcagacgtggtggcgggcgcctgtcatcccagctactcaggaggctgaggcaggagaatcacttgaacccaggaggcagaggttgagtgagccgagatcgtgccactgcactccagcctgggcaatagagcaagacttggtgtcaaaaaaaaaaaaaaaaaaagaattacatcagttgaaataattgctgtcccaagctacacataatttctgagggaacatatgtattatctctgaggaacaaaacttagggaaattgaactactatataattgacattgataactgaactctttgaaaatatggagctaatagaagaaataccaaaaggatatgctgaattggaacaacaaaaactagttaatagcatgtactaatagtagtttgctcacatcttcaaatttttaatatgagaccaattgtaataacctcttactgaagctttttctactaccataatttaacaaagagaaatttatatttttattttcctgaaatagaaacttataaaaaaatgtttcttacttgtttgtccttctaatgggattttaactgaaaatattagaatacttctaaaggaagcatcaagtacatttcaacagtaggatctcaagaggatatgtgggaaaataatatacatgttttatacttttataatataattttataattctcaaagaatttttcaaattataacaaccctgatgggtagataaggcagacagtcctatttattaataataaagcagaagctttcagggatttagtagtagacctgagttaaaacaccaactcttctcaagctttgattagtgtcttaccaatgaaacactttgctgctactagtgtaggtcattcattcaacacatttatttaatgcccactgtgttctaggtattatactaagtgctagtagagatcaagcagtgagctactggaaagataaaaatgtatgtctcatggaacttacattgtctgtcccatagatgagacagacaataattatgcaatatgccacaataaaagcagggagaggaaatgagaaatgttaagatactttgagaaagtgtctaatttcatcacaccactcactttgctcatctgttcttgtcaatcagttttaaactcctacgaatataatgcaatgtaactatcacaatttttatgtctgtcttacttctcaccttcaaatggacttgaaagcatcatgcctagaattttacggttaaagttgtatgtattatatgaagatctggagcattttgtttccactaataatacctaagaaaatgccatcgtgtcctgtggagagaggatattcctattcgtgtgcctgtttagaacatgcacccattaactttgctatatactgagtcagttgctcaccacaagataagcacaaaactatcatttccttctatcatctcaaagctttgtgcaatgtcacaaatacagcagacctcgatttttcaattaataaagttttatttcattccagtgttgagtctagtggtggcctctgaactgtgtaacgaagtagtacttagtacttagatgagtacttagatggagtgtttggtttttcctaaaattgttaaacatcttcaaaatgaaaacactgtgtcaagaaaatgatccataccctctataaatcatcaaagcaatgagagcgctcaaagaaagacggatgttcattattcctgttcttttctccttgaacttaaaaaatgtcacaaaggccgggcgcggtggctcacgcctgtaatcccagcactttgggaggccgaggcgggtggatcatgaggtcaggagatcgagaccatcctggctaacaaggtgaaaccccgtctctactaaaaatacaaaaaattagccgggcgcggtggcgggcgcctgtagtcccagctactcgggaggctgaggcaggagaatggcgtgaacccgggaagcggagcttgcagtgagccgagattgcgccactgcagtccgcggtccggcctgggcgacagagcgagactccgtctcaaaaaaaaaaaaaaaaaaaaaaaaaaaagtcacaaataagtttgcctttttgtctttcgtatttgtacaggtttacaacctgctaccagaaaaggacctcactggcttccctgggcctttgaatgaccaggacaatgaagactgcatcaatcgtcataatgtctatattaatggaatcacatatactccagtatcaagtacaaatgaaaaggatatgtacagcttcctagaggtaaactccttatgttgcagatggtctgatcttaagcttcttaaaatattacacatggaaaagagtctgtatttgaatgccttcatgtcctagttgagggtaatgggatataaagaggtaagtggcttctctactaatagcagcagatctgcgaaaagctgctgaactaagctggaactttttggagtattattcaagttttcttttttcacaggaattaattgctctgtgatgtttattaaaatcacatatacaaaataattactgttgaaagagtttaatgaaaagaataaaattacatccttaagtatataaatatcccttctacagatgtgaatgttaaaagtttaatttaagttaactggattgcttgtcaaattcaataaaaagaagtagctacctatgtatattttataatatatatttactgattagatgataattttctttgcaggacatgggcttaaaggcattcaccaactcaaagattcgtaaacccaaaatgtgtccacagcttcaacagtatgaaatgcatggacctgaaggtctacgtgtaggtttttatggtaaacaaaaaattaataaatatatattgcctaatatattcaccaaattttaaattttttaaaagatacaatgtgacaaaaattaacaaacaaaaaggacatgtgagtcatacatattaaggttattgctcaaggtcatatagtaatataaactcaaattctagtaaatggaggtacatgtgttaggctgaaaggaaagagaaagtttccaagcgtaggattagtgtaaacagaaatagaaatgttcacacaacaacactacattctccatcagtcaggtaaaaaagctgttcaacttccccaaaacatcagccaatatttatgttggaaccacacacattcatcaatgacatgagctacttctttgatgaactgaatagtaatcaagcatttatttatagtcccatattgtcaaatcatgattgaggataagttgagtacagagaaaagagggtcaaaaatcaaggaaagcatttaaggagaatcagttggctctatggaattcactatgaagcctaccgcatattttattatttataaattatattgtataatcctttatcagtaagatatatagtaaatttatgcatgtataggtatatatatatatatatatatatatatatatatatgcacaatttttttttccagagagctggttgtgaaatattgaccagcacacccttaatagaaggtgaatagagtgaaggaaactaactgtaatcttctgacacgatagagaataaaaagtctttattattattaaacttttccctcctgtaaactgtttctcaaagccactgtcataacatgtgtgtcagtttttccttgctcctgcagaggagcacaccaatggaaacttggattcctgcccctcttcacggccttgtgtcataacactctccacttagcacagcggcagcagccacataggactccacagagtccttgtgccccacagacaatccaagcctctgtctgccaaagtctctatagcctctgcttatgaccctcctcccccagctcactcctagcttattcttgtttttttttgttgtttgtttgtttgtttgtttgtttgagacgaagtctcactctgtcgctcaggtcgcccaggctggagtgcagtggcgccgtctcggcctcggcctctcaaagtgctgggattacaggcatgagccaccgcgcccggcctctcctggcttgttaagtcaaccaacatatttcctcctcaaagaagctttccttgatgacccaagcgccctctcctccttcctctctatttcatcagacgatttgttttttgttttttttttttggtggcaactattacattctctcataagctttatctgtatgtttattgtaatgtcttcttcctcactcaccatagagtcagatgtaatgggaagaggccatgcacgcctggtgcatgttgaagagcctcacacggagaccgtacgaaagtacttccctgagacatggatctgggatttggtggtggtaaagtaagtaacttcctgcatatgcaatatgcaacaatagaggtccctgactattttcaactctttgctagtttttctgtttttattgttttatatgtttatgatgtacaacatgatgttttgatatatatatatacacatacacatagtgaaatgattactacagtcaagcaaattaacacatccattagctcacattgttacctatttttgtgtgcatagcaagcacacctaaaatctatcctcttagccaagtttcagtatccaatacagtattatcaactgcagtcctcatgctgtactttagatttctaaatttattcatcctacgtaacttcaactttgtaccctttgacctgcttcttcccatccctgcaaccccaaccacctttctactctctgttcctatgtattcaacttcttttagcatccacatacaagtaagatcacgcagtacttgtcctgtgtctggcttatttcacttagcataatctcccccaggttcatccatgttgtcacaagtggcaggatcttcttccacttaaggctgaataatattccattacgcatagccacaatttatttatccattcacccagacacttaggttgtttttatatcttggcaactgtgaataatgctgtaatgaacaccaaaacacatatatctctacaaggtgcttatttcatttcctttgggagtatacccagaagagggatttctgggacatatggtagtttccattttaaaatttttgaggtatctccatactgttttccataatggctgtggcaatgtacatttgcaccaaggggagtgaacaaattccttccagagagacactggaaacagagttttatccgtgaaacaagccagtggggcaggtggagagaaagagccggaatggccatatactccctttcaggctcctggagtcttgtttacttctccctttcactcccagatgcaggctgtt

SEQ ID NO: 3629 - DNA, 6000 bp, Homo sapiens
caccatagcagactgaaggaaacttaatgcaacctctaaagaatctacataggcatcaaaaaataacttctgaaggagcatggtgttcctcttatggagaaagaaccaaatattggctcatagaaggttaaagagcatgtagcatgaatacaatgtgttgaactcttactcttacatctcataacttcaggttctatttccctcttctagtatgaggcctagatcaaatggtagtgaattggatgtcttcatacccttaactagcatcagaacattaggtgggtgagctgaagcttaaagctggtgaaaaatcaacagagtatatgatttatgagaggagagagggctttgatagggtttttttctaaagctagagtccttagaggtaatcatccatttgttacatctactgtttattatgtctgttacatctactaatggaaatagtcattaacctatgatggcttcctctcattctctttgtgccccagtgaagggccatttttccatctcaatccctgtgaagtcagacattgctcctgtcgctcggttgctcatctatgctgttttacctaccggggacgtgattggggattctgcaaaatatgatgttgaaaattgtctggccaacaaggtgtgtgttttagatcataaaatcttcaacatgtaaaactagaagttactattgttatcatttgttttacacatgtgaacattagggccaaaagggttaaacaaattccccagagacattcagcaaggtagtggcagagtcacactaagaagcagaatcacttgattccttatacaaaactctcaaacttctcctagcagtgcctcttaccaattacacagttcagagtatgttattcccttcttctatgatgaaacgttgggaaatatgtaagcaagtttttaagactactaaggagccaaaagaaaaatgcaagagcacctagacccatgcatgtcccaccacaattaatgagcaccttgccgtgtatcaaagataaaaatggcatttcatgactagtaatttataagaataattagaaataattctactggctcaagtgattcttgagaatgaaagagaagtgtagggaacaaaaagcttcaggattgacacaatgccaaccctccacgaagtcaagcagagtggttatacattgtacatgaggaacactctgcaaatgcgagtgaatgcatgggtaaacctggaaatttgcttttctgaccttttgttccaatttcacaggtggatttgagcttcagcccatcacaaagtctcccagcctcacacgcccacctgcgagtcacagcggctcctcagtccgtctgcgccctccgtgctgtggaccaaagcgtgctgctcatgaagcctgatgctgagctctcggcgtcctcggtgagttcctggcagcctcaggaatcaagaagggccgtgccaggggctcagagcaaggaaaaatgactggataagtaggataagatcaattaaaattatatttatctaggaattaattgctttgagctctcttgtgggctttcattggtaaggaattatatatatatatatatataactactcacttctgcagttaaaaaaataaacaaaatacaatatattgaatcaaataaaagaatttttaaaaggacaaaatgtgatgaaaattaacaaccaaaaaaggactcgttattcagacacgttaagcttcttgctcaagagcacatagcaatacaaattcaaatcttctgattgtgtcaggacatccgtatatgcaaggctggagagaatacagagcagattgtgaaaagtgctatatgagaagtgcagttatgcaaaataaaagaaaggattaactgagcaaccggggaagccgttcgaaaattatatatttaaaatgtaaaaagaccatacagtacccaaagtccttaaaatcccagagctccatgcaaccagtaataggagttgtcaaactagtttcaacatttcaaaaagcctaacaaaagtgatacatatacctgcactgaggctatacaggctaaatgaaatatcagatttccgtttttataagaattatggctgggcctggtggctcacgcctgtaatcccaacactgggaggccaaggcaggcagataacttgagatcaggagtttgagaccagtctggccaatataatgaaaccccgtatctactaaaaatacaaaaattagtcagacgtggtggcgggcgcctgtcatcccagctactcaggaggctgaggcaggagaatcacttgaacccaggaggcagaggttgagtgagccgagatcgtgccactgcactccagcctgggcaatagagcaagacttggtgtcaaaaaaaaaaaaaaaaaaagaattacatcagttgaaataattgctgtcccaagctacacataatttctgagggaacatatgtattatctctgaggaacaaaacttagggaaattgaactactatataattgacattgataactgaactctttgaaaatatggagctaatagaagaaataccaaaaggatatgctgaattggaacaacaaaaactagttaatagcatgtactaatagtagtttgctcacatcttcaaatttttaatatgagaccaattgtaataacctcttactgaagctttttctactaccataatttaacaaagagaaatttatatttttattttcctgaaatagaaacttataaaaaaatgtttcttacttgtttgtccttctaatgggattttaactgaaaatattagaatacttctaaaggaagcatcaagtacatttcaacagtaggatctcaagaggatatgtgggaaaataatatacatgttttatacttttataatataattttataattctcaaagaatttttcaaattataacaaccctgatgggtagataaggcagacagtcctatttattaataataaagcagaagctttcagggatttagtagtagacctgagttaaaacaccaactcttctcaagctttgattagtgtcttaccaatgaaacactttgctgctactagtgtaggtcattcattcaacacatttatttaatgcccactgtgttctaggtattatactaagtgctagtagagatcaagcagtgagctactggaaagataaaaatgtatgtctcatggaacttacattgtctgtcccatagatgagacagacaataattatgcaatatgccacaataaaagcagggagaggaaatgagaaatgttaagatactttgagaaagtgtctaatttcatcacaccactcactttgctcatctgttcttgtcaatcagttttaaactcctacgaatataatgcaatgtaactatcacaatttttatgtctgtcttacttctcaccttcaaatggacttgaaagcatcatgcctagaattttacggttaaagttgtatgtattatatgaagatctggagcattttgtttccactaataatacctaagaaaatgccatcgtgtcctgtggagagaggatattcctattcgtgtgcctgtttagaacatgcacccattaactttgctatatactgagtcagttgctcaccacaagataagcacaaaactatcatttccttctatcatctcaaagctttgtgcaatgtcacaaatacagcagacctcgatttttcaattaataaagttttatttcattccagtgttgagtctagtggtggcctctgaactgtgtaacgaagtagtacttagtacttagatgagtacttagatggagtgtttggtttttcctaaaattgttaaacatcttcaaaatgaaaacactgtgtcaagaaaatgatccataccctctataaatcatcaaagcaatgagagcgctcaaagaaagacggatgttcattattcctgttcttttctccttgaacttaaaaaatgtcacaaaggccgggcgcggtggctcacgcctgtaatcccagcactttgggaggccgaggcgggtggatcatgaggtcaggagatcgagaccatcctggctaacaaggtgaaaccccgtctctactaaaaatacaaaaaattagccgggcgcggtggcgggcgcctgtagtcccagctactcgggaggctgaggcaggagaatggcgtgaacccgggaagcggagcttgcagtgagccgagattgcgccactgcagtccgcggtccggcctgggcgacagagcgagactccgtctcaaaaaaaaaaaaaaaaaaaaaaaaaaaagtcacaaataagtttgcctttttgtctttcgtatttgtacaggtttacaacctgctaccagaaaaggacctcactggcttccctgggcctttgaatgaccaggacaatgaagactgcatcaatcgtcataatgtctatattaatggaatcacatatactccagtatcaagtacaaatgaaaaggatatgtacagcttcctagaggtaaactccttatgttgcagatggtctgatcttaagcttcttaaaatattacacatggaaaagagtctgtatttgaatgccttcatgtcctagttgagggtaatgggatataaagaggtaagtggcttctctactaatagcagcagatctgcgaaaagctgctgaactaagctggaactttttggagtattattcaagttttcttttttcacaggaattaattgctctgtgatgtttattaaaatcacatatacaaaataattactgttgaaagagtttaatgaaaagaataaaattacatccttaagtatataaatatcccttctacagatgtgaatgttaaaagtttaatttaagttaactggattgcttgtcaaattcaataaaaagaagtagctacctatgtatattttataatatatatttactgattagatgataattttctttgcaggacatgggcttaaaggcattcaccaactcaaagattcgtaaacccaaaatgtgtccacagcttcaacagtatgaaatgcatggacctgaaggtctacgtgtaggtttttatggtaaacaaaaaattaataaatatatattgcctaatatattcaccaaattttaaattttttaaaagatacaatgtgacaaaaattaacaaacaaaaaggacatgtgagtcatacatattaaggttattgctcaaggtcatatagtaatataaactcaaattctagtaaatggaggtacatgtgttaggctgaaaggaaagagaaagtttccaagcgtaggattagtgtaaacagaaatagaaatgttcacacaacaacactacattctccatcagtcaggtaaaaaagctgttcaacttccccaaaacatcagccaatatttatgttggaaccacacacattcatcaatgacatgagctacttctttgatgaactgaatagtaatcaagcatttatttatagtcccatattgtcaaatcatgattgaggataagttgagtacagagaaaagagggtcaaaaatcaaggaaagcatttaaggagaatcagttggctctatggaattcactatgaagcctaccgcatattttattatttataaattatattgtataatcctttatcagtaagatatatagtaaatttatgcatgtataggtatatatatatatatatatatatatatatatatatgcacaatttttttttccagagagctggttgtgaaatattgaccagcacacccttaatagaaggtgaatagagtgaaggaaactaactgtaatcttctgacacgatagagaataaaaagtctttattattattaaacttttccctcctgtaaactgtttctcaaagccactgtcataacatgtgtgtcagtttttccttgctcctgcagaggagcacaccaatggaaacttggattcctgcccctcttcacggccttgtgtcataacactctccacttagcacagcggcagcagccacataggactccacagagtccttgtgcccca

SEQ ID NO: 3630 - DNA, 6000 bp, Homo sapiens
cctgtaatcccagtactttgggagaacgggatgggaggatctcttgaggtcaggagtttgagaccagcctggtcaacatagtgagaccccatctctataaaagtaaataaataaataaataaataaataagaacaaagggggaaaaataaaatacataaaatattgttgtgtataatctatgcttattccagatttttaaaccataaatattcttgaacctcttctcaaaatgagaattgtgttagagaatggggtggagaaaatgtacgatttcaaggtatgttgtatataccaggtcttgtgctgagtcatttatgtcatttatattattataaatatcttttttccctttcaagatagttatgatttatgaagcattaaattgggtacttctaccgactgaagcggactcttgccatgagcaaatatgtcataatataaacctttgaaggttgctcctagtctagtagactctaaaagataacttgctagaaaagtatcagtaatctactctctcattagttcttgtagcaacacagaagcaccatagcagactgaaggaaacttaatgcaacctctaaagaatctacataggcatcaaaaaataacttctgaaggagcatggtgttcctcttatggagaaagaaccaaatattggctcatagaaggttaaagagcatgtagcatgaatacaatgtgttgaactcttactcttacatctcataacttcaggttctatttccctcttctagtatgaggcctagatcaaatggtagtgaattggatgtcttcatacccttaactagcatcagaacattaggtgggtgagctgaagcttaaagctggtgaaaaatcaacagagtatatgatttatgagaggagagagggctttgatagggtttttttctaaagctagagtccttagaggtaatcatccatttgttacatctactgtttattatgtctgttacatctactaatggaaatagtcattaacctatgatggcttcctctcattctctttgtgccccagtgaagggccatttttccatctcaatccctgtgaagtcagacattgctcctgtcgctcggttgctcatctatgctgttttacctaccggggacgtgattggggattctgcaaaatatgatgttgaaaattgtctggccaacaaggtgtgtgttttagatcataaaatcttcaacatgtaaaactagaagttactattgttatcatttgttttacacatgtgaacattagggccaaaagggttaaacaaattccccagagacattcagcaaggtagtggcagagtcacactaagaagcagaatcacttgattccttatacaaaactctcaaacttctcctagcagtgcctcttaccaattacacagttcagagtatgttattcccttcttctatgatgaaacgttgggaaatatgtaagcaagtttttaagactactaaggagccaaaagaaaaatgcaagagcacctagacccatgcatgtcccaccacaattaatgagcaccttgccgtgtatcaaagataaaaatggcatttcatgactagtaatttataagaataattagaaataattctactggctcaagtgattcttgagaatgaaagagaagtgtagggaacaaaaagcttcaggattgacacaatgccaaccctccacgaagtcaagcagagtggttatacattgtacatgaggaacactctgcaaatgcgagtgaatgcatgggtaaacctggaaatttgcttttctgaccttttgttccaatttcacaggtggatttgagcttcagcccatcacaaagtctcccagcctcacacgcccacctgcgagtcacagcggctcctcagtccgtctgcgccctccgtgctgtggaccaaagcgtgctgctcatgaagcctgatgctgagctctcggcgtcctcggtgagttcctggcagcctcaggaatcaagaagggccgtgccaggggctcagagcaaggaaaaatgactggataagtaggataagatcaattaaaattatatttatctaggaattaattgctttgagctctcttgtgggctttcattggtaaggaattatatatatatatatatataactactcacttctgcagttaaaaaaataaacaaaatacaatatattgaatcaaataaaagaatttttaaaaggacaaaatgtgatgaaaattaacaaccaaaaaaggactcgttattcagacacgttaagcttcttgctcaagagcacatagcaatacaaattcaaatcttctgattgtgtcaggacatccgtatatgcaaggctggagagaatacagagcagattgtgaaaagtgctatatgagaagtgcagttatgcaaaataaaagaaaggattaactgagcaaccggggaagccgttcgaaaattatatatttaaaatgtaaaaagaccatacagtacccaaagtccttaaaatcccagagctccatgcaaccagtaataggagttgtcaaactagtttcaacatttcaaaaagcctaacaaaagtgatacatatacctgcactgaggctatacaggctaaatgaaatatcagatttccgtttttataagaattatggctgggcctggtggctcacgcctgtaatcccaacactgggaggccaaggcaggcagataacttgagatcaggagtttgagaccagtctggccaatataatgaaaccccgtatctactaaaaatacaaaaattagtcagacgtggtggcgggcgcctgtcatcccagctactcaggaggctgaggcaggagaatcacttgaacccaggaggcagaggttgagtgagccgagatcgtgccactgcactccagcctgggcaatagagcaagacttggtgtcaaaaaaaaaaaaaaaaaaagaattacatcagttgaaataattgctgtcccaagctacacataatttctgagggaacatatgtattatctctgaggaacaaaacttagggaaattgaactactatataattgacattgataactgaactctttgaaaatatggagctaatagaagaaataccaaaaggatatgctgaattggaacaacaaaaactagttaatagcatgtactaatagtagtttgctcacatcttcaaatttttaatatgagaccaattgtaataacctcttactgaagctttttctactaccataatttaacaaagagaaatttatatttttattttcctgaaatagaaacttataaaaaaatgtttcttacttgtttgtccttctaatgggattttaactgaaaatattagaatacttctaaaggaagcatcaagtacatttcaacagtaggatctcaagaggatatgtgggaaaataatatacatgttttatacttttataatataattttataattctcaaagaatttttcaaattataacaaccctgatgggtagataaggcagacagtcctatttattaataataaagcagaagctttcagggatttagtagtagacctgagttaaaacaccaactcttctcaagctttgattagtgtcttaccaatgaaacactttgctgctactagtgtaggtcattcattcaacacatttatttaatgcccactgtgttctaggtattatactaagtgctagtagagatcaagcagtgagctactggaaagataaaaatgtatgtctcatggaacttacattgtctgtcccatagatgagacagacaataattatgcaatatgccacaataaaagcagggagaggaaatgagaaatgttaagatactttgagaaagtgtctaatttcatcacaccactcactttgctcatctgttcttgtcaatcagttttaaactcctacgaatataatgcaatgtaactatcacaatttttatgtctgtcttacttctcaccttcaaatggacttgaaagcatcatgcctagaattttacggttaaagttgtatgtattatatgaagatctggagcattttgtttccactaataatacctaagaaaatgccatcgtgtcctgtggagagaggatattcctattcgtgtgcctgtttagaacatgcacccattaactttgctatatactgagtcagttgctcaccacaagataagcacaaaactatcatttccttctatcatctcaaagctttgtgcaatgtcacaaatacagcagacctcgatttttcaattaataaagttttatttcattccagtgttgagtctagtggtggcctctgaactgtgtaacgaagtagtacttagtacttagatgagtacttagatggagtgtttggtttttcctaaaattgttaaacatcttcaaaatgaaaacactgtgtcaagaaaatgatccataccctctataaatcatcaaagcaatgagagcgctcaaagaaagacggatgttcattattcctgttcttttctccttgaacttaaaaaatgtcacaaaggccgggcgcggtggctcacgcctgtaatcccagcactttgggaggccgaggcgggtggatcatgaggtcaggagatcgagaccatcctggctaacaaggtgaaaccccgtctctactaaaaatacaaaaaattagccgggcgcggtggcgggcgcctgtagtcccagctactcgggaggctgaggcaggagaatggcgtgaacccgggaagcggagcttgcagtgagccgagattgcgccactgcagtccgcggtccggcctgggcgacagagcgagactccgtctcaaaaaaaaaaaaaaaaaaaaaaaaaaaagtcacaaataagtttgcctttttgtctttcgtatttgtacaggtttacaacctgctaccagaaaaggacctcactggcttccctgggcctttgaatgaccaggacaatgaagactgcatcaatcgtcataatgtctatattaatggaatcacatatactccagtatcaagtacaaatgaaaaggatatgtacagcttcctagaggtaaactccttatgttgcagatggtctgatcttaagcttcttaaaatattacacatggaaaagagtctgtatttgaatgccttcatgtcctagttgagggtaatgggatataaagaggtaagtggcttctctactaatagcagcagatctgcgaaaagctgctgaactaagctggaactttttggagtattattcaagttttcttttttcacaggaattaattgctctgtgatgtttattaaaatcacatatacaaaataattactgttgaaagagtttaatgaaaagaataaaattacatccttaagtatataaatatcccttctacagatgtgaatgttaaaagtttaatttaagttaactggattgcttgtcaaattcaataaaaagaagtagctacctatgtatattttataatatatatttactgattagatgataattttctttgcaggacatgggcttaaaggcattcaccaactcaaagattcgtaaacccaaaatgtgtccacagcttcaacagtatgaaatgcatggacctgaaggtctacgtgtaggtttttatggtaaacaaaaaattaataaatatatattgcctaatatattcaccaaattttaaattttttaaaagatacaatgtgacaaaaattaacaaacaaaaaggacatgtgagtcatacatattaaggttattgctcaaggtcatatagtaatataaactcaaattctagtaaatggaggtacatgtgttaggctgaaaggaaagagaaagtttccaagcgtaggattagtgtaaacagaaatagaaatgttcacacaacaacactacattctccatcagtcaggtaaaaaagctgttcaacttccccaaaacatcagccaatatttatgttggaaccacacacattcatcaatgacatgagctacttctttgatgaactgaatagtaatcaagcatttatttatagtcccatattgtcaa

SEQ ID NO: 3631 - DNA, 6000 bp, Homo sapiens
aatcttcaggtgcgcctagtagatgggaaaggcgtccctataccaaataaagtcatattcatcagaggaaatgaagcaaactattactccaatgctaccacggatgagcatggccttgtacagttctctatcaacaccaccaatgttatgggtacctctcttactgttagggtaagtttggaaagaaattaccaatgacatgaagtagccttggaaacaaggttgcaacctaagggtgagaaaatttccaaactgtgtctagttctatggagagaaaaaaactagcaattagaaaccgattgaaggttaacttttttaaagtttatgaaaagaaggcagtatattgtgattaaaagtgcgggttagactttagcagtgttgctgggaacgtaaaatggcggagccactatgaaaaacagtatagtagttcctgaaaaaattaaaaaatagaattaccaaatgatccagtaatcctacttctggacatatattcaaaagaatcgaaaacggggtctcaaagagctatttgcacacccgtgttcatagccgcactattcacaatagctgagagatcgaggctacccaaatgtccatcaagggatgaacaggtaaacaaaatgtggtatataaatacaacagaatattatgcagcctgagaagggaagaaaatcctgtcacatgctacagcatgaatgatccttgaggacgttatggtaagtgaaataagctagtcacaaaaagaccaatactgtatgattcacgtacatggggtttctaaagtagtcaaagtcatagaaacagaaaacaggatggtggttgccaagggctagggaaagagagaaatggggaattcctcttattggtattcaggtttagttttacaagatgaaaagttctggagatctgttgcacaacagatatacttaatactaccaaactgtacactaaagaataatgaagatggtaattttatgttgtgtgtgtgtgtgtgtttataataacttttttgaaaagtgtgaattccagaatctgaatcagataaagtggttaaaaatactggctcaaccctattttaaggaattaactaaaacctctgtgcttcatttccttatctgtaaaatgattgcaatactaacacctgactcttggggtggttgtgaagattaagtgaaatcatacatgttgaatcacttagtaagccccctttaactgttagatacttttactataaaagccaattctaacataattagcatttagttttaaatatatatactccaaaaattattaccttactttattttgtcttgctattctaattttctccagatgacctgttcataccaatataagttattcggtatagcatgcagtcctctattcatcaagagagatgtagacatgtctatagatacatggatatacaatacatatttaatatatattacataatcatggtaatggaaaacgcctgcctctttagagttttaccttgttatagagaaataaataatacattttatttatttagctttaatagatggcataaaagcacctccctctaatttgaatgtttactcatttcaaaaagtgtcttgaatgctttccacgtgccagcactgtgctagtcttgacaatgaaattattatttctacctgttccctgtttggggtgatcatatatgtgttgtcaccaaaatatacattaagatatgaacaaaatgttttgctcaaggattcactagtgctattgggagctggggatgaaggtagaggaagcctgaaaggagctaaggaataacttctacaggaagaaaagttggaaatataacccaaatagggcctctgaggtattagaatccagattgcagggagcattaaaaatagtcagcctaggccaggcacggtagctcacgcctgtaatcccagcactttgggaggctgaggtgggtggattgcgtgaggccaggagatcgagacgagcctaggcaacgtggtgaaaccctgtctctacaaaatatacaaaaaattagctgggtggggtggcatgcacctgtagtcctagcaactcaggaggctgactgggaggatcacttgagccccagaggcagagattgcactgagccaagattgtgccactgtactccagcatgggcgccagagcaaaaccctgtctcaaaaaaataataataatagcaatcagcctaagatagcccagaagaggtagacttcagctaattcatcagctcagctcttaaaccaatgctttctaccaatgtcttctcagacccctaaggttacaatattttatttattcataatacccattcaaaatccaccctaaaagaggcagctgctttctgaaagcacagttcttccatttctagagattatttactctcctcaatgaagtttcatagctccagtgtctctaattgcacaggtaaagcagtcaaagaaatttcaagcaagctaatcagagcaaaggatgcctccttttatgctcttaagaaatataaatctcaatcccaggaggctctgcagtgtaaagtcacaaagcatgcctacatttgaagcagagaaacaaaatcaggggtccttctcccacttttcattgtggaacaaaagatttctagctactagttaaggtaggacagtaaacttacgtagttttgtgagaacattaatctttatgacgtataatctaaaaataatataatttttctaattcattaggtcaattacaaggatcgtagtccctgttacggctaccagtgggtgtcagaagaacacgaagaggcacatcacactgcttatcttgtgttctccccaagcaagagctttgtccaccttgagcccatgtctcatgaactaccctgtggccatactcagacagtccaggcacattatattctgaatggaggcaccctgctggggctgaagaagctctccttctattatctggtgagaagggaggttactgcgttgacttcactgtagacaaaagctctctgtggagcaagtaatcatgaagctctttagatgtcattacttcaacttcttatccatgttccttttgaaagtttgatttctcttgaggtgaattattgccggcagggactcaataaaacaagtatattgaagtgagactgaagcgtgttctctctggcacatttaatttctttttatttccttttttgcagataatggcaaagggaggcattgtccgaactgggactcatggactgcttgtgaagcaggaagacagtgagtatttccatcatctctgcattgctgccccattctgacccattcagccttacaccacggaagtatcagaatactttccctttttttccataggtttttgggggaacaggtggtgtttggtcacatgaatgaataaattctttggtagtgatttccgagattttggtgcacccatcacccgagcagtatacattgtacccaatttgcagtcttttatccctcacccccttccacccttccccctgaatccacaaagtccattgtatcattcttatgcctttgcatcctcataacttagctcccacttcctaatagcttagctgccacttcctaatagcttagctcctacttctgagtgagaagatatgatgtttggttttccattcctgagctgggaatatcaggaatactttcaagtaacgagagaccatttccatctaatattaattaaaagaaagttgagggagggaaaacaataatggtttttttctcaccctttatcaaatatgtgttgtcttttttttcagcctattttctttgcgttatttaaaatattggtgtgggccagctatgatggcttacgcctgtaatcccagtactttgggagaacgggatgggaggatctcttgaggtcaggagtttgagaccagcctggtcaacatagtgagaccccatctctataaaagtaaataaataaataaataaataaataagaacaaagggggaaaaataaaatacataaaatattgttgtgtataatctatgcttattccagatttttaaaccataaatattcttgaacctcttctcaaaatgagaattgtgttagagaatggggtggagaaaatgtacgatttcaaggtatgttgtatataccaggtcttgtgctgagtcatttatgtcatttatattattataaatatcttttttccctttcaagatagttatgatttatgaagcattaaattgggtacttctaccgactgaagcggactcttgccatgagcaaatatgtcataatataaacctttgaaggttgctcctagtctagtagactctaaaagataacttgctagaaaagtatcagtaatctactctctcattagttcttgtagcaacacagaagcaccatagcagactgaaggaaacttaatgcaacctctaaagaatctacataggcatcaaaaaataacttctgaaggagcatggtgttcctcttatggagaaagaaccaaatattggctcatagaaggttaaagagcatgtagcatgaatacaatgtgttgaactcttactcttacatctcataacttcaggttctatttccctcttctagtatgaggcctagatcaaatggtagtgaattggatgtcttcatacccttaactagcatcagaacattaggtgggtgagctgaagcttaaagctggtgaaaaatcaacagagtatatgatttatgagaggagagagggctttgatagggtttttttctaaagctagagtccttagaggtaatcatccatttgttacatctactgtttattatgtctgttacatctactaatggaaatagtcattaacctatgatggcttcctctcattctctttgtgccccagtgaagggccatttttccatctcaatccctgtgaagtcagacattgctcctgtcgctcggttgctcatctatgctgttttacctaccggggacgtgattggggattctgcaaaatatgatgttgaaaattgtctggccaacaaggtgtgtgttttagatcataaaatcttcaacatgtaaaactagaagttactattgttatcatttgttttacacatgtgaacattagggccaaaagggttaaacaaattccccagagacattcagcaaggtagtggcagagtcacactaagaagcagaatcacttgattccttatacaaaactctcaaacttctcctagcagtgcctcttaccaattacacagttcagagtatgttattcccttcttctatgatgaaacgttgggaaatatgtaagcaagtttttaagactactaaggagccaaaagaaaaatgcaagagcacctagacccatgcatgtcccaccacaattaatgagcaccttgccgtgtatcaaagataaaaatggcatttcatgactagtaatttataagaataattagaaataattctactggctcaagtgattcttgagaatgaaagagaagtgtagggaacaaaaagcttcaggattgacacaatgccaaccctccacgaagtcaagcagagtggttatacattgtacatgaggaacactctgcaaatgcgagtgaatgcatgggtaaacctggaaatttgcttttctgaccttttgttccaatttcacaggtggatttgagcttcagcccatcacaaagtctcccagcctcacacgcccacctgcgagtcacagcggctcctcagtccgtctgcgccctccgtgctgtggaccaaagcgtgctgctcatgaagcctgatgctgagctctcggcgtcctcggtgagttcctggcagcctcaggaatcaagaagggccgtgccaggggctcagagcaaggaaaaatgactggataagtaggataagatcaattaaaattatatttatctaggaattaattgctttgagctctcttgtgggctttcattggtaaggaattatatatatatatatatataactactcacttctgcagttaa

SEQ ID NO: 3632 - DNA, 6000 bp, Homo sapiens
ctaaaaccatgcctggttaatgttatcatttaatataaccaaaagtataaaatatcaccaaggcttgattagtataaccaaaggtataaaactacataaaaatagatttattcttctgtaaatttgtgtatgaaatgtatgtaattatcctaaggccttattaaaattagtagagttttccccccttcttttgaaacagcattgtacaagtcactcaatctccttctcatggtttaccaggcagtctcaggtttttatgacattttctcacaagaatctcaaaattcatgctgaccagtttcattacgatgctaacactaactttgtatggaaacaggtgggtaggtggttttaatttttattttgaagtattaaagattctacaataatgtttatttcatggatagtatatttacactatttttctataacaagtatatttctaaaacagtgaacatggggtaaaacactgctatttaaggttctcagatttttgaattatgaattttcatgttatctaccaaaaaaatcttctcttacaatttttctgttgtcagcagatgtgcaaatggatctttatgactctagaagtctgagatcacagttacatgtgcctcaatgtgtatttactgtgtatcattttcttaatgtaaatgttacaggatttcagctatgaagggtgtaaaagaggcatagactcaacaaagtggagtacattctagaaggcttggttatgtcatgacaccaaaatgtattcaacttcctaaaatgaaagtgtagctcatttgtaaatttctcagaaagatagtgtactttgtaagtacattttattgctgttaaatatcctatttgtcataagactctctagctagaagaaaatcagaattatgtgcctattcttgtctttgtacatgcagccaacatttcactggcaaacttagattttgtaaatcaattatgagtactgatgggggtcagcctattgttcttcctgctaccaactgtagcttatactgaaaaagaattgccacctttacaatctgaactggactactcaactgccaatacaatattagcagtaaattagatttggcaacttatttaatactgtgtgcctcttttcaattttatatttttcacatgggaagtgtgtcataaaatctgcctaccttccaaaaggctgaagatctaggttgagaagcagagaccatgtctaaggcaactggagaaacacacaggacaatgtattggcaattgtttacttgtgcacttatgagacttcagacactaatctataggaagttaatggtccactccaaaataggtgtttggggcacaaataaatttagttaatagattaatagattaaaatatttcattatcatattactctagtgctctgtgactctctaagagttatatataataatacacagcacttccaaaatatctagaagacatttttcaggtcactcttgttattatccctatcactctctatcccttcacactgctctgtttttcttcttaggattgattactactaaattagtgtatgttatgtatatatttatttagcatctatctctttcactagacagtaagctctgtgatggaagaaacttcgttttttttcactgctgtgtcctcagtgcctggaaccatgttcaacatagaggaggcactaaaaaatgtgataaatgaatatgtttggtgcctattagttattaccaatataactaatccacagcttttaatcttcaggtgcgcctagtagatgggaaaggcgtccctataccaaataaagtcatattcatcagaggaaatgaagcaaactattactccaatgctaccacggatgagcatggccttgtacagttctctatcaacaccaccaatgttatgggtacctctcttactgttagggtaagtttggaaagaaattaccaatgacatgaagtagccttggaaacaaggttgcaacctaagggtgagaaaatttccaaactgtgtctagttctatggagagaaaaaaactagcaattagaaaccgattgaaggttaacttttttaaagtttatgaaaagaaggcagtatattgtgattaaaagtgcgggttagactttagcagtgttgctgggaacgtaaaatggcggagccactatgaaaaacagtatagtagttcctgaaaaaattaaaaaatagaattaccaaatgatccagtaatcctacttctggacatatattcaaaagaatcgaaaacggggtctcaaagagctatttgcacacccgtgttcatagccgcactattcacaatagctgagagatcgaggctacccaaatgtccatcaagggatgaacaggtaaacaaaatgtggtatataaatacaacagaatattatgcagcctgagaagggaagaaaatcctgtcacatgctacagcatgaatgatccttgaggacgttatggtaagtgaaataagctagtcacaaaaagaccaatactgtatgattcacgtacatggggtttctaaagtagtcaaagtcatagaaacagaaaacaggatggtggttgccaagggctagggaaagagagaaatggggaattcctcttattggtattcaggtttagttttacaagatgaaaagttctggagatctgttgcacaacagatatacttaatactaccaaactgtacactaaagaataatgaagatggtaattttatgttgtgtgtgtgtgtgtgtttataataacttttttgaaaagtgtgaattccagaatctgaatcagataaagtggttaaaaatactggctcaaccctattttaaggaattaactaaaacctctgtgcttcatttccttatctgtaaaatgattgcaatactaacacctgactcttggggtggttgtgaagattaagtgaaatcatacatgttgaatcacttagtaagccccctttaactgttagatacttttactataaaagccaattctaacataattagcatttagttttaaatatatatactccaaaaattattaccttactttattttgtcttgctattctaattttctccagatgacctgttcataccaatataagttattcggtatagcatgcagtcctctattcatcaagagagatgtagacatgtctatagatacatggatatacaatacatatttaatatatattacataatcatggtaatggaaaacgcctgcctctttagagttttaccttgttatagagaaataaataatacattttatttatttagctttaatagatggcataaaagcacctccctctaatttgaatgtttactcatttcaaaaagtgtcttgaatgctttccacgtgccagcactgtgctagtcttgacaatgaaattattatttctacctgttccctgtttggggtgatcatatatgtgttgtcaccaaaatatacattaagatatgaacaaaatgttttgctcaaggattcactagtgctattgggagctggggatgaaggtagaggaagcctgaaaggagctaaggaataacttctacaggaagaaaagttggaaatataacccaaatagggcctctgaggtattagaatccagattgcagggagcattaaaaatagtcagcctaggccaggcacggtagctcacgcctgtaatcccagcactttgggaggctgaggtgggtggattgcgtgaggccaggagatcgagacgagcctaggcaacgtggtgaaaccctgtctctacaaaatatacaaaaaattagctgggtggggtggcatgcacctgtagtcctagcaactcaggaggctgactgggaggatcacttgagccccagaggcagagattgcactgagccaagattgtgccactgtactccagcatgggcgccagagcaaaaccctgtctcaaaaaaataataataatagcaatcagcctaagatagcccagaagaggtagacttcagctaattcatcagctcagctcttaaaccaatgctttctaccaatgtcttctcagacccctaaggttacaatattttatttattcataatacccattcaaaatccaccctaaaagaggcagctgctttctgaaagcacagttcttccatttctagagattatttactctcctcaatgaagtttcatagctccagtgtctctaattgcacaggtaaagcagtcaaagaaatttcaagcaagctaatcagagcaaaggatgcctccttttatgctcttaagaaatataaatctcaatcccaggaggctctgcagtgtaaagtcacaaagcatgcctacatttgaagcagagaaacaaaatcaggggtccttctcccacttttcattgtggaacaaaagatttctagctactagttaaggtaggacagtaaacttacgtagttttgtgagaacattaatctttatgacgtataatctaaaaataatataatttttctaattcattaggtcaattacaaggatcgtagtccctgttacggctaccagtgggtgtcagaagaacacgaagaggcacatcacactgcttatcttgtgttctccccaagcaagagctttgtccaccttgagcccatgtctcatgaactaccctgtggccatactcagacagtccaggcacattatattctgaatggaggcaccctgctggggctgaagaagctctccttctattatctggtgagaagggaggttactgcgttgacttcactgtagacaaaagctctctgtggagcaagtaatcatgaagctctttagatgtcattacttcaacttcttatccatgttccttttgaaagtttgatttctcttgaggtgaattattgccggcagggactcaataaaacaagtatattgaagtgagactgaagcgtgttctctctggcacatttaatttctttttatttccttttttgcagataatggcaaagggaggcattgtccgaactgggactcatggactgcttgtgaagcaggaagacagtgagtatttccatcatctctgcattgctgccccattctgacccattcagccttacaccacggaagtatcagaatactttccctttttttccataggtttttgggggaacaggtggtgtttggtcacatgaatgaataaattctttggtagtgatttccgagattttggtgcacccatcacccgagcagtatacattgtacccaatttgcagtcttttatccctcacccccttccacccttccccctgaatccacaaagtccattgtatcattcttatgcctttgcatcctcataacttagctcccacttcctaatagcttagctgccacttcctaatagcttagctcctacttctgagtgagaagatatgatgtttggttttccattcctgagctgggaatatcaggaatactttcaagtaacgagagaccatttccatctaatattaattaaaagaaagttgagggagggaaaacaataatggtttttttctcaccctttatcaaatatgtgttgtcttttttttcagcctattttctttgcgttatttaaaatattggtgtgggccagctatgatggcttacgcctgtaatcccagtactttgggagaacgggatgggaggatctcttgaggtcaggagtttgagaccagcctggtcaacatagtgagaccccatctctataaaagtaaataaataaataaataaataaataagaacaaagggggaaaaataaaatacataaaatattgttgtgtataatctatgcttattccagatttttaaaccataaatattcttgaacctcttctcaaaatgagaattgtgttagagaatggggtggagaaaatgtacgatttcaaggtatgttgtatataccaggtcttgtgctgagtcatttatgtcatttatattattataaatatcttttttccctttcaagatagttatgatttatgaagcattaaattgggtactt

SEQ ID NO: 3633 - DNA, 6000 bp, Homo sapiens
ggtataagagaaaacacaacaggcattgattttcttagccaaataatgaattgtaagttggggggaggtgatagaattttagagacatcattcttcccaaaaataacagatttttttctcttttttcagtggtggaattgactggaaggcagtccagtgaaatcacaagaaccataaccaaactctcatttgtgaaagtggactcacactttcgacagggaattcccttctttgggcaggtggagtattttccagttcactcatcaacccatgtactgttacctaattagcacaatagttatggtttgtgctaaaaccatgcctggttaatgttatcatttaatataaccaaaagtataaaatatcaccaaggcttgattagtataaccaaaggtataaaactacataaaaatagatttattcttctgtaaatttgtgtatgaaatgtatgtaattatcctaaggccttattaaaattagtagagttttccccccttcttttgaaacagcattgtacaagtcactcaatctccttctcatggtttaccaggcagtctcaggtttttatgacattttctcacaagaatctcaaaattcatgctgaccagtttcattacgatgctaacactaactttgtatggaaacaggtgggtaggtggttttaatttttattttgaagtattaaagattctacaataatgtttatttcatggatagtatatttacactatttttctataacaagtatatttctaaaacagtgaacatggggtaaaacactgctatttaaggttctcagatttttgaattatgaattttcatgttatctaccaaaaaaatcttctcttacaatttttctgttgtcagcagatgtgcaaatggatctttatgactctagaagtctgagatcacagttacatgtgcctcaatgtgtatttactgtgtatcattttcttaatgtaaatgttacaggatttcagctatgaagggtgtaaaagaggcatagactcaacaaagtggagtacattctagaaggcttggttatgtcatgacaccaaaatgtattcaacttcctaaaatgaaagtgtagctcatttgtaaatttctcagaaagatagtgtactttgtaagtacattttattgctgttaaatatcctatttgtcataagactctctagctagaagaaaatcagaattatgtgcctattcttgtctttgtacatgcagccaacatttcactggcaaacttagattttgtaaatcaattatgagtactgatgggggtcagcctattgttcttcctgctaccaactgtagcttatactgaaaaagaattgccacctttacaatctgaactggactactcaactgccaatacaatattagcagtaaattagatttggcaacttatttaatactgtgtgcctcttttcaattttatatttttcacatgggaagtgtgtcataaaatctgcctaccttccaaaaggctgaagatctaggttgagaagcagagaccatgtctaaggcaactggagaaacacacaggacaatgtattggcaattgtttacttgtgcacttatgagacttcagacactaatctataggaagttaatggtccactccaaaataggtgtttggggcacaaataaatttagttaatagattaatagattaaaatatttcattatcatattactctagtgctctgtgactctctaagagttatatataataatacacagcacttccaaaatatctagaagacatttttcaggtcactcttgttattatccctatcactctctatcccttcacactgctctgtttttcttcttaggattgattactactaaattagtgtatgttatgtatatatttatttagcatctatctctttcactagacagtaagctctgtgatggaagaaacttcgttttttttcactgctgtgtcctcagtgcctggaaccatgttcaacatagaggaggcactaaaaaatgtgataaatgaatatgtttggtgcctattagttattaccaatataactaatccacagcttttaatcttcaggtgcgcctagtagatgggaaaggcgtccctataccaaataaagtcatattcatcagaggaaatgaagcaaactattactccaatgctaccacggatgagcatggccttgtacagttctctatcaacaccaccaatgttatgggtacctctcttactgttagggtaagtttggaaagaaattaccaatgacatgaagtagccttggaaacaaggttgcaacctaagggtgagaaaatttccaaactgtgtctagttctatggagagaaaaaaactagcaattagaaaccgattgaaggttaacttttttaaagtttatgaaaagaaggcagtatattgtgattaaaagtgcgggttagactttagcagtgttgctgggaacgtaaaatggcggagccactatgaaaaacagtatagtagttcctgaaaaaattaaaaaatagaattaccaaatgatccagtaatcctacttctggacatatattcaaaagaatcgaaaacggggtctcaaagagctatttgcacacccgtgttcatagccgcactattcacaatagctgagagatcgaggctacccaaatgtccatcaagggatgaacaggtaaacaaaatgtggtatataaatacaacagaatattatgcagcctgagaagggaagaaaatcctgtcacatgctacagcatgaatgatccttgaggacgttatggtaagtgaaataagctagtcacaaaaagaccaatactgtatgattcacgtacatggggtttctaaagtagtcaaagtcatagaaacagaaaacaggatggtggttgccaagggctagggaaagagagaaatggggaattcctcttattggtattcaggtttagttttacaagatgaaaagttctggagatctgttgcacaacagatatacttaatactaccaaactgtacactaaagaataatgaagatggtaattttatgttgtgtgtgtgtgtgtgtttataataacttttttgaaaagtgtgaattccagaatctgaatcagataaagtggttaaaaatactggctcaaccctattttaaggaattaactaaaacctctgtgcttcatttccttatctgtaaaatgattgcaatactaacacctgactcttggggtggttgtgaagattaagtgaaatcatacatgttgaatcacttagtaagccccctttaactgttagatacttttactataaaagccaattctaacataattagcatttagttttaaatatatatactccaaaaattattaccttactttattttgtcttgctattctaattttctccagatgacctgttcataccaatataagttattcggtatagcatgcagtcctctattcatcaagagagatgtagacatgtctatagatacatggatatacaatacatatttaatatatattacataatcatggtaatggaaaacgcctgcctctttagagttttaccttgttatagagaaataaataatacattttatttatttagctttaatagatggcataaaagcacctccctctaatttgaatgtttactcatttcaaaaagtgtcttgaatgctttccacgtgccagcactgtgctagtcttgacaatgaaattattatttctacctgttccctgtttggggtgatcatatatgtgttgtcaccaaaatatacattaagatatgaacaaaatgttttgctcaaggattcactagtgctattgggagctggggatgaaggtagaggaagcctgaaaggagctaaggaataacttctacaggaagaaaagttggaaatataacccaaatagggcctctgaggtattagaatccagattgcagggagcattaaaaatagtcagcctaggccaggcacggtagctcacgcctgtaatcccagcactttgggaggctgaggtgggtggattgcgtgaggccaggagatcgagacgagcctaggcaacgtggtgaaaccctgtctctacaaaatatacaaaaaattagctgggtggggtggcatgcacctgtagtcctagcaactcaggaggctgactgggaggatcacttgagccccagaggcagagattgcactgagccaagattgtgccactgtactccagcatgggcgccagagcaaaaccctgtctcaaaaaaataataataatagcaatcagcctaagatagcccagaagaggtagacttcagctaattcatcagctcagctcttaaaccaatgctttctaccaatgtcttctcagacccctaaggttacaatattttatttattcataatacccattcaaaatccaccctaaaagaggcagctgctttctgaaagcacagttcttccatttctagagattatttactctcctcaatgaagtttcatagctccagtgtctctaattgcacaggtaaagcagtcaaagaaatttcaagcaagctaatcagagcaaaggatgcctccttttatgctcttaagaaatataaatctcaatcccaggaggctctgcagtgtaaagtcacaaagcatgcctacatttgaagcagagaaacaaaatcaggggtccttctcccacttttcattgtggaacaaaagatttctagctactagttaaggtaggacagtaaacttacgtagttttgtgagaacattaatctttatgacgtataatctaaaaataatataatttttctaattcattaggtcaattacaaggatcgtagtccctgttacggctaccagtgggtgtcagaagaacacgaagaggcacatcacactgcttatcttgtgttctccccaagcaagagctttgtccaccttgagcccatgtctcatgaactaccctgtggccatactcagacagtccaggcacattatattctgaatggaggcaccctgctggggctgaagaagctctccttctattatctggtgagaagggaggttactgcgttgacttcactgtagacaaaagctctctgtggagcaagtaatcatgaagctctttagatgtcattacttcaacttcttatccatgttccttttgaaagtttgatttctcttgaggtgaattattgccggcagggactcaataaaacaagtatattgaagtgagactgaagcgtgttctctctggcacatttaatttctttttatttccttttttgcagataatggcaaagggaggcattgtccgaactgggactcatggactgcttgtgaagcaggaagacagtgagtatttccatcatctctgcattgctgccccattctgacccattcagccttacaccacggaagtatcagaatactttccctttttttccataggtttttgggggaacaggtggtgtttggtcacatgaatgaataaattctttggtagtgatttccgagattttggtgcacccatcacccgagcagtatacattgtacccaatttgcagtcttttatccctcacccccttccacccttccccctgaatccacaaagtccattgtatcattcttatgcctttgcatcctcataacttagctcccacttcctaatagcttagctgccacttcctaatagcttagctcctacttctgagtgagaagatatgatgtttggttttccattcctgagctgggaatatcaggaatactttcaagtaacgagagaccatttccatctaatattaattaaaagaaagttgagggagggaaaacaataatggtttttttctcaccctttatcaaatatgtgttgtcttttttttcagcctattttctttgcgttatttaaaatattggtgtgggccagctatgatggcttacgcctgtaatcccagtactttgggagaacgggatgggaggatctcttgaggtcaggagtttgagaccagcctggtcaacatagtg

SEQ ID NO: 3634 - DNA, 6000 bp, Homo sapiens
gatattttaactactctctccgggagcagtggcaacacaaaaattttaagtgctttgacagcatcctcatctgtagaatgttattctcctgttgcttttctatttttattttctttcacgttcttatcagtattattctatcatgaggtaagaaactgtttctagagaggttatgctaataggattgattctgaaagtgacaaaactgcacacacacacacacacaaaatgggaagggtggatagtgttgaagggtattggttctgccttaaccaaaaataaccaaacgtatattagggagataattaacacatggctataggggaaattcaatcatcaacagatcatttacctgaccttgcatgcttactggaaaaatcacttagattcagaatttgtagagataggcatacaactgaaatctcatctaactcactagtccacctaaggcgggtctacatacctgtctgcactgacatttttacgaagagactgaacgtgatttctcaagacagtctgttccaaccttgaaaagtcttgtttcctggatcttatgttcccatccatggtggcacacagtagcagtagcaggaagagcaggtatagtcctgtccaaagatcacacatgtaatacacctactattcagctaggcccctgctccagttctgtctcacagtgatggccaagttcctggttcctcataactggtgtgatcttgcaaatagacatacagaggacattctcaaataggaaaggagacaaatgcacttggaaacccagcaattgtctatgacatatttacgacacaatcccacttttgtaaaaaagtaaacaggcccggcgtggtggctcacgcctgtaatcccagcactttgggaggctgaggtgggcagatcacgaggtcaggagatcaagaccatcctggctaacatggtgaaaccccgtctctactaaaaaatacaaaaaattagccaggcatggtggccagcgcctgtagtcccagctacttgggaagctgaggcaggagaatggcatgaacccaggaggtggaggttgcagtgagccaagatcgcaccactgcactccagcctgggcgacagagcgagactccatctcaaaaataaaataaaataaaataaaataaaataaaataaaataaacaagtgaaactcgatatagagatggctgcacatggggagaggatgatggaagaagagacactatcgtactaatagtttgtattcctaggtagacttgagggcgtttgggttttttttgttctgttttgttttgtttgtttcgtcttgctggtattgtttctcttttaagaacgggtttaagttttataataagaaagacttttttaagataaaactaaaaaaaaacgaggaaaaaaaagaaatgataaaagaagaatgtaaatttcagcatgttgcaatggagatttctataagagccattagtgactcttgtcttcaatattgtgtgagcccagcagagagcagagggaagtacagacagggaatatactgtagctaaaggggagatataaatagctagaaaatggggaggttcagtgtctgctctgattcctttgggaatgttctcatgacagatacacatatgggaagcctgtccctggacatgtgactgtgagcatttgcagaaagtatagtgacgcttccgactgccacggtgaagattcacaggctttctgtgagaaattcagtggacaggtaggttgaacactattttttctagagaatagcgataaaggcattgttgaaaagcagtgagttgcagcatttttctgacgcaggaagagaacaatctagaagagaattccatgttggctattgtaatttttcaaaaaaaatcatgaacttagcacaatgggaattatttatttctcgtaattgcccattgtgagtgtttcagaacgatagacactgagccatctaaagcctccatgggcattcacttctacaaaggaaggaaaaaaccatacacctcttaattgccttagctggccaggccatcagttctgctctctctgtgaacaagaacctatcacatggccccaccaagatgccagagagttgacaaacacagtccccatatagaaggccgcttcccagccacagctgaatattatggaggaggaaccagactttgatgaggagttctaatggtcaagagcagatgtactgtgtatttcaaaatagcaagtggacaggacttgaactatttccaacacatagaaatgatacatacttgagttggtaggcaccctaaatcccgcgatgtgatcattacacattctctgcatgtaacaaaatatctcgtgtaccccataaatatgtataaatattatgcatcctttgtacaaaaaaaattactcctcaaattttaagacatttctatcgcaatatatctagggaatttcagataccaaggaatacatctgtcaattatacatgagatattgttgtgaaatttaatatttagttgctagagaatatttattgtgtcctcgtcatagaaaatgcctacatgatgttgtccccccacaaaaatcacaccggttatctgaccactgatctatttagtataatatgcattatatttttgtattttattttctcccttcttagctaaacagccatggctgcttctatcagcaagtaaaaaccaaggtcttccagctgaagaggaaggagtatgaaatgaaacttcacactgaggcccagatccaagaagaaggaacaggtttgtgtactacatgggtataagagaaaacacaacaggcattgattttcttagccaaataatgaattgtaagttggggggaggtgatagaattttagagacatcattcttcccaaaaataacagatttttttctcttttttcagtggtggaattgactggaaggcagtccagtgaaatcacaagaaccataaccaaactctcatttgtgaaagtggactcacactttcgacagggaattcccttctttgggcaggtggagtattttccagttcactcatcaacccatgtactgttacctaattagcacaatagttatggtttgtgctaaaaccatgcctggttaatgttatcatttaatataaccaaaagtataaaatatcaccaaggcttgattagtataaccaaaggtataaaactacataaaaatagatttattcttctgtaaatttgtgtatgaaatgtatgtaattatcctaaggccttattaaaattagtagagttttccccccttcttttgaaacagcattgtacaagtcactcaatctccttctcatggtttaccaggcagtctcaggtttttatgacattttctcacaagaatctcaaaattcatgctgaccagtttcattacgatgctaacactaactttgtatggaaacaggtgggtaggtggttttaatttttattttgaagtattaaagattctacaataatgtttatttcatggatagtatatttacactatttttctataacaagtatatttctaaaacagtgaacatggggtaaaacactgctatttaaggttctcagatttttgaattatgaattttcatgttatctaccaaaaaaatcttctcttacaatttttctgttgtcagcagatgtgcaaatggatctttatgactctagaagtctgagatcacagttacatgtgcctcaatgtgtatttactgtgtatcattttcttaatgtaaatgttacaggatttcagctatgaagggtgtaaaagaggcatagactcaacaaagtggagtacattctagaaggcttggttatgtcatgacaccaaaatgtattcaacttcctaaaatgaaagtgtagctcatttgtaaatttctcagaaagatagtgtactttgtaagtacattttattgctgttaaatatcctatttgtcataagactctctagctagaagaaaatcagaattatgtgcctattcttgtctttgtacatgcagccaacatttcactggcaaacttagattttgtaaatcaattatgagtactgatgggggtcagcctattgttcttcctgctaccaactgtagcttatactgaaaaagaattgccacctttacaatctgaactggactactcaactgccaatacaatattagcagtaaattagatttggcaacttatttaatactgtgtgcctcttttcaattttatatttttcacatgggaagtgtgtcataaaatctgcctaccttccaaaaggctgaagatctaggttgagaagcagagaccatgtctaaggcaactggagaaacacacaggacaatgtattggcaattgtttacttgtgcacttatgagacttcagacactaatctataggaagttaatggtccactccaaaataggtgtttggggcacaaataaatttagttaatagattaatagattaaaatatttcattatcatattactctagtgctctgtgactctctaagagttatatataataatacacagcacttccaaaatatctagaagacatttttcaggtcactcttgttattatccctatcactctctatcccttcacactgctctgtttttcttcttaggattgattactactaaattagtgtatgttatgtatatatttatttagcatctatctctttcactagacagtaagctctgtgatggaagaaacttcgttttttttcactgctgtgtcctcagtgcctggaaccatgttcaacatagaggaggcactaaaaaatgtgataaatgaatatgtttggtgcctattagttattaccaatataactaatccacagcttttaatcttcaggtgcgcctagtagatgggaaaggcgtccctataccaaataaagtcatattcatcagaggaaatgaagcaaactattactccaatgctaccacggatgagcatggccttgtacagttctctatcaacaccaccaatgttatgggtacctctcttactgttagggtaagtttggaaagaaattaccaatgacatgaagtagccttggaaacaaggttgcaacctaagggtgagaaaatttccaaactgtgtctagttctatggagagaaaaaaactagcaattagaaaccgattgaaggttaacttttttaaagtttatgaaaagaaggcagtatattgtgattaaaagtgcgggttagactttagcagtgttgctgggaacgtaaaatggcggagccactatgaaaaacagtatagtagttcctgaaaaaattaaaaaatagaattaccaaatgatccagtaatcctacttctggacatatattcaaaagaatcgaaaacggggtctcaaagagctatttgcacacccgtgttcatagccgcactattcacaatagctgagagatcgaggctacccaaatgtccatcaagggatgaacaggtaaacaaaatgtggtatataaatacaacagaatattatgcagcctgagaagggaagaaaatcctgtcacatgctacagcatgaatgatccttgaggacgttatggtaagtgaaataagctagtcacaaaaagaccaatactgtatgattcacgtacatggggtttctaaagtagtcaaagtcatagaaacagaaaacaggatggtggttgccaagggctagggaaagagagaaatggggaattcctcttattggtattcaggtttagttttacaagatgaaaagttctggagatctgttgcacaacagatatacttaatactaccaaactgtacactaaagaataatgaagatggtaattttatgttgtgtgtgtgtgtgtgtttataataacttttttgaaaagtgtgaattccagaatctgaatcagataaagtggttaaaaatactggctcaaccctattttaaggaattaactaaaacctctgtgcttcatttccttatctgtaaaatgattgcaatactaacacctgactcttgg

SEQ ID NO: 3635 - DNA, 6000 bp, Homo sapiens
ttattgttcttttgtgcgtggttatattctcaatacctagaatgatacacagcgcatgagaaggtacttaataaagattagtttttaaaaatgaataaacattcatagtagcttcttatcaatgtttattcatttttaaaagtaatatttattaaactaaatttattaatgaaatatgtccattcctcctcattcttagaactacgtaagaattctatgacccatcttaatgattacatctgaacatatttacttatagttacataagtgtttatttctcaacctgtaaaattgcatagcaaaggattgatcttcactaggatgctataagcacttaagacatgttaatccatttttagtaaatggcactttacatgtatatttgttgctgaaggcctagtaagttcttaacattatttattaattgcttaaaatagattaatgaaaagttctataaaatttaatctggaatatttctgtatttcactatagagggaattattctatatgaaactaatttagattttttaaactttttattgtttttaatttttgtggaaacatagcaggtatatatatttatgggttacatgagatattttgatacaggcatgcagtgcatgataatgattatggatgataatcattatcattatccatatcattatccaatcatggataatgattattatcatgcattgcatgcctgtatcaataaatggagtacccatcccctcaaacatttattctttgtgttacgaacaaatccaattatacttttagttatttttaaatgtacaattaaattattttttactatactcaccctgttatgctagcaaatactagctgctttgcttataaatgagatttaagaatatttgaaaataattataaacttcttttttcttttgtctttcagattccactagtatacattcaggtaagcaacatgaaacattccatattaaaaggaaagcaatacatatagggaaaatgttcttatttcagaggtttttacaatatctcagaaacttgtcattaaaggagaagccttcaaactcccatagagctagatggctataactcatctcctctactcaccctttactactaccccatttgacctttttgtagataacttagggtttccatagatatcttttattagctccaatgctccaggtgcttttgtaagttataattaatttactcatataggatcccaaaggaaatcgcatcgcacaatggcagagtttccagttagagggtggcctcaagcaattttcttttcccctctcatcagagcccttccagggctcctacaaggtggtggtacagaagaaatcaggtggaaggacagagcaccctttcaccgtggaggaatttggtatggatcatgaaaagtcatcaagcattatttttcttcatatttaaactcttaggtcctggaatttaagttcatttggagtctttccatttcccatgggtgacattgggcttggagtagaattaattacacctaagtccaatgaggacatcagtgatctgtgaataggacttcacatagcttcgttattttctgtagcaatatttaataccaacccccaaaattaaaacattcttgttttaatggagttttccataattaattaagcacacagtgatctctcatagtccctcaactgaaatcttcatttgagaggaggatagataagaatagattggagagcagagctaccttttcagagccctaaaatattattagggaactgttacagggaacctgaaaataggaattcccccaaagttgaaaaccaatcaccaaccttctttatcaccaatcaacagttcttcccaagtttgaagtacaagtaacagtgccaaagataatcaccatcttggaagaagagatgaatgtatcagtgtgtggcctgtgagttcattttttaaaaatcttttgtgggggattatttaaaagagactcaccatttgggatattttaactactctctccgggagcagtggcaacacaaaaattttaagtgctttgacagcatcctcatctgtagaatgttattctcctgttgcttttctatttttattttctttcacgttcttatcagtattattctatcatgaggtaagaaactgtttctagagaggttatgctaataggattgattctgaaagtgacaaaactgcacacacacacacacacaaaatgggaagggtggatagtgttgaagggtattggttctgccttaaccaaaaataaccaaacgtatattagggagataattaacacatggctataggggaaattcaatcatcaacagatcatttacctgaccttgcatgcttactggaaaaatcacttagattcagaatttgtagagataggcatacaactgaaatctcatctaactcactagtccacctaaggcgggtctacatacctgtctgcactgacatttttacgaagagactgaacgtgatttctcaagacagtctgttccaaccttgaaaagtcttgtttcctggatcttatgttcccatccatggtggcacacagtagcagtagcaggaagagcaggtatagtcctgtccaaagatcacacatgtaatacacctactattcagctaggcccctgctccagttctgtctcacagtgatggccaagttcctggttcctcataactggtgtgatcttgcaaatagacatacagaggacattctcaaataggaaaggagacaaatgcacttggaaacccagcaattgtctatgacatatttacgacacaatcccacttttgtaaaaaagtaaacaggcccggcgtggtggctcacgcctgtaatcccagcactttgggaggctgaggtgggcagatcacgaggtcaggagatcaagaccatcctggctaacatggtgaaaccccgtctctactaaaaaatacaaaaaattagccaggcatggtggccagcgcctgtagtcccagctacttgggaagctgaggcaggagaatggcatgaacccaggaggtggaggttgcagtgagccaagatcgcaccactgcactccagcctgggcgacagagcgagactccatctcaaaaataaaataaaataaaataaaataaaataaaataaaataaacaagtgaaactcgatatagagatggctgcacatggggagaggatgatggaagaagagacactatcgtactaatagtttgtattcctaggtagacttgagggcgtttgggttttttttgttctgttttgttttgtttgtttcgtcttgctggtattgtttctcttttaagaacgggtttaagttttataataagaaagacttttttaagataaaactaaaaaaaaacgaggaaaaaaaagaaatgataaaagaagaatgtaaatttcagcatgttgcaatggagatttctataagagccattagtgactcttgtcttcaatattgtgtgagcccagcagagagcagagggaagtacagacagggaatatactgtagctaaaggggagatataaatagctagaaaatggggaggttcagtgtctgctctgattcctttgggaatgttctcatgacagatacacatatgggaagcctgtccctggacatgtgactgtgagcatttgcagaaagtatagtgacgcttccgactgccacggtgaagattcacaggctttctgtgagaaattcagtggacaggtaggttgaacactattttttctagagaatagcgataaaggcattgttgaaaagcagtgagttgcagcatttttctgacgcaggaagagaacaatctagaagagaattccatgttggctattgtaatttttcaaaaaaaatcatgaacttagcacaatgggaattatttatttctcgtaattgcccattgtgagtgtttcagaacgatagacactgagccatctaaagcctccatgggcattcacttctacaaaggaaggaaaaaaccatacacctcttaattgccttagctggccaggccatcagttctgctctctctgtgaacaagaacctatcacatggccccaccaagatgccagagagttgacaaacacagtccccatatagaaggccgcttcccagccacagctgaatattatggaggaggaaccagactttgatgaggagttctaatggtcaagagcagatgtactgtgtatttcaaaatagcaagtggacaggacttgaactatttccaacacatagaaatgatacatacttgagttggtaggcaccctaaatcccgcgatgtgatcattacacattctctgcatgtaacaaaatatctcgtgtaccccataaatatgtataaatattatgcatcctttgtacaaaaaaaattactcctcaaattttaagacatttctatcgcaatatatctagggaatttcagataccaaggaatacatctgtcaattatacatgagatattgttgtgaaatttaatatttagttgctagagaatatttattgtgtcctcgtcatagaaaatgcctacatgatgttgtccccccacaaaaatcacaccggttatctgaccactgatctatttagtataatatgcattatatttttgtattttattttctcccttcttagctaaacagccatggctgcttctatcagcaagtaaaaaccaaggtcttccagctgaagaggaaggagtatgaaatgaaacttcacactgaggcccagatccaagaagaaggaacaggtttgtgtactacatgggtataagagaaaacacaacaggcattgattttcttagccaaataatgaattgtaagttggggggaggtgatagaattttagagacatcattcttcccaaaaataacagatttttttctcttttttcagtggtggaattgactggaaggcagtccagtgaaatcacaagaaccataaccaaactctcatttgtgaaagtggactcacactttcgacagggaattcccttctttgggcaggtggagtattttccagttcactcatcaacccatgtactgttacctaattagcacaatagttatggtttgtgctaaaaccatgcctggttaatgttatcatttaatataaccaaaagtataaaatatcaccaaggcttgattagtataaccaaaggtataaaactacataaaaatagatttattcttctgtaaatttgtgtatgaaatgtatgtaattatcctaaggccttattaaaattagtagagttttccccccttcttttgaaacagcattgtacaagtcactcaatctccttctcatggtttaccaggcagtctcaggtttttatgacattttctcacaagaatctcaaaattcatgctgaccagtttcattacgatgctaacactaactttgtatggaaacaggtgggtaggtggttttaatttttattttgaagtattaaagattctacaataatgtttatttcatggatagtatatttacactatttttctataacaagtatatttctaaaacagtgaacatggggtaaaacactgctatttaaggttctcagatttttgaattatgaattttcatgttatctaccaaaaaaatcttctcttacaatttttctgttgtcagcagatgtgcaaatggatctttatgactctagaagtctgagatcacagttacatgtgcctcaatgtgtatttactgtgtatcattttcttaatgtaaatgttacaggatttcagctatgaagggtgtaaaagaggcatagactcaacaaagtggagtacattctagaaggcttggttatgtcatgacaccaaaatgtattcaacttcctaaaatgaaagtgtagctcatttgtaaatttctcagaaagatagtgtactttgtaagtacattttattgctgttaaatatcctatttgtcataagactctctagctagaagaaaatcagaattatgtgcctattcttgtctttg

SEQ ID NO: 3636 - DNA, 6000 bp, Homo sapiens
gtataaaaactacagggttgatcttaaattacatgtcagggtactgagaaagtttctgtactgcacatgagttaccaaggtctaaagtcaatcaccagaggaccatttttggatggagccattgtctaatcatgagctgaaaggcaaatatttaaaatgcaaacatccatggttaggtaacactcttaagaccttattagctgcttaccacaactgagactgtgaagtaatggctcactttctttgaggctcagattccatatctgtggagtggaagcgagtgcttaccatacaattttcacagggctgctgaatgtgtgtatgtatgtatgtgtgtatatatattttaatgaaaattctataatttgattagtttttgtaatgtccgcatgactgagagcttgcttactttttacagcaacttgaaggtaaaaatagattttacaacatgaacaaatgtaactacatatttttatttgaattcagatgttcacaaattgttccttaaagtgaagcatgcctacaagttttaatctgtttaagacctacctcaagtaaaatgttcactgccatggcatgtgagggaaaagggaaataattcttatgcatggccttcaacggccaaatttcatgctcatcagtacatcttctcttggtgtagaactgatgatgataattatgatgatggaaaaaagtgctgttgatagcaatgcctctcttccttcactttcctctaactgaaccgtctcattcccaggcagtatatggttctggtcccctccctgctccacactgagaccactgagaagggctgtgtccttctgagctacctgaatgagacagtgactgtaagtgcttccttggagtctgtcaggggaaacaggagcctcttcactgacctggaggcggagaatgacgtactccactgtgtcgccttcgctgtgagtgtggctgtttgacttaatatacttggttcttttagtcagggtcatagggatctagtattctgtcagatgaggctttgggaggttggtaagaactgcaggaaggaatccaaatgtagcaaactaagtatagaaattaaggagcaatgcatgactctccagccatgggagacaaatatttacaggcaaactaaaagtcagcttaataatcacatagaaaccctattagccagaaaggaaaaaaaaaaaaagaaaatgtgacttcttaaaattaagatggaaaaaatattaataaagcaaactagaccaaggctcaacatgagccacccgtggtggactgacaggaacacatcactccacactacttctaagagtaaaaattgtagaaattaccctgagcaaaggtgtaatatctcttcagagttgtccacatgtgagatgcttacagcctagtgtcagtaaaatacggggtttttttccatagcctgtaaaacatgcttcgaccatgcccttttagcatgtaatatcagcctggtaaagctcagcgtataattgaatcaagactgtttctgtgagctgtatgaaggtgtgaatctcacttacaacctctcttactgatttattttcctccaccttgtgtcctgtctccccatttgtaaaatggcagaagtgattcctgtccatgccaactttccctgctgagaacaagggagtgaagttaagtaagaagggcaagatctccagggaagagtgcaacagcaaataggggaggagacctgcgggtgctgaatggggtttcaggatcggtcctgtatttcaggtcccaaagtcttcatccaatgaggaggtaatgttcctcactgtccaagtgaaaggaccaacccaagaatttaagaagcggaccacagtgatggttaagaacgaggacagtctggtctttgtccagacagacaaatcaatctacaaaccagggcagacaggtatgaagaagcctacagacaggacaacttcaaaaaggaaagatcttcttcccctggatgttccccaggcaaagttcctataatcttggttccttaatagcttgtcttaccagcctacaggcctactttgggtttgggggctcatgaaaaatatttctgtttcagtgaaatttcgtgttgtctccatggatgaaaactttcaccccctgaatgagttggtgagttttctattatctacataaaatgattgtctgtataaacaggctgggaacctgttttttgtgctgagggaagaccagggagaggaagaatctggtatcattaacagtaacttctggcattacaacagcacaagatcctaatctaaaacatcattccaggtaaagaaagtaggtaattctttctgtcttggtgctggtactcagtcagttgtcacacaattaaatttacttttcggatggttcttaattaggacaattagaaagatacattcaatagcagacacagaaaaatcctcaaagaacctaagctcaaaaaacattttaaagatttagattttttctatacacatctaccaaaatcttcactataaaggaaagtcagggtaattaatttgttcctcaagactaactcttggtatctgtgataagaaacagttctttctattgtaatgcagacatcaacccaaagtcttcatttttctctcccaaattaacttcttcacattttcttatctcaaaaagaggcaactcttctcttctagctccaaagacaaaagattatggcctagttcttgtttctctttctctcatacccacatccacttcactggaaaatcatgttggcttaaaatatattcagactatttcttatcatctgaactactgctgcaagctagtcctagtcaatgtcatctctaaataagatcattacaataaccttcaaagtggtctcccagcttctactttcactcctctgtctaaaatgaggcaccacacccatcactctgtcagcctaacttggctttgtttttctatttgcacttaccaccattctatacgtattgatttttaaaaatctgcctatttctattataacataagctccattaaaacatggtttattgttcttttgtgcgtggttatattctcaatacctagaatgatacacagcgcatgagaaggtacttaataaagattagtttttaaaaatgaataaacattcatagtagcttcttatcaatgtttattcatttttaaaagtaatatttattaaactaaatttattaatgaaatatgtccattcctcctcattcttagaactacgtaagaattctatgacccatcttaatgattacatctgaacatatttacttatagttacataagtgtttatttctcaacctgtaaaattgcatagcaaaggattgatcttcactaggatgctataagcacttaagacatgttaatccatttttagtaaatggcactttacatgtatatttgttgctgaaggcctagtaagttcttaacattatttattaattgcttaaaatagattaatgaaaagttctataaaatttaatctggaatatttctgtatttcactatagagggaattattctatatgaaactaatttagattttttaaactttttattgtttttaatttttgtggaaacatagcaggtatatatatttatgggttacatgagatattttgatacaggcatgcagtgcatgataatgattatggatgataatcattatcattatccatatcattatccaatcatggataatgattattatcatgcattgcatgcctgtatcaataaatggagtacccatcccctcaaacatttattctttgtgttacgaacaaatccaattatacttttagttatttttaaatgtacaattaaattattttttactatactcaccctgttatgctagcaaatactagctgctttgcttataaatgagatttaagaatatttgaaaataattataaacttcttttttcttttgtctttcagattccactagtatacattcaggtaagcaacatgaaacattccatattaaaaggaaagcaatacatatagggaaaatgttcttatttcagaggtttttacaatatctcagaaacttgtcattaaaggagaagccttcaaactcccatagagctagatggctataactcatctcctctactcaccctttactactaccccatttgacctttttgtagataacttagggtttccatagatatcttttattagctccaatgctccaggtgcttttgtaagttataattaatttactcatataggatcccaaaggaaatcgcatcgcacaatggcagagtttccagttagagggtggcctcaagcaattttcttttcccctctcatcagagcccttccagggctcctacaaggtggtggtacagaagaaatcaggtggaaggacagagcaccctttcaccgtggaggaatttggtatggatcatgaaaagtcatcaagcattatttttcttcatatttaaactcttaggtcctggaatttaagttcatttggagtctttccatttcccatgggtgacattgggcttggagtagaattaattacacctaagtccaatgaggacatcagtgatctgtgaataggacttcacatagcttcgttattttctgtagcaatatttaataccaacccccaaaattaaaacattcttgttttaatggagttttccataattaattaagcacacagtgatctctcatagtccctcaactgaaatcttcatttgagaggaggatagataagaatagattggagagcagagctaccttttcagagccctaaaatattattagggaactgttacagggaacctgaaaataggaattcccccaaagttgaaaaccaatcaccaaccttctttatcaccaatcaacagttcttcccaagtttgaagtacaagtaacagtgccaaagataatcaccatcttggaagaagagatgaatgtatcagtgtgtggcctgtgagttcattttttaaaaatcttttgtgggggattatttaaaagagactcaccatttgggatattttaactactctctccgggagcagtggcaacacaaaaattttaagtgctttgacagcatcctcatctgtagaatgttattctcctgttgcttttctatttttattttctttcacgttcttatcagtattattctatcatgaggtaagaaactgtttctagagaggttatgctaataggattgattctgaaagtgacaaaactgcacacacacacacacacaaaatgggaagggtggatagtgttgaagggtattggttctgccttaaccaaaaataaccaaacgtatattagggagataattaacacatggctataggggaaattcaatcatcaacagatcatttacctgaccttgcatgcttactggaaaaatcacttagattcagaatttgtagagataggcatacaactgaaatctcatctaactcactagtccacctaaggcgggtctacatacctgtctgcactgacatttttacgaagagactgaacgtgatttctcaagacagtctgttccaaccttgaaaagtcttgtttcctggatcttatgttcccatccatggtggcacacagtagcagtagcaggaagagcaggtatagtcctgtccaaagatcacacatgtaatacacctactattcagctaggcccctgctccagttctgtctcacagtgatggccaagttcctggttcctcataactggtgtgatcttgcaaatagacatacagaggacattctcaaataggaaaggagacaaatgcacttggaaacccagcaattgtctatgacatatttacgacacaatcccacttttgtaaaaaagtaaacaggcccggcgtggtggctcacgcctgtaatcccagcactttgggaggctgaggtgggcagatcacgaggtcaggagatcaagaccatcctggctaacatggtgaaaccccgtctctactaaaaaat

SEQ ID NO: 3637 - DNA, 6000 bp, Homo sapiens
atcatactttgtatttattttgttttgatcagttatatacaagtatttttgaacatagctcagtcagaaggaaatgtttaatatttataaatttatggttacattctatttaaaagaggagttaaagttaaatttacctacccacatatgttacatatatatgtatttatgtatatgtattcatatatgtatatatgtgaacataagtatacatacgtatatgtatagatgcttgacaataaagaagtaagaataattcacaacattttttgaaatataaaaatttaggataaatttctgtatggtaattggcatggaaattcaaattcaaaaaggaaaaaagaagagaaagatattaaatatcagaccattaaaagaattttttaatgtacttttaaatagtgatagtaggtatcttatactacagtgtttattattcatgagaaaattgtaaaagtaatctaagtattaatttaaaatatcatcaaaaataatatcttttgctattacttaaaatcatgataaaaatatgtttacttgaaaatatgtaaggagtgcacagagtccaaaaattattttaggagttctgtgagcaaaaatgtataaaaactacagggttgatcttaaattacatgtcagggtactgagaaagtttctgtactgcacatgagttaccaaggtctaaagtcaatcaccagaggaccatttttggatggagccattgtctaatcatgagctgaaaggcaaatatttaaaatgcaaacatccatggttaggtaacactcttaagaccttattagctgcttaccacaactgagactgtgaagtaatggctcactttctttgaggctcagattccatatctgtggagtggaagcgagtgcttaccatacaattttcacagggctgctgaatgtgtgtatgtatgtatgtgtgtatatatattttaatgaaaattctataatttgattagtttttgtaatgtccgcatgactgagagcttgcttactttttacagcaacttgaaggtaaaaatagattttacaacatgaacaaatgtaactacatatttttatttgaattcagatgttcacaaattgttccttaaagtgaagcatgcctacaagttttaatctgtttaagacctacctcaagtaaaatgttcactgccatggcatgtgagggaaaagggaaataattcttatgcatggccttcaacggccaaatttcatgctcatcagtacatcttctcttggtgtagaactgatgatgataattatgatgatggaaaaaagtgctgttgatagcaatgcctctcttccttcactttcctctaactgaaccgtctcattcccaggcagtatatggttctggtcccctccctgctccacactgagaccactgagaagggctgtgtccttctgagctacctgaatgagacagtgactgtaagtgcttccttggagtctgtcaggggaaacaggagcctcttcactgacctggaggcggagaatgacgtactccactgtgtcgccttcgctgtgagtgtggctgtttgacttaatatacttggttcttttagtcagggtcatagggatctagtattctgtcagatgaggctttgggaggttggtaagaactgcaggaaggaatccaaatgtagcaaactaagtatagaaattaaggagcaatgcatgactctccagccatgggagacaaatatttacaggcaaactaaaagtcagcttaataatcacatagaaaccctattagccagaaaggaaaaaaaaaaaaagaaaatgtgacttcttaaaattaagatggaaaaaatattaataaagcaaactagaccaaggctcaacatgagccacccgtggtggactgacaggaacacatcactccacactacttctaagagtaaaaattgtagaaattaccctgagcaaaggtgtaatatctcttcagagttgtccacatgtgagatgcttacagcctagtgtcagtaaaatacggggtttttttccatagcctgtaaaacatgcttcgaccatgcccttttagcatgtaatatcagcctggtaaagctcagcgtataattgaatcaagactgtttctgtgagctgtatgaaggtgtgaatctcacttacaacctctcttactgatttattttcctccaccttgtgtcctgtctccccatttgtaaaatggcagaagtgattcctgtccatgccaactttccctgctgagaacaagggagtgaagttaagtaagaagggcaagatctccagggaagagtgcaacagcaaataggggaggagacctgcgggtgctgaatggggtttcaggatcggtcctgtatttcaggtcccaaagtcttcatccaatgaggaggtaatgttcctcactgtccaagtgaaaggaccaacccaagaatttaagaagcggaccacagtgatggttaagaacgaggacagtctggtctttgtccagacagacaaatcaatctacaaaccagggcagacaggtatgaagaagcctacagacaggacaacttcaaaaaggaaagatcttcttcccctggatgttccccaggcaaagttcctataatcttggttccttaatagcttgtcttaccagcctacaggcctactttgggtttgggggctcatgaaaaatatttctgtttcagtgaaatttcgtgttgtctccatggatgaaaactttcaccccctgaatgagttggtgagttttctattatctacataaaatgattgtctgtataaacaggctgggaacctgttttttgtgctgagggaagaccagggagaggaagaatctggtatcattaacagtaacttctggcattacaacagcacaagatcctaatctaaaacatcattccaggtaaagaaagtaggtaattctttctgtcttggtgctggtactcagtcagttgtcacacaattaaatttacttttcggatggttcttaattaggacaattagaaagatacattcaatagcagacacagaaaaatcctcaaagaacctaagctcaaaaaacattttaaagatttagattttttctatacacatctaccaaaatcttcactataaaggaaagtcagggtaattaatttgttcctcaagactaactcttggtatctgtgataagaaacagttctttctattgtaatgcagacatcaacccaaagtcttcatttttctctcccaaattaacttcttcacattttcttatctcaaaaagaggcaactcttctcttctagctccaaagacaaaagattatggcctagttcttgtttctctttctctcatacccacatccacttcactggaaaatcatgttggcttaaaatatattcagactatttcttatcatctgaactactgctgcaagctagtcctagtcaatgtcatctctaaataagatcattacaataaccttcaaagtggtctcccagcttctactttcactcctctgtctaaaatgaggcaccacacccatcactctgtcagcctaacttggctttgtttttctatttgcacttaccaccattctatacgtattgatttttaaaaatctgcctatttctattataacataagctccattaaaacatggtttattgttcttttgtgcgtggttatattctcaatacctagaatgatacacagcgcatgagaaggtacttaataaagattagtttttaaaaatgaataaacattcatagtagcttcttatcaatgtttattcatttttaaaagtaatatttattaaactaaatttattaatgaaatatgtccattcctcctcattcttagaactacgtaagaattctatgacccatcttaatgattacatctgaacatatttacttatagttacataagtgtttatttctcaacctgtaaaattgcatagcaaaggattgatcttcactaggatgctataagcacttaagacatgttaatccatttttagtaaatggcactttacatgtatatttgttgctgaaggcctagtaagttcttaacattatttattaattgcttaaaatagattaatgaaaagttctataaaatttaatctggaatatttctgtatttcactatagagggaattattctatatgaaactaatttagattttttaaactttttattgtttttaatttttgtggaaacatagcaggtatatatatttatgggttacatgagatattttgatacaggcatgcagtgcatgataatgattatggatgataatcattatcattatccatatcattatccaatcatggataatgattattatcatgcattgcatgcctgtatcaataaatggagtacccatcccctcaaacatttattctttgtgttacgaacaaatccaattatacttttagttatttttaaatgtacaattaaattattttttactatactcaccctgttatgctagcaaatactagctgctttgcttataaatgagatttaagaatatttgaaaataattataaacttcttttttcttttgtctttcagattccactagtatacattcaggtaagcaacatgaaacattccatattaaaaggaaagcaatacatatagggaaaatgttcttatttcagaggtttttacaatatctcagaaacttgtcattaaaggagaagccttcaaactcccatagagctagatggctataactcatctcctctactcaccctttactactaccccatttgacctttttgtagataacttagggtttccatagatatcttttattagctccaatgctccaggtgcttttgtaagttataattaatttactcatataggatcccaaaggaaatcgcatcgcacaatggcagagtttccagttagagggtggcctcaagcaattttcttttcccctctcatcagagcccttccagggctcctacaaggtggtggtacagaagaaatcaggtggaaggacagagcaccctttcaccgtggaggaatttggtatggatcatgaaaagtcatcaagcattatttttcttcatatttaaactcttaggtcctggaatttaagttcatttggagtctttccatttcccatgggtgacattgggcttggagtagaattaattacacctaagtccaatgaggacatcagtgatctgtgaataggacttcacatagcttcgttattttctgtagcaatatttaataccaacccccaaaattaaaacattcttgttttaatggagttttccataattaattaagcacacagtgatctctcatagtccctcaactgaaatcttcatttgagaggaggatagataagaatagattggagagcagagctaccttttcagagccctaaaatattattagggaactgttacagggaacctgaaaataggaattcccccaaagttgaaaaccaatcaccaaccttctttatcaccaatcaacagttcttcccaagtttgaagtacaagtaacagtgccaaagataatcaccatcttggaagaagagatgaatgtatcagtgtgtggcctgtgagttcattttttaaaaatcttttgtgggggattatttaaaagagactcaccatttgggatattttaactactctctccgggagcagtggcaacacaaaaattttaagtgctttgacagcatcctcatctgtagaatgttattctcctgttgcttttctatttttattttctttcacgttcttatcagtattattctatcatgaggtaagaaactgtttctagagaggttatgctaataggattgattctgaaagtgacaaaactgcacacacacacacacacaaaatgggaagggtggatagtgttgaagggtattggttctgccttaaccaaaaataaccaaacgtatattagggagataattaacacatggctataggggaaattcaatcatcaacagatcatttacctgacctt

SEQ ID NO: 3638 - DNA, 6000 bp, Homo sapiens
gcagaactgtacccttccttttttaagtcatgaactgaaagttgcatgtatcacttccacttgccctccagtcaccagaacttagtcatatgccatacccagcttcaagggagtgggttaaaaacatagaagtcaactaggcagtctgcacccagcaaaggatcgggagttctattattaaagcagaattggagaagtggtaacaggaaacaaccaccagcctctgctgcatgtatatgaaacagatgtttcccaaatcactattctcacttattctgtctgatacactgtattttttattatattctctttcattttttaaaatcctggtcatgactcacagggcatgatgttacaacccacttagatgctaacaccataatctgaaaaatattacctatattatgtctaatattggccacttgaagtatggctagcctaaattgatctatgttgtaagtataaaattcacaccagcttgtgaaaacaaattatgaaaaaaaagtctttaagatatcattaacaattttatattggctaaatgttgaaatgatcatattttggatatattggattaaataaaatacactattaaaattaatttaatgtttctctttatgtggttactagaaaatttaaaatttaaaattacacagggcgatcacattctatttctagtagaccacactgctgtaagctcaagattcaaatgtcaaactcctgtgaatattaatacgtgaatatcccacaagcacttactccatcttcccaaccctcagcccttctgtcctccttctgctcccaccaatctgtgtttcttctgtttcactcacccagctaaaggcaacacaattcactccgtgacgagccaggaaaatggaaagacacattttcctttattcctcacattgatatattcactgagcactataattacctcttaaatatgatataaatctgcaagctcttttcaataccaccacaaattccatagttcaaaatgccatcagctttcacctatattattacaccagctcccatctggtcttcctgcatcctggatcacctctttctagctgccctttcaaatttcaataagagcaagctttccaggaaacaaacctgaagtcaatccactgagtactcctctgaataccttaatattgttgacaaattcctttctgatttgaagtatcagaaaggaatatttcctccataccaaatagttttcatttcatgcatgtgccgtgattcttctccctcctttgcatctgtcattcgttatgcttagaaagctcttttcatctctttgttcttcgagacaaccactactcatacttcagagcttaatttacattttgctttccctcaaaatttttttaaaaggttccaggtctgggttatgtgctctcttatgtgctcccagagcatcctgaacttctgcaataatatgtttggctactgtattttatacagtagttttatattgtattttatactgtattttatacagtaggtgttatattgtattttatacagtagttgtttttctgtctgtttttgccccaacaagaatgtaaaatctttaagtgcctgttttcatacttatttgaccaccctatctctagaatcttgcatgatgtctagccctagtaggatcaaaaaatacttacaaagcaactgaatagctacatgaatagatggatgaataaatgcatgggtggatggatggattaatgaaatcatttatatgacttaaagtttgcagaggagtatcatatttggaaggcagtaaggaagtctgtgtagtcgatggtaaaggcaattgggaagtttgttaggcacaataggtcaaaatttgtttttgaagtcctgttacttcacgtttctttgtttcactttcttaaaacaggaaactcttttctatgatcattcttccagggcctggctcttcatctgcaacccagtaatatccctaatgtcaaaaagctactggtttaattcgtgccattttcaaagaggactactgaattctgatgtggcttcaaacatttaggttaggcatatctaatggagaacttgcagccacactgacttgtagtgaaatatctattttgagcctgcccagtgttgcttaaattgtagttttccttgccagctattcatacaagagatgtgagaagcaccataaaaggcgttgtgaggagttgtgggggagtgagggagagaagaggttgaaaagcttattagctgctgtacggtaaaagtgagctcttacgggaatgggaatgtagttttagccctccagggattctatttagcccgccaggaattaaccttgactataaataggccatcaatgacctttccagagaatgttcagagacctcaactttgtttagagatcttgtgtgggtggaacttcctgtttgcacacagagcagcataaagcccagttgctttgggaagtgtttgggaccagatggattgtagggagtagggtacaatacagtctgttctcctccagctccttctttctgcaacatggggaagaacaaactccttcatccaagtctggttcttctcctcttggtcctcctgcccacagacgcctcagtctctggaaaaccgtgagttccacacagagagcgtgaagcatgaacctagagtccttcatttattgcagatttttctttatatcattcctttttctttcctatgatactgtcatcttcttatctctaagattccttccagattttacaaatctagtttactcattacttgcttacttttaatcattcttccccaactctctgaagctctaatatgcaaagccttcctaaggggtgtcagaaatttttagctttttaaaagaataaattttagatattcacattcatattgatctacttgagaccatgctatttatcttttcttatttcctctttctcaagggtccattttctattttataaaaataaagacaattctctcccacaaccaaacatggaacaatgccctggagtataaaaatctatagagtgccaaataaaggaacaatttgaaatactggtgttgatattgaaaaagcaagggactctaatgtcagaagagaaatccttttgcagatgaggtggtgatgaattctttgtttcaacacaactgaaggaggaactgaaggaaataccagctgatgagtgatgagaagggattcttgataatagagtactaggtgatttttggcatgtaatgcagaagttgcaagaagtggtaacaatgatgcaattgttttacctgccatttatttacttttatgtgagccattcttcttagcacttatagctacacaaaacaaaaatagtaacagaattaatgttgtttaattcttgcaatccatggatgcataaattcactgggggaaaaaacagctcatcattctcattaaagatgtgcttcaaaagtattttaattttatatctaatatgtatgaatcatactttgtatttattttgttttgatcagttatatacaagtatttttgaacatagctcagtcagaaggaaatgtttaatatttataaatttatggttacattctatttaaaagaggagttaaagttaaatttacctacccacatatgttacatatatatgtatttatgtatatgtattcatatatgtatatatgtgaacataagtatacatacgtatatgtatagatgcttgacaataaagaagtaagaataattcacaacattttttgaaatataaaaatttaggataaatttctgtatggtaattggcatggaaattcaaattcaaaaaggaaaaaagaagagaaagatattaaatatcagaccattaaaagaattttttaatgtacttttaaatagtgatagtaggtatcttatactacagtgtttattattcatgagaaaattgtaaaagtaatctaagtattaatttaaaatatcatcaaaaataatatcttttgctattacttaaaatcatgataaaaatatgtttacttgaaaatatgtaaggagtgcacagagtccaaaaattattttaggagttctgtgagcaaaaatgtataaaaactacagggttgatcttaaattacatgtcagggtactgagaaagtttctgtactgcacatgagttaccaaggtctaaagtcaatcaccagaggaccatttttggatggagccattgtctaatcatgagctgaaaggcaaatatttaaaatgcaaacatccatggttaggtaacactcttaagaccttattagctgcttaccacaactgagactgtgaagtaatggctcactttctttgaggctcagattccatatctgtggagtggaagcgagtgcttaccatacaattttcacagggctgctgaatgtgtgtatgtatgtatgtgtgtatatatattttaatgaaaattctataatttgattagtttttgtaatgtccgcatgactgagagcttgcttactttttacagcaacttgaaggtaaaaatagattttacaacatgaacaaatgtaactacatatttttatttgaattcagatgttcacaaattgttccttaaagtgaagcatgcctacaagttttaatctgtttaagacctacctcaagtaaaatgttcactgccatggcatgtgagggaaaagggaaataattcttatgcatggccttcaacggccaaatttcatgctcatcagtacatcttctcttggtgtagaactgatgatgataattatgatgatggaaaaaagtgctgttgatagcaatgcctctcttccttcactttcctctaactgaaccgtctcattcccaggcagtatatggttctggtcccctccctgctccacactgagaccactgagaagggctgtgtccttctgagctacctgaatgagacagtgactgtaagtgcttccttggagtctgtcaggggaaacaggagcctcttcactgacctggaggcggagaatgacgtactccactgtgtcgccttcgctgtgagtgtggctgtttgacttaatatacttggttcttttagtcagggtcatagggatctagtattctgtcagatgaggctttgggaggttggtaagaactgcaggaaggaatccaaatgtagcaaactaagtatagaaattaaggagcaatgcatgactctccagccatgggagacaaatatttacaggcaaactaaaagtcagcttaataatcacatagaaaccctattagccagaaaggaaaaaaaaaaaaagaaaatgtgacttcttaaaattaagatggaaaaaatattaataaagcaaactagaccaaggctcaacatgagccacccgtggtggactgacaggaacacatcactccacactacttctaagagtaaaaattgtagaaattaccctgagcaaaggtgtaatatctcttcagagttgtccacatgtgagatgcttacagcctagtgtcagtaaaatacggggtttttttccatagcctgtaaaacatgcttcgaccatgcccttttagcatgtaatatcagcctggtaaagctcagcgtataattgaatcaagactgtttctgtgagctgtatgaaggtgtgaatctcacttacaacctctcttactgatttattttcctccaccttgtgtcctgtctccccatttgtaaaatggcagaagtgattcctgtccatgccaactttccctgctgagaacaagggagtgaagttaagtaagaagggcaagatctccagggaagagtgcaacagcaaataggggaggagacctgcgggtgctgaatggggtttcaggatcggtcctgtatttcaggtcccaaagtcttcatccaatgaggaggtaatgttcctcactgtccaagtgaaaggaccaacccaagaatttaagaagcggaccacagtgatggttaagaacgaggacagtctggtctttgtccagacagacaaatcaatcta

SEQ ID NO: 3639 - DNA, 6000 bp, Homo sapiens
cacacgttagtgggatagcacaaatgagaaaaactctgctctttgatcactgagtacatctctgtagatatatatttccttcactgcagattttgcccaagatacttcgtcaaagacaaagccagtacaccctctaatagggtgaatatggttatgccacctactgagcttgtttttgatactagttaatatgtaaccagatgaaattgtcattatcgtcactgtcaggactatgggaagcttaagtgttctcttttcaaggacaatgtgcgctaactgtacaattggtacaattaaataagttatattcagttcctgggaagcactatagcaatacaaggagaaaatttgattctatttatttttgttaaggcccacctacctcctaatcctaatttctctcatttcccaaatattccttgtttgttcttactgttatgtgttttcctgtattttgctcttctactttcttttccatggactatctttttcccttcctttttttcgctctacccctttacctcagctttctagcagtatttgctaaatacttcaaaactgtatagaactggttcaaattgtgtgctcccttttctgtcaagaacttgctactcaggtaacccaattggtgatttttcctggaaacactgatggatgctgttcctatagcgaaacccagaacagagatgaaatagatgtcatcctcagccattagcattcaaactataaaaattaatttacactggtatagtaaggatcagaatgtcaaagctgtgttacacctagcatcttgtatgaaactaccccattaaggtgagaccacagatattattgccccactattggcatgaaagctgaggctcagagcagttaactgagttacccaggaccacacagctaagttagaagtagggctcaggtgtcctggcaactaactggtccagttattttttctctcaagctcgttttccctctcctaaagaataggaggctctgtcgtggtgaaaggcgattttagtaatactttcctttttatctgtgattataatgaatgcggcatctctcccattaaggatcattcctccacccacattcttaatacatctgctgcatgcatccttcagagacctccctctgggatcatcccttctcactccaaaaagctcaacttctcccctgtcatttgtacctcccactcagcatttttagaagcaatatttcattcaaacttattcaagtttatttccacctaaagaaatattcctttcaccctggcatctccgtcaggtactgctctgttgtttttctccccttcagacaaactgccaaactggctctagttcctcacattccccatcaccctcagcaagcttctgccccacaccggcactgaaacagctgaatcccaatgtccttgtccttaaacccagcagaaaaaaaaaatcaatcaattatttgatttcacagcggcacttgacatgggtagccaggaatttatcaatgacaacctttacagatcatctttgtaatttatcatgaggcatcaaatgaatgctattaacattaatccctcctattttaagtcattaatccaagtaaatgctcacttatttctagcgtcttagaaaccatttaaattatgttacattatgaatcaatacattataaaattataccatcatttgtaataattttttaaaatgttgtgtgctattaacattgatgccttggtataaagtcatgatcattctggtctagtagcaatcttctattgactattctcttactaaagcggtcccttccgtgggactcagagacctcacactctcctgcctgtgtttcttcctctctaattggcccttcttgctccacttgggtgctcctgcccattgcctagacaagagcattccctgtaactctgtcttgggctctttttctcttttcatcaacatcttctacgtgggtattatcatccatttccatggcatcagcttgcccaataaactgataaatccatagtctctataagtacagcagatctcatcaagctagtggcattcagactgctttaactttaaccaaaaataagggattttgtacatgttcaataagcagttcccactgtgacactgtaatcacattttcacaattgtgacctaggacacttagagtaaaggatacagatgattgagacagaaatagtgacaaagaaaaataaggttaggatatagattttaatgctgtaacagacctcaaaatacaatggcttaactaagagaatgcatttctctgtcacataaaggtcccaactggcgtagacttttgatgactcaagggctcaggctgtgcctggtttgtggttctgccttccttaacacatggcttccatctgatgagctacagcagtacctatcactagtcagcatgtccacattccagcctgggcaaggaagaaaggggaagcgcagaactgtacccttccttttttaagtcatgaactgaaagttgcatgtatcacttccacttgccctccagtcaccagaacttagtcatatgccatacccagcttcaagggagtgggttaaaaacatagaagtcaactaggcagtctgcacccagcaaaggatcgggagttctattattaaagcagaattggagaagtggtaacaggaaacaaccaccagcctctgctgcatgtatatgaaacagatgtttcccaaatcactattctcacttattctgtctgatacactgtattttttattatattctctttcattttttaaaatcctggtcatgactcacagggcatgatgttacaacccacttagatgctaacaccataatctgaaaaatattacctatattatgtctaatattggccacttgaagtatggctagcctaaattgatctatgttgtaagtataaaattcacaccagcttgtgaaaacaaattatgaaaaaaaagtctttaagatatcattaacaattttatattggctaaatgttgaaatgatcatattttggatatattggattaaataaaatacactattaaaattaatttaatgtttctctttatgtggttactagaaaatttaaaatttaaaattacacagggcgatcacattctatttctagtagaccacactgctgtaagctcaagattcaaatgtcaaactcctgtgaatattaatacgtgaatatcccacaagcacttactccatcttcccaaccctcagcccttctgtcctccttctgctcccaccaatctgtgtttcttctgtttcactcacccagctaaaggcaacacaattcactccgtgacgagccaggaaaatggaaagacacattttcctttattcctcacattgatatattcactgagcactataattacctcttaaatatgatataaatctgcaagctcttttcaataccaccacaaattccatagttcaaaatgccatcagctttcacctatattattacaccagctcccatctggtcttcctgcatcctggatcacctctttctagctgccctttcaaatttcaataagagcaagctttccaggaaacaaacctgaagtcaatccactgagtactcctctgaataccttaatattgttgacaaattcctttctgatttgaagtatcagaaaggaatatttcctccataccaaatagttttcatttcatgcatgtgccgtgattcttctccctcctttgcatctgtcattcgttatgcttagaaagctcttttcatctctttgttcttcgagacaaccactactcatacttcagagcttaatttacattttgctttccctcaaaatttttttaaaaggttccaggtctgggttatgtgctctcttatgtgctcccagagcatcctgaacttctgcaataatatgtttggctactgtattttatacagtagttttatattgtattttatactgtattttatacagtaggtgttatattgtattttatacagtagttgtttttctgtctgtttttgccccaacaagaatgtaaaatctttaagtgcctgttttcatacttatttgaccaccctatctctagaatcttgcatgatgtctagccctagtaggatcaaaaaatacttacaaagcaactgaatagctacatgaatagatggatgaataaatgcatgggtggatggatggattaatgaaatcatttatatgacttaaagtttgcagaggagtatcatatttggaaggcagtaaggaagtctgtgtagtcgatggtaaaggcaattgggaagtttgttaggcacaataggtcaaaatttgtttttgaagtcctgttacttcacgtttctttgtttcactttcttaaaacaggaaactcttttctatgatcattcttccagggcctggctcttcatctgcaacccagtaatatccctaatgtcaaaaagctactggtttaattcgtgccattttcaaagaggactactgaattctgatgtggcttcaaacatttaggttaggcatatctaatggagaacttgcagccacactgacttgtagtgaaatatctattttgagcctgcccagtgttgcttaaattgtagttttccttgccagctattcatacaagagatgtgagaagcaccataaaaggcgttgtgaggagttgtgggggagtgagggagagaagaggttgaaaagcttattagctgctgtacggtaaaagtgagctcttacgggaatgggaatgtagttttagccctccagggattctatttagcccgccaggaattaaccttgactataaataggccatcaatgacctttccagagaatgttcagagacctcaactttgtttagagatcttgtgtgggtggaacttcctgtttgcacacagagcagcataaagcccagttgctttgggaagtgtttgggaccagatggattgtagggagtagggtacaatacagtctgttctcctccagctccttctttctgcaacatggggaagaacaaactccttcatccaagtctggttcttctcctcttggtcctcctgcccacagacgcctcagtctctggaaaaccgtgagttccacacagagagcgtgaagcatgaacctagagtccttcatttattgcagatttttctttatatcattcctttttctttcctatgatactgtcatcttcttatctctaagattccttccagattttacaaatctagtttactcattacttgcttacttttaatcattcttccccaactctctgaagctctaatatgcaaagccttcctaaggggtgtcagaaatttttagctttttaaaagaataaattttagatattcacattcatattgatctacttgagaccatgctatttatcttttcttatttcctctttctcaagggtccattttctattttataaaaataaagacaattctctcccacaaccaaacatggaacaatgccctggagtataaaaatctatagagtgccaaataaaggaacaatttgaaatactggtgttgatattgaaaaagcaagggactctaatgtcagaagagaaatccttttgcagatgaggtggtgatgaattctttgtttcaacacaactgaaggaggaactgaaggaaataccagctgatgagtgatgagaagggattcttgataatagagtactaggtgatttttggcatgtaatgcagaagttgcaagaagtggtaacaatgatgcaattgttttacctgccatttatttacttttatgtgagccattcttcttagcacttatagctacacaaaacaaaaatagtaacagaattaatgttgtttaattcttgcaatccatggatgcataaattcactgggggaaaaaacagctcatcattctcattaaagatgtgcttcaaaagtattttaattttatatctaatatgtatgaatcatactttgtatttattttgttttgatcagttatatacaag

SEQ ID NO: 3640 - DNA, 6000 bp, Homo sapiens
atgattttattcctgtaagcagtttgcaaaccagggagacccagccttcagtacaaaacaaagatgctctccctgagaacagagagacaggttatcctttatagaaaaagctcccacccagattcccactctggtctgctctgcaagtgagagggatgcaagtatgtttggttttgattggtcaatgcaagtcacaagtctatttgttagatccagaagtcaagatgagacttcccagcacccatcaaatcagggagcataaataggagcagacagccatgaaagtccccaaatcacgcgagcctgtggtttctcagagaatgcagaagacgtttgtgacctggctccattctgaatttagacccagttagccactcaggatccatttggaaggattggctctttcaggttcatgaagtgttcatggcagctttatttacagtagccagaaactgggttctatcccagttacctttagtgactttcagtcatactcagcttcactgaacagtacccctgaactggccctttaagaaaaggaaggcgtcttctgctcacgaggtcggagggagtccagaagggcagggggtgtccactggagctgggggtgctttgtaggaggcagatgctgatgaggagaatgtaaggcttcagaatatgtaggaaaatgggagttgtacctctttgtagtttgttggatagtggctttgtattagtttcttgaggctgtgataacaaagtaccacagacttcaacagcagcagtatgtcctcgcacagttctgggggctggaagtcagagatcaaggtatcagcagggttggttccttctgaggctgtgagggacaggtctgttcccggcctcttaccctggcttgtagatggtcatcctcatgtccacacagtgttctacctatatgagtgtctgcctctttatctaaatctccctttttatggggacatcagtcattctgggttggggcccaccctaatgaccacatttgaacttgattacccctgtaaagaccctatctccagataagctcatgttttgaggtgctgggagacaagacatcaacatgggaatttagggggatacaatccaacccataacaggcttgagcctttttctttctgtgattatgtggaccacagtcccagatagcagctactggtcccagatcatgtacaagtggtcccagcattgtgaaggacctgaggatgtctgggctaccttggctttgaataaccagcccaggagctgtgtgagagcctgtcctgcccctttagaatactgaagtttgaattggatcccctagctaaaatgttggcattttaatagttacagagaaaagaaaggaaccttagctcttctgttgagggtttattctgcctgatgctttcgaaataagtttgttattttggcaacactaatgaggtaggtgttatccccttcctgcagcttaggattaaaaagctcagtgggactaggtagccttcgtccacactgcctaagctgttattcaagtacaggtagtaagagggatttgaacataggcctttctgactccagcatccgtgttcttttcataaccatgagctatttcattttctaaaaagtgttcagttgaaacaaatgcagaaattattcctctcaatgtatgtaatagatctgtgtttatctgatctaatccaggatatatcctctgaacagaaaagttagaaaagacggcattagaaaagacatgcagacaactcaaaaaactatgaaactttatggggaaaatgtgttatcacctgatctatatcttaaaatggtgagaattcatggcatccacctgtcaagataaaggagcaaaggaaccacgctccaagttttgggaagaaaatagcacatggtggcgactgggggtgacatgagaccccactccccatcaggaatctcaggcagcccctcccttcttggatatgaacaactgaagttttctcaatcatttattttattttttaactgattaataataattatacatatccctgggcacctagtgacatttctatacctataaggtatagtgatcagatcagggtaactggcatgcccgtcatctcaaacactgaccacttcttttaaagtgtagcctggagctccccactgtggatccaatggctgccacaaccactttgcagaaccaggtcgctgaaaggcagcttgacaaaaagactaagatgagccaagtgtactgcaacatggcacaggaaccattgatcaaatgctgtaacttggtgtcatgacaacggacaatgatgtcgagtggagtgctggatctcttatcaccactgtatcacactgatttaatcacactaatctaagcttcttgaaggggaaagagaaaagctttgtagtagctccccttcctggtgctgttcagaaacaacaatggtgcaggccacacctcacaacgaagggggctcggctggctgggcacagtgctaaatgagccgcaggtcaagaggtcactcctgcagccaggccgacctttagccacactctggtccaggcgacagatggggccctagcctcagtcccctttcatctcacatatggggagttcttggccacaagaggaccaattcaaaataatatccagtgacttggtgaataaactcttccactggagatggtattgcattgttggatgtatcttgaactacaaagcttgcttggggagatttgtataaattgaagatcatttgattggttttcattcaagtccctgctttcaagtgcctcctgtatgtttttcagtggaacacaagaacccgaattcagtccttcacctatttctactggtgttgaaatctataaagacataaaatctacttgcttagccaatgagccttacagagtgtctagttgctctgatttaatatatcagtgtatcgggaaactttaatcctgagtgcaggctgttggcatatggattccatgctggtggtaggtttggactacctcagaaaagaaatgggcacatgccttcttgtaaatattttgtctttgtaaatattttctttgtattcatgggttcaagatgcccaggaaacgtatgtgaagcccagatgtcacaggaattttcctggtctgctttaaggaagtccttaagcatcacacctgccagttcaaatactatttgagccctgtgcatttttgagaaatgatgtataagtagaaaaattatacaagaaacatggaaaaatcaacaggactatttaaatgttatacagaacttatgaacagttcaaactaaatattttgctattaaaattattcaagaatcatagaaatctggaaataaacacttcataaataacgttttcaaatatcgcgtcaggaaaaattagacaaaaccagttaaggagggaagttacattgaaaaagactgagttctactatcccctaagttttgcaaaaatatttttaacttactttctaaaagttagtgagtttccattataaaatagaaaaattgtcttcattccatgaaagaactgtctgaaaatcagaaaagcaccatatcctggatttcaaggaagatgaaacttcttcttatcttctattttactaaatactcaaaataaaataatcatattgtattgaatctgacattgttaaggaaaatagcttaaaatttttaaataatgagcaatatatttaattttaaaatacgaagaattaggctaaggtggtaattttttagtgagttgaaagtccaaactatgagttcggaagaaacagccctaaaaggcaaataacatggctttggaataatcacagggcaaatgctttgttctacataattcttcttttgtgaattttaaaatgctcaacaagtattaatgaaatatgtctaagaagtagatattgctttaaaatctaatttccagagtcccgaactaaggcaaagattgagattaagtctccgcccaaagtcttaagtgagccagtggaagatggcagtttattcatgaattgttggttatctgctgcttaactacttaacacaacccggtttgattggtaatcagatcctaataatgtatgtttcaaagaaagggcagtttccttaaaatccttaaagacttgtcactttgaaaactggaatcaaaatgtgaaaatgttatcggtccatctggcagtgtccttgggtgttttttagagtggtctcatagtgctatttaactatgctgaatatttgacacccagtctctgtaggaaattgtgatttttatcagcgaagaggcaattaaatgctgtcatttggcacgtccatccatcagggatcttatcacccaagaagcatccagcagcagttgctgtcctttccagctggcagacagataacagaaactgtcctgtgtgaggcacaatagtctaacatgattagaaatcagccaaactctggcttctcttgagctatactcccccacaggctgaattatagctctcctaccagtcccacggcgctgaatgatgtcatgggatctgcagttcagcgagatgaaagggataaagcagaacccgctggcactaggaaaagcttccaacacacagtccacaacacagcttgggaaccaaaaaagctacagatccagccactcagcccaagcatgggagaactaccagcattgcctcattgcaaaaaagaggaggaaaacaacgtgatccatgtttaacaaaagagtctgtggactaggaggtgggagggtaactacctgctgaaagtgaactttctttgatatccatgcatatatataaactcagccctgcctttgatgttcagcaactgattcactgatcagattacaggcatttcatctccctgctcgtctgcctttgatctgcatggttaattttattttcctggatttgaagtttcgtctgggcttgtgctgacatacatttttgggaaggtagaagcatttggcacagaagtgctgccaggagaaactaagttgctgaacgggtaagtactgcaaagagctcagcatgttgcaggtactctgttttaagctttgttatagctttcactgcatttttcgcatgtgttctgagaaaagaatggttttaattaattttttagaaagcatttatacagctgaatactacatgatgctgaatgtgtgtatcagagtaactatggaacttgatgtaatttttagtagtttgtacaagagggtttgcagtctgtcatacaaattttacttggaaatgagttgtacaaacaggacaaaacagaacagcgctcactttagcatgcaactggtacttcaacccctgagatctgtgagctataattgctctaagtatttacaggttaccttatttagtaaacagtcagtgcaactttgcttgttgaaaatgctttctttgttttcttatataaaagagtaaaatgtatctctggcaatactgtttctttagtttatttattctctcacttccaagatgtaaatctatcaaatacacttccttatgcagtttgtacactcaagggaatcactgaaaaaccatcaagtatgattaaagacttttatgtgtaaaactgaagaatttaaaaacagtgaggataaagttgcactaagtttggctaaaaatactccagtgattttctataacctttggaaatagcataagccttatttacagaaacattcacaaggttaatattcctaaattaacatttactttacatttatagtgacagctgttttaagtcaaaatttgccaactgtttatgaaaactatctgagtaatcaacagttattatgttacataaagtatcttagtcacattttcactttagctaatgcccaacatgacaaaaccaaattatattgctgtaccgaatttgaaagttaactgttatttttttgtcagttcatgatacacacacactcacgctcacacacacacacagtaaaatctttacagtgaaatata

SEQ ID NO: 3641 - DNA, 6000 bp, Homo sapiens
tagacatttttaatagtattttctgtcaggatggccataaaggacctccctaagccatgaaggcataatctgttctccctctgcttcaggagtgaactgaactcaaccatctggcattggtttagtcggattctctttctgtgatggcaaggccagtccaagccaccctggaagaatgagtgattttgtcccctttaaaggatggttctttaaaacgttgtccacctgggtgagctctgtgatgggagggcagagggaggctccctggtggctgtgttggctgtgctttaatttctcctctactgtcactagtcattcagctttggctccaaagttgttacctcaaacccacccacttgccaaaatcaatactcacttctttagattaagtaggtagtttaaaaccctcctttgtgacttaaattttctctttgatgagaaggggaaggagaagtcatgtgggggtttccaatgacttcataaaaccattccttccaacataacccactgtctttgagaggagttctgataaagatagttttctccatcctgttaaatgccccccattctttggtggctctatagcttagcaccatgggctgctgcccagccagcctggcctcaagccagccctaggtcggggagtccaccatgttcatcaggaaggagagaaggagagtcaatggactgtctcttccctcatcgaactcatgaaaagggtctagccaatgaggtactcagggccaaactcacaaagatcagtgcaagtgctgcaacttgtaacaactttgctctgtaagtgtcttgagctccacttacaggagggggctataaaaatagcctccttgggtttttcatatatattggtttacgcacccatggtatggtgaagattatgttaagatacagaaagcccagattctgattccagctttgttaattaacttggtgtgcagcattcaggaagtcactgggcattggcctcacggtgctccctcagccccatgctgatagtctataattggcagtagtgggtatcgggaattacttaaatagctaggtcttgggggttcctcctccacttattttcttaactgtatttggaaaactttattactctttgagattctcactctcaattactaattcatccaacaaatttttaatgagaacttactatgtgccagaaactgtaaaccaaagagacaaaatttcatattctcctgtagcttgcattctattccacttttttcccaaggaatagtgatttacactagaaatgactagaagttaggcaatttttcattagctttgctaccagcgagctaatttatcactgaaactattctttcaggggtttttcaagttttccttagttcaacttttggggaaaaatattttaaacaaatgcactttgtgtcagctcagatattgctaaaactatcttcagaaaactaacttttaacataaatcttaaaaacaaacacctctatcaagattgtcatagcaattttgcttttccagtaaaaattttaacccattaatgatatgcagtgttttaaaggaagtaaaatgctcccagtcctaattacaagcatccagtttcattttgcatgagcctaaggatcacagaattctttttttttttttttgagaccgagtcttgctctgtcccccaggctggagtgcagtggcgtgattttggctcactgcaacctctgcctcccgggttcaaataattctcctgcctcagcctccctagtagctgggattacaggcacctgccaccatgcctggctaatttttgtatttttacagagacgaggtttcgccatgttagccaggctggtctcaaactcctgacctcaggtgatccgcctgcctcggcctcccaaagtgcctggattacaagcgtgagccactgcacccggcccacagaactctttttatactactatggtgctcaattgtgtgcctgagtttttgttcagacactgtctccaaatcatacaacactcaaatgagggaaagtgggaactatagtgtttgttccctcagcatctgagggggactgctttcaggacaccctcttggataccaaaatctgcaaatgctcaagtcccttacaaaaaatggtataaatttgcatatgctctgaatcatctctgtattacttataatatctaatacaatgtcaatgctgtgtacatagttgttataccatattgtttagggaataatgacaaaataaagtgtacatgttcagtacagacacaaccattcattttttttcaaatattttcaatctgcagttggttgaagccatgatgtaaaatccatggatgtggagggccaactgtgtttaacttaatgagtctctttaaagaattagatgaatctaacagctggagtccagaggttcaatgtcctttttctcaccgtcaatgatcatttattgattgatgctaggcattgtaagaggatatattgctactaagaatggctatttagtaagtgctaggcattggcctaagcactttaaataccttatctattaatacttaccaaccatcaatgaagcaactcattttacatatggagaaccagaaacttagagaggttaagtaacttttccaaagtcatgcaactactgaatgacaggttggcattgggaccagattgtcagatgcccaagcccattcaggctaacaataggttctctctctgttgtaagctaacaggctaaccgggaagatcagtcaaaacacgtaaaatgattcaagaactaatgaactgagtaatgtgttactactgtctctaaggacaaaaggaggtcagagagaagaagaacatttggttgaagtcagagaaggtagttcctgagctggcagattcaattccactcagaaagctttggttgaacatttatttgaatgattgatactgtcagagatacaaatcggaacaaaatatgccccttctctgaaagtgtttttaactccttgaagaagaaagttagtacacagaatcttatgatacaggacacaatgggcaagtgctaaattgccacaaaccttggagcaaggaaatacataggctcagaattgagggaaaactcgtgagagccgtggcttttgagcgaggtgctgaaactggagtaagacaagtaggtaaagctcagaggtaagatgggagagcacgaagaggaagtagagagcaaaggaagggccacgcggcgcagtttataaagcctgctccagaggcgaggcaaggctggaaataggtgtagggctgcacctggacatctcggaatgctaatctaaggagcgcagaatccattctttacagtgaggaacctcctgtgactcttcagcctgacagtagcagtgatgaaaggcgggaagcggggttgatgaccgaggcagtgctgtggtgaggggtggggagggtctgcatggtggtgaaggaggtggtgggcaccaagacaaagagaggacgatgggggactgcgtgagaccttgcaaaggaagatgcagtaactcagcttagaagtgctgagtatccatcgtgtgctaggccccgggatatcaaggaattaggagatgccctcgggagatccaggtgtagctggggaaggaaacagataaagaagttcagcgggatgtgggaatgaatatggtagtgatgtgcactgagggctggagtctgatcgggtagccgctgggagatgggacagggaagcacacacttgccttgaggttcaaattagataacgtacatcatttggaaatcgtttaccaataagtcgttattgggatctatattctggatgtgttagatttgaaatatacaacctctatcaaggtgtgacatcgggaataatatttttaacattgttcacaagtacctagtatagtgctacgccgttggaagcctgggatcacaagctgtgcttttgggcaattaaatacaacaacctattcactcattcattcaacaaatactgatggaggggctccagtgggccttggggtatagacaagaaacagggacttgggtccatccacacagtgcagttgagtgggaagtcaaaaccaacacgtgagaaacggtggatgccttggtaccaaagtcatgcaccgtatcttgggtgaacgaatagaacaatactgcttgcacttttacagcattctactggtggaaaagtattttacagacgcgattctcttaaccctttcagcaaaactgcccagtgagtccccggccctggccccgcctcgcacgcgctggtgctacagctgtggtgcagacgcccttccgctgcgagggtgcggccgtctcggggcgagtgcttcccggcctgcaggaggcgaactcgggcttccccgggaggcgtccgtgggaacgcgcacctgcgagtccctgccggctgaggagccgaggtctgcgacctctgccgacctgagctcaggcgcagcagcgcagacctggccgccgtatcccctctggctgggatgcgggcccacgcgggaaaggctgaaaggtggggaacaccccggcggaaaggaaccctccctctctgctctgaaggaaagtttcccaacacagccatgttcttggtggtctccggtcccccatccccaagcccccagtcagcctcacactcatccgcttcagtagccgcggagtgggggcctccaaagaacccagctgcagagcaagtccggctgacgcagtgtgcgctgggggcggggctctggacgggggcggagccacggcgagagccgcggtgagggcggggcccgggtgggcggtgccctgagcggggctcctagtgggcggggctctggggtggcggccgttgccgggctacgggagagcgcggagccctgcgctgggaggtgcacggtgtgcacgctggactggacccccatgcaaccccgcgccctgcgccttaaccaggactgctccgcgcgcccctgagcctcgggctccggcccggacctgcagcctcccaggtggctgggaaggtaggtgcgtcgctgtccccggcgcgcggcgtcccgcgaggtcttcagccctcgccctggtggatccccgctgggtgggagccgggagtggaggcggccgccctagggagggaggagcgcaggcgggggctgctcacgggcggagtactgcgcggcgaagggaacccccgaaggggctgaccgggtctcggggccgtgacaggcggcgaggcggtgggaggggagcgtgtgaattcacgccgggtccccgcgggcgacgcgagcgacgcgacctggactcctatccgggatattgtaaatagatctgcttgtgaggctcacgactgggagcctgtcactctgcccaagcccgacccggccccggcgcccgcccgcgtcctgcggaggtcccctgagccagcgcgcggctgcaggggtctcggggccgcatcccggaccagcgccagcggcgggagagcgttgtctgtgagcggcccagggtatattccttctgtgggaaagagttccttagagttcagcaggaattattagtatattgatgagtagagcctgtgatagatttagagagtgagaaagccagctcttacaatgcgtgtaatgccatctcatgggacagaaatttggctaatatactcctggagatcaagtttggcggatcaaaattctgtgatctgttttgatggtagtgcactagtcatccagtctccgttcactattgtaagaaacccatgtcatttgtttgcatgttaataaaggactcaatatgcatacaaaatcatcaccattgttcagtgtttcttttaactgaaacagtttaacccaagatatgtatgaagacgtagtttttaccccatgacagtttctttgactacaaaaccaaacaatttctttatgtaaacaggaaacagttattgttaaacatacctcatgcaaacgatatttcttagtgttgtcatttcatgatcagata

SEQ ID NO: 3642 - DNA, 6000 bp, Homo sapiens
tccagagccgttcctgagagtgacatcatgcatcaagaaaacataaccttggtcctcaggtgaacccttggaacattctgtgaccgcctgatgtccattctgagccaccttggcacacatgcttacaggcagcactgctaagggttcaggtgccccatggctgacagcccgagttgcttctgtggaccatcatgccgctcggcacgtcctgagacagaagttgctgcaggaaggagcttctggagaggtcctgtggcatgtgtgggggtgtgtgtgtgtatgtttccttcttgaacagacattccaactttagatgtgtttatagaactgacctttttactaacaaaatacaatgatatatgttggaaactacttaatatgcttttcctgcacaccttagcaataactgtaggggtctctgctagagttgtttgtatgtacagcaattttgaacaaattgttttaaatgtaatataagagaattagtttaaggaagtaaagagaatcatttgcttgtgttacattttcagtgaggattcagtttaagagtcattcttaggacttccatttcctaatatttattcatgggtaatgaagaaatggtttgcattttgtggccagtcctaatttattttccagctgagccctaacttccggctcccacctacctccacggacttcctaacagagacttatgaataccaggatgtgtttttgttaagtcaggttcaattcgttgcccctgtcagttttatagagtgtgagggtcactccattaaagatctctcctgggtggatcctacttggatgttcaggtgattttgaaaactgctaacatttttaaaaggctagaacatcctttgacttcttgaaaatctgcatgtctggcttgggttttattaccacatgcctgagttcttcaagaatggaaggctcaagtattctcatcttccatttgccaaacttccttcctgatttgagtcacgtgttccacttggaaagaaagggaacagagagcctcctccatggacagtgtatgaatttcattgggaatcttgctctctcccgcctctatgcctttctctctttttaaccttactttacataatattatagatgggccaagaaaagaaaagatgacataacattttgatgaatttcacctattccattcttcacgtttcagaattggtcgactttgttagaagataattgaagtagccttgggtcaaaagcaaccttttcaattgtgatcatacctaaaacatataaaaaccctgccgtagattaaaagcaattataaaatcataaaattgaatgtttgcagaatcctggagcagtagatttctttgtctttggcctgcggactagaaagagggcagcagtagtatgctggagcttccctgggataccagccacatggtttcttttcattagatctgatttttgtttcccactgtagatctgattttgtagttgaaaacatttcaccaccatcaaacactatttctgaatattgtgcctttttatacctagcctagatgaaaaccgatgccattcttattcagaaaatccccccatcctacatgactgttatctagacataaagcaaagtgcatttaattcaaaatttggttcacaatataagtattttgtaaaagccagctgaaccagcattttatcaggtggaaatctctgcaagccaaattgctgatactccttcatgcagatcaacttggtgtcccagtcagaatagaacagcataattacctggagttagggggagtatttctgcactattacttgtcagggagagaagaaacttagaattgtccctcaaaggagtgtcaagaagtatgaataaatgtcctttcaccagctcacaggccagaaatggaggacccaagtcaactaggtgaaactactagcagacccagctttcccataataacctaatctgcaaattgttctattaaagtctcattgttttcaggatgcaatgaaagtggatttcaaaaggctttggaaaaataagtggaacatgactgatcttgaaaaaaaaagcaaaagcttaaatatttgatacaagtttacttagctacaacatactttacattgttgcctttagttatctcacaggcactgacattttatatttagaaaatacttttaatctttctaatctttttttgtaaatattagtgtccattctgtatgactcgctaacctactttgcaaggctttgggcaacattttagctcattaacttcaagatgatgtgtcatctgtataggtcaaagaatgggacttctgaactgaggaatttgctgttgacagccaaagtatagtgtacaagattgatgtaacttgatatgtatttttgttgaagttttttgtaaaaaaaaattatttacaatgttatttgaatgatttttttaaatgctgtgaatctatatttgttgttttgtatattaaaattcatttgccaaactcgttctgatgatgcatttgagtagcagcctttaaaaggaggaagtggagagctgggtgcgggggcttctgggatttgtagctcctctgctgccctgatgtccctagacttctcagtggcaacaactcatccattcaggagctccatgtaaccactgggtaggcgtgggagaaggggggctccgagggcaacctcggagggcaccctggcttgagaaacgtcagtggttggagtaagagggatgcggaagggagcagtggggcggggccgcttttgctagggatcatggagaggagacagaacaacagactgtgccctctgactgcccctgaaggctaggccctgccacaggagctgtgctagtggccctgctcactcgccctttgcgggtgggtagattagaatttccttctccaacagctcagaagagctaagtcaacagcccattgtttgctgtggctgtaatcagaaaaggattcctatgaaggctgccaagtggctactgcccactttttgtttactcttaatatccacctgcttcccaaagtgatctgctcctcccaaccttgggctgcactggggaagggcggtcgctagggtggggagggggcgagccccagaacccatagggcagagcatagtggctccatgtataggacacagtgaaagagatgggggtggcattttcttccaggagagttgtggggagatgaccgttaggtcataagcgcgcccctactctgcactggcgagaccagcaaagctggagtgaacccagctgaacctgggccgcagcagccccggaggctggaggcgctgcagtcgggaaacaccaggaggatggagcccttttccctgtaagcaggaggccaggatcctgattcctgagccggcttcccacggaccccaggccccggcagggtcctggcgggaggaagaacccacggagtgagtggggtgtcagcaaagcggggccgcagggcaggttctggaagcctctccgcgtggctgggctggagtgtgcagacgtgggagagcccggaatggggagcgcgtggccggtggaggcccgaggctgtgcttccgtcgctggctctgaggcagaggtccaggccggcaggctgcccaggtggtcctgtctcagagctctccggggcgcagaggcgcgggaagcggggaagggccgggcagcgagacgggtgtccccagcaggaggtcggggacccgtcgcgcgttccgtcggggccgcctgcggtgcaggggtcagagaccagccacgcgagcaagagggagcccggccagaactgctgagagcccccagcggagctgggactcaggggctccttgcgtttagccaccaagagtgggggcaggctgcggggtgccggggagaagccagatctcactcattttacaccgactaattagatcccgccgcccacctgggaccacggcattgtcatgtccgctgcactgacggggaaattgaggcacgggggcgagtaaggcgggagagggagtcggcgccgccgagctggggcgagccccgcacccacccgtacactcggcctctgcccctgctctgtgcgtgggctcctgctctgtgcgtggcctcgccgccgagctggggtgagccccgcacccacccgtacacccggcctctgctcctgctctttgcgtggcctcctgctctgtgcgtggcctctgctcctgctgcgtgcactgcggcatctcgggaaaccgggctgggctcctctgtcctctggaagctactgtaagttttagataaatgttactactagacacgaggaaagtgagtccatgattactggcattgaacaaatggttgcaccgcgttctccgtggtaggtggagtgtgtgattgtgagaggggaatggacactgaatccttacctacacaaatgcctaaactcgtaaggcattacgacacacccatctgaaaatctaattaagcggtaggaattctaatggtccgggatccaaatgagacccagccacttaacagttagcagccttcagttttgtcctgttgcccgtaattaccccaaggtcagggagaagcactgaagcaaaggcatgaacatcactttgaaaaagaaaggagttaatgggtgcagcacaccaacatggctcatgtatacatatgtaacaaacctgcacgttgtgcacatgtacactagaacttaaagtattatatatatatatatatatatatatgaaagaaacctgcctggggcactccttccttcagactccccttgaaagtattccctcatttcattcaaaaggatttaacttttctaaactaagtggtgctggtagaatatgctacctgatttacgtgttgctgtaattcttgaagctcttccaagacatcttggccttcctctgttccctccccttcctgctattttgcagacatatccactggggaattgtatggcaggaaggctgattttatttagctggcccttgattcttggtttgcacagtatctgggtccagcctgcagccctagggtccaggtaagttcatcaggaaaggatttctttacattcaatttaagccatctaggtcctaaaacaacgcttatattatctgtgggataatcctgcttagttatttgcaaaatagtcagatgtctatacagttttgggtaggaaaggggtaagccgctttcaaaattcattcttgaggaagaggctaaagaggagataaaagcagattttgaaattcttctgctggaactctgcaattggctgggaggagagagaaaaaccatagaataagtcataagaatagtgggctttttttctttttttcagatgtagtcttgctctgtcgcccaggctggagtgcagtgtcatgatttcagctcactgcaacctcgcctcccgggttcaagcaattatctgcctcagtctcccgagtagctgggattacagacatgggccaccacaccctgctaatttttgtattgttagtagagatggggttccaccatcttggccaggctgctcttgaactcctgaccttatgatccaaccgctttggcctcccaaagtgctgggattttttttgagacagagtctcactctgttgtccagactggagtgcagtggcaggatctcagctcactgcaagctccgcctcccgggttcacaccattcttctgcctcagcctcctgagtagctgggactacaggagcctgccaccgcgcctggctacttttttttttttttttgtatttttagtagaaacggggtttcactgtggtctcgatctcctgacctcgtgatccgcctgcctcggcctcccaaagtgctgggattacaggcatgagccaccacgcccggcctatgatggatctttttaagagagctttctagagaagcttatagattattttgcacaaattttaatgtgtacttttttttcctgatcaggttcatcatattcagattgtacacattttcatttttatggc

SEQ ID NO: 3643 - DNA, 6000 bp, Homo sapiens
ggggagaacctgtctcatgtgactgcttcccaagctgccctgatgtgaccacactgaggcagcagcatggggacccagaatggtggcaagcagaagaaaagaacgaacagaaactgaacagtattaacactccaaaggaatctcagtgctgagccctttggctcatccatgctctgctgggatcaggtctgtagctaaggctgaggtggagcaaaaccaagatggtggagatgttggcaaaatggaataaaaccaagatggtggagatgctgataaatggagcaaaatcaagatggtggagatgttgatcttctagccattctccacatttatcctactttagtagctttatttttctcatatgctcatggatttttaaaatatacctgcattatcaagattttttttccagaaagaatctgatagattaattatctccacactttagcctttagcagaagttagggattgataaactggcagggcaggtgaggatggcttgcctccaaaatgctaccagtcatagggggctccctttcttcttgtaaggagagtaacaatggctctttctattccaccattcttggagaacagtaatttgttgaagaaaatgaaatggagtttgtaggtgaatgtgcatttcaagttataaattaaaaaataaaactctagtaccacataagagttttctatgtatgtctgtttaaagtcaagaatagcggtgatataataacaataatccaaattgatcagcagttataatttttctcttcttttgctctcctctactgggtgtccctgaactctgcttctttgaacaatgttgttcactcatctggattagcataaagactcattttggaaattatattccactattgctatttgtttttacagttttcaattcagctcctacttaagttattcaacatcactaccatagttgatctgtaataccgagagcatgcactctccatcagttaaaaaacaatgtccttgaaacatatattaatccataggtagtagaacattaaaacatttctaatccatttcactgaagttgctgtgaactgcagctcaacaaacaaggaggttagaacatcataactgatggagaaaactcaaccctgccattccaggttggttgcaagaatgctgggacgggaagctcagggaaaggaatccagaagttcagcatgcagccttggtgtgggtcaggcacagccaactgctgaaggtgtgttttgtgtccaagctggcaggtttactagggtacgcctcttgaagatggtgggtagcctgattagagcctagagtcaagaatgtcaatgggttggcccttctgatgagttatagtatcatgtcccaggagagctagattttcacgaactcatttcctcaaattcaaggttttagatagtttctctccatggctatgaggaaatgaaaataattaactatgaaacagtgactttgtcagtcttagtgttactgccataaaactttctggccatatgggaggaatttgtttctctggtctgatgtggcctggtgtcagctggaggggatccatctcagcactgatgtcactcctggccagttgtgtactgtgtgcttgggtatcgagtcatggtctgaagttcatcttcattgatcatctcatagtgaagttaattatttctgagactctgaagtcatggtctgttgtgagttcaatcaggatgaaactagaatcattaaagaatgagagggttactttcttcctgctgactggagagtgattttcaaacactccttagcagtagactcttttggtcaaacacacctttctgcagaattccaatataggaaataggtaaaagtagatgttctctggtacccctggtgtccaaccacagactttacccccagacacagcatgaagcctgctcaggaagagataccactgaccaaagtggaaaattcctctgcaaatttgtacgggaacagaacttgcttgcactgtggtagcacatggaaagaacctggcgacactgaggaatgtcataggaagcaattctatgaagcttatttctgtgtttactgcagggatgttgtcaaggatgtggttgatgacattccacagtgtttcctttatgatgatctgctgaagaaattttcctctcccctcaggatgatgattaaccacatttctcctgagcagctgggcagttgacatcttgtaggtattgtaaattgtggcctgtccctatgtgtacctatagggtagggttctcaaaccttactgcacactggagtcatctagggaggtatttaaatgccaatttccaggcttactccagactaattgcatcagaatctcaagagggggatcgacatctttaaaaagttttctgggtgacccaaagagtagccagttttgaaaaaaacaaaaaaaaggtttatttaatcagggagcctctgaagacacctggtttctgttgaatatatctttttttttttaaatgagaggatatccatgcatatgtatatatacatactagcttatgattattaaataaatggttaaaatagtcatcttcttttagagtaaaattcaattattcttatagcttcctcctgtagtaaggtgctacttaggattttccaagaagcagacaccaagttggaattagatgtgcaagaaatttaccaacaagatgcctgggagggaaaatagagaggaagctaggaagggctgtgacagctgatagtgccagctgttggtctgaactttgggagggagagagtgaaggaataaggggtggatgaggagtcctaacttgagtgcagttgtaggtaagcctggcaaggctgatggggagccttgagtcaaagtgatcagtcagagaagcttgaggctcccagggacgggccagacttaggatcctgccgttgtcttagctattgatggggagcaaccgagtagggtgatgtgggggcgtgaggagctggccttgtgctaaggcaatggcgggtttcagagcgtagcactcggggccagcaatccatgtgcttgctgtagttgcagatctgagaagcatgtttttctggcagtcacagtatatcacctgaattccttgcccccccgattcttcccatcatttgtgtttagaaatagcaaaggattgtgaggagtgaggatgtgtgacacgaggatgaaagaaagcagcagggtcaggagagtggcaaatggggctttgtgaaggttgctgcagggcattagatggagaattagtcctggttcagcaacagatcaaagagaaagaggcagggtgggggcaggaacaactgggagaggagtgagtaaaaaatttggagcaggagtgaatagactgctggttagaccttagcagagaaagattaaagtgtgggtgttacttgctcataagaaatagacgcatattttcacctaagggtggctacctcgccccatccagcaaggcacatttcagctttaatatgaagaaacacacgtgatttctttagcatagtggttttctttcctggtcttatgttagaatcatttggagatctgaaatatacaaatatctgaaactttaacagaataattaaatgagaatttttgagggcaagtgcagatatcagcattttttaaaagcacctctggtggtgccaatgtgcagcccaagtttagctgctttaccaaatgggtctaaaaactattaacagagcctgtgaaggacccatgaataaaatatgcatttattcacataaatctctgagaataattcgagggtacatgcattgcataagatgcttcaaagtgctaagatttgtaaacatttaaatcatccatgaaaattgtgttttcagcctgactctccctgtttgcatcaaagaccatgataaaaacgttatctgctctgtcacatcaaaattatggatagaaccgcttcccattccctctcacacacttcttttggaggcagagtgaaaacgggtttccattcttaacaggtcaaaacagatctgaagcaagaatgtataggcccactgcacacacagcagaaggcaactcctgcctgagggttcactgtaacaatcattcattaaatacttaccctgtgcttgggggacactgaagcagatatgtcataggacaggatgactactggtactcctaggacacccagacccagccctgcttgagaatggggaggtctgaagatacagatcctaaaaaggtggggccttcatagtggaaagaggaacgccatttggatagacatgaaccacccaggaggcagtcgtacattgactgaaggactagtggcaacggtggggtaatttcgttttcagtataaatcagcagtcattaattaatgaagaacttcttatgtgatagacactgcaggatgctatggaaatttgtctcacctactttttgagggttctctggtgctggcttctcctcttccctgacatgtttctgtggtaggcagaataatggctcccacctcacaaatgtcctaatcctctaggcctgtgactgagtttcattatgtggcaaaaggaactttgcagatgggattcagttaaagactttgagatgggcttattcaggtgggctcaatctaatcacctgtgtccttaaaaaaggaaaacccagctgggcacgctggctcatgcctgtaatcccagcactttgggaggctgaggcgggcggataacctgagttcaggagtttgagaccagctggaccaacatggagaaaccctgtctctactaaaaatacaaaattagctgggtgtggtggcgcacacctatagttccagctacttgggaggctgaggcaggagaatcacttgaacctgggaggcggaggttgcagtgagccgagatcgtgccattgcactccagcctgggtaacaggagcgaaactcctctccaaaaaaaaaaaaaaaaaaaaggaaaacctttcctggttatagtcggagaggggaatgtgaccagggaggcagatcagagagatggcagtgtgaccgaccatggccggctttgaaggaaggagtcaagagccaagaagtgcaggcagttcctagaaactgaaaaaaagccaagaaaatccttccatggagtttccagaaaggaacgcagtcctgatgacacgttgtctgtagtccagtgagacatatctcaaatctgacctacaaaaccataaggtaacaagtttgtgttgtgataggccactaagtttctggtaatttgttacagcagcaacaggaaacacatataatccctgaaggatctcaaatccatttgtagcaagaagagacatgctgcttaatttctttcggttttatttttaaaacttttgattttgagataattttagaattacagaagagttgcaaaatcagaacagagtttccatatacccttcatgcagttttccataatgttaacatcatacatactagtaaattgatcagtattaagaaattaatactgattcaatacatttaactaaactatagactttattcatattttaccagattttccaccaaaggtcttctctttttttctgtcccaggatccccctttgcatttagttgtctatctccttagtttccctcaatctgtgatagtttctcagactttccttgtctttcagagccttcgcactcctgaagactactgctgtttggtaaaacgttcctcagtttgggtttgtttggaattttctttctttctttctttcttttttttttgagacagaatctcgctctgtcacacaggctggagtgcagtggcgtgatctcggctcactgccagctctgcctcccgggttcatgccattctcctgcctcaacctcccgagtaactgggactacaggggctcgccaccacacacagctaattttttgtagttttagtagagacagggtttcaccctgttaaccaggatggtctcgatctcctgaccttgtgatc

SEQ ID NO: 3644 - DNA, 6000 bp, Homo sapiens
atacaccatggaatactatgcagccataaaaaatgatgagttcatgtcctttgtagggacatggatgaaattggaaatcatcattctccgtaaactatcgcaaggacaaaaaaccaaacactgcatattctcactcataggtgggaattgaacaatgagaacacgtggacacaggaaggggaacatcacactctggggactgttgtgcggtggggggaagggggagggatagcattaggagatatacctaatgctaaatgacaagttaatgggtgcagcacgccaacatggcacatgtatacatatgtaactaacctgcacattgtgcacatgtaccctaaaacttaaagtataataataattaaaaaaagaaagaaaaaagaatattaaaaaaaagagcttaggcatattaacatgctaacagatgacttactatgaagaatgatcttacgtatttctcaataatttttttctcaaaaaaactttacaattgaaaaataagtaaatgttctagataaaaaattaatcttaccttttataacatacaccttgagagaattataaccaatcacagtagaaatacttaaatattttcttttttttttttttttttgagacagtgtattgctctgtcacccaggcaaggcacatctcggctcactgcaacctctgcctcctgggttcaagtgattctcctgcctcagcctcccgagtagctgagattacaggcacacaccaccacacctggctactttttgtatttttagtagagacggggtttcaccatgttagcaaggctggtcttgaactcctgacctaaagtgatccacctacctcggcctctcaaagtgctgggattacaggcgtgagctaccacgcccgaccatattttcatggaatgcctctacttgagtaaacagggtatgctgatgtactccgacttttcctcaaggtcttgccatggtcgacaccatgggcctgaatgggaccatcgcactgctaaggggcacctgctgggtgaggctgcagctgtcctattgcgtgttccttgtttcctgtgggattcttctggctcctccccagctttcacctatcatttctaatggccagtggctgtcctttactatagggaatgtccagccagtgcttcgatttttctctcttttcatatacactggatttattttcaaagataagagccagaatgattactcaagattcattatgctgccaccaaggaaagtgcatggactttgtgacagcgcttttccttggtgcctttcctcctacttacagggctgactgatgttgatggaaatctgactggctgaataatgatgctgtctagtagtcattttaacaacaacaacaaaagtataataatgaaaagaagaatggtgagaacaacatgcatatattaagcactgttctaaggatttggtatagattgattcatattatacttaaaacaaccccataagcactgaatcagaccattgcaccacttaggtgtaccagcagtgggaccctgtaaccactcccattgagtgttttgtctttcaaatgatgaaactaaggcacagaaatatcacccagccagtaagtggcagatcctggaatgaatcacaggacatgtgggctcagagtccctctttttagccactttgttttaggatagatttctaaagctttcattctgtaatggagcatgaatatattcatgtgtaagacaatcacttatttctatccttttattttgcagggggtaactttggtaaaacctgtgtacagtttcatgagagggagcttgttataacagggagatacataagatccccagtcaggcagagctgatactgagaggtgacagcatgctggcagccctcgcagccctcgctctcggggcctcctcggccttggcacccactctggccgcgcttgaggagcccttcagcctgcgctgcactgtaggagctcctttctgggctggccaaggccagagccagctccctcagcttgcggggaggtgtggagggagaggcccgggcgggaaccagggctgcgctcggtgcttgccggccagcgcaagttccgggtgggagtgggctctgtgggcccgcactcggagcggccggcgggccccgcagccccgggcagtgacgggcttagcacctgggccagcagctgctgtgctcaatttctcgccgggccttagctgccttcccttggggcagggctcgggacctgcagcccgccatgcctgagcctcccccgacctccgtgggctcctgtgcagccggagcctccctgataagcgccgccccctgctccatggcacccagtcccgtcgaccacccaagggctgaggagtgcgggcacacggctcaggactggcaggtgggatccactgggtgaagccagctgggctcctcagcctggtggggacttggagaacctttatgtctagctaagggattgtaaatacaccaatcggcactctgtatctagctcaaggtttgtaaacacaccaatcagcacactgtgtctagctcagggtttgtgaatgcaccagtcgacactctgtatctagctactctggtggggacttggagaacctttgtgtccacactctgtatctagctaatctagtgagaaggtggagaacttttgtgtctagctcagggattgtaaacgcaccaatcagcaccctgtcaaaacggaccaatcagctttctgtaaaatggaccaatcgactctctgtaaaatgaaccaatcagcaggatgtgggtggggccagataagagaataaaagcaggctgccctggccaccagtggcaactcgctggggtctccttggtcactgtggaagctttgttctttacctcttggcagtaaatcttgctactgctctctctttgggtccacacggcttttatgagctgtaacactcagcgtgaaggtctgcagcttcactcctgaagccagcgagaccacgaacccaccgggaggaatgaacaactccagacgtgccgcgttaagagctgtaacacttcttgtgagggtccgcagcttcattcttgaagtcagtgagaccaagaacccaccaattctggacacaatatgacattggttcaggcattcaatccttaagaaagctccatctggatatctcagtttttactctttttattctacctttcctggaaggctggcagtactttgtttgcaggtggtacatgtgtattgttgtagtgatgatatcttccccagtgggtatgtctgataggtgtttgttcagaaagatcatactgtatacatgtttgcatctgtattactgcttcgatgttttcagattcaggaggatccactgtattcaacaacactaataaagagcctactatgtgcaggaattttgctaggtgatgagagtacaaatgatgaataaaacattctgtattttcaagacttttataatctactagagaagacactcatatagttaaagtcactgtaatgaggaaagtgataggataaagtgaatgacaggctggacgcggtggctcacatctataattccagcaatttgggaggcgaagttgggcagattgcttgagaccaggagttcaagaccagcgtggccaacatgctgaaactctatctctactaaaaatacaaaaattagccgggcatggtcacacacacctgtagtctcagctactcgggaggctgaggcacaagaattgcttgagcctgggaggtggatgttgaagtgagccaagattgcaccactgcattccagcctgggtaatgcctcaaaaaagtgaaataaaacaaataaaaaataaaggtgagtgaggagcaagagaggaagggctcttagaaaattctgggaatttgggaacagcaagaaggcgatatcctctgggctgaggtttgaaggttgaagaaggttgtcaatgaaacaaacagaagcaggaaaggcttccccagcatctcagacctatgaatgtgaagtgagcttggccaacctgctcttcctccagagtgtttcatatcagcaagtggcaccaattcagttgccaaagagagaaacctgtgtggcatctttgactccttcctcttcttcaccatgtcatggctggttagtcaccaaacccaacagactccactcctaagtgcctctgagacccattgcttctctccaccccttctgccaccaccatgctcagtcctggcctggatgtggcccgtggtctagtgactggctctcttgagtccagacttgctctgcccacctctttctaccaccctccctgaaacctattctccacattgcagtcaaagcacattctaaattacacaacagacctgtcattttgctgagaaaaaaactttcaatgactctccattgcttccgaataaaattcaaatttttattgtgagtgacaaaagctttgtgactcaatccctgctcgttttctagtctcatttttcactattcttccttcccctctgatcaagctacactaaacttctttcagttccttgaatacatcctgttttgcttcttggctgttatatgtgtgtcttcccactttgcttggataactgactcatcccacaagcctcatcttaaatatggcttcctccaaaaagtcttttctggactcccaagtctaggttaagaactctcatgtgctcccaggacacattttactaattacattttatggtgactgcatttgcttgtgtatcagcatgttaaagtggaaactaaatcctaggttgcaaaaactcccatatttcaaagaaagatacttgtagagaaggaatctggaaaccaagttaaggatatacataattgaggttgaagtaatcaagccatagtttgtttagagaatctgtgagaggagctttgagataagcagtgggcgaggttgatatttgttgtgacgtttcaggtaacaaagagcctgggatttgtctcacatctaagaagactgaaagcaaatggtgtggccgaagctgcctctctggtggcatagctaagaccaagctgcacgcagtgaaaacacagtttgttttcactgacaacaaggcagaatgtgtaccagggatgtgacgtggggaaccaggaagaggacagtctgaggatcattattaaagggactccatccaagaaggtttccagccagaggcaagctgtagccagaagaaaagaatgagaggtactattagttgcagaaattgaggggagaactgtaaacagtcagctagggagagggagtttcagtcagatgtttccagtgggaaaatctttaagaaaatacaaaagagtaccatgaatgaaagagttcactctgaacattttaccaagctcagagagcaccaacccaggttataactttactagtcaaataagtcccctccagttccatcccacccacagcaggctccccttcccatggtaaagttttcagactgaaagttctgaattgaaggagggaagaagatttaacttgaaattgaatcaaagcttttgttattaacttgggcctcctcttttaatttttgaaatgagtgtgttctcaggactaaaagtgaccagaggactttttatcatttaagtaagaacaaagaagttaggctggacggggtggctcacacctgtaatcccagcgctttaggaggccaaggcgggtggattacttgaggtcaagagttcaagaccagccttgccaacatggtaaaaccttgtctctaccaaaattacaaaaattagctgggtgtggtggcggacacttgtcatcccagctactcgggggactgaagaagaagaatcacttgaacccaggaggcggaggttgcagtgagctgagattgcaccattgcactccagcctgggcaacagagcaaaaactccgtctcaaaaaaaaaaaaaaaaggaagaaagaaattttgaaacctacctgagatttccagcctgagggaaaatatatg

SEQ ID NO: 3645 - DNA, 6000 bp, Homo sapiens
aacacagatctagatcaaatgaaggaacatattcaggatgaagcataaataaaggccaggcgtggtggctcatgcctggaatctcagctctttgggaggccgaggtaagcagatacttgaggtaaggagttcaagaccagtctgggcaacataggaaaactccatctctagtaaaaatacaaaaattagccaggcatggtggtacatgcctgtaatcccagctactcaggtggctgaggcaggggaattgcttgaaccggggggcagaggttgcagtgagctgagattgcaccactacactctagccttggtgacagagaaggactctgtctcaaaaaataaataaataaataaataaataaataaaatgaaactgcaagttaaacaatgtattatagaagacctaatatggcaaaaataagagtttcaaagaagaaacaataaaaaattattttctgaggaaaactgaagtggagacagattcaggaaacatttaggaaatgaatacaataagaccctttgatattatttaattatgttttcagaaacagctacaatctccctaattaatttttgtatttcccaaaagtttatttaaaagctctaatactttagattaattttattttaggaataagtctgagataatattaatgaattaaaaacctgtcaaacagagttgctttctagaaagtaagagataaaattactctaaatatttctagcattgtgcacagaagagataaacagttatggacaggtttacttccttcatacatgaccaagatgtttttcctcttccacctcccatccagttttccgtaatgtctgataatttgccattagaaatgcactcctttaggggtgagagctaaaccaaaccaaccaaataggccctgtttggccaggaggacctcagagaaaccttaaaataataataattaaaaaaacccacctgagttcccaaccatgatgggatggtaggtcagatgcctcattatatccctttctttttgctgtttagacacaacagctgacagcattaatgttaaaacagagatcataagactgacagaatagactgtttatggcaataagataccaaattgtaaacaagagctatggccatgccaggcaagggttaagtcacacactttacacttaacaaataaacgatgttctaattcccacagggtttcttctccctctttctccagcagctaaacaacactagctttgagataagtgatgttgaagcagttgcagctccccagctatcagacaccaaataactgagcccccacctgttacacaagccacagtgacagctttgattggacaagagagtgatttctgtaactttctcctgataagagaccaccaaccatggactacttctggctggttttacagcagatgcacatttgagtgacttcctgtcccttcttcacctaattgtgtacatttaaatgttaaatctccatcccaatggaactgtgggacgcacgtaacatgcatgtttgcttatcatgcatgcttacaccctttcatgaatattcatagctcttcctatgtcctgttgaatatgtatgctttgccaaccccttcagcttaaattcctgtgttactcttccctctgttgaagggcttgctttaggttttttccagtggcaggctgcccttcctgcctgcaggttgtaattccattcttaagaaataaaactcacctttctaaatttattaattgtgtgatttaagttaagggggtaaggcagtatatttccagaagactgccaacataaaattttaattcaattgtccattgacacagtgaatgttaatttgtcatcacatactagttaatttgttagctgaagggaatgtaataagaccaagttgcttgtaaagggtaatgggtaagctggattagattattagggaggccggtcctaggtgagaagtttcattaggttttcagtgagcagcatatgagcctggaccggagatcagaagacgcgggaacagacagaaaaagaagaagagtgatcaaaggagaggtggcaagtacaaaagacaaagcccaccagtttcataaagttgctcaggctgaccccatttccagggtgagatattttcacagacttattacctatgattatacacattttaaaaattgttattagcatgaggggctgcatatatattttataatagccacacttataaattagttgcaactggcttcagatttagcaagtatcttatacagggtcctggcaggaaataggtggcaaatccaaggggtttaactgaaaagactttaatttgaagagttgaggtcagggttaagcaaactaagaagggatggtaaggaacccaggggccagcaaaagtgggttcgctttcccacactgcagtaggttaacgccctccgccacgaaggaatccatatcctaagccccagactccgtgactatgttacctcacatggcaaaacttactttgcatatgtaatcaagttaaggatctggagatgcagagatgatcctggatagtctgggtgggcccaatgtaatcacaagggttcttatcataagagggagatattagctgggcacggtggctcacgcctgtaatcccagcactttgtgaggccgaggtgggtggatcatgaggtcgggagatcgagaccatcctggctaacacggtgaaaccccatctctactaaaaatacaaaaaattagccgggcatggtggcggtcacctgtagtcccagctacttgggaggctgaggcaggagaatggcgtgaacccaggaggaggagcttgcagtgagccgagattgcgccactgcactccagcctgggctacagagcaacactctgtctcaaaaaaaaaaaaaagaaaagaaaagaaaagaaaagagaaagagagagagagattagagttagagtcagagagaagctgtgaggacagaatcagaggtcagagactggagtgatgaggtttggagatgaaggaaccaaggaatttaggtgacttctagaagatggatcctctccggagttcagcaaagtgaaacgtctgtcataataataacgaatgacttcctttttcattttcattcatatagtgaagttttctaaaggctgcatcatgtgcaatattgtaacagagtaagtgcaggactgaatgtgactctatcaggccaattgtagagatgtgaaaaaatgtaaaacagtggcacttttctccctacttttttttgaaaatctgtttttttaaataaaataattttataaaagtattatgaattatttataaaattatattaacattatgttaacatgctaatatggtaaaattttctgcttggagtttgaatacaccaaatatttataaatataactcacacaaataaaacctctttggtgttctcaaaattttgaagaatgtaaaaggtttgaaaattgctgatctagcaaatgactgaacatgaacagctatagtatttgtacctgcccagcagtgcagcaattccttatccttctcatatctgcactttaattttcctttgacaaatatctctccctcctctcagcccatgacatgaggttcacatggggttaacttaattccctggctcaaaggaaaggtattaaattcagacttgtatccaaccattcctgaagctagacttagccctatttttcaataacatgaaccaatcaattttcacatgagtccaaaataattctatgttaatacactaaggtactaggaaatatagtttgagaaatgttgatccaaacattgtgttatttacagtggagtattgacataaactttgaatcttcaaatatgttctggtgtcttggcatctcttaatacctattagcttacaaggctttcactcaactattttataattttgataatgacttaattgattagttgatatattgttaaaataaatatattaatgaatttatgataaataaggcagataaataagacatgcaattaggaagacatgttaaacaaattgttataataatacaatcactctcagcttaggatagctcctggccactttctctctgggtggtttttactctgggagtagtttaaatcattatctagtagtagtttaaagcattatctttgcctaagagctttcgctgactccccacatttgcattgtactaagagttttctctgactccccacataggtctagaccctagtattataagattctcattgtacttgcactttgccttcaaagtactaatcacggttttgttagtgatttgtgtgatgatttgttgaatctttttttttttcccactagggtgtaagccccatgttccatcttgatcaccatgtttctagcccagtgctggcatatagtgggttctcactaatatatctgtagagtaaatgaagaaatgcatgagtgacatgacaggagaatttaaggatgccatgggagcataaaacagagggagccacctgggtgaggagagctgagaaagacttctggagaggcgacatttgagctgagaaaggaaagacaagtgggagagtcctccaggtgtagaagttggagagatgagcgctccagttaggtagtatttgaagctgatgtagaaaaggagtcttgagccagcttgtgaaggactattggagagttttatttttatttttatcttttttttaatttttgagacagaatcttgctttgtctcccaggctggagtgcagtggcatgattgtagcttactgcagcttcgacctcctgggctcaaacaatccacctatctcagccttctgagtaactgggaccagagatgtgcaccaaaatgcctggctaatttgttcattttttgtaaagatagggtctccctatgttccccaggctattctccatctcctgggctccagtgatcctcacgcctcggccacccaaagtgctgggattatagaagtgaaccactgcgcctggcctattgaaggtttttaatcttcagagtttcgactttatcaacaacacttagaagccaccaaagaattgcaggtatggaaatgacatatacttttgcttttagaagaaaatcctgatcagtgtgcacagaattcttcagggggcaagtgtgattcattctgataagatatagcatggcttagactgggagactggcagaggctttgaagatttctttgctcaaattttattcagcaagtatttaccatgcacctactatagcaggcaacatttttaggaaatggtgaatgttacagaggtgaataatacagcaagagtcgttgaacatatggagtttatctattagttggggagtgaatgttgacaaaggaataagtaaatacataggcaagaaagatacattacctgtgaaacagcagcaggtagactgacagtggagtatctaatacagcctatggaagccagaagatagtgggatgacatttttggagtactagtagaaatgtcatatgaagaactctgtaggaatgtaacatacggtcccatatatgaagctcctgggtcaagtatacctgaacataattcagggatttgagggactttcttgtaacctgaggatcaagatgtcaaggaattaaaaacatgtataaaacattgttgtataaaaacccattaaaaagaatggaagacactatagtaaaatcattgtgggtttagttgttataacacattttaaaaatctttgatcccaatcaatatttataagaaagaagaaatatggaattatttcctgagtcaaggagcagggagagaatgaggaagaagaggaggaggaggagggggaggaggagacaataaacctacttcccaaagttaacaaacaaaaagtgggaagaggtcaaagactacaaggagtagaattaacgtcaattgtttctatgtttgagtctgaaaattttttgtcccttctccaccaacctatatattgatac

SEQ ID NO: 3646 - DNA, 6000 bp, Homo sapiens
ccatctctactaaaaatacaaaaaattagccgggcatggtggcggtcacctgtagtcccagctacttgggaggctgaggcaggagaatggcgtgaacccaggaggaggagcttgcagtgagccgagattgcgccactgcactccagcctgggctacagagcaacactctgtctcaaaaaaaaaaaaaagaaaagaaaagaaaagaaaagagaaagagagagagagattagagttagagtcagagagaagctgtgaggacagaatcagaggtcagagactggagtgatgaggtttggagatgaaggaaccaaggaatttaggtgacttctagaagatggatcctctccggagttcagcaaagtgaaacgtctgtcataataataacgaatgacttcctttttcattttcattcatatagtgaagttttctaaaggctgcatcatgtgcaatattgtaacagagtaagtgcaggactgaatgtgactctatcaggccaattgtagagatgtgaaaaaatgtaaaacagtggcacttttctccctacttttttttgaaaatctgtttttttaaataaaataattttataaaagtattatgaattatttataaaattatattaacattatgttaacatgctaatatggtaaaattttctgcttggagtttgaatacaccaaatatttataaatataactcacacaaataaaacctctttggtgttctcaaaattttgaagaatgtaaaaggtttgaaaattgctgatctagcaaatgactgaacatgaacagctatagtatttgtacctgcccagcagtgcagcaattccttatccttctcatatctgcactttaattttcctttgacaaatatctctccctcctctcagcccatgacatgaggttcacatggggttaacttaattccctggctcaaaggaaaggtattaaattcagacttgtatccaaccattcctgaagctagacttagccctatttttcaataacatgaaccaatcaattttcacatgagtccaaaataattctatgttaatacactaaggtactaggaaatatagtttgagaaatgttgatccaaacattgtgttatttacagtggagtattgacataaactttgaatcttcaaatatgttctggtgtcttggcatctcttaatacctattagcttacaaggctttcactcaactattttataattttgataatgacttaattgattagttgatatattgttaaaataaatatattaatgaatttatgataaataaggcagataaataagacatgcaattaggaagacatgttaaacaaattgttataataatacaatcactctcagcttaggatagctcctggccactttctctctgggtggtttttactctgggagtagtttaaatcattatctagtagtagtttaaagcattatctttgcctaagagctttcgctgactccccacatttgcattgtactaagagttttctctgactccccacataggtctagaccctagtattataagattctcattgtacttgcactttgccttcaaagtactaatcacggttttgttagtgatttgtgtgatgatttgttgaatctttttttttttcccactagggtgtaagccccatgttccatcttgatcaccatgtttctagcccagtgctggcatatagtgggttctcactaatatatctgtagagtaaatgaagaaatgcatgagtgacatgacaggagaatttaaggatgccatgggagcataaaacagagggagccacctgggtgaggagagctgagaaagacttctggagaggcgacatttgagctgagaaaggaaagacaagtgggagagtcctccaggtgtagaagttggagagatgagcgctccagttaggtagtatttgaagctgatgtagaaaaggagtcttgagccagcttgtgaaggactattggagagttttatttttatttttatcttttttttaatttttgagacagaatcttgctttgtctcccaggctggagtgcagtggcatgattgtagcttactgcagcttcgacctcctgggctcaaacaatccacctatctcagccttctgagtaactgggaccagagatgtgcaccaaaatgcctggctaatttgttcattttttgtaaagatagggtctccctatgttccccaggctattctccatctcctgggctccagtgatcctcacgcctcggccacccaaagtgctgggattatagaagtgaaccactgcgcctggcctattgaaggtttttaatcttcagagtttcgactttatcaacaacacttagaagccaccaaagaattgcaggtatggaaatgacatatacttttgcttttagaagaaaatcctgatcagtgtgcacagaattcttcagggggcaagtgtgattcattctgataagatatagcatggcttagactgggagactggcagaggctttgaagatttctttgctcaaattttattcagcaagtatttaccatgcacctactatagcaggcaacatttttaggaaatggtgaatgttacagaggtgaataatacagcaagagtcgttgaacatatggagtttatctattagttggggagtgaatgttgacaaaggaataagtaaatacataggcaagaaagatacattacctgtgaaacagcagcaggtagactgacagtggagtatctaatacagcctatggaagccagaagatagtgggatgacatttttggagtactagtagaaatgtcatatgaagaactctgtaggaatgtaacatacggtcccatatatgaagctcctgggtcaagtatacctgaacataattcagggatttgagggactttcttgtaacctgaggatcaagatgtcaaggaattaaaaacatgtataaaacattgttgtataaaaacccattaaaaagaatggaagacactatagtaaaatcattgtgggtttagttgttataacacattttaaaaatctttgatcccaatcaatatttataagaaagaagaaatatggaattatttcctgagtcaaggagcagggagagaatgaggaagaagaggaggaggaggagggggaggaggagacaataaacctacttcccaaagttaacaaacaaaaagtgggaagaggtcaaagactacaaggagtagaattaacgtcaattgtttctatgtttgagtctgaaaattttttgtcccttctccaccaacctatatattgatacacatataaatgctaaaggcatttttgaatttgaacagatcattttctttgtatggctgcctttaaaaaaaattcaacctggtcactcttcctcaacatttactgaggtctaagtgttcaatttagaacacatgctttaataactcagagacctgtcatttgtcacaaatcttgcctagagaaatactcattagcgaattaggcagaaagaggatgcaaaataaaaaggcacagtagtcccctgatatccatggaagactggttccaggacaccaccaaacccctccccgcaaataccaaaatccatggatgttcaagtttcttaacatatcatggcatagtatttgcatttaacctacacacatcctcttgtacacttgaaattatctttagattatttataatacttaatagaatgtaaatgctatgtaactagttgtgtatcatttaggaaatgatcacaagaaaaaaagtctacagatgttagtccagacacagccatcctttttttttttttcaaatatttttgatctgtggttcattgcatccacagatgtggaacccatggatactgtgggctaactgtattaataaaaaagtggaaacatcctaagtttcatgggtgtttaaattggtcagcaacttccttctgaagaagtatcagaatttgtgagcaatgttaatatttttgttttctcactaagagccacagttctgaatagaggtttttaaaaagccctagcaaggtttctttagcaatgaaactaacatttaactgtatcatcagcttcgtgttacatctctttcctgactgttgggtgagccctcctcggatgcttgcttctggctacacgcccctttacccttttctctgcactgttttcatctttataaagtcagagttggtgtctataggctctctactgccacattcaagacctgcctcgctcaatgtcaccttcaagatgcagaaatagggatttgggaaggggattgtgaaattttcgaagtcttccaaaatactttgagaaactatatttggaagcactttggggggagaggttggacaggaagggtcttcagagatcatcaaatttaactttctaaatcctaaggaggaaaccgagactccaggatgtgaagtcccttctctaccaaactagaatggatgcaggaggaatgtctgaggtgcaatccttatcctttagcaaaggtgtcctctgcgtcttctttaacccatctcttggacctccagaaagacagctgaggatggcaaggggagtctggaaccactggagtagcccccagcctcctccttggagggcccccatgaaggaggcccttcagtgacagagattgagagagagggagggcgaaaggaaggaaggggagccagaggtgggagtggaagaggcagcctcgcctggggctgattggctcccgaggccagggctctccaagcggtttataagagttggggctgccgggcgccctgcccgctcgcccgcgcgccccaggacccaaagccgggctccaagtcggcgccccacgtcgaggctccgccgcagcctccggagttggccgcagacaagaaggggagggagcgggagagggaggagagctccgaagcgagagggccgagcgccatgcgccgcgccagcagagactacaccaagtacctgcgtggctcggaggagatgggcggcggccccggagccccgcacgagggccccctgcacgccccgccgccgcctgcgccgcaccagccccctgccgcctcccgctccatgttcgtggccctcctggggctggggctgggccaggttgtctgcagcgtcgccctgttcttctatttcagagcgcaggtgagtggccaccttcccaggggatcgcggctgagagcgcccatctccttcccccgcacttggaaactgagtctggcggcagggctgggccacccagagcttgcatattccggaagggaaagtgactccagaagggagagaggaagtgttgagtttggggacaacctggcgcagggctgtcgggcgcaccctgctctctctccgcccacgcaccccagcttctcggtgctctgggggcggactcccctggccggacgatgggtttgaatctcaccccgtcccttcgctgggaaacaacactggcctctcaccttttctggtagtgattgcatactttttctccctgtcatttctcacttgaagttaagaatcaacttctgttcacgtaggaaaaaagatgagcgccttcacttgggcatctacctttcccttcccgcccaccacccggcgggtttcggttcctgcgcctggctgctctgcaggtgtgctggggccacggtgctggagggctgcgcggagcgggaggtcgcggtgctcgtgcccaggtcgcccaatgggtgggcagaatgacacggcgcgaccagagaggcgcgggctcgggatgggggctctgcggctgtggcgctgtcctgtgggggtgaaggaagagggacagccccacgtgcctgctagggatgtgggcggaggaaggaagcgaggtgagtgtgatggcacagtgttactacagtctagcaaataaccaaccttcggaaagatgaagaggttttttgcacgacggctaggaactgcagagagatagtaggaaggaaggggtaaatttgtaatattatgctttctggtggtttatgctc

SEQ ID NO: 3647 - DNA, 6000 bp, Homo sapiens
tcgctgcaacctccacctcccaggttcaagcaattctcaggcctcaaccacccgaatagccggaactacagccgcctaccaccatgcctggctaattttattatttttagtagagacgaggtttcaccatgttgggcaggctggtctcaaactcctcacctcaagtgatccgcccaacttcacttcccaaagtgttgggatcacaggtacgagccagctcacccagcctgttttcagcaatttctttcccgccatgcagccctcctgcagttgcctcaagttactttcaagatgtgactgttgagcagtttcctgctaatagagggtcagaatgatcacacttctctcagcccctacacagcaagccagatctccatttggctgttttctctttctggcaaaaattgttcaaatgagctagagtcaaatataagtattcacaaaacactggggtcatttaaaaaaatcatttgctgaaattgaagagtttatggtgccaagtaatatatttgaaaagaaaatttgcccaagtcaatggatttcaaaacacttgacttataaccacaggaagaaatatatgtgggatctagtacattcatacatacataaatctaaaacatacctgggagtggtggcgcgtgcctgtaatcccagctactcagggggctgaggcaggagaatcgcttgaacctgggagccagaggttgcagtgagccgagatggtgccactgcactccagcctggacaacacagcgagattcattctcaaaaaataataaaataaaataaaataaaataaaataaaataaaataaaataaaaataaaataaaagcttcacaaaataatactcacctttactgtgattcgcctttatatatgatttttcttttctattcttatttcattttaaataaagttgttcactattcactaaattgtttctcaaccgtctgtttattctcattggttgggtgttcaagatcttttcttttcagagcccgcaattttatcaataaaatttttgttgttgtttgtagtttgagacagagtctcgctctgctgcccaggctggagtgcagtggcgcaatctcggctcactgcaacctccgtctcccaggttcaagcgattctcttgccttagcctcctgagtagctgggattacaggcaaccgccaacaggctcggctaatttttgtatttttagtagagacgaggtttcaccatgttggccaggctggtctcaaactactgacctcaagtgatccacctgcctcggcctcccaaagtgctgggattacaggcgtgagccaccgcgcccggccaaaggcaagattttaatctagggtgccatgactcttcagtactttttttcaccacgactatatttttataaaacttaaagaactgtttcgacctgaatatgagattgggcagttgagagtaatgtttgagagtactgcatgggtcaatgataatatttctgaatagtttggaagtattaaaactgaagaaaataattatacttgccgggtgcagtggctcacgcccgtaatcccagcactttgggaggccgaggcgggcagatcgcctgagctcaggagtttgagaccagcctggccaacatggtgaaaccctgtctctactaaaaatacaaaaaaattgcctgggcgtggtggcaggcacctgtaatcccagctacttaggaggctgaggcaggagaatcgcttgaacccgggagtcagaggttgcagtgagccgagatcatgccactgcactccagcctgggcaacagagcaagaccccatctgggcggggcggggtagaaaataattatactgtaataatctggaaaaaaaatgttcacacagtattaatgtgtgataatcatctcatacattccagaaatgaggtttgagagccttcactgaccatgtgtcatatccatttattttgggatccctttcaccccatttttaacttcctcccagttgcccaatgtcctctggagttttccatccaagacccccatctttttttttccctttcccccctttttagcttcctcccagttgcccaatgtcctctggagttttccatccaagaactccagcttctttttttgggggtgggggaggacggggtttcactcttgttgctcaggctggagtgcaatggcgcgatctcggctcactgcaacctccgcttcccgggttcaagcgatcctcctgcctcagcctcccgagtagccgggattacaggcgcgtgtcgggatcacacgtgtgagccaccacgcccagtccccccatcttcttaaaggggttaatttcttggctcttgcattttgacttttccatcattccaattgccatcctgtgtcctgctctttcccaagggttgcattcttactctgctgaatgctatattattggatttatgaacaattgttaatgtattataattgtctgatactttgatttaccagaatgaacacttctataagtaggactggatcgaacttgttcacaattggaatcttggtgcaaatcctagttctaagggatacaaagcacaaaatatttgcgaaatagaacaagctttcagacttcatactggcatgtatctttgccttatgccaaagatgtgacgatgtgactaaatacggaagttttgttttgctattgagccaaggtcttgctctgtcattcaggctggagcgcagtggtgcaatcatagctcagtgtaacctccaactcccgggctcaagcgatcctcccagctcagcctccctaatagctgggattacaggcaggcaccaccgcacccaattaatttttaatttgtgtgtgtgtgtgtgtgtgtagagacagggtttcagtagttgcctcccaaagttctgggattacaggcatgagctaccatgcaggacctgttttgttttaatacttagtaattgggtgtaaagtccttcaaaaaacaggtggggcaggtgggaaactccctttgtgtgaccctctagcaccagggataaaatttcaacttcatcttaaagcgacaacatacttttccaagaccaagtgcgaaatagtaaagggaagagctagctccgtagccgtccgccacagaatgccacaagctttcaattatgggacaaaattggaacacatggaaaccctgtgcagactcccgtgacatcttccctcctctccaagtcccttcccacagaccttgcgccccacacgattattccccaggggccgagcaggacgacttgggtcccactatccggactcagcggtgcccccacaaaagcgtcccaaaaactccagctggggcagccctggggcagatgctgaaaagttgtcagaggccctcgggcagtcccgagatctaccccaggccagagggcctgaccctccctaaatgcgacgttctcctaccttggttgatactcacgttcccagaaaagggtggaacctaggctggacgaggcgcagggccaaagtttaattcctctaagctccacccagctcccagcacctctccaggcggccccgtggggtagggcggagccgggtccaacgtactccgcttcccccgctccacccacccagggctagggagcgccccgagagttggcctcctcccacgctgcgcgcgcacctccccgcccccacccctacccgctggcgtgcccagtggaacggagccttgtgtctccgcctcaagtccccggatgctcacctccccgactcgcccccgctgtggccccgcccccgcgcggctcttcgtgccacgtcaccgcctgcgtcgcttccggaggcgcagcgggcgatgacgtagagggacgtgccctctatatgaggttggggagcggctgagtcggccttttccgcccgctcccccctccccccgagcgccgctccggctgcaccgcgctcgctccgagtttcaggctcgtgctaagctagcgccgtcgtcgtctcccttcagtcgccatcatgattatctaccgggacctcatcagccgtgagtcctcactgcactatccttactgccgcacacgggggtctggggtgcgggtgggggcggggaaggcgcagccgtcgcgggcctaggggacgccggcggtcttagccgagcgcggaggggtcggtgcccggggctcgcgcccagctctggtgtgctacggaggggcagatcccgcgtgcggccgccggcgcgggaaatgcgggaaatggcggcgccaggcgcacggtgatgggcggctctgtgtatccggcagacgatgagatgttctccgacatctacaagatccgggagatcgcggacgggttgtgcctggaggtggaggggaaggtgagtcggtcgggcctgcgcgtgggggagtccgggccgagcgggctcgggtttcctccgctcccccgcctgaggttgtgcaatcctccccgccgcctcctggcggaggagacgctctttccgggcttgggtttttctagaaaactggaggcggagctgatcctggaaataggcccgccgcctcggcgcccatcctcctcccggggttgtccgggacatgatgcttccggcttaggagcctggagtcctttcgtgtttgtcctgtccccacttaccaaccggaggcatcacatgcccgcaactggaaacaactttttaatgaccccattttttgttccggccaacagacaactcttttaagttaggtcgttttgagaaatccacgggtcacaactttattcccaaaatggtgctttttttattttcagcaagaactaagaatacttcttatccgtgaactattggcgtggaaggtgctttggatgcgtttgtgtcttttgcaattatactgctttttcttaatgcagatggtcagtaggacagaaggtaacattgatgactcgctcattggtggaaatgcctccgctgaaggccccgagggcgaaggtaccgaaagcacagtaatcactggtgtcgatattgtcatgaaccatcacctgcaggaaacaagtttcacaaaagaagcctacaagaagtacatcaaagattacatgaaatcgtaagtgatactggcagtacctagctgatgtctagaatcttacaggatttaaagattggctaacttttgaggttctttcgcagtgggtatacttttgtgaaagtccttgcttttttattaatgagttcacggaaaagagtggttgcttttctataatatgagcatactgaagcctgcagtctgtttccgtttagaattagaatagtattttgaaaatagtcaacaagaaatgtaaacattcttgaaagataccttctgtgaactagtaatttcttaacagctggttgcctttttcagtgttttctttttttaagcttggatattttttactttaaaaattgattttactgaaaattcaatacttcaacctgttaatgaaatgttgttttagaatcaaagggaaacttgaagaacagagaccagaaagagtaaaaccttttatgacaggggctgcagaacaaatcaagcacatccttgctaatttcaaaaactaccaggtaaataccttaagtatctggatcaaaggattgtacaattttaactgcaagagcaaaaattaagttgattaatcttcaattctatactagtattccaggtgtagaaagtggctttcccagctcgcaggtgtttccaaatcttgtcttctgattgaaaatttgcttcccagatgacatttctcagtttttctttttgtgaattgcttaaccacctaagtgttctttcagttttttgcttacaattttaatgtgtctcattgctactggtcctccttctaatgtatctgagcttgttaattctacttttggaaaatgtcagtggctttccctttcctctaattttccagcttcatgcatcccctggccataagatacttccagactgtatgatatattctatcactgtcagccttatgttccctgtggtt

SEQ ID NO: 3648 - DNA, 6000 bp, Homo sapiens
gtggcacgtgtctgtagtcccagctactcgggaggctgaggagggaggtggaggctgcagtgagctgtgattgtgccgcttcacagcctgggcaacagaatgagatcccgtctcaaaaggaaaaaaaacaaaaacacagggatttccaagaggcagggattgtaattttaaacatgatggtcaaggatagcctgtggagagggtgacaatttgagcgaagtctatgccttttgttttttttttttgagacgggagtcttgctctgtcgcccaggctggagtgcagtggcgcgatctcagctcactgcaagctctgcttcccgggttcacgccattttcctgcctcagcctcccaaatagctgggactacaggcgcccgccaccacgcccggctaattttttgtattttttagtagaggcggggtttcaccatgttggccaggatggtcttgatcttctgacctcgtgatccacccacctcggcctcctaaagtgctgggattacaggcgtgagccaccacgccgggccgccttttgtttctatagacagtagcttctttttcagagggagagaaaactgaggtgttttcaacaattttttttttcagagatggggtctcgctatgttgcccagagtggtctcaaactctgcctcaagtgagcctcccaccttggcctgcctaggctggagtacaatggcactatctaggctcactgcaacctccacctcccgggttcaagtgattctcctgcctcagcctcccgagtcgctgggattacaggcgcctgccatcacgtccaggtaatatttgtatttttaatagagacagggtctcaccatgttggccaggctggtcttgaactcctgacctcaggtgatccacctgcctcggcctcccaaagtgctaggattacaggcatgagccaccacgcccagccggctttttttttttttttaactagtcaaggacagtagtgaaaaagggaggggagaaaaattttctgcaatttcttttttttttttttgagacagagtctcgctctgtcacccaagctggagtgcagtggtgcaatctcgactcgctgcaacctccacctcccaggttcaagcaattctcaggcctcaaccacccgaatagccggaactacagccgcctaccaccatgcctggctaattttattatttttagtagagacgaggtttcaccatgttgggcaggctggtctcaaactcctcacctcaagtgatccgcccaacttcacttcccaaagtgttgggatcacaggtacgagccagctcacccagcctgttttcagcaatttctttcccgccatgcagccctcctgcagttgcctcaagttactttcaagatgtgactgttgagcagtttcctgctaatagagggtcagaatgatcacacttctctcagcccctacacagcaagccagatctccatttggctgttttctctttctggcaaaaattgttcaaatgagctagagtcaaatataagtattcacaaaacactggggtcatttaaaaaaatcatttgctgaaattgaagagtttatggtgccaagtaatatatttgaaaagaaaatttgcccaagtcaatggatttcaaaacacttgacttataaccacaggaagaaatatatgtgggatctagtacattcatacatacataaatctaaaacatacctgggagtggtggcgcgtgcctgtaatcccagctactcagggggctgaggcaggagaatcgcttgaacctgggagccagaggttgcagtgagccgagatggtgccactgcactccagcctggacaacacagcgagattcattctcaaaaaataataaaataaaataaaataaaataaaataaaataaaataaaataaaaataaaataaaagcttcacaaaataatactcacctttactgtgattcgcctttatatatgatttttcttttctattcttatttcattttaaataaagttgttcactattcactaaattgtttctcaaccgtctgtttattctcattggttgggtgttcaagatcttttcttttcagagcccgcaattttatcaataaaatttttgttgttgtttgtagtttgagacagagtctcgctctgctgcccaggctggagtgcagtggcgcaatctcggctcactgcaacctccgtctcccaggttcaagcgattctcttgccttagcctcctgagtagctgggattacaggcaaccgccaacaggctcggctaatttttgtatttttagtagagacgaggtttcaccatgttggccaggctggtctcaaactactgacctcaagtgatccacctgcctcggcctcccaaagtgctgggattacaggcgtgagccaccgcgcccggccaaaggcaagattttaatctagggtgccatgactcttcagtactttttttcaccacgactatatttttataaaacttaaagaactgtttcgacctgaatatgagattgggcagttgagagtaatgtttgagagtactgcatgggtcaatgataatatttctgaatagtttggaagtattaaaactgaagaaaataattatacttgccgggtgcagtggctcacgcccgtaatcccagcactttgggaggccgaggcgggcagatcgcctgagctcaggagtttgagaccagcctggccaacatggtgaaaccctgtctctactaaaaatacaaaaaaattgcctgggcgtggtggcaggcacctgtaatcccagctacttaggaggctgaggcaggagaatcgcttgaacccgggagtcagaggttgcagtgagccgagatcatgccactgcactccagcctgggcaacagagcaagaccccatctgggcggggcggggtagaaaataattatactgtaataatctggaaaaaaaatgttcacacagtattaatgtgtgataatcatctcatacattccagaaatgaggtttgagagccttcactgaccatgtgtcatatccatttattttgggatccctttcaccccatttttaacttcctcccagttgcccaatgtcctctggagttttccatccaagacccccatctttttttttccctttcccccctttttagcttcctcccagttgcccaatgtcctctggagttttccatccaagaactccagcttctttttttgggggtgggggaggacggggtttcactcttgttgctcaggctggagtgcaatggcgcgatctcggctcactgcaacctccgcttcccgggttcaagcgatcctcctgcctcagcctcccgagtagccgggattacaggcgcgtgtcgggatcacacgtgtgagccaccacgcccagtccccccatcttcttaaaggggttaatttcttggctcttgcattttgacttttccatcattccaattgccatcctgtgtcctgctctttcccaagggttgcattcttactctgctgaatgctatattattggatttatgaacaattgttaatgtattataattgtctgatactttgatttaccagaatgaacacttctataagtaggactggatcgaacttgttcacaattggaatcttggtgcaaatcctagttctaagggatacaaagcacaaaatatttgcgaaatagaacaagctttcagacttcatactggcatgtatctttgccttatgccaaagatgtgacgatgtgactaaatacggaagttttgttttgctattgagccaaggtcttgctctgtcattcaggctggagcgcagtggtgcaatcatagctcagtgtaacctccaactcccgggctcaagcgatcctcccagctcagcctccctaatagctgggattacaggcaggcaccaccgcacccaattaatttttaatttgtgtgtgtgtgtgtgtgtgtagagacagggtttcagtagttgcctcccaaagttctgggattacaggcatgagctaccatgcaggacctgttttgttttaatacttagtaattgggtgtaaagtccttcaaaaaacaggtggggcaggtgggaaactccctttgtgtgaccctctagcaccagggataaaatttcaacttcatcttaaagcgacaacatacttttccaagaccaagtgcgaaatagtaaagggaagagctagctccgtagccgtccgccacagaatgccacaagctttcaattatgggacaaaattggaacacatggaaaccctgtgcagactcccgtgacatcttccctcctctccaagtcccttcccacagaccttgcgccccacacgattattccccaggggccgagcaggacgacttgggtcccactatccggactcagcggtgcccccacaaaagcgtcccaaaaactccagctggggcagccctggggcagatgctgaaaagttgtcagaggccctcgggcagtcccgagatctaccccaggccagagggcctgaccctccctaaatgcgacgttctcctaccttggttgatactcacgttcccagaaaagggtggaacctaggctggacgaggcgcagggccaaagtttaattcctctaagctccacccagctcccagcacctctccaggcggccccgtggggtagggcggagccgggtccaacgtactccgcttcccccgctccacccacccagggctagggagcgccccgagagttggcctcctcccacgctgcgcgcgcacctccccgcccccacccctacccgctggcgtgcccagtggaacggagccttgtgtctccgcctcaagtccccggatgctcacctccccgactcgcccccgctgtggccccgcccccgcgcggctcttcgtgccacgtcaccgcctgcgtcgcttccggaggcgcagcgggcgatgacgtagagggacgtgccctctatatgaggttggggagcggctgagtcggccttttccgcccgctcccccctccccccgagcgccgctccggctgcaccgcgctcgctccgagtttcaggctcgtgctaagctagcgccgtcgtcgtctcccttcagtcgccatcatgattatctaccgggacctcatcagccgtgagtcctcactgcactatccttactgccgcacacgggggtctggggtgcgggtgggggcggggaaggcgcagccgtcgcgggcctaggggacgccggcggtcttagccgagcgcggaggggtcggtgcccggggctcgcgcccagctctggtgtgctacggaggggcagatcccgcgtgcggccgccggcgcgggaaatgcgggaaatggcggcgccaggcgcacggtgatgggcggctctgtgtatccggcagacgatgagatgttctccgacatctacaagatccgggagatcgcggacgggttgtgcctggaggtggaggggaaggtgagtcggtcgggcctgcgcgtgggggagtccgggccgagcgggctcgggtttcctccgctcccccgcctgaggttgtgcaatcctccccgccgcctcctggcggaggagacgctctttccgggcttgggtttttctagaaaactggaggcggagctgatcctggaaataggcccgccgcctcggcgcccatcctcctcccggggttgtccgggacatgatgcttccggcttaggagcctggagtcctttcgtgtttgtcctgtccccacttaccaaccggaggcatcacatgcccgcaactggaaacaactttttaatgaccccattttttgttccggccaacagacaactcttttaagttaggtcgttttgagaaatccacgggtcacaactttattcccaaaatggtgctttttttattttcagcaagaactaagaatacttcttatccgtgaactattggcgtggaaggtgctttggatgcgtttgtgtcttttgcaattatactgctttttcttaatgcagatggtcagtaggacagaaggtaacattgatgactcgc

SEQ ID NO: 3649 - DNA, 6000 bp, Homo sapiens
ctgctcatgcactgacaacagccacagtcaatccataaatgaataagcatagccacgttccaataaaactggactcgaacttaaattccatatcccacaaggtattcttttcccctcaaccatttaaaaaggcaaccaaccaccttaaagtgtacaaaacaggtggtcagataggctagtttgccagtccctgttctagttaccagggagtttaattaacattcatcccaaaagacttcgctctctttatgtgaaataagctgagacaaagttgcttccactgaatgagtctctttttattctcttggtaatctcttccagttaactacttccgttgtaggtgatgaaatgggtaaggctccacacttcagatgttggcactgctatgagcatggtctttccctttattgcaactcaaaatcagaacctttgattcttttttatattccagtcccagaagtagtctccactgtagaagttaattgatgagtagtagcctacaatcaggctctagcttctccaggaacactacaggatcaatttagtttaaatatgcattaaactaaaaggcattctctcaaatgagtttaaatgcattttatttttagacaacctacatgacatgtttttcttaaaaacaatgcctccactccaaataaatcacagtcaaaataaatgaagagctcaagatgacatcagtcccatttgtcttaagtcctggtgttgtgtggatgacaagcagaagccagttatgatgacaggtgatagatccaaaataattgccacatttgttactgtaaaagcaaaaactacattaatatttttcaaacattacactgcaaaagttacattaccattaacatgcagcctacatttccaggctaaagatgtattccccaattcaatctgggccgccacaaagacagacagaaagcgcagggatttctttcttttgcatcctagtgcaaaccaaaagaacaacagtaaattgttcaaggtctatcagtggatgcagaacacccttaccaaatcagcggtagctcatttttcagaaggctgtggcatgtaccacccacaccctgctctaccaacaaaaacctcagatactgtctgaataacccctttggtaagtcatcttatactgttctaagtaatttctgtctactgttgactctaatcttgttcagtatagctttatgtttttcttcttccttatacagaagcctatgaaaactaggataatgaatgcctttgtttctgtacagcttccagcagttccttccatagaagacaccaagttatttattattagtaaaacaatttgcataccagttcagcagtcagctctatttactaagctagtactgcactaggcttttcaatgatcagctgcccattatcagtaaaccaaagtgaaaaccactgatactgatccatacgtatacagcaaaatatgattatgaagtgaaagtgaggccatatctagaggaagatcaatggtgttctctgatctccttcagcatttaaactctactgtatttttttgagacagcacctcactctgtcacccaggatagagtgcagtggtgggatctctgctcactgcaacccccctcccaggtttaagtgattttcctgcctcaggctctcgattagctgggattacaggtgcccgctgccatgcctggctaatttttgtatttttagcagagatagggtttcgccatgttggccaggctggtctcgaactcccaacctcaggtgatgcacccacctcggcgtcccaagtgctgaaattacaggtgtgagccaccacacccagcctaaactgtactttattatgccccatctgcactcaacgttttccacaaataagattctaagcctttttataccctaagaattttttacatatgaaacacaattctcttgatccccaaagagaaaactaaaaccatgtttcagaacgctgtaaaactcattctcagtgtcacaaaacaattgcaaatcacatctaaaatgtcttttttacattatttattttaacccacttccttgtacttacacatttttccatttctaaaccatccttaaagaaaatcatatatggggtcacaccatcctcacggtagtccaatagagcaaccatgccatctggattcatgttttcaccaataaagaacttgggaagcaaacaaaatacctagaattagactattacatacaaatacatgccattcaaaacaaactacagtacaagggaaggtttagaccaccacaaaaatcaaaacttcagtacccaaaagctctgatgctcacttatcatagacatctgttcactggattaaggcaccttaatagtgacctaaatagaaaaataacgtacagagcaatccaggaacactaggctttcaggaaacctttactctcaatcctaaatacaatcccaaaccctaaagcgtgcttatatagtcaaccacagggaacataaggctgacagtgatagaatatatcatacagtctggaagtatcttatggccaggggatgcatgaagctggaaaattagaggaaagggaaagccactgacattttccaaaagtagaattaacaagctcagatacattagaaggaggaccagtagcaatgagacacattaaaattgtaagcaaaaaactgaaagaacacttaggtggttaagcaattcacaaaaagaaaaactgagaaatgtcatctgggaagcaaattttcaatcagaagacaagatttggaaacacctgcgagctgggaaagccactttctacacctggaatactagtatagaattgaagattaatcaacttaatttttgctcttgcagttaaaattgtacaatcctttgatccagatacttaaggtatttacctggtagtttttgaaattagcaaggatgtgcttgatttgttctgcagcccctgtcataaaaggttttactctttctggtctctgttcttcaagtttccctttgattctaaaacaacatttcattaacaggttgaagtattgaattttcagtaaaatcaatttttaaagtaaaaaatatccaagcttaaaaaaagaaaacactgaaaaaggcaaccagctgttaagaaattactagttcacagaaggtatctttcaagaatgtttacatttcttgttgactattttcaaaatactattctaattctaaacggaaacagactgcaggcttcagtatgctcatattatagaaaagcaaccactcttttccgtgaactcattaataaaaaagcaaggactttcacaaaagtatacccactgcgaaagaacctcaaaagttagccaatctttaaatcctgtaagattctagacatcagctaggtactgccagtatcacttacgatttcatgtaatctttgatgtacttcttgtaggcttcttttgtgaaacttgtttcctgcaggtgatggttcatgacaatatcgacaccagtgattactgtgctttcggtaccttcgccctcggggccttcagcggaggcatttccaccaatgagcgagtcatcaatgttaccttctgtcctactgaccatctgcattaagaaaaagcagtataattgcaaaagacacaaacgcatccaaagcaccttccacgccaatagttcacggataagaagtattcttagttcttgctgaaaataaaaaaagcaccattttgggaataaagttgtgacccgtggatttctcaaaacgacctaacttaaaagagttgtctgttggccggaacaaaaaatggggtcattaaaaagttgtttccagttgcgggcatgtgatgcctccggttggtaagtggggacaggacaaacacgaaaggactccaggctcctaagccggaagcatcatgtcccggacaaccccgggaggaggatgggcgccgaggcggcgggcctatttccaggatcagctccgcctccagttttctagaaaaacccaagcccggaaagagcgtctcctccgccaggaggcggcggggaggattgcacaacctcaggcgggggagcggaggaaacccgagcccgctcggcccggactcccccacgcgcaggcccgaccgactcaccttcccctccacctccaggcacaacccgtccgcgatctcccggatcttgtagatgtcggagaacatctcatcgtctgccggatacacagagccgcccatcaccgtgcgcctggcgccgccatttcccgcatttcccgcgccggcggccgcacgcgggatctgcccctccgtagcacaccagagctgggcgcgagccccgggcaccgacccctccgcgctcggctaagaccgccggcgtcccctaggcccgcgacggctgcgccttccccgcccccacccgcaccccagacccccgtgtgcggcagtaaggatagtgcagtgaggactcacggctgatgaggtcccggtagataatcatgatggcgactgaagggagacgacgacggcgctagcttagcacgagcctgaaactcggagcgagcgcggtgcagccggagcggcgctcggggggaggggggagcgggcggaaaaggccgactcagccgctccccaacctcatatagagggcacgtccctctacgtcatcgcccgctgcgcctccggaagcgacgcaggcggtgacgtggcacgaagagccgcgcgggggcggggccacagcgggggcgagtcggggaggtgagcatccggggacttgaggcggagacacaaggctccgttccactgggcacgccagcgggtaggggtgggggcggggaggtgcgcgcgcagcgtgggaggaggccaactctcggggcgctccctagccctgggtgggtggagcgggggaagcggagtacgttggacccggctccgccctaccccacggggccgcctggagaggtgctgggagctgggtggagcttagaggaattaaactttggccctgcgcctcgtccagcctaggttccacccttttctgggaacgtgagtatcaaccaaggtaggagaacgtcgcatttagggagggtcaggccctctggcctggggtagatctcgggactgcccgagggcctctgacaacttttcagcatctgccccagggctgccccagctggagtttttgggacgcttttgtgggggcaccgctgagtccggatagtgggacccaagtcgtcctgctcggcccctggggaataatcgtgtggggcgcaaggtctgtgggaagggacttggagaggagggaagatgtcacgggagtctgcacagggtttccatgtgttccaattttgtcccataattgaaagcttgtggcattctgtggcggacggctacggagctagctcttccctttactatttcgcacttggtcttggaaaagtatgttgtcgctttaagatgaagttgaaattttatccctggtgctagagggtcacacaaagggagtttcccacctgccccacctgttttttgaaggactttacacccaattactaagtattaaaacaaaacaggtcctgcatggtagctcatgcctgtaatcccagaactttgggaggcaactactgaaaccctgtctctacacacacacacacacacacaaattaaaaattaattgggtgcggtggtgcctgcctgtaatcccagctattagggaggctgagctgggaggatcgcttgagcccgggagttggaggttacactgagctatgattgcaccactgcgctccagcctgaatgacagagcaagaccttggctcaatagcaaaacaaaacttccgtatttagtcacatcgtcacatctttggcataaggcaaagatacatgccagtatgaagtctgaaagcttgttctatttcgcaaatattttgtgctttgtatcccttagaactaggatttgcaccaagattccaattgtgaacaagttcgatccagtcctacttatagaagtgttcattctggtaaat

SEQ ID NO: 3650 - DNA, 6000 bp, Homo sapiens
agagacaaatactgtgtaatctcacttatatatgcaatcttacaaagttgattttattgaagtagagagtaggagagtggttaccggaggtattggggtggaggtttgtcacctggtacaaagtcagggttagataggaagaacgatttccagtgttccattgtacagtagggcggctatagttaacaataatatattatatatttcaatagagctagaagacaggattttcaaagttctcaccagatagaaatgataaatgtctaaggtgatggatatgctaattttcctaatttgatcattacacattgtatacatatatcaaaacatgacactgtatctcataaatatatatgtgtcaattaaaaattttttaaattaaaaattatatacagtgattaacatttagcctttcaaatcaaatttaactatataataacttaacacacatactctctctctctccattatatataatatatatataaaatatataatatataaatattttatatatatataatatttctactggaaaacagcatattttcctgaaatgcaatacttaacctatatcataaatcttccatattctgagtgctttaggataccaattttatctagatgtaattttaggtacatttacagatcgagtacattcacagatctagaagagctgttgtcgccatgcttgactggtctaaatccttttcctcaaaggattttgaggaaaacacgcttttcctcaaagaaaaagggcaaaggagagattcctcaaacctgtaattctttatagcactatttagccagaaatttataattcatttttaaaaatatttttgaggttgtcaatgtaagaacatagtcagagagtgaatgtttattttctgctgtttctgactcccggacaaactcacaagttatattcttttgaatcctatctgcctatttctgagtggatagaacagtttcgtcagtcacaaagtcctagtatctcagtttgtttattgaatgacagaagaatgctttacacttacattgagaaaaagatgtgtgtaaaaagcagctaaatactgtcaataaacactgaatgtataataagatcgctgcacaatctgtggctcagatacagtggccttttgtccctgaataaacttgtgatgtggtgtattattcaatgaacgtgaacatgcttcttgtttaacagaatttctgttaaattattgccaaaccatttcctcttccggaaacagattcttgatttatggagtaatgacttccttttgttcatctaataagagattcaagagtcatgaatgtcacttcgttttctacctgtctttagagaaaatgcagctgtcagatccctgtggaggatgtgcacattgccatccctgcttgctgtccctctagccagagggacatgatggctgccctttgtggaagaagaacttgcccattttatgcatggcacggctcactgccgcaacaaacatcggcactggtttaaaaatggctgcgtgcaggctggccagtgactctcttttgagatgttcaggcatgaaagtctctgcccaacacagtgacgaaggcagagggaattccctaaagcagtcaaatcattccctgtcttcagaattttctctgagggatatagaggggaacgactcaccagaagagggagaatgtccatggatggagagaagcagtggctacaggaaaccctgagtgaaacgcagagagaaattgctttctagcactgcgttgcatcctttcatttctgcatgtatttaaatcataagaatacacaaacacatcatctaaaggatctcaatgactttcagtaagaaggccttcatacaattcccatacgaattccattttttatggcaaggttactccgtatgactcaccctaattgttctggaacaagaactgacagaaaagaattggactgtcattcctgatgcaaaagggtttacaaacatccttctaaaagaagacttccacctgagaaggttgatggaggacctcttgtctacgtacctgttagactggggcacggtcaccttattgtgggagttataggtaagaaaaattagagagcagcttattttgggggccaggataataacaagttatttttaaaaggtcttggaaacttgcagatgcaaagggaaaaaaacaaaaaacaaaaaacaatcctaatggtaaaaacaagtaagtctgactgcgtcattttgtagtaagacaatgaggaaatgggaactcgtcagagggtaactgggtggtgcctgtaaaagtgaagatgtgcttctccctcagcaggcatttgctgggaaacccttgcagacgttacaagcacagttgtagaaaatatctattagagcactgtttgtaactgaaaaatgtttcattcatactttgaatgtaaagaataaaagtgaatgaaaaaatggaagcattgcaccgtgcttttgatttacatttccctgatcatttagtacaaccaccatggaaaacagtgtggagattccttaaagaactaaaagtagaactaccatttgatccagcaatcccactactgggtatctacccagaggaaaagaagttgttatacgaaaaacatacttgcacacacatgtttatggcagcacaattcacaactgcaaaaatatagaaccagcccaaatgcccgtcaatcaatgagtggataaagaaactatgatacatatatatgatggaatactactcacccataaaaaggaatgaattaatgatgttcgcatcagcctggatgggattggagacaattattctaagtgaagtaactcaggaatggaaaaccaaacattgtatgttctaactcacagtgggagctaaattacaaagatgcaaagacataggaatgatctaatggactttagggactcaggggaaagggtgggaggggggtgaggaataaaagactaaaaaatgggttcaatgtgtacactgctcgggtgatgggtgcaccaaaatctcacaaatcaccactaaataacttaaccatgtaatcaaataccacctattccccaaaaacctgtggaaataatttttttttaaatggaagcatccaaaatgtaatttgtttccacattcttgtaagcctcattatgtatcccagggacagttaatatcgtcatacgaattcacaggtgaggaaatggaatcacagagagattatgtactttgcataaggagagcgagggtgaggcaggatttgcagtctagaagcctgggtctggagttctccactttgcactatatcatttctgtaaacttcttacttaagactgtgtggaaatgtagagtgagacagaactaaagctcactattcttagtccacaggggagtagtgactacccagggcttggtaagtgctcagtaacgtttgttgaaagatgaatcaatatttcaatgctggggcaaagcagtgaaaaactggggaatgtccaggaaccagccatcaggataaggcaggactagaatgaatgcaacagtcctcacaggtccaccaagtcaacaacagaaaaatccaaagctaaggtggctcttgtgtgatcaaggacctcttgtacaccgacctgttaggctgtggcacagtcaacatgggagttgtagacaagctacttgagagtggttaatggtagcagtcaggcatttggagctggaggcaaggctgattctcctcaactagtatcatattgagcggggacttaaagcctcagaagtctgagcagaaaagctgagaccaggctccttgggacaggctgttcatatgcatgattgagtttcagtgatgagtcccagaaggaaaaagtttatgcatgttttccttaaaaatatattcacttatatttagagaatccttcagatatctaacctaaatacgtctgtaacatttactctcattctttttatgacattattagtataataatatgaataattcccagtggacttacttccacacttccttcaaggattctccattttatttcataattgaagactgttaataaatcactctctagctaagaacaattcaatgctaaaacacttagcttatctgaccttcacattaattatttttatgacagcagcaggaactttcagctgcttttcccccttccttatgaagccatgtggtcccaagcagacagagttcccttgctacacttaagggtgggcttctcagacctgagcatatcttaaaagctttcccttgactgtgccaatccaaactccaagtttcctcagcagatttaaggggttttaaatctacttgagcatgagtgttatgagaagactttgaaattcttacaaaaactgaaagtgaaatgaggaagacagattgagcaatccaatcggagggtaaatgccagcaaacctactgtacagtaggggtagagatgcagaaaggcagaaaggagaaaattcaggataactctcctgaggggtgagccaagccctgccatgtagtgcacgcaggacatcaacaaacacagataacaggaaatgatccattccctgtggtcacttattctaaaggccccaaccttcaaagttcaagtagtgatatggatgactccacagaaagggagcagtcacgccttacttcttgccttaagaaaagagaagaaatgaaactgaaggagtgtgtttccatcctcccacggaaggaaagcccctctgtccgatcctccaaagacggaaagctgctggctgcaaccttgctgctggcactgctgtcttgctgcctcacggtggtgtctttctaccaggtggccgccctgcaaggggacctggccagcctccgggcagagctgcagggccaccacgcggagaagctgccagcaggagcaggagcccccaaggccggcctggaggaagctccagctgtcaccgcgggactgaaagtgagtttgcagcagctgcaagacgcaggcaagatcctgcctacactgctgcctctccctcgcctcagctgtctttctaataacttgaagtttttctgttcatagatctttgaaccaccagctccaggagaaggcaactccagtcagaacagcagaaataagcgtgccgttcagggtccagaagaaacaggtatgttttgggcacagacacttttaggagtcagggattagagaataacatccagtctgggggagctggaggtgagtatcccctctatgaacctattaaatagagactatgaaatttgccatccaaagcagacattgctttagagcaaagccccagcgctggcaaatgtaacaggctgcatgggtgtgctttttcctccaatgagcagatcgtgtgactggaagcatttctctgtgcgtgtgtaagtatttatctgtgcattaagcatagaggagataaaagggccatatgtgtttcctcaggtagataatgccctcccatgtgagaagcattattcatcactccagaaaaataaaaaaaagcattacatgttagaattagactttgcttactacctgggtcatagaaagttaaagacatctgttttctgaatgtacattacatgttgtgaaaccaggtgaaggttgtaatgaaaggccctgtatgttgtactttaattttgtttatttgttaaaaaggttattttacacacacacacacacacacgcacagacacacacacagattttaaagcttctctttaaggtacgcttttccaggggatccatgcatttatcgtcttcttataatcgtcctttactgatttctgactttcttcatgttctgctcattccacggaactttacagagttggtggggcctaccaaaatgatcgattctagttctttcatttgaaggtgaaaaaaagaatctttgtatacatttattaaagttataatataacaaattcttaatattattgtccttttattaaatatattgaaagaatattttttgagcacctggaac

SEQ ID NO: 3651 - DNA, 6000 bp, Homo sapiens
gctggttggtctgaggacccgaggttgtaggtagatctcctcacggagtgagggcaaggacaggggactggtctcccgaaggagtcctcctgtcccgggtttcggcaccaaatgtcacgcgcgtccctgtgaagagaccaccaaacgggctttgtgtgagcaacaaggctgtttatttcacctgggtgcaggcgggctgagtccgaaaacagagtcagcaaagggagataggggtgggtcgttttataggatttgggtaggtagtggaaaattacagtcaaagggggttgttctctggcgggcaggggctaggggatcacaaggtgctcagtgtggaagcttctgagccaggagaaggaatttcacaaggtaatgtcatcagttaaggcagggctggccattttcacttcttttgtgattcttcacttgcttcgggccatctggatgtatactgcaggcttgggctcagaggcctgacagtaaggatgacctggaaagggccttcccattttggtttaaggctggttgggttaagggtttttttttgtttgatttttgttttttgttttgagacagagtcctgccctgtcgccaggctggagtgcagggcacaatctcagctcactgcaacctttgcctcccaggttcaagtgattctcctgcctcagcctcccgagtagctgggactacaggtgcctgccaccatgcccggctaatttttgtatttttagtagagaaggggtttcaccatgttggccaggatggtctcaatctcttgaccttgtgattcaccaggcttggcctcccactgtactgggattacaggcgtgagccactgtgcccagccgggttaagggtttttagaaaaacatgttctcctggtaggagggtctggtcagtgaggcctttatgtggtattgggagggcctggtgtgcctgtttgcagaggagatggcggatgagggagagtgctgggaggtactctcctaattgagaatcagaaggaggcctgttttgtaagaggaaagggtctcagaaggaggcctgttttgtaagaggaaagggcatccatacattaattcaaatgggctgaggaaggagggtgcctttgggctggctctgacgctggctagagctatgggtaggagggaagtccagggcctctggacttctagagtgagtttgatcaactgagtgttaaggtttccatttgccctttcgacttttcctgatgattggggtcgatatgggatatggaggtgccactggatgctgagggactgggagagctgttgggtgatttgggaaatgaagccagggccattgtctgattgattggagcgagggagaccaaagctagggatgatttctcttgtggggatctgggagactactgcagctttttctgaagaggtaggaaatgcctccacccacccagagaagatgtctataagagtgagaagtagtcttgtgtttttgacgggaggcatgtgggtgaagtctatttgccagtcttcccctgggagtgttcctcttagctggtgtgtaggaatagatggggaatggagggctccttgagaggaggtgacagagcatatatgacattttgaagttatactttttagtgaggtaaataggtgaggggagaagaaatatgggcggaggaggagatataggggacatgcaccaatatggaaggattggtggagagatgtcaggattttgtcggtttggccctggggaaggtctagcttctggtccttatctatccagtccccctggaggaaggctccttgttatagtaatgaggctttttcagtggggggtactgaggttggactgcaggggtaatgaggaggagggaggcaggagcggaagaaagggaggcttcttttgctgccccattggtctttctgttgcctcttgagattttatctgttcctgtgtgatgtccccaacagtgtataactcctgcctcagttgggagatgtgcggcttgaaggagttggtaaataagggggtggttagtgatagggtcactttggcagtaaggaatctcctctcttgccagatggtggcgtgggaatgaagaatgtgatatacatctttggagtctgtgtaagtgttgactcgtttgcctttggaaagggttagggctctggtgagagctatgaattctgctttttgagaggaggttcctggaggtaggggcttagcttcaattactcggtcaagggaaacaactgcatacccagcaattttgggggagccagtgggcccagaaggggggccatctataaatagctggtcatcggggttggtgagaggctcggaggaaatgttaggaaagtgtggctgcaggtgatctaggacgtcagtgcaagaatgagtaggaagggaagaagatacagggagtaaggatgctgggttgaagggagcacttttggcaagaccgaattcaggatttttgatagagggcatggagtaattgaatccggaaaggagggagcctcatgctcgggaggagaggagatcctgtagattatgaggactgtaggtggtggtattttgactcaatgttagtttcctgcttacagctaaagtggccgctgctgctagcattctaagacaggttggccatcctctgactgtgttgtctaactgtttagagaggtaggctacaggggcaaaggaaggagggtctcctttctgttgccctaagacaccgagggctattcctcatcttttggcagtatagagtgtgagaggttgggagataccaggtaaggacagagctggtgcagtgacaagagcggtttgaagtttgcagaagttggggagtatgttacgtgagggatttagaggctcactgagagggcctttggctgcttcatagagtgggtgagctaggagggcaaagttgggaatccatattctaaaaaagcctgctagttctaggaaggaaagaacttcgcttttggaggagggcgagggcagattatctattagtgctgctagggcaggggtcatagcccgggtcccaggggaaagttgaactcctaggtaagttactatggaggtggaaagttgagcttcggagggggagactctataccctttgatggagagaaagttttaagagagtaactgtgtgagtttgagagtcttctagagaggggctgcaaaggagaagattgtccacgtattgaaggagacggctagggaaaaggtttaaggaagtgagatcttgagctaaagcttgtccaaagaagtgagggttatctctgaagccttgagggaggacagtccaggttagttgttgtgactggagggtgtcaaggtcggtccaggtgaaagcaaagaggttttgggaatcagggtgcaggggaatagtaaaaaaagtcatcttttaggtcaatagcagtgtagcaggtggtgttggagggaatgagacagagaagtgtagaggggttagggactatgggatgaataggaaagacagcctgactgatggctcggaggtcttgcaggagtcggtatgagccgtctgattttttaaccaggaggatggtggtgttatatgaagaacgtgttggcctaagaagacggcgtgaacagagcttgtttgtgatgggctgtaagcctttttggtgggttagggagatagggtttttggggatgctgggaaatttagagaggtcttttaactggattttgatggggtcgtggtgagtagctagggaaggggtggtggtgtcccaccctgttgggtttacaaaagaggtgggaagtgggtactggggagaggggtcaggggctggactcgcatagaggagtaggagggactccggttgagggagggagaaaaaggtgatagaagctttgaatttggccaaaatttgaatttgaatttggctttgaatttggcctaggatgggggtagggcaacgaggcatgataaggaaagagtgtgggaaaacagtatcaaacagagagcaagtaaggggtctggtggcgcgtggacgcaagatgagtccatcagcccccacaactgagacctgagagggatgagtgggtcctgaaaattcaggcaaagctgagtaggtggccccgctatcaatttaaaaagagatcggcttacctgctactcgcagagttaccctgggctccaatgcagtgatggcagatggggccgggggccctgggcccggtcagtcctcagcggctaggctgaggagctgcgggaatgcaagcggttcttcactttttgtcttgttaaaggggtggtggctctgaggagcaggcttgtctgtctgttgagaggacagtcggacttccagtggcctgtctgctggcacactggacaaggactctttggcactcaagggttaggatacacccatgcccagtggccttctttgccacacttaaaacaaggcccggagggttgctgctatcgggtcttttgtgcccttgggtgatacggctgggttgatggacagccgctgctagaagctggtatttagcacgatctctttgggctttatctaatttattttgctcatccctgttattaaagactttgaaagccaagttaaggaggtctcgttgtggggtctgaggggcatcttcagcctttttaagtttgcgccagatgtcgggggcagattgggaaataaaatggatgtaaagaacaatagttccttcccgggaggcgggatcgacacgcgtgtatttttggagagtctctgtaaggcgagaaaggaattgggcagggttttcattggccttttgggagattcctttgagtttttcgaaatttacagccttatgggcagttttgttaaggcctgcagtgaggcaagtaatcatatgattacaggaggtctggcaggggcctgtgggttgatacgcccaggtacgctcttctcagggaactgcagcggcccctactggcctagtaggatcttgccgatggaggtcatcggcatgggcctgggctgcaagccacactctttccttttcttccggaaggagggtagaagacaaaataatatagagatcatgccaagtaagttcataagactgggtgagatatttaaattatttgatgtaagtgtcgggatcggagaagaacctggacgtttctcaatttgggaaacattagagagggaaaatgggacgtggacacggaccatcccttcggcccatgccacttcccggagaagaagcaagggagcaggctgctgggcgtgttgggctcgagaacgagtaaggggtggagatggggaggactcagagtcggaggtggggtggttggagagaaggggagagagaggtagagccggagcggaggcatacggtggggggtcatgctgttccggtggaggattaggatgttgtcgaggaggggagaaatcggtgggatcaaagaaggagaagtcgtccgctggggctattgggatgaggggagcaggaggtgagtcgggtttggagcaggcgaggagaatttgaaaagtacagcaggactggcagagggagggacgactacagagagtaaagaaagcctgaacatgaggaatctcagaccacttcccactgcggtggcaaaagttgtctaagtctctgagcatgtcggaatcgaaagtgccattttcaggccattgggagccatggtctgatttgtattgaggccatgtggtgttacagtaaaagataagccttttagggcagatttctgaacggaggccaagagtatacagattgtgtaggaggcacccaaggggggtagttttaggaggaatagactgagaggctcccatagtgaatggaagggaggggggtagaggaagaagagactgccggtgacgtcccctttcccgcggaacttgtcaggaatagaggaggtaaccaccgtgtcaggcgtccctgaaacggaggaaccagaggcctggaggctggaggaagcccttggcccagcgctgggtctttcggaaatgg

SEQ ID NO: 3652 - DNA, 6000 bp, Homo sapiens
ggggttgttctccggtgggcaggggcaggcggagggggtcacaaggtgctcagttggggagcttctgagaaaaggaatttcacaaggaaatatcagttaaggcagggaccggccattttcacttcttttgtgattcttcacttgcttcaggccatctggatgtatatgtgcaggcttgggcttagaggcctgacattcctgtcttcttatattaataagaaaaataacataaaatagtattgaagtgttggggcagtgaaaatttttgggggggtggtatgaagagataatgggcgatgtttctcagggctgcttcgagtgggattaggggtggcgtgggaacctggagtgggagagattcagctgaaggaagattttggggtaatgggtggtattgtggggttcttagaaggagcatttgtcatatagaatgattggtgatggcctggatgtgtttttttatgaattgagagctaaacggaagacacaaggtccaaataagagaaggagaaaaacaggtattaaaggactaagaattgggaggacccaggacttccaattagggagtgcccaagggggttcagcgtaattacttgcttggttggtgagtttttgggctctatccttgacagagccctcctttttaagttggaggctgagtttggtgaggtgtgtttttaaaagaccattagtctgttccattctacctttcctgaagattgaggatggtaagcggtatgaaggttccactgaataccaagagcctgagaaactgcttgggtgatttgactaataaaggccagtccgttattggaccgtatagaggtgggaaggccaaaccgaggaattatgtctgacagaagggaagaaatgaccacggtggcctttttttgaccttgtgggaaaggcctctacccatccagtgaaagtgtctatctagaccgagacgtattttagtttcctgactcagggcatgtgagtaaagtcaatttgccagtcctgggcaggggcaaatccccgagcttgatgtgtagggaagggagggggcctgaacaatccctgaggagtagtagaatagcagatggaacactgagaagtgatttccttgaggatagatttccatgatggaaaggaaatgagaggttctaagaggcagactagcagcttgtaatctacgtggaagaggttatgaaatgacgacagaatagaatgggcctgtgaggctggaaggagatatgttccttagtccaagaactatttgccttgtgtgggaagagattgataggtggaagtttcagtggtggagtaggtgggagtgaccgatgagaaggagaaaaactgccatgagggatagaagttggaatgctagctgcttctttagctaccttatcagcataagcgttgccccgagcagtggggtctgatgccttttgatggcccttgcagtgaatgactccagcttcctttggaagtaaagcgaccttgagaagtatttttattaaagaggcattaatgatggaggacccttgtgtagtgaggaaacctctttcagcccatataacagcatggtggggcaggatatggaaggcatgtttagagtcagtataaatattgatgcgtagttcctttgcaagagtgagggcttgagttaaagcaatgagtttggcttgctgagaggtagtggagggggcagagcagtagcctcaatgatagatgtggaagatactatagcatagcctgcctttgctggtaagcggtgattaggcctggtggaactgccatggataaaccaagtgtgatcagggtgaggaacaggaaagaaggaaatatggggaaatggagtgaatgtcaggtggatcagagagatacagtcatgggggtcaggtgtggtatctggaataatgtgggaggccggattgaagtctgggccaggaacactggtaattgtgggagactcaacaaagagtgagtacagctgaaggagccagggagcagaaagtatatgcatcaggtgtgaggaagaaaatagattttggaagttatgagggctgtagagagtgagttgagcatagtttgtgattttgagggcctctaaaagtgttagggtgacggcagctgccacacagagacatgatggccagcctaaaacagtaagatcaagttgtttggacaaaaaggatacagggcacggtcccggctcttgtgtaagaatttcaactgcacagccctgcactttggctctgtgtaatgaaaaagggttgggatgagttagggagagctagtgtgggagcagcttccagggctgtttttaaggaacggaaagaggaatggggaaaggatttaggatctatgtggtcagctaggttttcttttgtgtttatgtaatggttttgttaggatggcaaaaccaggtatttaaaggtgaaagtatttaaccatgcccaggaaggaaaggagttgttttgtagaaggggttggggtttgggagattagccagacatgattagcagggagggcatgtgtgttttgatgaagaattatgccaagataggtaacagatgaggaagaaatttgggtttgactgaagtaatgggggctgtccatgaagccttgcagcagtacagcccaggtaatttgctgagcctgatgggtgtcagggtcagtccaagtgaaagcaaagagtggctgggatgaagcgtgcaaaggaatagtaaagaaagcatgtttgagacccagaacagaataatgggttgtggaggggttgtggagggaggtattgaggataggagagtatatgggtttagcactacagggtggataggcaaaacaatttggttgataagatgcagatcctgaactaacttgtaagacttgtccggtttttggacagggaaaatgggggaattgtaaggagagtttataggctttaaaaggccatgctgtaacaggtgagtgataacaggctttaatccttttaaagtgtactgtgggatgggatattggcgttgagtgggttaagggtgattaggttttaatgggatagtaaggggtgtgtgatcagttgccaggggagagtagaggtgtcccatacttgtggattaaggtggggagatacaaggggaagatgtgaaggaggctttgaactgaggaaaagggcagcaatgaggtgtggctatagtctaggaatagtcagggaagcagataatttagttaaaatgtctccacctaataagggagctgggcaggtgaggataactaaaaaggagtgcacagaagaatgttgtccaagttggcaccagagttggggagttttaaaaggtttagaagcctggccgtcaatacccacaattgtggaggcaagggaaaagaaggtaatgtggagtgggtaagctccgtattgattaagaaggggatggacttaccctccactgtaagagttacccaaagcgtctgtgatggtccaggaggcttccgaggcaatcaggtagcattagtcttcagccgctaaagccaagaagatctgggaaggagtcagtcagagagccttgggccagagttccagggactctgggagtggctgctgggcgagttggacagtccgatttccagtggggtcctgcacagatgggacatggcttaggaggaattctgggctgtgggcatttcttggcccagtggccagatttccggcgctagaagtaagatccttggggaggcagttctggaggaacgcctggccactgcggttcagacgtttggaagttcttgtgtcctggagatgtggctggggtttgtctcacagtggaggcaggaattgcaattcagaaattcattgctacttggctgcctctactctattattgtacaccttgaaggtgaggttaattaagtcctgttgtggggtttgagggccggaatctaatttttggagctttttctaatgtcaggagcagattgggtaataaaatgcctattgagaataagatggccttctggcccctctgggtctagggcggtaaagcatctaagggttgttgccaaacgggccatgaactgggttgagtttttatatttgatgaaaaagagcctaaacactgatttgggagaggtcagataaagaaaaaggagcattaaccttggctaagccttcggctccagccacctccttaagaggaaattgttgagcaggtgcgggagggctagtctccccacgtgaaactgtaagctggaccctgtgtgaggatgggaggtgattaaaggattatagggtgggggagtggaggctgaggaagaattgagacctggctcagcctggcgaggattagcctggggaggaagggaggggtcagatgggtctgtagaaaaggattcaaaggactcagagcttggagtggagactgaaggaatagacaggagagaaagaagaaagatttgggatgagttgcattgggagcagagactagggagggaccgatgtgtaaaagaatgcctggacgtcaggcacctcagaccatttgcccatttttcgacaaaaatcatccaggtcttgtaaaatggagaaatcaaaagtgccattttctggctgtttagaaccattatcgagtttgtattggggccaagtggtgttggcgaagacacttaggttttaggtcaggcaagagttgaagaggttttaagtttttgagaatacagcctaaggaagaagaagggggaatggagggtggaaggttgcccatagtgaagcaggcaagcccagagaaaagagagggtagagacacagataaggagggtggtgagcagccctgggctgcaatgtgggtgagcagccaaagcaggcatccccgcagttgacttgccaccaagggaatgtgggtgaatgaccaaggcaggcatcctcgcggtgatcagacaccaatggagtgtgggtgaataatcaggcaggcatccccgcagtgattaaacaccaagagaagactattcctgagtctgtgactggtgctggagttttgagtccacagataaaatgtgtctccttcgtctctactagagaggaaaaagaactggaattggaagaacagggagactgaagggtagcaagagaggctggagaagagagtgaaaagaccgcttacctgatttgaaattggtgagatgttccttgggctggttggtctgaggacccgaggttgtaggtagatctcctcacggagtgagggcaaggacaggggactggtctcccgaaggagtcctcctgtcccgggtttcggcaccaaatgtcacgcgcgtccctgtgaagagaccaccaaacgggctttgtgtgagcaacaaggctgtttatttcacctgggtgcaggcgggctgagtccgaaaacagagtcagcaaagggagataggggtgggtcgttttataggatttgggtaggtagtggaaaattacagtcaaagggggttgttctctggcgggcaggggctaggggatcacaaggtgctcagtgtggaagcttctgagccaggagaaggaatttcacaaggtaatgtcatcagttaaggcagggctggccattttcacttcttttgtgattcttcacttgcttcgggccatctggatgtatactgcaggcttgggctcagaggcctgacagtaaggatgacctggaaagggccttcccattttggtttaaggctggttgggttaagggtttttttttgtttgatttttgttttttgttttgagacagagtcctgccctgtcgccaggctggagtgcagggcacaatctcagctcactgcaacctttgcctcccaggttcaagtgattctcctgcctcagcctcccgagtagctgggactacaggtgcctgccaccatgcccggctaatttttgtatttttagtagagaaggggtttcaccatgttggccaggatggtctcaatctcttgaccttgtgattcaccaggcttggcctcccactgtactgggattacaggcgtgagccactg

SEQ ID NO: 3653 - DNA, 6000 bp, Homo sapiens
atgcaccaccatgcccagttaagttttgcatttttttttttttttttgagacggtgtctccctctgttgcccaggctggagtgcagtggtgccatcttggctcactgcaacctccgcctcccgggttcaagcaattctctgcctcagagtagccaggattacaggtgcccaccaccacgcctggctaatttttttatagttttagtagagacagggtttcaccatcttggccaggctggtcttgaactcctgaccttgtgatctgccggcctcagcctcccaaagtgctgggattacaggcatgagccaccgcgcctggccaatttttgtattttttgtattattattgttattttttgagacaacggctctctcctgttgcccaggctggaggtcagtggtgcaaacatggcttattgcagcctcgatttcccaggctcaggtgattctcccactttaggcttctgagtagctgggactgcaggcacctgccaccaagcccagctaattttttgtatttttagtagataaggggtttcaccatgttgcctcggctggtctcgaacccctgagctcaagccatccgcttgcctcggcctcctaaagtgctgggattacaggtgtgagccactattcctggccaggaaaccttttcttacacttaaaaaattctaaatgtatttctttgagttcctttttctcagaaacctacacagacttcttcgtagacagaattttacctatttttgcatccacactagaccaggatctaatttctagagtgcttggttaactaccatccttcatgttaatttcagtggctaatgtttttgctcctccttatttaatatccttgttcaagcttagttttccctgagatgtgtttattattttacaaaatcaatctaatttctaatatctttaggtagatttgcgttttacccactttaacagtgttaacacgtttgaaatgtctgtcatccctagcttttctgacttgtttcctggtttgaaccttaattcagatgctcagcagaaggaaataggttgtctgctaaacatagccacatggctgaatcccttgacattggcaaatagggaaaaactaatgctagaatatgggatgaacagtctgagggagttttagaacgattcaaaaagctcaagtggttataattaggtagtgttcatacagttttaaaagcggagctctggaactgggcgcggtggctaacgcctgtaatcccagcactttgggaggctgaggcaggtgaatcacctgaggtcaggagttcgagaccagcctgaccaatatggtgaaaccccatctctactaaaaatacaaaaattagccaggtgtggtggcacgtgcctgtagtcccagctacttgggaggctgagacaggagaattgcttgaacctgggaggcagaggttgtagtgagccgagatcaagccacagtactccagcctgcgtgacagagcaagactctgtctcaaaaaaaaaaatttaaaaataataacttaataaaaaaaaaaagcagagctctgagatgcgtggtggttccatttcacaagcgtttcctgagcatgtaatatgtgctgagcaggctcctggctctgggtgagctgggcaggtgagaggcttggggtgaagaccctctctggaggagttcacagcctggtacttcttacttatctgtccattcagggctggagtggcccagctaggcaggtgctgaggccacccagctgaagcctgaacaggttgacccctccgctgatgtttgagcgtgtttaccacaggaagagaagctcctcagcaattgttccttcttttcaaagcagcatttcctatttcatttagaattaaagaaagaataaggaattctctaggccagtggttttcaaaatatggccactggtgcagcatcacctggaattttgtgagagctgcaaactatcccccactccagacttacagatttagaaataatggggcggaaatccctgatcgaatggaacattctggagttcgtcccctcacccaaccttaagatgaacttggaacaagggtgctcagccagaggggcaggtgaggccgcaagtccagctgcccctgttcacctaggtaagcacatagactgtgtctaccccctgggggcaccttgctctaaatcatctgcccaatcaggaccaacatggtctctacaacgtcacttctgagaaccacttgtccacaatgaagggaagaagaaaatccatcagcacctggtgaattgggaaacaatggggctctcacttgctaaatgcattcacctgttcacttatttaatacactctgccctgcagggtagagaaaagacacatgaggggcccaaggaacttagaacccacctggttagaagaaactaacaagcaagagacagggttagaaatataaatgtgacataagggcaagcccccaaataagaaagaacacaagaagagaagaagggatagatcaaatcctagtggtctggagagattagatgtggcttctcaaagccaacaaagatagcaccaccaacaataatacaccagcaataatcgctatttattttttcaacttttttattgagagaaaatttacataaaattcaccattgtaaccatttatttatttattattttttgagatggagtcttgctctgtcgcccagactggagtgtagtggcaggatctcgactcactgtagcctccacctcctgggttcaagtgattctcccgcctcagcctcctgagtagctgggattacaggagcgcatcaccacacctggctaatttttgtatttttagtagtgacagggtttcaccatgttggttggccagctggtctcgaattcctgacctcagttggtccatcctcctcggcctcccaaagtgctgggattataggtgtgagccaccacgcctggcttgttttgtattttatttatgtatttgcttttttagacggagtctcactctgtcgcccaggctggagtgcagtggcgcaatctcggctcactgcaacctccgcctcccgggttcaagcaattctctgcctcagcctcccgagtagctgggattacaggtgcctgccaccacacccggctcatttttctattttcagtagagatggggtttcaccatcttggccaggctagtcttgaactcctgacctggggatccacccgccttggcctcccaaagtgctgggattacaggcatcagccactgtgcccagccgttttgtatttttttagtagagacggggtttcccccatgttggccaggctggtctcgaactcctggactcaagtgatctgcctgcctcggccgcccaacgtgctgggattgcaggtgtgagccaccgcgaccggccgctttctctttctttcgagacaaggtcttgctttgtcacccaggctagagtgcagtggtgctatcatagctcactgagcctagaactcctggtctcaagatacctccgccttattctcctgaatagctgggtttacaggcatgtgccaccgtgcccggcttttttttttttttttttttttttttgagtctcttgctctgtcgcccaggctgcagtgcaggtggtgcaatctcggctcactgcaagctccgcctccagggttcacgccattctcctgcctcagcccccggagtagctggaactatagcgcccgccactacgcccggctaattttttttgtatttttagtagagatggggtttcaccgtgttagccaggatggtctcgatttcctgacctcgtgatctgcccgccttggcctcccaaagtgctgggattacaggcgtgagccaccacgcccggagtttttttttttttttttttaagagggaagtggggtttctctatgttgcccaggctggtcttgaatttctggcctcaagcgatcctcttgcctcggccttccaaagtgctgggattacaggtgtgagccaccacacctggccaattcagtcttaaaccaattttctgaggcttcgttttggcaaggctacttatctgttttaaaaataaacgatgtattttagtaaaagaaaaaaaatggaggaaaaaacagggttttgatctcatggaataattatgaggctaatctaatgagcttcataaaatactatacccatacatagtatgcttgttattttattgttttgtcagggtccagagaactaggccactgtgttgcttaggcaccgtgtctgcacatagttcattccggtgtacattcattcatctttacactagaatgttagtttcaagaactcagtcacctcgtctacactgtcctttaatccccaatacctgcgacagttcctggggcaaaaacaaatgcttgttgaattaaaaagaaaaactgggccgggcgtggtggctcacgcctgtaatcccagcacttcgggaggccgaggcaggcggatcacctgaggtcaggagttcgagaccagcctaacatggtgaaaccccgtctctactaaaaatacaaaaacattagccgggtgtagtggtgggtgcctgtaatcccagctacttgggaggctgaggcaggagaatcgcttgaagccgggaggcggaggttgcagtgagccgagatcacgccattgcaccccaacctgggtaacagagcgacactctgtctcaaaaaaaaaaaaaaattcctgtagaagctcccaagcccaattaaagctcaaggctatcgtccacgtagtgggttccaaatcgctaagttcccaggccagcagggagagcgagccgagcgaaggtcgcctgtgtcaaaggcggggatttgcacagtatttacatggaagcggaggaaaggctgcttagcaaccgggctgaggggacgggctgcactgcgcacgcgtacatgggcggggcatcttgcgcatgcgcaggcgacagctcatggcgttcagggcctgacggttgctagggtgacagggacacaacatggcggcgggatctctaacgctctccttcgagggaccaccacggagatcctagtgcgggaccccgcctcagggaagtggaaagcagggggacaaccttcctgcttctttcttttccgtccagtgtcggcaaggggttgtcaccggcttccgcatccaagatgaagagtgagtggggccggggaaaggggcagggactggagagcgagtggcgggggagggagggactgggggagcttgaggagcttgaggggcctgtggggccgggcgtcgtcgccttctgccgtggctcgacaggcccgggaggctccgcatgtgggccccgaatccccctcggctgtgagaagccggtgcccctgggggaagcttgaggggttggggctaggttgggaactttggggtctcggagagccgactcgagttcccgctcaggcatattttggtgcaggtgcgtggttcttacattggagtttagggagttgactgtgattcattttattttattttaaatgctggcttgaacctgacactcttttcctgaacattcggcagaaaacgggggagcgcttacagcgtggctccctgccttttcatgatactggtttagtgaccaattgagaggaaagctgggctgtgtgctttattttattttttgggtcaagcagtagtgttttataggaaccactttttaatagtagttttgaagcaaccttttagttaaaagctgttacttcaaagttgggaaatgaggtagtcattctagaaaatgtaacgggtaaaaaattttctttagtgggatttgtggattattgacaatccaagtgcaaccagctagaatgatgtttttaaaattattattactgtacagatataattgtttatggttgtgaaccagaggtgcagtaaaaattcagacctttgctgtgaaaatattatgttaggagtagttataatgttaaatttgcattgtatcctaattgtcaatggtgtaca

SEQ ID NO: 3654 - DNA, 6000 bp, Homo sapiens
caggacccactcctccaggaagccctcctacaccacactatttggaaggccactggggttggggtcctgctgccccataggccctgctttctctcccatggcccttctccagcaaggacagtgggtcaggctcatggaatagctgcagaagccatacctcatcaggcctcggtttctccatctgccaaatacgaaaaggaatccttggcctggcttcctcctaggaggaaaggggcaggggggctatcaacaaatcgacagtgtcccgtggggctggggtggggcaccgcctgatggtacatgtctgggctgctgagggtcctcatgctccctcctttgcaggaggggatgtgccgtgaaagtggctcctggtcagctgtcctggccatcccacagtcccggaggaggtcagcagacttcagccagggtctcatggagctgtaggtgatgctgagcaagtcactgctcctcttggggaaggctgggtggcagcagggacctcaggcttaaggcctcaacctctgtgcctgcttctctgagactcagtttcctcatctgtcaacagggaacacaatggccccaccccatgcagacagtagggcatccccaggaagagtctcagggctggtgacagcctgagaagtgaaagggagaagcagggtgagtgttggggtcctgggaaccagggttagggcagtgggaagtgcaagtcatcatgcagagggaagtgggcccgggctgctgggggaggggctaggtgacccaccctgaggtcagcaccactcttgtgaccaaggctagcagctgcagccacgcctctggccaggcccagccacctataggccctctgcccctcgtgatcacccaccaccctgggccctgctccaggttgctctcccttctgccttcgactgccctcttcttccttttttttttttttttttttttttgagatggagtttcactcttgttgcccaggctggagtgcaatggcgtgatctcagcttaccgcaacctctgcctcccaggttcaagtgattctcctgcctcaggctcccgagtagctgagattacaggcatgcaccaccacacctggctaattttgtatttttagtattttgtattttgtatttttagtagagacgggatttctccatgttggtcaggctggcctcgaactcccgacctcaggtgatccgcccgccttggcctcccaaaatgctgggattacaggggtgagccaccatgcccagccccaactgcccctcttctagagagctttcctctaggtgccttcaagaatgcagagagagggccagtaatgtgcctccctgtgttattctctggtccgtgctgaatcggccttttctgctgccctacagggcgcaggtggaggtttaattaatggactaaatgaggtaatgaaaaagattgggaaaaatttttttcaaggtgaaaaaggagtgaaggatagtacctcccatttctgcatctaaactccttggtctagaagtcctttcttgtgtctgacttaaatacatcaagctgaatttcagacgctgagcaacgttggaggagaagcaagataacactgtgcttagtgaaggggctcctagcttcaccactggctggcacatgactggaccgctctgtgcctcagtttcctcatctgtgaaaagaagagagttagtgcccacttcattaggctgtccgatgaaatcggctaatgtatacaaaacacttagaacaacgcctggcaccggtggagatcaacaaacatcagcagtctacccaaaagaattgaaagcaggaacgtgaacagatatttgcatacccgtgttcttttgtttgtttgtttttgttgtgagacagggtcttactctgttgcccaggctggagtgcagtggtgcaatcatggctcactgcagccttaacctgccaggctcaggtggttctcccacctcagcctcccaagtagctggggctacaggtgcaccccatcacacctggctaattgtttgtatttttggtggagacagggtctcactatgttgcccaggttgatcttgagttccagagctcaagcgatccacccgcctgggcctcccaaagtgctgggattacaggcatgagccaccacacctggtatacacacccatgttttatagcagcactgtacacagcagccaagaggtagcagcaatcccagtgtgcacagagagatgaatgaatgcacagtgtagcccatccatacaatggaatatgattcagcctcaaaaaggaagggaattctgatacctgctaccacatgaatgaatcttgaaggcattatgctgagtgaaataaacctgacaacgccctcctggcagatgcagacacaaaaggataaacgctgtgtgactctatttatttgcagtacatagaatagtcaagaccacagagacgaaaggtagaatggcggttgccagggcccggaggagagggaaagaggagttagtgcatagtgggtagagtttccgttttgccaggtgacgatttctgcaggtggagggtgctgttggttgcacgaccctgtgaatatacttaatgccactgaactgtgcacttaaaagattataaattgcattatgtatattgtaccataataatttttaaacagtcagctgtcattgctctggcagacagaagggagggaacatcccatgtgtcgtagcctctgaggccctgggttgcgtgcgaggagctgaccgtggctcctggccaggtgctggcacactcgccttctaggctaaatggagaggtcattgccagtctgctcctgtctgctgccctccccaccaggcagagccccctgctcactgcccctggcctgtgccctggggagctggggaatgggacagccgctggccactggtcacaaacatcgccacccagcatgtgatgctggcttcctgctggggaggagccgtaggctggcctttggctcctctggaagtgcctggcctcttgggaactgctttctgcatctgcgagaagagggtaaggactgctcctgccctatgggccccattggctgtcatcccttgggcctccatgctgccccattttcagaagactttccttgtcttgaggacttcacgtatgttaccattgaccctcatgcctgagcttagagaggggaagtgactggtgcagacacaagtccaaggcagcagcctcgtttcccaatccccagccggtgctctgggcgggccactgccgtcagtgggggacaagggtggcagccccgcctcagccctgcaaagcccgtggagaccaggggctgccttcgaggggacagtggggcctaaggcctgacaacgccctcctggcagatgcagacttcccgagcaatttcccgatctgcttgggaatgggagggggggtgagggggtggggtgggggaacagagtctggcaggagaggcttgtggggattgcacaatgaggccacagcagccagccgtgaaggcagccaccggccagggcccctcagcccgtatcctcatcgcccctgtgtggatgaactccatctgcgcggtgccggtggaaggaccctcccagccccgggacaccgcggctctgtggactcatctgaaaaatgtcatccctggagtcctaggagagaaggggtggggttggcagccttaacgccccatcctgcatcctggcggcctcccgcatccgctcccccacaggttccccagagacaggatgatggatggcaatccgagtgcaaacctggcgcttggccagcactctggaagaggaagttctcagttcccagggcacctgaacccacagccgcccccactccgctggcccccctggtcctggaagacctgttactaggctgcagaaggggtggcggagtgatcagggggcggggaaagaggccaaacaaaagaggggaggagcagaggccccagtgaggcaggagggaagcccctgcccagcgggaaattcctaaatgtctgggtcctttccagagggcaggaattcctagcctagagtgtgaaataaggaaggaagtgaatctccagtgggttcccttcacagcccctttccatcctccccacatgccccacccccacatctcccaaaacaaaccctgagagacggtgtggatggggagacaggcctggaaacggaggcctgcgctgaatgggcaaagccgggttgatgatccagacgaggccctggagtctgggccttgggcccctccccttctgcctgctccggcagcctgtgggtccagccccagccccagagggggaaaggctccagtgggagtcccataggcctggctaggaaccccactccgctacttaaagtggtgtgagccgggtcagccacttcacctttccgcatttacgcatttcaagcaaggcttgacgaccggaggggctcaaggccctgtgcacagccgcgcggccagcactctggccagccttgtagcccccttccccttagggggcctccttcaggaagcccccgtcccctgcctccttgtggccacggtgacaccggaacacttcagaggggcggctggggagttggggtgggacgggctctcccgcagctggagccggtgtgtgacgcgggaacgcggccaagcgcgccccatccaggcggcctatcaggagccgtcgtcggacaatggctccgcgcctgacaaccccgtcgtccccgtgccgtcccccgaactccacataccatgcgacgcgcggccagccccccgcccctgcccggctgctgggaggaagtgacagcgccccgcatcccccgctgggcaggccgggcgcgcccagcccctgggacgcagggacacagccgggccgcgctgggccttggcctccgcccgcgggttttccgcggttgcggcggggcggggaaggaggggcgggcggggcggggctgactctgcgactatttcaggccttgcggaacccgggccaggacagtggcggccaggccgggacacggtaagtgacctccgcttccacacgtccattccccgccgctccgcgcggcttctcgcccgcccctaccccgaggccaggccggattccccgaggaaagagcctgtcgccgcggcggggacaggagggggctggacgcttccagggaaactgaggccctggcgcgcccagcgtccgcgcgtccgggcgcagaggggccaaggctggctgagggcccgggcctgccagaggcagggagggcggggctggggcaggcgcaggggtctcccctccattacagcagaaaggccccaggtccggcgtgactccccggccgggcgacacaggccgagtcacttcctcgcccgtgcccgggtgtcctcatcgggggatgggtgcgccttccacatcctgcccaggactgaaggagccgggcccagcgagctcccgggaggtgtgtggacatcagccctgacggggaaggcgagccaggtcagtggacctgaggagaggccgggcagcaggaggctggggggcgctgttgagccactggctgtgacccctctacgagcctcccagcaggccccttcctgcctcagtgggcccaaccagcggcaaggctcaaaggaacgcccctcctccccttcttcctttctggctgcaccggctcgctgctgcctgcaggacagactcaggacacaggagactcacccccactgaggcccagctaggcgcccagcacttggctgtgcggtttggccacatcccctcagcagcactgtggggtgggggtcctcatccccttttcaaagacggggaaacggcggcttgtgaaggaaggaggtgtgcagtccacacactagtgagaagtgtgctgagcccacaccgaaagcgtttctctttccatggcaccagctgcctcggagagcggagacctggggcgaggcccagggggctgcagcaggaccttcaggcgctctgggtttcgtgtcacagagggg

SEQ ID NO: 3655 - DNA, 6000 bp, Homo sapiens
gcatctgcgagaagagggtaaggactgctcctgccctatgggccccattggctgtcatcccttgggcctccatgctgccccattttcagaagactttccttgtcttgaggacttcacgtatgttaccattgaccctcatgcctgagcttagagaggggaagtgactggtgcagacacaagtccaaggcagcagcctcgtttcccaatccccagccggtgctctgggcgggccactgccgtcagtgggggacaagggtggcagccccgcctcagccctgcaaagcccgtggagaccaggggctgccttcgaggggacagtggggcctaaggcctgacaacgccctcctggcagatgcagacttcccgagcaatttcccgatctgcttgggaatgggagggggggtgagggggtggggtgggggaacagagtctggcaggagaggcttgtggggattgcacaatgaggccacagcagccagccgtgaaggcagccaccggccagggcccctcagcccgtatcctcatcgcccctgtgtggatgaactccatctgcgcggtgccggtggaaggaccctcccagccccgggacaccgcggctctgtggactcatctgaaaaatgtcatccctggagtcctaggagagaaggggtggggttggcagccttaacgccccatcctgcatcctggcggcctcccgcatccgctcccccacaggttccccagagacaggatgatggatggcaatccgagtgcaaacctggcgcttggccagcactctggaagaggaagttctcagttcccagggcacctgaacccacagccgcccccactccgctggcccccctggtcctggaagacctgttactaggctgcagaaggggtggcggagtgatcagggggcggggaaagaggccaaacaaaagaggggaggagcagaggccccagtgaggcaggagggaagcccctgcccagcgggaaattcctaaatgtctgggtcctttccagagggcaggaattcctagcctagagtgtgaaataaggaaggaagtgaatctccagtgggttcccttcacagcccctttccatcctccccacatgccccacccccacatctcccaaaacaaaccctgagagacggtgtggatggggagacaggcctggaaacggaggcctgcgctgaatgggcaaagccgggttgatgatccagacgaggccctggagtctgggccttgggcccctccccttctgcctgctccggcagcctgtgggtccagccccagccccagagggggaaaggctccagtgggagtcccataggcctggctaggaaccccactccgctacttaaagtggtgtgagccgggtcagccacttcacctttccgcatttacgcatttcaagcaaggcttgacgaccggaggggctcaaggccctgtgcacagccgcgcggccagcactctggccagccttgtagcccccttccccttagggggcctccttcaggaagcccccgtcccctgcctccttgtggccacggtgacaccggaacacttcagaggggcggctggggagttggggtgggacgggctctcccgcagctggagccggtgtgtgacgcgggaacgcggccaagcgcgccccatccaggcggcctatcaggagccgtcgtcggacaatggctccgcgcctgacaaccccgtcgtccccgtgccgtcccccgaactccacataccatgcgacgcgcggccagccccccgcccctgcccggctgctgggaggaagtgacagcgccccgcatcccccgctgggcaggccgggcgcgcccagcccctgggacgcagggacacagccgggccgcgctgggccttggcctccgcccgcgggttttccgcggttgcggcggggcggggaaggaggggcgggcggggcggggctgactctgcgactatttcaggccttgcggaacccgggccaggacagtggcggccaggccgggacacggtaagtgacctccgcttccacacgtccattccccgccgctccgcgcggcttctcgcccgcccctaccccgaggccaggccggattccccgaggaaagagcctgtcgccgcggcggggacaggagggggctggacgcttccagggaaactgaggccctggcgcgcccagcgtccgcgcgtccgggcgcagaggggccaaggctggctgagggcccgggcctgccagaggcagggagggcggggctggggcaggcgcaggggtctcccctccattacagcagaaaggccccaggtccggcgtgactccccggccgggcgacacaggccgagtcacttcctcgcccgtgcccgggtgtcctcatcgggggatgggtgcgccttccacatcctgcccaggactgaaggagccgggcccagcgagctcccgggaggtgtgtggacatcagccctgacggggaaggcgagccaggtcagtggacctgaggagaggccgggcagcaggaggctggggggcgctgttgagccactggctgtgacccctctacgagcctcccagcaggccccttcctgcctcagtgggcccaaccagcggcaaggctcaaaggaacgcccctcctccccttcttcctttctggctgcaccggctcgctgctgcctgcaggacagactcaggacacaggagactcacccccactgaggcccagctaggcgcccagcacttggctgtgcggtttggccacatcccctcagcagcactgtggggtgggggtcctcatccccttttcaaagacggggaaacggcggcttgtgaaggaaggaggtgtgcagtccacacactagtgagaagtgtgctgagcccacaccgaaagcgtttctctttccatggcaccagctgcctcggagagcggagacctggggcgaggcccagggggctgcagcaggaccttcaggcgctctgggtttcgtgtcacagaggggagaaggcggtgatgctgtgggggtcctgcgggagctgtgcctggaggtgggacagagcctagtacatgtggggtgggacagggaaggctgaggtgaggctggcagggagcattgctggtaagggccaccctcccccaccccaggagaatggcagaggtggggcctgggcacccagggtggggctgagtggccctgccagacagaccagctcccgcgggtgctaggcatgcacctgagaggggctgggaagcgaagttggggcaccgggtggggagcagaggtgccccatggccttgcccctggggctccctggagcatgcccctcttggtcctggagtggaatgctcaacccaaatggcactagggaggccagtgccatccaggagtgtgggactctgcccagggcactgggtgagcatggcaggggctgggggtgggaggagcccaggcttcctgtccctcaggtggctctggccaagcccctccaggatggggacagggtagtggggctggtggaggcagcggggccatgggaagagtcggatgggcccagtctgagcctccatggctgctgtgcttggggcaaacacctcctactcagcctcagtttctccttctggatggtggatcatcctgcctgccttgcagggctgtttcaggggtcacttgaagttaccatgatacatgagacaaggctgcatgcatttagtcttggggtggggcagacaggtggcatcaaggttacaggtcaccccagttcttggggaggcccagcccctgcctgcttccccctttcagatcagccatgctcttctccagtggacctggccttgctctgacaatggtcaggtgctgggcagggactctggggaagctcgggtcttgcctctctggatgtagcttgcaggatagctggggatgtggaggcaggggaaagctgggctctgggaccgggtggcctgagttccaagcccaagctattgactatagggacagtttaagccgaaataacacccttccagatgagagaaaggaagagatgggatgggcacccaggaaggctgcagaaactggaagcctttgtgatgatgctacgatcccatttgggagggggtgggagccaggaagcctgggttctggacccgagttgctgtgtgacttcaggccgccctgtgacttgctgagccccttgccccagtgatgtgtgaaaggctgtctgaggtcccacccactgtggcttctgtagatcctggtcaggctctgcccctttcatggcccagctggagcagctgtgtttctgtgaccccaccgctggatcagaactggacaagatggcagaggggctgggtctgggcaggaggaggctgggttccagtctcaggccggttctggtgttctagaccccggcatgtcccagacctttctggacctctgttcctgctctgtccaaagggacagagcccatgccccgcctcttccctagggtcccgtgggatccagggaggtgtccattgcctgcttcctgcccagagggtgggctggcagggaaggatttgcccaagtaaagtgaaagtccccctctgtgtggcgggcttggcgtccccagcctcttccttgcttctggggctgtgaagtattggaaggggagctgtagatggtgagatgctcgtggccagggaggaagcacagttgttggtgctcatctgggccaggagatgagcagagccccggtggctgaatgggtgaaacagactgagtgtactcaatgcagccagcatagctgtgtgtccagcctgggagccagggccggtccatggtgaccactgatgccttcacccccaccccgcaggagcctgcaggcctgaaccagggtgatgctgaagatgatgaccttcttccaaggcctctagagccatcagcctgtgccaggcaccctcgacttgcctagaggcccccaaaagttgcagtccacatcagaggcagagtcagaggcctccatgtcggaggcctcctctgaggacctggtgccacccctggaggctggggcagccccatatagggaggaggaagaggcggcgaagaagaagaaggagaagaagaagaagtccaaaggcctggccaatgtgttctgcgtcttcaccaaagggaagaagaagaagggtcagcccagctcagcggagcccgaggacgcagccgggtccaggcaggggctggatggcccgccccccacaggtgctctaggaccctgggttagagctagtctggggcctggacggggttggcgctcatccgcgtgagtgagccacttgcacagtgggccggcaagtggggctggaaggcgcgtctgtctccctgctttcacctgtgccgcaatctggggggctgggaggccttcagcctagtcagggacaccgacatcaccctttagggtgttggccgccggccctgtgcgcgtctaggggaggacggtcccgcttggcgctggccgccccgcccggtgggcggtgggctggggccggggctgacgcggctttcccggcgcagtggaggagctgaaggcggcgctggagcgcgggcagctggaggcggcgcggccgctgctggcgctggagcgggagctggcggcggcggcggcggcgggcggtgtgagcgaggaggagctggtgcggcgccagagcaaggtggaggcgctgtacgagctgctgcgcgaccaggtgctgggcgtgctgcggcggccgctggaggcgccgcccgagcggctgcgccaggcgctggccgtggtggcggagcaggagcgcgaggaccgccaggcggcggcggcggggccggggacctcggggctggcggccacgcgcccgcggcgctggctgcagctgtggcggcgcggcgtggcggaggcggccgaggagcgcatgggccagcggccggccgcgggcgccgaggtccccgagagcgtctttctgcacttgggccgcaccatgaaggaggacctggaggccgtggtggagcggctgaagccgct

SEQ ID NO: 3656 - DNA, 6000 bp, Homo sapiens
ttatagctctctgcccagttgtcacctcagccaagagaacctctctgtctgccatatacaatatcattcacatctttccccatccttttcactctccagccccacctcattgtctccccagtacttgccaccatatcaccaatgtatattaccggtgaacttgttgttctctacttcctacactataatgtgtgctccatgaaggcagggactttgttcactccagtatgcccagagtctggccaaaatgcctgatccctgagatggacctgcccaataactatttgctgacttaataatgagtgagtgaactgccaaaccctatctgctggcatgtgaaggacactaacatcctgaactggtacagacaaaaccaggaccttacgaaggtcacaggtactagttgctagtaggttgggaactggggaggagagggctgagtttacagagggcagtagcctaccttgactcccatctacctgcttcaagtatcaatccaggaaaatttttattagggaactcttggacactgaaaaattccttttgattcagtgatgtgaagcactgatgacagaacttcaggcgccatggccagcagggagaaggtgtccagctgtttggctcacccaaatcaccccttgagtcacttcatacctacttataactccagtagtaaccaaaagatcatttacacagacaagccattagagaaatttgagaatttaagtcatagtttcagcagtattacccagataaacagcagcttgtggttaggtcttggatggagttcttgcccacaggtcagggtttctcctttctggtgcttaaaatcactgcctcaccaagaaggcagcaagtagggtatcattacagtgaacaattcatgacacaaaatgcaagaatgtccaagccccacccagaagcccatggtcatgatgcttgcctgatctgctcatgactgaatccattgagaggaattattttggtaccaagaacacatttcccagttcccgtccatatatggggagaaatggcatgcctctgtgtgtcagtgcccagaaacaagcaggctctcagagttgggaatgacagaagcctcacccacagtctagccgacatctgagatgtttccagggagcctcgctgaagaagcagtgttattttccagaggaggtcagggcacagtggtgataatgtggaagaggagaaagaaaatgaaacatcctgttctgaaagcatgagctcagaaagtaatggttgtgtaagagactgtcccttgcaggaatgtcactattccttcttgtgactacaccttccctaccagggcactgaatttcttctgggccatgactaattacaacgaaaccccctctccacgaaaatcacatctgcatggtgttcacatgaacaggatctgatctgtgccttcagcaaaataagatagctgcaagcccatggagctgttttatcaggattaaataaaattgtgtacctaaaggacctagaaaatctgtacctgggagtcagtgtgtgctcaagaaatattatttttcctgtctaaggatctcattattttgcttactacatgatattgtgttgccttgcagtgatgattatttcttttaacatctggcttagactaccccttttagcttcttgcatttttgttttagagagtatagattatgtttggtttttagttgcaataaagttatatgttggaactagctcagtctaataataatctcaaacattatagtgatttgagggacatttgttcccttcattaatccatttacctcatgttgttccagaagtattttgagggggctacaaaaataaatatagcaggatacaacgagataagattaattattacaagttggttccaaaattggtcccaagcatcagagaagccaaagcaaagagggaaaactgagcaatgataagattcacagtatttgcaagatgccagttgcttcaagaaagcagtttttcttgcagtaagccctaaatgaactctgttctgtcctcaacagtatctctacagaatagctgcctctgatcctgccttttggtacaaaccagggcaccacacccaagagcagctgaagacaagatctaagcaaggtaggtttctgctggactagtgtgattcaggggtgggatcttcctggcaagaggaatcagtgagatgtacatttgttccagttactataggtgcataacaaattaccccaaaacctagtagcttaaaattattattttagtttgcttacaattttgagcaagagtaatgtggacagggaacaacaaggaaagcttgctctgttccacgatatttggtgttcacataggggcaatgtgaaaggcggaatctggaagcatctttacttacacagctgatggctggtgctggctgttggctgggacaggggcactcacacatggcttgtccacatgacccaggctgcctcactgcatggaggttgacagtaatcagaattcttctgcagcagctaagcgctccaaatgtgaatgtcccagagagccagacaaaagctggatagtcttttctggcctagcctcagaagttatccaaagtccctttcactgaatttggttggttgcaaagcaagtcacaagcccaaccagattcaaagaaaggggacgtagaccccacttcttggtagaaggcatgtcatcacattataaaaaagcatgtggatgggagatatggttgccaccatctttggaaaacagaattttctacaacatcctctatgcaatcacttatacatactgtatcttgcaataaagcctttgataagaattgacagaccttgatccttaaagggtatctttttggtgtcaaacactagatgaatagtctaaataggtatacagcacacttgagagccactgtgactgtaaactaaatggctcaacagaatctgggtcctcaaatatattagcatgctcaggctgccatcacaaaataccacaggctaggtggcttaaacaacaaaaactaattttctcaccattctggagccggaaagtctaagattagggtgccagtatgattggtttctggtgaggctttacctttgggtagcagatgggcaccttctggctgtgtactcagctgacctttcttgtgagcaaagagagtgagagagttcttgtgtctcttcttataagggcattaatcccattataagggtcccaccctcgtgacttcatctaaccctaattacctcccaaaggcctgctcttcaaatactatcacatagaagctaggcctctacatgtgagtttggaatggacacgaatatccaggcataacatcatggttacagacatgtcagcattcagtggaaaatggcatcaatccctgaatatttccaaatatctggagtctttaatcaagtggacaacttacccatacacatgaatttttcactttctgtcaacttagtcttatagctaaaattcaagccagagactatgacatggatataaatagacccagagaatcattatatataatttggaaagggtgtcactggcatacatctgtaagcagttcaggaacactttcaagctgtgtttacatgatatcaaacatctggatgaaaactgaaaaaaaaataatcaatttggattggaaacaaagcagaagtataaatttcagtgcactgcactagcctttggaatactgaatgcagagctgatccccttaccccaggaatgagataatggtgctcaagaaaggacactgaaatgaccaagaaggaaagggggcttctgtgggaaggcagattaaaaaaaaaaaaaaaaaaaaaaaaaaaaaaaactaactccattatgcaacaggagatgaaaagggacaacatcaaagactgaaaaacgtaaagaaaatgaatcttaaagcaccaaactgctagaactgggagctttgaggcttaacggcaaagaatttttttcaactaaaaatccaataaatcctggtcgtcagggaaaggggcattcggaaactcaagattctagatagccaacaaatcattcctttaagtatcacaacctatgttcacttttcatatagaaccttttctcaaatatcgtacttattcctggggcctcttaaaaagaatacactccacccagatcacaatactccagccctcagtgtgtagagaaactatgccacatatccttgtgtcccaatggtccttgttaaagggctccaggaccccaaaatactttagttgtttgtattttttcagagttctgctattttctctttccatcatttcttggcttttcgttcttgcagcatgccttaggataagtttcttcagaagctgaccctgagttaaggacttgagagctagttgtttgggaggcgatcccaggaagtaccaggaagcccatccaggtgcattcctgagaggttatttatttaacccctgtggacagctgggcttcaatcctgccggaacttctataagactatgcagaagtgtcccacacaaggggcaggaacctagatttcatctccaaatcttgcccatcgttctctaagaaccactccccttaacacccaggaactgtcaaaagccttcagctgtttgcagtaggaagtcatcaggtgagtaagaggtaaagtgggtgtggacaggagcacctctctaccctgccctcctattcccatacctgatagaattttggggtaaagaaagaaaactagactatgagtgagagcctgcaggactctctcctgagtaaaagataccttttctgatagcttaggggtctttactttctgatttctccctggttcttgatcatattttttaaaggtgctattattcaactggcagttaaaaaaatttttttggtcattcagaaagtccaatctaattaatttttgaagcaaagtaagagtccactaaatggcaggtagtgttaggtaaactccctagagatgaaaactgacttgctagtcttacctcaagtaatgggaaacgaccagacctcctaaagagtcagtgtgcaagttagggctactgtcccaagaaggacacctgagtccaaatggggaaaccacggcaaaacccaagcacactggtttccacactctgtgaggcagagccaaaggggaaactgtgggtcaacggatatgcagggacccaaggcacaagggatgccacgttacaaacaagactcatccccttatcttttcatcttcagaggggaaagggacttggtcagcactggctcaggaactggcagagaaggaagtataggggcggggaggcttgtgcaaagcatgcaaggtggcgagctgaggatgcacagagctggcatctgaagagggccagcacaggcagcccatctcttatttagtgccccacatcaaattcatgaacagccagaataaaaatccaggtgtcttcactccaacacagcagaaattactcaacattgattcacttagaggcaaagctaagaggatgtgggttccaggaacacaagggcacgctggccagaaggtcccatgaggataattcagagagaagggcccaaggccaggtcagagagccaaaacctccagccatcacagcaaagcatccactggcagggaggagacagccttaagctgggggaaggaggggccaggagtgcactcatcagggacgaggctgcagcagacagagagccaggggaaagacacgcaggagcagggcagagagcagaaacagactgacatggcgcagatgcaggacatggctgggtatgacaaactccttgctgcgtggactctgggtagttctttgttttggtgtatattcaggactctcctgtgagtggggagcatagcaggatagtaaagaggccggctttaggatggctgagaaagctcgaactctggcttgggtgtagctggatttgggcaaggctggataaggggagacagccaagagagtcctgttg

SEQ ID NO: 3657 - DNA, 6000 bp, Homo sapiens
tgcaggcgccgtcctgcgttttctgtcccgtctcccaaataaagagcacgttagctttccacacggggcgtgtgcgccagggcggggcttcccctcactgtccgtctgggctggagtctcagtcccccgtgtggcagctctacccacggactcatccgtgggatgacagggttggtgtcagagcccaggagcaggagcccccgggcctcagagggcaggacaagagcaggtgagggctggggctccacagcacagcccagccacggatggcgtgtccagcccagagcctggccatccggctccgctccctgctcgcctccccgctcccccaccagtgctggctcctccgtcctttcgccagagtcttggggccttgggacatcctttgggacccctgcacctccccgccccctccccccgcacctccccgccccctccccccgcgcctccccacctcctccccctgcacctctaggcccccagcctcaacttcatatcctttgagactgggcactcgctctgcccggagctcctcccactgctggtgcaccagctgggaggatcctccaggtgggtcccacccagactgcccccttccgcagccccactgtccccaggactcccagacttagacaggcagatcggcagggggtccctcccgcaccccccaggatggggcccacccggagagcatgtaggtgggggtgccgtctccaagacccaggcccatagggctcctataccagcctggaggggacggggaggtaacaggtacaagcccctctgcctcaaccacccactgggacacctgtgagctgggtgagatcagcaggtggaagatgctgcgcggggggcgctgggaggagagtggggcgcctttcaagtggggctaccggacctctctcccccacctgctgacaccccctgcagaggccactgctggagaggaaaaacgccaccccaagtctcctgctgtttgctgtggggaggggacggtgctgactgccagcacggtcacctggcgggcggagcctgcacggggagaaatctgggcgaggctgtgtgtgagcaggtggggcagggagggcttcctggaggagggggcctgacttccacagcacaggccaaggtacaagggctgggcctctcgcctcatctggagctcactgaggccaagcccttcaggtctctgggctctctcacccgggtgcctgcccaggcagcccctctccctcagccctgggccctgtgggaggaagaggtgtgtgtggcgggggcgtgcgagggcacccccagcaggtgggatggactcaggcggtcccccctgctgtctggtggtggggggagctgcatgtaggcagtggccaggccccagcccatgctggtgaccccggagagagggtacttatccccgttttgcagacaggacgccgaggcccgggaaagcccaggccctgccacgtgattcagctccaagccttagcacggatgggtcctcctgccctttctcctgcagccccgggaccgcccagggagcagggcagctgctgtgatttgggagaggccgtgctgcgataggctcattgctgaccggaccgggccccccaccagctcggagccccactgccgggcagcaacgattcctctgcccacctggcccctcccagaggggcagaccctgaccctgaaaggtgggcctgagagcttccagaaccttctctccagcacaggatgttccagagaaaatgtcacctcctgtcaccacggaagccatgttgttcgttaggagccgccggtcaccacggcgacaaccagggcccgactctcattctttggggccattaaaattcaccctgggtgctgttgccactgggtctgagcagccaggaacagagaagaggacccagcgtggagcctcacccgggggctgcaggcagctcatgtcctgtgcacgcagcccctcaaagctgctcaagagcaccagacggtctggagcagtgacctgccgggggaacgaggaaccgcctctctgcagtccccctggcatgggggggcctggagccaggcagaagctggtgaactcaaaggcccctgagccacgggaggctcctgggtgggggcttcactccctgccacctgggacaccatggccagggagggggagggtgtgggtgggtggcagctgcaggaggggtggcctggcactgccccatcccgcatccagggctctgggtggaactcagaccccgtgccagcctccgtgggtgtgggtttggggtgaggtccccgtgccgtgtctgctccagccccacagggagctgccggctgctgtcacctcctgtggcggctcatcacatgtactctcggccagtggccattaagagccttgggagataatggtccctccgcgccggccgcgcactcaggcctcattattgcccaggcccaggcagcgctctggcatgtcccctcggggagggggtggctgatgagaagccgagggttggggcacgggggagggggcctggaaggagtcgctgaggctggctggtggcaccagcctgggaacacggagccaggcgctgttccgagcacaaggcaggttccaatgtcaggcctcacgtgcactttacagctggggacactgagcccaggggtccctgcgcccactgtgctcccacgtcagggccaggctgatggctgcagcaatgggggcgactccccggctggagaggggccaacacccccgcccccaatttcctgacctccccactcccccacgtgcaggcagaccactggactagggcacgcgggggccgcccgccttgtgctgaaaaaggaggcccagactttcgcagtctagtagtaaaatcctgaaacccagggatggagccctccccactttctgggtggaccccaaacgccttcctttagaaagatcatccactcctctcgggggctgagtgagcccaggcgtccaggagcccccagtctgtacagcagggagctgaaggctgggagagaggggtggagtcgggggtcttgctgaggccccctcccccagtgcctggcacctccacccgcacctcactggcacaagcgccccgcagcacggagagggggcggccctcccggggcccgcctgggacgctgctgggtgtctgtggggggtgggccccagggcacccggcagcagccgctcccccgtcgccacggcaatgccgcggtcatgcctggccagggctatttctgtccaggagacatgctgtcctgccccactgagtcaccccccgcgctccctgcccaccccactcaggcctggcctgcagcttctgtgccacatagttcaggcatcggccctgccagccgcctgcccagacggactctccccaggacgggtcatcccgggccacccgaacccaagggacccaaaggcacccttcccgggccgttcacccacccctcagcctccctccaccctgctctgtgcgtggggaggctctgggacctgccctcaagggggactgtcaggaacatgcctctctttttagggggcagttctgctggcgtcggggggcactgaggggcacagggttccctgtgtctaggcctcagggacgctctggatacttctgagctccatgggtgcccatttcacgggcatgggaggctgaggctcagacccagggcacagcagagtgtgggcgtccgcccgtctttctctgcaagccccaggagcacactgtcccactgggacacatctgcagagctgtgttctcgccgcccagggcacagccacgctgagccggctcggtcggatgcaggtgccatagtcacaggcgctcaggtcttcacaccccatctgtgtcaccacagccaacagggtgaagatggctgtccccagagggggccgctgggcctagtgggtgccgctgccaagggtgagctgtcaccgcccagggccacctggaggggggagcctggaaccggctacagctggtgcggtccccaccacagccctccccagcccgttgcccgcagcctggcacacgaagctcccacaggggggaccccttggtctcccctcacctcctgtcctcctttcctcctcggtctttagcatgggggtgctgagggccaggccaagctgaggggctgcggggagagcgggaccccaggtcgcacacaaatctgccgaggggactgagccagctcggggcccctccccgcccacagcctgctttcaggcaaggccgccacaattctcctgccacgtccagcacctcccacaacaggggccggcttgtggaggaaggacctgtggggaatggccgcgtgtccgtgtccagaggcccagggtcggagcgggacaaggccaaggtgctgtgtgggcttggcctggggcccacagagaatggagcccccgcccgctgaggcctgggaggcctagaagtcattcccgcgagtcgtccggcccagtccttatccgctgagaggcggggctggtgcggggcctccccaggggtgtcatgagggaatgaagagaccccacggagcctggggaggctgcgctcctgggctccatccagcctggcttccccgccagcagcatgagggctgtgcgtcacccggtggcttggtggccatgggggccccgtgcagcatggaggccctggtctgggccccgaacacgggcctcggcctacagcccccccgccgggcccgcccagccacagcttccatctgcctgcttctcctcagggcgccgcaccccaggcgggcagcaggcttggtttcccgatggaggagagctgcgtgcccacggcaccatcccccaacccagccggccaagacgccgggccccagccccgctcatgggcacggggctggcaggaggaccctggggccgcgaggcaggcttcgcagtggacacaggggccctgccaggatcctgtccagggctcggcggagctggcctctcggcctgttgctcttggacagcccagaggaagccacgggcgcccaggcgggcatgaaagggctctttgacggctgggttgctgggacagtaacacagacggccggccaggcagggagcatccctgagacggtaacaggaagcacagggcctggggctggttgtgggagtcttcacagccgccctgggcaggtcgggctccccctgaaccccagcggagcatgatccagccctgattgtctgccaggcagggccaggggctgggacggccgggaactccgtgggggctcctgcaggcctccgtgcatgcacacacccactcctgccaggctccctctgccggaggagtccaggggggctcttgtggtgtccagtggggccagggggtgagtcagggtctgctgagctcatggggaggcaggcagagggtgtctcaactgccagagacattccacccacctggaatgacccactgcaggaggaaggaccttgccctgtgctacaatcccagagggcttcctgaaggaggcagcctagatctttgtccagcagagcccatcttcagggaatattgaggatcccgacccgtgcacctgccctagcggaagacactcctggccaagcctccagatgtggctgtgaggggagtggggtaggcaaggcccacctggcaggggggccaggcttgttggggcagctgctgttgggagggggcctaccttgctcagggggacccaggttggctctggcttcccctcggcaccaaggtgggaccatccttccctagtctgggggaggcagaggagtggcctcccgaggcccctgcaggccctgccctgggggctccggacgagaggctctctgggcctggctgagacggtgcctctgtgcactgtgcagggccccccaccccaggccagccttggggggcctttccctggagcagaccagccaccacgccccagggctctgcccagccacagtgggtggggccttgggcggctacccgctcctgagtttag

SEQ ID NO: 3658 - DNA, 6000 bp, Homo sapiens
ctgcgcaggtcccgctcgccgccggccaccggagaggcttcggggccatggggctcggctgtgggctgccaggggcaggcggagctggtgatgtggctgacctcctcgtcggctgggtccgaggcctcggcctcctctccgcctggggccgccggccggctggagacgcagcgctgtccgaaggtatgcttacgagtgcggacgctggcgggccgtggggagcgtggtggggactgcagggagcccccctgggtcaccggcctcaccggggttttctcaccaggctctgcaggatccagggtgtccctagggctgtcaatcttcccttccaaggaatcggtgtgcacagcctcctgtgggggcgtagagtcaaagtgaggggcggggccctgggagagccctgtcagtggccagggctcggagacccctcaccatccaggtactggagaggccaaactgggcaggtcccctgggtggctcctgaccctcgagatggggctggaagccgctggtgtggacgtcctagtctcactcctgacctgtgaggctcccggggaaagcctgtacccgctgctctgtgggcagagatgccatggcccccaggggcacagagctgaggctgaggccacctccccacccctggacatcagcagcccagctgggcacccccaggatggggctctcctaactgctcctgtgcggtacaggcgtcttgtactgggcagcaagaggtaggaaagggcaggaagaggagctgaggctgcaggtgggcaaggctgggacatctgaacacaagccaggactgaaaaagccgctgtctgcccaccacgggacccatgcccacatggggcctgagaaactgccatctgcccgccgtgggccctgggaaactgctgtctgcccaccacgggacctgagaaaccgctgtctgcccaccgtggggcctgaagctgtgggtccaagaagactcaggtccctgtagccaagagctctgtagccacaggctcacaggcctgaagacgcacctgggcccaatgctccaagatccaccaagcagcaggcagaaaccttcggagccccaaggacccagtgcgaccctcctcctgccttgtcctcgtctgctggtccttcagatgagacgaggcatccctgcaagccccccatccccgccagcctctgctgcaggccaacggcttctcctacctgtctgcagagcagccggctgagactgggggagcgggctgtgccccgaggggacagggcgtggaggggctcgccgctcctggctggggacgacacagccaatgggatctggagggaggcacaggactctgcgggcggagagtgcacagaggcaacggagcctggggcagggaagaatctaagctggcagctctgcccctgccttcctgcccagctgccacccacccccgtcctcccccaacctgccaccatcctccttcctggccagccccagcccgacccgtcctctctctcacctgcccacacccagcctcctcaatctggcctccatcctccctcctgcctgcccccatcctccttcccgcccatccttcctcttgccctgctctggcctgaccccatcctccctcccacctgcccccatcttcctccctgtcctgcttcccacccagcccatatcttcctgctggctaccatacccaagggggtgccggccccataggtctccatctccacctcctgcagcgggcgggggtggggcgccgaggcaggcaccacgggcctgaacatgtagctgtcgttgggcagcgagagcatcctggacacggacaccttgcgtgcaaccaggtttggggcgtccctggcgcccggactctcctggggcaagggaggcctgtccgcgtccacccggcgtgcactcccggggccctgcgccatctccagctcgatctcggcgtccagctccgcatcctcccgtgcctccttgttgctctcctccaggtgcttcatgagcacggccaccaccacgttcaccagcacgaactgggccaccagcacgaaggtcacgaagtagacgggcgacagggccggcaggtagctcaggcagtgcttgtcctcacgggagcactcgcgcagcgtgtcctgcggtgggggacagctgtgggccggggtccacacccacccgcgggtgccaccctggcagtgccgtccccttccccctgccctgcaaggacggatccgacccgttcctgggagagcctgaaaaaccgctggggctgccaggtgccagaggcatggccgcggcgggtaccttcatgatcccgttccagttgtcccccgtggacacgcggaacagcgtgaggaaggccatgccgaagttgctgaaggtggcgtgcctgctcaggccctcgcaggggttgtcttcactgcactctgcggggagggagaccccgcccggtcagccgagcccgctccgggtggaggcgggacatgcacccagcctccacatgccccttggggagcccagaggcaggatagcccggaggatgtggatgacgaggccctggcggttcgccctgcctggcagagggtgaccctgggtgtgaggtcggagcccctgggccgaggcccctgctgccgcacctgggctggggctcatcaggcctggcggctgccatggaagaatcattattgtgtgtgtctgtgactgcgcgtggcgggggatgagtaggcgccggctgaccaaaatcaagcttacctggtggacagacactggactgtggcaacgccacacccaccgtcgggacagggcccgggggagggccctgcagggactgggctgcctgaagtggaacccggcaggggcagggctgggccgtctaaggagggtccccacctgccccgcccagcctgggccgaggctgaggcctgggtgggggcctcaggaggctacggccaccaggtaaggggagacagccaacatttgtctcctgggaccatgtgacgttgggcatggcgtgtgtttccagatgtctgtgtgtgcacgtctctaggtgttcttgcttcccctcacgtgtggcaggcatccctgtgtctgtgttgctgtgtgcacgtccgcacacgtgtcacaagcctgggcacatgcctctgcgtcaacacgagactcggcctcgtgcagaaaaggctccggaagcagggccgggtgaggacgcccaggaggcgtgtggccctgatcaggccccacgctatttgcaagcatgtgcctgcgtgtgagtggatgggcacaggggcgcctgtcaggaccccatgtgtgccaggaggagggcgcaggagccactcacccagcctcccgaacagctccactcccagcgcagcatagataaaaaacaggagcatgaaaagaaggcccaggttccccacctacacaagagagaagcagagctgggtcagacgggcgggcagggaggcctcagcccaccctgcagggcactcggcgcctcggccaccagaccccacctgcccaccttcttccaggtgctccgggcccggccaagtggaagcaagttcccagagctgggcggggacccctgttcctcagccccatgcccctctcggggcaccatgacctcaccaggtagacagagcccacccctctgtgctggcccgcactggcttctctcttcctctgccctgcccctgagcatcagcctctggcccagagcccactccacactctgcccagcaggttccccaaggcctagcatgctcttcctgggggctctggcccgccctgttcagcggctacctcagagatcccatggcggggcccaggccagcacgcagctgactgaggggtcccggcaggtgggcctgggcctcacccctcccctgccacggctctcttgtgagccacccaccagccccagcatttgcacacactgccccgctgggcggcgcaccctccaaggctggccaggcctgtcctacgccacgccccttctctgcacagctgagcacctggtggagtggtacctggccctcgggagtgttacttggacgaagctaggcacgccgctgaggacagggtgagtggggacagctgaggtgggaggcagaagacaggcagggggcaagtgacagatggcgcagggacaggaaatgggtgggaacaggaggaggtgccgggtgcataggcagccgtgggggttgggggtggctgggaacatggctgggctggtggatggacggacacacgggggttggataggtggactagaggctacggacgggacaacgtgttgggtctcttggccttggaggacagaaaggatctgggcaggggccaggggcacaggaagcagggaggctgggcccatgtgggctccgagggggccccgggcccgcagccgacgcctgcatcctgggtgtattcctgtgcccacacacacccaccttggccacctgctgccctctgcctgcatccctctggctctccacggcccccgcctctggaagtgcaccggggagggggccccggttatgagtcttgcccagaggattgaggccagagggcagcggctggatccacctctgccagcccagccaagccatgcactgcacacagcagggacgcagcttcagccaccacacaaccgagggaccagagaaacgagtgagggggagagggggacggcgaggcgctccctgcaaccccgtcttccgggggcctgcgctgaggatggcgcgggctccacctacctgggggagagcttgcaccacagtgtccagcagggcgcgcatgcccgtagccatcttcagcagcttcagcactagggccgggagctgagcgtcagcagggctgggcggaccctccctgctgcgcggggaccctggccgccccgcccctcactcccacccatggctgagcccccaccctccacccgcagagagaacctggcgggcacgcgggcacctaccacgggcaatgcgaagcacgcgcatgatgcggatgatggtggggttgatgggcagcgcggcgctcatctctatctcctccagcgtgatgcccatgagtgacagcagcacgatggccaggtccagctggttccacctgtgtggccggaggctcagcgcacacgtctggggtccccgcctcggctcagcagcgttgcttctgcagacctccgtgggaaagcctgcggcctcacctgcccccagcccccagagccctgaggggcccccagaacccaagacggccccaccacacacacctgtccttgaagaaccgacggaacccaaatgctaccagcttcagtgcagcctcgaagacaaacacgatggtgaagacgtagttgcagtacttgagggcctcgtccagcgactgggggtggagggtcgggctggctgaggtggggctggggccacccctcttccccctggctcccactctgcacgcccgagtgcccccgctggccggccctggaggctcccaggtcagctcagtagctcctccctgggcaccgggagcctcttcggccctcctccagcccagcatacaggaagtgctccgtaagtgtctgatcaggtgaatgagtgaaaggtaccctcccagcatccacaagaccagctgaatgccactgtctccaggaagccaccctgagcccccagcccatttcacaccctgcagccgtctgtgcaccccgatggcagtgtcctgacctcccaccctgtcttctactgacttgagcacctcggggacatggggacatgggctcacagggcccaactctgagcaccgacggtatgcagcctgggctgggctgggaggtactgcccagatggacctgggagcccctcaccctctgaggacgaacctccggagagggaagatcctgcccctcccagcccaggctcctggcctctggccacggccatcctcggctccacacaaaacgctttccatagagctgagtctgttcagcctcaaaagcttactgctacccagaggctacctccttc

SEQ ID NO: 3659 - DNA, 6000 bp, Homo sapiens
ggtactcagagggcccccgagagatggcaggggcagatgttgagtagcgggccatgtaatggctggggccctgggacccccccgaggggcaagtgcagcacagcaaccccccacccagcaacaaaaggcctgaggccgcccagcccaagtagagggaggcccccagctcccgcttttgggcctcagccaccagggggttatagaagtcccggatgatggcatgcgccgtccagcacacggggattagcgtcaggacccctgagatgacaaagacaatcccagaggtgagcaccaggcgggccttggaatccttctcctccacacaggtggtacacttggccccagcaaggtagaccagcaagccgaacagggccacaaggagggcgatgacacagagggcacgtgcagcctgcaggtcctgtggcagcgccagcagtgagtcgtacaccttgcactgcatctggccggtgctctgcaccacgcaggacatccacaggccctcccacaccacctgggccaccacgatgctgttgccgatgaaagcggtcaccttccacatgggcagggcacaggagaccaggccattcacccagcccagcagtgtcaggacgactcccaggatctgcattccggcagaggccatggcgaggttgaaggagctgcactgtgtttgggacagaagcacaacaaggtgaggcctggcaggcccagacctcaggccacatgtggacaggactctaggggcatgcaccctggaaagtggtcatcacatcctggaactcagtcaagacatgctccctgagcctcacttctcgtgggcaaaatggacacttaatgctttagcatttattattctttctagttatgtgacaggcactggctgatgacagtgactgtgcaagcagccctgccctggctatcctgaatgcaaatgaaagataacaggatgaaacctatacaatgacagtccaaggccagagccagtgatcaggctgcaaggcggcaaaaagcaggatgacaggacggtgcgatttccaagcagtttccgtgtagaatggttcaattctagccctgagtttaaggctcaaaacttgtccatttgttttgtttgtttgtttgagacgaggagtctcgctctgtggcccaggctagagtgcagtggtgccatctccactcactgcaacctctgcctcccaggttcaagcgattctcctgcctcagcctcccaagtagctgggattacaggtgcacaccaccacgcccggctaattttttttttttttttttaagacggagtctcgctctgtcgcccagcctggagtgcagtggcgggatctcggctcactgcaagttctgcctccccggttcacgccattctcctgcctcagcctcccgagtagctgggactacaggcgctcaccaccacgcccggctaatttttttgtatttttagtagagacggggtttcactgtgttagccaggatggtctcgatctcctgacttcgtgatcctcccgcctcagcctcccagagtgctgggattacaggcatgagccaccacacctggtcttaatttttgtatttttagtagaaacagggtttcatcaagttggccaggcgggtctcgaactcctgacctcaggtgatctgcccgcctcaagcctcccaaagtgctgggattacaggtgtgagccaccgtgcccaaccaaaacttgttaatttcaacactaagattggagatcctaagcttcctcccaccacccaatgtccctcacaacttggttccacaccccaggctggcagacaccaggaccaggagagatgaagaaaagcatcattaatcccccatctaaaagcagttcctcccccaaagccagtggataactccctggccccacccttctgacctgccctaggcgccggagagcatagcctcaaggctgagggccttttcctatgaattctagacgaaaatgccgtgctagactcccctcaacaccagttctcccaccgccacctggcctgcacctgtgtcccctcagtgttggaggtcgtggagggaatcacttctgactagggccgggctgtggcctcccactgcccagagtactttcattgtacggcttggacctaaacttttcccggccggcagcggtcggagggcaggctctactcattagccgggggccccaggcctgggcggagcagaccaccttggggagactggctggggcacggtgccccagcgctcaggtccggcccttaggcctctggccgagttagggtcggggccgcgctggtataggcgcccaggcctctcccctctgagtgtgcccctgcccctttctttttcatgcactgcatgaaaaagactctgtccgagggcgccccggcccacccgaccaccccagcctgggagccgcgcgccctggaggggttctatagctgcagtggccgcaaggtccgctcccccaggtgagggggaggggggaggggcgccccgccccgagaggcaaggcaggtgggggaggggcgccaggggtttcggagtctttgtccctggggaggggggaggggcgtttaacccttgggagccccgaaggaccctatcacctcggaggcttgggcgcggaccggccgaccccctcagggactcgcccatccaggtggccgcagcccgagttcgcacgcacccctacccacgccgccaccaccctgcacccggccccaagaggcgtctctccaacacgcacactagccccggactcacctgcgaaggagataagggaaattcctaggccgagtgtcgggacaggggcggaggcgggggtcttaaagaagcggtgacgtcactggaccaccgccccggaggaggggcagagaccctgtccctgacggcagcgggcgtgcgaatcccaggcttgtcagaggggggcgctggaggctggggtcgctgggcccgcctcgggctggcagacgtccagactcacccagggtgagggcgccaggcttagggtagaacagagcttgagactccgcttcaccacttaagcagcgcggtgacatggggaactcacctaaccttcccgagccttcgtttcctactctgcaaaatggagataacaagtctgcattttattatgtaactacgtcctaaggtacaaattaaagggcatactattggtattattttagagaaatattttcactgtgtcacccaggctggagtgcagtggtgcgatcacggctcactgcagtctcgaccttctgggctcaagcgatcctcccgcctcagcctcctgagtagctgggactacaggcagcacacgccaccgtgcccagctaatttatgttttgttttgtatagacagggtcttgttatattgcccaggcgtctcgaactcccggactcaagcgatccgcccgccttggcctcgcactgcgctgggattaccggcttaagccaccgcgcccggccagataatattatttttatgttgctggttttttgttgttgttgttgtttgtttttgagatggagtctcgctctctcgccaaggctggagtgtggtggcgcgatcttggctcactgcaagctctgccttccgggttcacgccattcacctgcctcagcctccagagtagctgggactactacaggtgcccgccaccacccccgactaatttttttgtatttttagtagagacggggtttcaccgtgttagccaggatggcctcgatttcctgacctcgtgatctgcccgcctcggcctcccaatgtgctgggattacaggcgtgagccaccgcgcccggcctgttttgttttttgagatggaggccctctctgtcgcccagtctggagtgcaatggcgctatctcgactgactgcaacctccgtctcccaggttccagaaattctcctgcctcagtctcccgagtagctgagattacaggcgcccactaccacgcccggctaacttctttcttttttttatttttagtaaagacgggggttcaccaagttggccaggctggtctcgagctcctgacctcaggtttaattgttataccccccgggcccttaacaaagctgtagtggccaggctaacctgggcaacatagtaagaccctggtctctacaaaaaatacaaaaattagccggacgtggtggggcagggcctgtggtcccagctacttgggaggctgaggtgggaggctcacctgagcccagagagccgtgatcgtaccactgcactccaggctgagcaagagtgagacgcaatctcaaggggaggtggggggaaggaagctgcagtgatctctgcatggattggtcgtgtgtctgatttctttttattgtttgtttgtttgtttatttatttatttatttatttatttatttatttgagacggactctcactctgtcgcccaggctggagtgtagtggcgcgatctcggctcactgcaacttctgcctcccgggttcaagagattctcctgcctcagcctcctgagtagctcggattgcaggcgcgcgccaccacgcccggctaatttttgtatttcgagtagagacggcgtttcaccacgttggtcaggctgctctcgaactcctgacctcgtaatccgcctgcctcagactcccaaactgatgggattaaaggcgtgagccaccgcgtccggccgttcgtgtctgatttctatatgtgctgccgaagcgagcactcgtgtctaatttttgatttccccacaccacgcacgctggactagatcaccggctgggcaaggaagggggtctgcgtccctgcggggtcctggcagctcccgcgccaggactttgttgaatgaatgactgaactgagcgggcgccgcggggcggggcgtcccgaagcggacctcaaggcgggcggaggcgagagctccgccccggaaggcgggggcgggggcggggcggcggccgtgggtccctgccggccggcggcgggcgcagacagcggcgggcgcaggacgtgcactatggctcggggctcgctgcgccggttgctgcggctcctcgtgctggggctctggctggcgttgctgcgctccgtggccggggagcaagcgccaggtacgcgggactccggggtcggggaaccccgggccggggctcgggagccggactgggtgtctggagaacagcgccgaactgggggaacaggcggatgtggggatctggggtcaggtggccttcaaacagctcgctcccggctgtgggaagttccatcactctccaagcttcattcacaatccgggcctcagtttctcccaccgtccaattggggttggggggggtcttcagttccacaagtccgaagtacttcgaatggagagagaaagtgagtgagggcgggatgtttagtctaggaaggggcacgcccccagcctggtccgtacagggtctaactagccccagtgatcgacgagttggggaggccgtcgagaggcactagggtctgtgccctctataccatgtggggtgcccccttccatccggtgacttcagtgcccagctatgcggggggagggactggggtcgggcccggtgcccaggagtgagtcacccgccggcggcaggggggttgtggggacctgaccccccccacccccagcgtcccgcgctacgccctccctcccggagctgccgtgtcccggtcgggccgtgcggtcacctgtgaggaatgcgcggggagggcgccggtgactcacgttattcgagccggccgaccctgacctcagaccccagaatagccgagtcccgcccccagcctctgacccgaggccccctccccaggcaccgccccctgctcccgcggcagctcctggagcgcggacctggacaagtgcatggactgcgcgtcttgcagggcgcgaccgcacagcgacttctgcctgggctgtgagtggggggcagggccagtggccagcggaccccagactgggagggagggtggctgg

SEQ ID NO: 3660 - DNA, 6000 bp, Homo sapiens
tgactgtgcaagcagccctgccctggctatcctgaatgcaaatgaaagataacaggatgaaacctatacaatgacagtccaaggccagagccagtgatcaggctgcaaggcggcaaaaagcaggatgacaggacggtgcgatttccaagcagtttccgtgtagaatggttcaattctagccctgagtttaaggctcaaaacttgtccatttgttttgtttgtttgtttgagacgaggagtctcgctctgtggcccaggctagagtgcagtggtgccatctccactcactgcaacctctgcctcccaggttcaagcgattctcctgcctcagcctcccaagtagctgggattacaggtgcacaccaccacgcccggctaattttttttttttttttttaagacggagtctcgctctgtcgcccagcctggagtgcagtggcgggatctcggctcactgcaagttctgcctccccggttcacgccattctcctgcctcagcctcccgagtagctgggactacaggcgctcaccaccacgcccggctaatttttttgtatttttagtagagacggggtttcactgtgttagccaggatggtctcgatctcctgacttcgtgatcctcccgcctcagcctcccagagtgctgggattacaggcatgagccaccacacctggtcttaatttttgtatttttagtagaaacagggtttcatcaagttggccaggcgggtctcgaactcctgacctcaggtgatctgcccgcctcaagcctcccaaagtgctgggattacaggtgtgagccaccgtgcccaaccaaaacttgttaatttcaacactaagattggagatcctaagcttcctcccaccacccaatgtccctcacaacttggttccacaccccaggctggcagacaccaggaccaggagagatgaagaaaagcatcattaatcccccatctaaaagcagttcctcccccaaagccagtggataactccctggccccacccttctgacctgccctaggcgccggagagcatagcctcaaggctgagggccttttcctatgaattctagacgaaaatgccgtgctagactcccctcaacaccagttctcccaccgccacctggcctgcacctgtgtcccctcagtgttggaggtcgtggagggaatcacttctgactagggccgggctgtggcctcccactgcccagagtactttcattgtacggcttggacctaaacttttcccggccggcagcggtcggagggcaggctctactcattagccgggggccccaggcctgggcggagcagaccaccttggggagactggctggggcacggtgccccagcgctcaggtccggcccttaggcctctggccgagttagggtcggggccgcgctggtataggcgcccaggcctctcccctctgagtgtgcccctgcccctttctttttcatgcactgcatgaaaaagactctgtccgagggcgccccggcccacccgaccaccccagcctgggagccgcgcgccctggaggggttctatagctgcagtggccgcaaggtccgctcccccaggtgagggggaggggggaggggcgccccgccccgagaggcaaggcaggtgggggaggggcgccaggggtttcggagtctttgtccctggggaggggggaggggcgtttaacccttgggagccccgaaggaccctatcacctcggaggcttgggcgcggaccggccgaccccctcagggactcgcccatccaggtggccgcagcccgagttcgcacgcacccctacccacgccgccaccaccctgcacccggccccaagaggcgtctctccaacacgcacactagccccggactcacctgcgaaggagataagggaaattcctaggccgagtgtcgggacaggggcggaggcgggggtcttaaagaagcggtgacgtcactggaccaccgccccggaggaggggcagagaccctgtccctgacggcagcgggcgtgcgaatcccaggcttgtcagaggggggcgctggaggctggggtcgctgggcccgcctcgggctggcagacgtccagactcacccagggtgagggcgccaggcttagggtagaacagagcttgagactccgcttcaccacttaagcagcgcggtgacatggggaactcacctaaccttcccgagccttcgtttcctactctgcaaaatggagataacaagtctgcattttattatgtaactacgtcctaaggtacaaattaaagggcatactattggtattattttagagaaatattttcactgtgtcacccaggctggagtgcagtggtgcgatcacggctcactgcagtctcgaccttctgggctcaagcgatcctcccgcctcagcctcctgagtagctgggactacaggcagcacacgccaccgtgcccagctaatttatgttttgttttgtatagacagggtcttgttatattgcccaggcgtctcgaactcccggactcaagcgatccgcccgccttggcctcgcactgcgctgggattaccggcttaagccaccgcgcccggccagataatattatttttatgttgctggttttttgttgttgttgttgtttgtttttgagatggagtctcgctctctcgccaaggctggagtgtggtggcgcgatcttggctcactgcaagctctgccttccgggttcacgccattcacctgcctcagcctccagagtagctgggactactacaggtgcccgccaccacccccgactaatttttttgtatttttagtagagacggggtttcaccgtgttagccaggatggcctcgatttcctgacctcgtgatctgcccgcctcggcctcccaatgtgctgggattacaggcgtgagccaccgcgcccggcctgttttgttttttgagatggaggccctctctgtcgcccagtctggagtgcaatggcgctatctcgactgactgcaacctccgtctcccaggttccagaaattctcctgcctcagtctcccgagtagctgagattacaggcgcccactaccacgcccggctaacttctttcttttttttatttttagtaaagacgggggttcaccaagttggccaggctggtctcgagctcctgacctcaggtttaattgttataccccccgggcccttaacaaagctgtagtggccaggctaacctgggcaacatagtaagaccctggtctctacaaaaaatacaaaaattagccggacgtggtggggcagggcctgtggtcccagctacttgggaggctgaggtgggaggctcacctgagcccagagagccgtgatcgtaccactgcactccaggctgagcaagagtgagacgcaatctcaaggggaggtggggggaaggaagctgcagtgatctctgcatggattggtcgtgtgtctgatttctttttattgtttgtttgtttgtttatttatttatttatttatttatttatttatttgagacggactctcactctgtcgcccaggctggagtgtagtggcgcgatctcggctcactgcaacttctgcctcccgggttcaagagattctcctgcctcagcctcctgagtagctcggattgcaggcgcgcgccaccacgcccggctaatttttgtatttcgagtagagacggcgtttcaccacgttggtcaggctgctctcgaactcctgacctcgtaatccgcctgcctcagactcccaaactgatgggattaaaggcgtgagccaccgcgtccggccgttcgtgtctgatttctatatgtgctgccgaagcgagcactcgtgtctaatttttgatttccccacaccacgcacgctggactagatcaccggctgggcaaggaagggggtctgcgtccctgcggggtcctggcagctcccgcgccaggactttgttgaatgaatgactgaactgagcgggcgccgcggggcggggcgtcccgaagcggacctcaaggcgggcggaggcgagagctccgccccggaaggcgggggcgggggcggggcggcggccgtgggtccctgccggccggcggcgggcgcagacagcggcgggcgcaggacgtgcactatggctcggggctcgctgcgccggttgctgcggctcctcgtgctggggctctggctggcgttgctgcgctccgtggccggggagcaagcgccaggtacgcgggactccggggtcggggaaccccgggccggggctcgggagccggactgggtgtctggagaacagcgccgaactgggggaacaggcggatgtggggatctggggtcaggtggccttcaaacagctcgctcccggctgtgggaagttccatcactctccaagcttcattcacaatccgggcctcagtttctcccaccgtccaattggggttggggggggtcttcagttccacaagtccgaagtacttcgaatggagagagaaagtgagtgagggcgggatgtttagtctaggaaggggcacgcccccagcctggtccgtacagggtctaactagccccagtgatcgacgagttggggaggccgtcgagaggcactagggtctgtgccctctataccatgtggggtgcccccttccatccggtgacttcagtgcccagctatgcggggggagggactggggtcgggcccggtgcccaggagtgagtcacccgccggcggcaggggggttgtggggacctgaccccccccacccccagcgtcccgcgctacgccctccctcccggagctgccgtgtcccggtcgggccgtgcggtcacctgtgaggaatgcgcggggagggcgccggtgactcacgttattcgagccggccgaccctgacctcagaccccagaatagccgagtcccgcccccagcctctgacccgaggccccctccccaggcaccgccccctgctcccgcggcagctcctggagcgcggacctggacaagtgcatggactgcgcgtcttgcagggcgcgaccgcacagcgacttctgcctgggctgtgagtggggggcagggccagtggccagcggaccccagactgggagggagggtggctggtgcgcagagcggggccgagagctttgcatctgggaaatcattcgggaggaggtgggagctgggagggggctccggtcagggaggaggccacgtttgggagaaggcagaaggctcagtcttagggggcggggctggcctggagaggggcgaggtctgactccgagtcccgcccccaggcgctgcagcacctcctgcccccttccggctgctttggcccatccttgggggcgctctgagcctgaccttcgtgctggggctgctttctggctttttggtctggagacgatgccgcaggagagagaagttcaccagtaagtgtgccctggcctgcccagccctgtcagcactcgaccttttctctgctgctgacgaccccacctcttatcttgcagcccccatagaggagaccggcggagagggctgcccagctgtggcgctgatccagtgacaatgtgccccctgccagccggggctcgcccactcatcattcattcatccattctagagccagtctctgcctcccagacgcggcgggagccaagctcctccaaccacaaggggggtggggggcggtgaatcacctctgaggcctgggcccagggttcaggggaaccttccaaggtgtctggttgccctgcctctggctccagaacagaaagggagcctcacgctggctcacacaaaacagctgacactgactaaggaactgcagcatttgcacaggggaggggggtgccctccttcctagaggccctgggggccaggctgacttggggggcagacttgacactaggccccactcactcagatgtcctgaaattccaccacgggggtcaccctggggggttagggacctatttttaacactagggggctggcccactaggagg

SEQ ID NO: 3661 - DNA, 6000 bp, Homo sapiens
catagaggtgggcaggagacttgggggttcttccctttccctccccaagcagctcccagtcattctccactaattcaagtcaagtacgtctgcgtgtaaacattttttcctctttctagattcttggtttacgcggagcctgaagtccatgtgtggccaccttaggacatgccttggatccctcagtaccttacaaagccacaggtccagccgggcgcaggggctcacgcctgtaatcccagcactttgggaggccaaggcaggcggatcacgaggtcaggagatcgagaccatcctggctaacagggtgaaacactatctctaccaaaaatacaaaaaaattagctgggcatagtggcacgtgcctgtagtcccagctacttgggaggctgaggcaggagaatcacttgaacccgggaggcggaggttgcagtgagccaagactgcgccactgaactccagcctgggtgacagagtgagactccgtctcaaaaataaaaaaataaaaaaaagtcacagggccctgggctagcagaggccccaggaccacaaggctctgaggctgagggtttgtctctgaaggctacaggccaacaggacagaaggctctgggggtttttctggaacttggtagatttgccctccacagaacttggggcctgccagtcttggcagaggccccccacccttaactaaagcccaggtttccctccttttgccaaatatcacttccccttgttgaaactggcctggtgtggtggcttaagcctgtaatcccagcattttgggaggccgaggcaggcggatcacttgaggtcaggtgttcgagaccagcctggccaacatggtgaaaccccgtctctactaaaaatacaaaaatcggccaggcatggtggcgggtgcctacaatcccagctactcaggaggctgaggcaggagaatcacttgaacatgggaggcagaggttgcagtgagccgagatcacaccactgcacttaagcctgggcaacaagcacgaaactctgtctcaaacaacaaaaaacaaaacaaaacaaaaaaagaaataaaaggcctaagccagatatattgccccatggaccaatgtgacagctgttacaaaacagaggattggccgggtgcggtggctcacgcctgtaatcccagcactttgggaggcagagatgggcggatcacgaggtcaggagatcgagaccattctggctaacatggtgaaaccccgtctctactaaaaattcaaaaagaaattagccgggtgtggtggtgggcgcctgtagtcccagctactcgggaggctaaggcaggagaatggagtgaacccgggaggcagagcttgcagtgagccgagatcacaccactgcactccagcctgggcaacagagcaagactctgtctcaaaaaaaaaaaaaaaaaaaaaaagagagagatgatttcctgaatggagcgaaaaagggatgaaatgtgaagccgagacaccccccacccacccccattccctgaggacatgctggaaagggctctgcctggagtgtggtgatagggaacacaggcaggcccatgcaggcctataggaggaggcagaaggagtttggaaaggattgtaaatatgtgcatgtgtgttggtagggggaccactggaggatctgagagacggagtatgatccggctgctgtggaggatgggaggctggcaagagcggaagcagggggcctgtcagggctgctggagtggtctgggtgacaggaccctgctcttccacccaaatctgcccaccctctttccattcccttctcaattgcttaagctgggaacttgccactttccacctggaagcgtttcctgacacatcctcttccacccagctctgtcccggccccactgaaggtcactctcctggctcctgtgcttctctgcagcacgtgccacgagctggagtcgctatttttgtacagttattagagtgtggcagtgaatcttcagtgtgcctccgaattacctgggaacctcagtggagccgcctgggccccactccgggactgaggaggtgccgggaaatcggcattatgaggctgcagctgggtctggaccaaatgttagaccagggtgtatggtctgaatctccaactagtctctaacctccagcaaggtgtaaagcaaaaacaaattctttttttgctgttgttttttgagatagagtctcactctgttgcccaggctggagtgcagtggcacgatctcagctcactgcaacctctgcctcccgggttcaagcgattctcctgcctcagcctcccgagtagctgggattataggcatgtgccgccatgcccggctaattttgtatttttagtggagacagggtttctccatgttggtcaggctggtcttgaactcccaacatcaggtgatccgcctgcctcggcctcccaaagtactgggattacaggcgtgagccaccgtgcccagccggcaaaaacacattataagtcccccaacccatggaatggatcattcctctccaccaaggggatttcaaagaaacctaaaaaactagttcaggccataattggaaggatggggtgggtcctgcctcattacaccctccaccccttggaaatgaggcacaactgaccagcgttaacattacaaaggacttttttttttttttgagacggaatcttgttctgttgcccaggctggagtgggagtgcagtggtgcgatcttggctcactgcaatctctgcctcctgggttcaagcgattcccctgcttcagcctcccgagtagcctcagctgtacacaggtgcacaccaccacacccaggtaattttttttgtttttgagacagactttcactcttgttgcccaggctggagtgcaatggtgcggtatcagctcactgcaaccttcacctcctgggttccagcgattctcctgccttaacctcctgcgtagctgggattacaggcatgcgccaccacgcctgactgattttttgtatttttagtagagacggagtttctccctgtcagtcacgctggtctcgaactcccgacctcaggtgatctgcccgcctcagcctcccaaagtgctaggattacaggcgtgagccactgctcttggcctaatttttgtatttttagtagagatggggttttgccatgccgaccaggctggtctcaacctcctgacctcaagtgataagaccaccttggcctcctaaagtgctggaattacatgcgtaagccaccatgccaggccacctttgcaggtcttttcctgatcctgagggtctaggaatttttaacggtctgaataaacaatatttgcgaaaacatttgccatctattacctgtaagggtggtcatctatgagacttcctctacataataagaaccttggtcttcacaacctgttttttgtttgtttgtttgtttgtttgttttgagacagggtgtggctctcttgcccaagctggagttcaatggcacgaacttggctcactgcaacctctccctcctgggcttaagcaatccacccacctcagcctcccttgtagctgggattacaggcctccgccaccacatccggtacaggtatgtttggtacagacagggtctcaccatgttgcccacgctgctctccaactcctgacctcaagcaattcgcccacctcggcatcccaaagtgttgggattacaggtgtgagtcaccgtgctcgtgcccacaaccccttatcttcacccagacactctttttattgattccaggtctgtataactcaactcttttttttcttttttttgttttcttttttttttttttttgagacggagtcacagctctgtcgcccaggctgcagtgcaagtggcacgatctcggctcactgcaaccgcagcctcccgggttcacgctattcttccgcctcagcctccccaggagctgggactacaggcacgtgccaccttgcccagctaattttttgtatcttagtagagatgatgggttttcaccatgttggccaggctggtctcggactcctgaccgcaggcagtccgcccacctcagcctcccaaagtgctaggattacaggcgtgagccaccgcgcccaaccagaactcaactcttttaaccaattgccaatcagaaagtatctgaatccacctatgacctctaagtatttcaccctttgagttgtcctgcctttccacacggaaccaacctatgtcttacatgcattgactgatgtcttatgtctctctaaaatgtataaaaccaagcaagctgtaacccaagcaccttgggccaagttctcaggaccttttgagactgtgcctccctccatgcacactcatatttggctcagaataaccttctaaatactttagagtttgactcttctcgacaaggacaagagaagtggaataaacgaataaccgcagttttcctggtggtattggtcactgggttcaggttttggagtagtagccagtcaagcctggaatccccttcctcattcgctttagctttttgtccagtcttggtttgcaagagacttgcagcggcctagacggatggccgggattcacaaaggtcgcagacacgggaactgcttcttccccagcgtcgcctccacaccctcgcgtggatactgacatccgccccattccaggaatgcgcacagctaggcgcagccggccagcgtgggccgggggcggcggggccacctcccccacctccgcgcgcaaggcccgtcgcccttgacaacgcgatccaaggtcacggaggtcccacccccaggcccgaccgtccacgagacgggtagtaccccgccacgcgcccgagcaggcagctgcccggacagcccggcgcccgccgtgacgtcaccgccccgcgcccgaggaagccccgccccgcgcagccccgtcccgccccttcccatcgtgtacggtcccgcgtggctgcgcgcggcgctctgggagtacgacatggcgcgcgagctgcgggcgctgctgctgtggggccgccgcctgcggcctttgctgcgggcgccggcgctggcggccgtgccgggaggtgagggcgtcctggctggacgggcagcgggcgggccgggccacggagacggcagggacgtccctgtgctccggggagcgaggcgccggcacctgcttcacaggcgtgggaggtccggcgaggccaagcgcggcagacgcgtttactttcgctccgctcctcgccagctccagcttggctgccttttcctcggctggactcccctcgccacccgcccatgggagccctgaaggaggctgggtcttggggggtcgcggggtcgggcggagcggctgcggggtcgtccctcctggagcttcggtccagtcaggtagcgcacgtgcaggtggagccgctgcggagcgcggagtctttgcgggtgcatgttgcggggaatggactcactcggggtgatcgtgctagttccatggatcgtgctttacccctccccgcctcccagtagcgcactgagggttcatttgttaattcgttcattggacgcacatgtgagcgcccgctcagtgcccggcgccgtgcaggttctggggacgccacagtgaacaaaacctatagcagtcatccgggtccccagagcaggtggactcgatgtcgttgacgcagctgtgtcctcggggcctggaattgatggatgcgccaataaatgtttgtaaaacagagagaacgaccctaacctctgctttcccagtccccactcggaggtaacaacagtgaaagtttcggcattgcttcggggctgtacacagtgttatacgtgtaaatataaatgtctgcgtataagtattttttattctaaaaagcctaaaccatgtatgcattgtgctacgttgtacttcagaaaattttaacgctcccagcattctttccacatcttttcatgtcagtgtatacaggtccatgtgccttcca

SEQ ID NO: 3662 - DNA, 6000 bp, Homo sapiens
caaagagttagcaaagctttcttcccctggcttctggcttcccaggtatggttccctttttttttttttttttttgagacagagtctccctctgtcgcccacgctggagtgtgcagtggcatgatctcagctcactgcaacctctgcctcccaggttcaagcaattgccctgcctcaggctcccacgtagctaggattacaggtgtgcgccaccatgcccggctaattttttgtatttttggtggagacggggtttcaccatgttggccaggctggtctcaaactcctgacctcaggttatccgccctcctcagcctcccaaagtgctgggattacaggcatgagccatggcgcctggcctcaggcatggctcctattggctgcctcctcttcctcaccactccttaaatatctaccatctggcttgcatcagggacacactcaaaggccatcaatgacctgcttctttagtgcatcgcccctgatcttcctgtagaatttgactccactccctaactcaggctaaaatctctccttgcttgactgttatgggagatttttttttctttcttttcttttttttttttgagacacggtctcactccgtagcccagactgcagtgcagtggcgcaatcttggctcactgcaacctctgcctcccaggttcaaacgatcctcctgcctcagcctcccaagtagctgggattatgcacgccaccacgcttggctaatttttgtatttttagtagagactgggtttcaccatgttggccagattggcctcaaactcctgacttcaggtgatccacctgcttcagcctcccaaagtgctgggattacaggtgtgagccactgcacccagcctgggagataatttttgttctctccctatttctctaatcatgtttgtcctgtctcctttgcctgtcttccaaaggtcagcaatctggcagaggctgagggagtggagcctcctgggccagctgcttcagcttctccctgtcctgcctaggcagcctctcccacttacctcaccacctggaccccagaggaatttgacgttttgatcaatatctaagttcaaaatctttcctaggctcaagtcctgcatttaaaaaaaaaagtatttttttaaatttctgcattttattttcatgattttagcatttattatggactactttaaaaatacaaaaagaggccaggcgcagtggctcacgcctataatcctagcactttgggaggccgaggcgggcgaatcacttgaggtcaggagttcgagaccagcctggccaacatactgaaaccccgtctctactaaaaatacaaaaattagccaggcctggaggcacgcacctgtaatcccagctactagggaggctgaggcaagagaatggcttgaacctgggagacggaggttgcagtgagctgaaattttgccaccacactccagcctgggtgacagagtgagaccctgtttaaaaaaaaaaaaaaaaaaggtatgagcagttgtataatatgctctatctgcctcctgggtggatacaaataaaataggtagggtctgaatagacagacataaacagaggctctatttggaaagacagaagactgacagtggctgggcactgtggcttacacatgtaatctcagtactttgggaggctgaggcaggaagatcacttgagcccaggagttcaagaccagcctgggcaacatgatgaaatctcatctctacaaaaaatacaaaaattagctgggcatggtggcatgtgcgtagtcctagctactcaggaggctgaggtgggaggatcgcttaagcccagaaggtggaggctgcagtgagccctgatggtgccactgcactccagcctgggcaatagagcaacaccctgtcttaaaaaaaaaaaaaaaaaaaaaggctgggtgcggtggcttgcacctgtaatcccagcactttgggaggccgaggcgggtcgatcacgaggtgaggggattgagaccattctgcccaacatggtgaaaccctgtctctactaaaaatacaaatattagctgggcatggtggcgcatgcctgtaatcccggatcatgaggtcaggagatcgagaccatcctggctaagatggtgaaaccccatctctactaaaaatacaaaaacaaaattagccagacatggtggtgggtgcctgtagtcccagctactctggaggctgaggcaggagaatggcatgaacctgggagtcggagcttgcagtgagctgagatagcgcccctgcactccagcctgggtgacagagcaagattctgtctcaaaaaaaaaaaaaaaaaaccaaaaaaaaagaggaagactgacagtaattactgcctctggcaagagagaggaaatccagggtaggaaaaagacttacttttcattgaaaaatctttggcactgtttgaatacttattttttaataatatgaattttaaaaacaagaattatcagtggctgggcgcggtggctcacacctgtaatctcagcactttgggaggccaaggcaggtggatcacgaggtcaggagactgagaccattctgcccaatatggtgaaatcctgtctgtactaaaaatacaaatatttgctgggcatgatggcgcatgcctgtaatcccagctattccggaagctgaggcaggagaatcacttgaacccgggaggcagaggttgcagatcgcactactgtaccccagcctggcaacagagggagactccatctcaaaacaaacaaacaaacaaacaaacaaataaataaaaaatcatccaggctaggtggctcatgcctgtaatcccagcagtttgagaggccaaggccggtgggtcacctgaggtcaggagttcgaaaccagcctgaccaacacggtgaaaccccgtctctaccaaaaatacaaaaactagccaggcgtggtggcatgcacctgtcatcccagctactcaggaggctgaggccagagaatcgcttgaacctgggaggtggaggttgcagtgagccgagatcgcgccattgcactccagcctgggcaataacagtgaaactccagctcaaaaaaaaaaaaaaaaagaataagtttttaaaggttggggtgcttggaggatgaaataaagtagaagggatggcaggtttccttggcacactccttgggccttaagaaagtgtaaagaataagaaaaatacaacaaaaggaaaacaacaaatatcaatgtatccaccactcagcttaataaagaaaatataataaacacaggtgaagccttttttgtgctccccttcttccccaccacttacctcagagataatcactatactgaattaggagtttgccatttcctcaaattttaattgagtcctgcatttttgacaaacatctggacgtctctatatgggtatttcactcagtatggttaaaagcaaattcaagctgggcttagtggctcacacctgtaatcccagcgctttgggaggccgaggtgggtggatcacttgaccccaagtgtttgagagcaacctgggcaacacggcaaaaacccatctctacaaaaaatacaaaacttaccaggcgtgctggcgcatgtctgtagtcccagctacttggaaggctgaggtgggcagatcacctgaacccaggaggtggaggctgcagtgagctgtgattgtgtcactgcactcagcctgggagacagagtgagactctgtcaaaaaaaaaaaaaaaggcaaattcaagtgatccatttatgtaaacagaaaaatgcactatataaatgtatctatctagaattcagggatcggtgaaacaaaagacatcgcatcggcaggtctgtttgcaacttctgggatacaccaggtgttagcggtgatgacttctggatgcttggactgtggatttttaaaatggttttatctgctcatctgtatttctaaattttcaacaatggaacatagattattgtattattattataataccccaaacctatcttcctctcagccctctttccacgagctcttaccctaaatgtctctttttctgtcagtggcattgtgcgtcttccttagtgcatcacctctgatcttcctgtagaattttttttttttttgagatagagtcttgctttgtcacccaggctggagcgcagtggcctgatcttggcttactgcaaactccgcctcctgggttcaagcacgtctccctgcctcagcctcctgagtagctgggatcataggtgcctgccaccatgcctgactaatttttgtatttttagtagagacggggtttcaccatgttggccaggctgttctggaactcctgacctcaagtgatccacctgcctcggcctcccaaagtgctgggattacaggagagcgccacggcgcccagcttacaccagactactttttaaaatgtttttgtaaagtcagggtttcgccatgttgcccaggctgattttgaactcctgggctcaagcaatccttttgccttttgactcccaaagtcctgggattacaggtgtgaacccctgcagctggcctcaatgttaagatcttaaggggcacagcacagaccttgtcttgtctatctccctggcacctctcacagagtacagcttattaacagatgttccagaaactgttactgaacattcggcttgatgctgtgggcttgtctgcatcttgcaactgtcacctggctgagaaatttcttctataaataagcagtttctgtttcagatgtgatatgccctgatatttacaccctgtctcttaccccatccaagactcaaacttagaaacttgaattagatgtggtattcaaatccttagctgccgcgaagacacagacagcccccgtaagaacccacgaagcaggcgaagttcattgttctcaacattctagctgctcttgctgcatttgctctggaattcttgtagagatattacttgtccttccaggctgttctttctgtagctcccttgttttctttttgtgatcatgttgcagatggctgggcagtgctcccaaaatgaatattttgacagtttgttgcatgcttgcataccttgtcaacttcgatgttcttctaatactcctcctctaacatgtcagcgttattgtaatgcaagtaagtaatattgcttgaacgattattcattggtgtgaactattctgtctatatggactgcttattcagagaatcaacataatgggcatgatggtgagttttcttgaatcaaaaagagaaaggaagcaaggcagtgattttaatgtttatggaaacaaagtaattatttggaactgaacttgatatgattcagcactattagcaacatagattttttttaaaaatcagctcttctaattaagtgatatttagaatttaaaagtcaatgttcattaattaaggtgattgaatggaaataatccatacttgattattttgctatcaaaacaatccataattcattattttagcaaaataatcaagtatgacagccgggtgcggtggatggctcacacctgtaatcccagcactttgggaggccgaggtgggtgaatcacctgaggtcggcagtttgaggccagcctggccaacctggtgaaaccctgtctctactaaaaatacaaaaaattagctgggcatggtggcacaggtctgtaatcccagctactcgggaggctgaggcaggagaattgtttgaacttgggaggtggaggttgcagtgagccgagatcgcgccactgcactctagcctgggcaacagagcaagactttgtctcaaaataaataaataaataataacaataaagtatgtgaatattatgttatcagctcattatctgtctgatgttcttttcataaaggtgtgaccaattcagtgaaaggaacgaatgcgattctctggacctgtttgggactgagcttaataatttctttggcagttttcgtgctaatgtttttgctaag

SEQ ID NO: 3663 - DNA, 6000 bp, Homo sapiens
ccagcctgagcgacagagcaagactacatctcagaaaaaataaaacaaaaacaaaaaaaacttccatactgtcctacctcccttccctgctccctccctccttctctttgtctctaatattttcagaatcagtatgaactcattttcttttcttttttttttttttccaagacaaattctcactcttttgccgaggctggagtgcagtggcatgatctcagctcattgcaacctctgcctcccaggttcaagcgattctcctgcctcagcctcccgagtagctgggactaccggcgcccatcaccacacctggctaattttttggtaatttttagtagaaacggagtttcaccatgttggtcaggctggtctcgaactcctgacctcaggtgatcctcccgtctcggcctcccaaagtgctgggattacaggcatgagccactgcgcccagcctctttttttcttttaattaaaacaattaaatagagatggggttctctgtctgttgcccaggttggtcttcaactcctgggctcaagcaatcctcctgtctcgggctcccgaagtgctgggattacaggagtgagtcaccacgcccagcctaagtattgctcttctgtgatgatttgcaggcaacaatcacctcttgttcatattttcattatctttccctccaccccgagcctatagtctgtcttggtcagaccccatttcttgagtgcaccaggctggagtttggacccatccacatcctcgcagctctcctgagttggggcccaacatctggcttggggaacagacagctttgccgacagcagtaacaatttggttgaaatgataactttgtcaaaaatgaattttgccttagtgtttttttaaaggttgagaatcttgtacattcttacaacatttctattttctacagttaaaaaactgtaggctgggtgcagtgactcactcctgtaatcccagcactttgggaggccaaggtgggtggattgcttgagtccaagggttcgagaccagctaggcaacatagcaaaatattagctaggtgtggtagctactcgggaggttgaggcaggagaattgcttgaacccaggaggcagaggttgcagtgagccaagatcatgccactgcactccagcctgggcaagagagctagattgtctcaaaaaaaaaaaaaagtaagttccaattactttgcagccaattattcttgctcttctatttgcaatagcagaagattgaaatagcctcctagatgtctgacagtggaatgggttcttttctttttcttttttggtagagatgagggtctcactatgtggccaggcaagccttgaactcctggcctcaagtgatcctcccgcctctggaggcaggaggtagggtacagtcccagactcaaagcactgggattacaggagtgaaccactgcgtgagcctggtttcttttctttcccctccctcccttccttccttccttccttccatccgtccttccttccttccctccttctctcctctttcactctacctctttcttttcttcttttttctggcttgttaaaacagaaatacataataattatagtgaaataaactagggtatttactgcagcagttagtaataatgaaatgttggaaaacaatctaatgttcatccgtagggaatatttaaaatatagtgtatttctgccgggcgcggtggctcacgcctgtaatcccagcactttgggaggccgaggcaggtggatcatgaggtcaggagatcgagaccacggtgaaaccctgtctctactaaaaatacaaaaaagttagccgggcttcgtggcgggcgcctgtagtcccagctactcgggaggctgaggcaggagaatggcttgaacccgggaggcggagcttgcagtgagcagaaatcgcgccactgcactccagcctgggcgacactgtgagactccatctcaaaaaaataaattaattaaaaataaataaataaataaaatatagtgtatttctggccgggcgcggtggctcactcatgtaatcccggcactttgggatgctgaggctggcagatcacaagatcaggagatcaagaccatcctggctaacgcggtgaaaccctgtctctattaaaaatacagaaattagctgggcatagtggcatgtgcctgtagtcccagctacttgtgaggctgagacaggagaatcgcttgaacctgggaggtggaggttgcagtgagctgagatcgagacactacgctccagcctgggtgacagagcaagactccgtctcaaaaaaaaaaaaaattatagtgtatgccatggaatattatgcaactgttatatatgtgtgtgtgttcccaaagcattgttcagtaacaaaggaaaagtgcaaaacactaaaatggatgaatacatgcttgtgtaaacacagacactgtcaggaatgtttgtctggaggtgatgggtatggagcctttttgtctgatatattgggtgtatcaagaatgccaggtcctgagcagttttttttttttttttttgagttggagtctcactctgttgcccaggctggagtgcagtggcacaatctctgctcactgcaacctccacctcctgggttgaagcgattctcgtgcctcagcctcccgagtagctgggattgtaggcgcccgccaccatgcccagctaattttttgtgtttttagtagagacggggtttcaccatgttggccaagctggtctcgaactcctgacctcaggtgatctgcctgcctcggccttccaaagtgctgggcttacaggcatgggccaccgtgcccagccgtttatatgtattaactcttaatcatcaaaacaaactatgtggtattaccataattatcgccatttatacaaagcaacagagggataaggagattaaggcacttgcccaagtgcaagaggtaggacaggaacccagagtcccgtgctggtagctgcttttctgtgcacttaacattatctcatttaattcttgcagtcacttcatgaagaaggtggcggtcctagggcattggagaagttatgtgcttgttcaaggtcatgcagctggaagatggtggtggtaggacaggaagtctgtagggcctgattctgcagccctctagtctatactcctttgctcctgtgtccctcatcccccctgcagaatgggcaccccgttacctttctgagccactgtgcgcagaaaagagagcatgttggccaggctggtctcgaactcctgacctcaagtgatcagcctgccttagcctcccaaagtcctgggattacaggcgtgaaccaccacgctcagcctctgaatactttgtactcaagccatttttcagtgctgtgtttgcagtgagcacacccgagggatgaagacacgtctccctgtgggaacctgggcttaccagggcccctagaggaggggaatctctcaagctcagagctctatggctgcggtgcaggcccactgtgtgcatggtgtcagtctgggcccttccatgttgcccccgtgggacttggggtaaggggaactgatgcaaacatcacgctgctgttgcttggtgtgagcaattaattcctgtggctctcacccaggagtctcatgtctttgggtcagacaaactcatcagcttgtagaaatggcacagtcccacgggcctgttagaatcttctattgtgcacatgttgctcttaaaatatacaaatcagttttgattttaaaaaattatttatttttttagtgataggagttttgctacgttgcccaggctggtttcaaactcttgggctcaggaggtcctcccactttggcctggactgccagcataatgtatcaccacacccgggactgattttcgtttttcaagaacaaaaaccaaaaacatacacaaaccgagagtcaaagcttgctaattagaggaaagtcaggaaatgggaaccattcaaagaagaaaatacccccacctcctactctcacctatccaaagacaattaggtgaatcccttagtagatatctttccagacggttttccatatagattcccatatctggccaggcgcggtggctcacacctgtaatcctagcgcttggggaggctgaggcggatggaccacctgaggtcaggagttcgagaccagcctgaccaacatggagaaacctcgtctctacgaaaaatacaaaattagccgggcacagtggtgcaagcctgtaatcccagctactcaggaggccgaggcaggagaattgcttgaacctaggaggcagacattgtgctgagccgagccaagatcatgccattgcactaaactccgccttaaaaaaaaaaaaaaagattcccacatctttactagtttgcagaaataagatcctagcatatgcagtgtgtaggaaccaccttggtttagccacgtctctgtgactgggggccactgtggtgacccccagctccccggacagagtcaagagctcaccagcctgcaaaggttttcacggcccccagccagactcgggggcttcctcttgccctgctacttcctgggagctctgagggcaggaaatggcgccactcagctcctggcctaacagcttggggaccacaaatgcaaaggaaaccaccctcccctcccacctcctcctctgcacccttgagttctcaggctcacattcccaccacccacctctgagcccagccctccctagcatcaccacttccatcccattcctcagccaagagccaggaatcctgattccagatcccacgcttccctgcctccctcaggtgagccccagacccccaggcaccccgctggcccctgaaggagcaggtgatggtgctgtcttcgcccagcagctgtgggagcaggcgggtggggcaggatggaggggtgggtggggtgggtggagccagggcccacttcctttccccttggggccctgtccttcccagtcttgccccagcctcgggaggtggtggagtgacctggccccagtgctgcgtccttatcagccgagccggtaagagggtgagacttggtggggtaggggcctcagtgggcctgggaatgtgcctgtggcttgaaaagactctgacaggttatgatgggaagagattgggagccattgggctgcacagggtcagggaaggccaggaggggctggtcactgctggaatctaagctgctgaggctggagggagcctcaggatggggctgatgggggagctgccagcatctgttcctctgtcatttctgataacagtaaaagccagcatggaaaaaaccgttaaaccgcaggttgggcctggccgttggcagggaagtgggcagaggggaggcccggccaggtcctccggcaactcccgcgtgttctgcttctccggctgcccacctgcaggtcccagctcttgctcctgcctgtttgcctggaaatggccacgcttctccttctccttggggtgctggtggtaagcccagacgctctggggagcacaacagcagtgcagacacccacctccggagagcctttggtctctactagcgagcccctgagctcaaagatgtacaccacttcaataacaagtgaccctaaggccgacagcactggggaccagacctcagccctacctccctcaacttccatcaatgagggatcccctctttggacttccattggtgccagcactggttcccctttacctgagccaacaacctaccaggaagtttccatcaagatgtcatcagtgccccaggaaacccctcatgcaaccagtcatcctgctgttcccataacagcaaactctctaggatcccacaccgtgacaggtggaaccataacaacgaactctccagaaacctccagtaggaccagtggagcccctgttaccacggcagctagctctctggagacctccagaggcacctctggaccccctcttaccatggcaactgtctctctgga

SEQ ID NO: 3664 - DNA, 6000 bp, Homo sapiens
cctgttctctgggctccaacctcactggcttctttgctgttccctgagcataccaggcacattgctgaggacaccaggcacattgctgcttccagacctctgcactcgcctttcccctcctatgggaacactgttccctgagacagtggtgtggttggcttcttcatttccttccagtcttagttcaaatgccacctacatgaggtagtccttccctgaacaatctacctaaatagcagtttccagccactgcctgccttcctttgtattgtcttctctgcatgaactacctgatgcatggtcatttttcccctcccctagaatgtcagcttcttgagaacaggaaccacgctcactgcagtgtcctcagagtctacaaaggtgcctagcacatagtaggtgctcaatacatatttgttgaatgaaggaaggatccactttctttattaaagggggcagaaaatagaagttggggcagcttataagaatgagtcaccctttttctgacatcatttgtgtctccttggtaaaggaggaagattccctgggacatggaacaatccctaatgcatcaactgcccaaaatgggatccagatgtagcagaaagttccctttaataaagagctttctgtgtgtgttttaaaaatcaaacatagaaattatttgtcattgataccagcaaatagctcaaatgggagagcatggatttatagttcggctggattagtttaaagatgattaaagtaatcccctttatcttatcaaaaagagcttttaggtggtcagagtaaaagtcctcagacagaatgttcagttgcacttggaatttcccttccctaagagataagcacatctcagagatggaagacctcagcccgttatccatggatcaaaacactgtgctgggctactgtggagaaagcgcctgtgacgtatccttgcttgtgcggatacctggtccagttagccacttggcctggtgttcattctgaatgcccatattcacaggattagtgggaaaatggctggaaccatgggaggttggatggacatctgggagttgccatttactaagatggggagtgcagagggattgcagggggtggtggtggtgaatatcaggagttcgcttttggctgtgttgagtggagatgctgagaaggcagtaggatataaaagagacaccaaatttggagagactgcaagtaggaggtaccccgtggtaggcactgggaagcatggagcagggtctagtcaataatcatgaccggtgccactgagcaggttcccttgagtcctgacggtgtgttactctatgtcccatgcccctagcaggctacctggagttcaccgtcctccgtggggaaagctccattcaattcaatagctttatgttagggtcccgctgtgtgcaatgagagaactacataagacagcttagaatcagtgttaggtcaggcacagtggctcatgcctgtaatcccagcactttgggaggcaaaagcaggaggatcacttgaagccaggagttcaagaccagcctgggcaacatggtgagaccctcatctctactcaaaagagaaaagttagctgggcatggtggtgcgtacctgtagtctcagctgctcaggagactgaggtgggaggatcacttgagcccaggagacgggggctgcagtgagctatgattgtgccactgtactccagcctaggcaacagagtgagaccccatctcaaacaaaaaacaaaaaacaaaaaaagaaccagtgttatgttccctgcaaaacccttcacaacttcccattgctcttgggatggagaacaacccctgtccttggctcccaaggctcttttgtgccttcattgtctgcgctctgcctcttccagtttcttcaacaggtcatgcactttcctgtttcctatttctggagtgttccccctcactcctgcctgccagttatctttcccatctcatctcaaaggtgacttcctcaaacaggccttccctgagtggccaacctccctttaggcatgctcagagagattcttcttctgaggcttaccacagccataattaagtaagtgatcatctaatgagtattttagtttgcctttttttttttttttttttttgccagagggagtgtggcatctctcttgtacactgctatgtttcctggaacctgctcagtaacacaaccgctagttccatgaacccaggaccaggctggatggaagaggctgtggggtggtggattgagagaggtcattagtgagggctggagccctctgtgaagacatgtctgtaaaggactttgactaggtcctccatgaagggaggatttggaaggcagagatgatgagcatttcagttggggaatccattttaacagaggtggaaagagtcttggcttggaatcagggtctcggcccatctcctgagtgacaggggcttgtaatttactgtctttgggccttcatctactacctgtaaaatgagaggctggttcaccaaggactgcaaataatagcaccatgacactatctccccatcttatcccctggcagatatctctcttcccggtgagcctgaatataagttcagaattagctttaacgcaatgttctaagcagccattcccaattgataggaaatgataattgagataagccccatttgtcaggcttgacttggatgaagatcccttagatgaagtcaggccccggcactgattcagtgaacgtatgacaggacagagcctggggacgaaagccctatggaagtagagacctcagcagcaccaaacaccatcaacagaaaggacacaaaaataggccgggcacattggctcatgcctgtaatcccagcactttgggaggctgacgcaggcagatcacttgaggtcaggagtttgagaccagcctggtcaatatggtgaaaccttgtctctactaaaaatacaaaaattagctgggtgtggtggcaggcacctgtaatcccagctacttgggaggctgaggcaggagaattgcttgaacctgggaggcggaggttgcagtgagctgagatcgcaccattgcactccagcctaggcaacagagcaagactctgtctcaaaacaaagaaacaaacaaacaaacaccccagcaacaacaacaacaaaaacaaaaagaagggacatgaaaatattctagtccagagtggcaaactcagatgccttaagggaccagtggatgtagatcgtgcagataagagaagtggtcccagtggtaacatgagaatgtttgccttgcctaaaaggaccccaaatctctctccttcacattcttttctccttcctccttatcgtatgggttaggcaaaaacaaatttcagctgaaattttcttccagacagttggactgtgacctctgagtcctaccagctttgttggagaatccagatgtagatgagaacggtgttgcctaaggccacacttcaagccaggcccgttgatttccaacttatggcttcctacagcagtgtggtcatgaagcctggaaaacaggaagataggagtgacaaaagagggacaggagtagaatgaggcttaggttttcaaaagatgctcatttcattttggatgactatggcaaggaagagtggtggcctgtctactgctactgttagtcatcactcatgtgactgtttttatgtattcattggtttaaattccctggatctccagaaacatgtcactttccactgggggaaatttgtgtcatgattaaaaacacacacacacacacacacacacacacacacacccctcctcctttctcagtgttaatcaccttctcctataattagcacttaaaatgtcaaaggagaagaaattaattaacaggagtatccagtgcagcaaggctctaggactgattataaaaagcacttccttaaatattttgagtgcttttgggaatcagaagcctcccttctaattgaaagatccttaactacaccctaagtcctggctggtggccaggggtgcggggctgagtgaggcggcgtgtggaaatcccttcttcaccatccttgggaaaattccctccaaactgggataggtggcaacagaggttcggaaacagcaagcgtcccaggctgaatctgcggaggaggaagagatgaacctttcctgagctggtactgcgtgccaggaactttagctcggtattttgccacaatcctgtaagacaaccgatactatgatctccattttacagatgaggacattgaggctcagcgtggttgtgacttcctcaggtcacgcagccactgaatgaaagcgccaaagattcaaactgaggtctgattctaaagctttgctctctcacggcatcctggaatcctatttcaaccttcatctggactcttaacccagcccaaacctaagcgtctacagttttgacagctgaggcgggagcacgggaggcggagctggtggcagcgcagcgccccgccccggctccagcatcagccaatggtgacgcggcacccacagcctttcgcccaatcagcttgagcttcccgcctccatccgccgctcttctctgccccgccccttcgctttccctttggttccaccgagcttgacagagcggaaagtcccttcggccggcgccgggctggcagccattggaggaaggtctgtcacagggaggcccaatcacggcccgctcaggagcgcagctcggcctacgattggctagcgcggcggctgccccctccgcccccgctccctccctcttccctgtgcggttcggaggcggggcaggtgggggcgggcccaggtagcaggtttggctgcgcgggggccgcgcgtcggaggtaaatactagggcggtgggtgtggggagccggggccggcccgggacgcgggctggggagccggggcgaggggcgacgccccgccgcccgaggttagtgaatgagcgggcggctggcggccggcgggcggccggatcccctcggcgcagccgcctggcctcagggcgtccggagccgccgcggcgaccatcgggccctcggcgccggcccgttagttgcccgggcccgagccggccgggcccgcgggttgccgagcccgctgacgtcagcccgggtttcccccccccaccggggcttccccatcccccgaggcttcccgggagggctgcgagtccggggagcgtgcggggtcgccaccatcgggacccccagaggagagaggacttggggcgggagccgcgcgggacgctgtccccctcccgccccccaccccatttacagattgggagactgaggcacaggccgctggcgggccccgacggccacggttggcctcaggagcccggggctgtgattcctaccgaccgcgccgcggggcgtacgtaccgatcgattttgcgggtgttggtggctcccgtccaggaatggcagtcggggttctggccttgttaatggcgtgttctgctttttctttcagtttccccctttctagggtgaggatggttctacacagccacccggagttccttagttgaaaggtgcgccctgctgtgacaggtattctttctttatgtttttctttcatgttaacaatcgaggggggtggggggcgaatggggggcgggggcgaagtcatgaaatcttcaggagatggtgttgagtttggtactcagctgggtcagctgccggttattcatgtacttggcatcgtttctcttccaccccttggcatttgaatgttttaggatagttgtcatcttccagccaccaagcctgtggccttgcagtctcccagcccccatcatccctgccaccttcttctcctcaatttttcctggaaagttttatccttagctcagctaaggagcatgcctaccttgcttttgaattcgggctaattagggatcttaataagattgttcattttgcaatcattggctctcagagaagcacccaggccttgagagggtgt

SEQ ID NO: 3665 - DNA, 6000 bp, Homo sapiens
agcgtccttaaaggaaaggccttctgttcaacatggctttagggttaaacatattattgtgtttcaactcgttggtaattttcattcagtatttattaccaagatattcataatcacacagttatccagcctgaagtaagatagtatttagatgagtcatttgtgatatactcactcaaagtgattcaacctgcaaaataataagagaatacaagtgaaaatttctcccttcacactgacccctcacccccacctgccctacggtgactttgaatttagctgtgcttctttttccttcagttgtcttactgttccctaggcctttacttaaaggcagaagctgagtgaatgtggattgatgttgggtttttttttgtgtgtgttctctctttcctctttgtttttttttttttttttttttttgagaccaggtcttgctctgtcacccaggctggagtacagtggtgtgatcatagctctcttcagcctggacctcctgggctctagcgatcttcccatcctccagagtagctgggaccctgagtagctgggcccacaggcagacaccaccacacccggctaattttcttttctttttttttcttccttttgggacaggctctcattctgtcacccaggcaggagtgcggtagtgctatcacagctcactaaagccttgaactccagggcttaggggatcctcccacttcagcctccaaagtgctgggattacaggagtgagccactgtgcctagcctagatgatgtagttttcagtatctaactctgtactgaaagcgtaaaaaataccaaactaacaaaccaaccttcttgatgataaataactcatttacaatgtgatttagatctttcccttcatattgtgttgagtcagtttttactgcttggggtacctaagactttaactatttaactactatgcacatcccagtgaaagtagactgttggtgttatattcacttctacagtggggagaaatgtatgttagcatatttttattgcaatactggtattttgagtacataaaataaatatatatatataatggagtgtgtatatatgtgagagagtgtgtgacagggtcttgctttttcacccaggctgaagtgcggtggcgtgatcatggcttgctgcagtccctccctccagggctcaagccatcctcccacctcagcctcacaagtagctgggactacaggcacatgccatcacacctggctaacttttgtactttttgtagaaatgaggtttcactgtgttgcacaggctggtctcaaactcctgggctcaagctgtccactcaccttggcttcccaaagtgttgggattacaggcgtgagtcactgtgcctggccgagaatattagtgatcattcagttgattgccttgtatatctctagactcgagccgtaaagtttcccattcaactttctctatcagttgcagtgaagagaatcaatttttaataagagagtttcaaacttgttcttaatatattctttctgaaagaggaaaggctgtatcctttatttttggataatgcttttgaaatatttgataacttgtgcttgactattttagttgtctaacatgacccatcctattgctaagtctaagctcatttccacttgtgctaatgaaagttaggaaaaaagttaccactccttgtagagttcactttaaaatatggtacttgaaagctatagtttattaccctaaaacatttttataaacctagcagttatatcaatttttactgtggattctcttccttaaattatttcagaaagcaagcttataatcaaatttatttaacataatgtcctaatgcacatatagtaatttagttttgtcttaataatagattattagcattaatgatttttattttaaattgtgacatgaatagttaagctacaggaccaatagagtaggagctgttggtataaagcaattattaagattcagggaagtttctgattgtaatatttgaagacattgttcttaggaattttaaaaaagaatttcttttcaaaatagaattactttacctttttcaaaaaaattttggccctaaaaatctaaatacattttaaagagaaccaaaacaacagctcgtttttttgaaagttgctttttgactgtcttaaccttctgctagtgaccagactctctattcaataaagcctatgtgccctttgctcctaaagaccctttcagaatgtatgcattcctcttttcacgattgttgctttgtgttttcaaacacacaaacatatttcactacctggcttctcagaactgattcgaagcgataagttggaaagcaacaaggccgtaaaaggagtcaaatgcatacagcaggaaaccacagaaaatggctgattgcaagggaaaactctagacagtagatctgtagaaagcattcgcgacctcaggaagcataagatacagccttttaacaaaataacagccttgcagatcaagagttatgcaaaataatttacagtcataatgatacatcaatgatcaagaaaaaaataaggacattttcttgtggaaagtgttgacatgttaaaagcattttggtcaaaaagaaccaacacttcagtttggtcctttaaaggaatccaaccaaattgaggggttggatagctgtttgggcagcccttataaggagttttgtttatattgtgtcaagatagaggtttccacaggtgtcttatataagtggcaaatataaattgatcccattcttgctgaagtagacagtgccctcaagtggaattaaaacaaacacaccacaaaaaagaagaaaagagaaccacttcatgctacctctgcttttaccctcactgagtgttacacagatatttcagtcatgttggtttgaaggaggtgcctaacctgtatcctgtcttggctaaaccacatgtctcatgctggcttgtagagggagagacttttaggaacgttaccattatggaatacttcattatctagcagtgctttctaaaagaagtgttccactgtgtatagatttgccaggttgtttgatcattaagtgattaaatctaaaatttggttctttaggagtatttattttttaattgctagaataaaataaatatgatagtgctatcaattgcagccattacccagaataatggaaatggatacctctatctcaaggaaggatgaaatgaaagtactgtctttggaaaccagatagccacattcttatgacagggatacctaggaagtattgttttcagcagaaaattaattaaaataatgaagtaaagtctcagtttaaattaatgaaattgtgtagttttttaaccatcagttaaaataggtttgagaatgagcctacttcattggaaagattattattcttgtaaaaattttaaatgaggaccaggtgcagttgctcatgcctgtaatcctagaaccttggaaggccaaggtgggaggatcatttgagtccaggagtttgaaactgcagtgagctatgatcgcaccaatgtacccaagcctgggtgacagagcgagaccctgtcttaaaaataaataaataaaataaaaataaatgaaaatttgaaaaagaaataatagaaagaaattataatgcagttatatcatgatattcccttgctatgtagtacaagttttgatgctacaaaattgatttttaaaatatttttaatatagtcatattataatatctgatatttgcgatttgagaaatcagataactatgattaatgtgatgaacattgcccatcttcagaaaaaatatatgaaatgaagttgagtcagaggtaaaatgttccattatcacaatatggccatatcatagctatcatttataggcatgagccacacagctcagcccgaaacgctacttttaaaagtttattagtgtcagaatatgggacaggcctggtggcttacgactgtaatcccagtgcgttgggaggccaagacaggaggattgtttgagcccaggagttcaagaccagcttaggcaacatagtgagaccctgtctctacaaaaaatagaaagcttagctgtgtgtggtgatatgcgtctataataccagttactcgggaggctgaggtaggaggatcacttgagcctggaaggtcttggccacagtgaactgtgattgtgccactgcagtccagcatgggcaacaagagtgagaccctgtctcaaaacaaataaataaaaataaattaaaaaaagttagaatatgtatataagggtaatctttaaaagtttttactagaatctgattttataaatttcagtgtcttggaagcaaacattgtgttgtctttgaaagtactttacaattggatttcattaattaaatatgcacagttacagtagataaaagtaatacagtatgtatgtcttttagcccttttagatattttttgaaaatatttcatttgtgtgtatgtgtttactggtcaaatgaaaattttaaaagtcttcagtcttaattttcagtcatgtagaatgaagtctaaagtttatttttgctttttcactaggcattttgatttcctttctttttacagcatggacaccacgttgctgaaaacatgctttgggactgccactgaatttatcttttgcggttttatgacaaagttattagtagtttcccttttttgaattagtattttgaagttaatatcacaatgagttcaggcttatggagccaagaaaaagtcacttcaccctactgggaagagcggattttttacttgcttcttcaagaatgcagcgttacagacaaacaaacacaaaagctccttaaagtaccgaagggaagtataggacagtatattcaagatcgttctgtggggcattcaaggattccttctgcaaaaggcaagaaaaatcagattggattaaaaattctagagcaacctcatgcagttctctttgttgatgaaaaggatgttgtagagataaatgaaaagttcacagagttacttttggcaattaccaattgtgaggagaggttcagcctgtttaaaaacagaaacagactaagtaaaggcctccaaatagacgtgggctgtcctgtgaaagtacagctgagatctggggaagaaaaatttcctggagttgtacgcttcagaggacccctgttagcagagaggacagtctccggaatattctttggagttgaattgctggtaagtttgataaaccattttagtagtgtgtttgtttgtgttcatgtgtgtctgtgtatttgtatgcacatacatatttttctccttaaatacgaaataaattttcccaagagtcttctgtaatttttaatattcatcatccttgctgatgaatccatgttgtggttgaatccataatccaaaacttgcttatagttgtcactgataatatgtgtgaaaatcaccttggcgtttatttctgttggaaagagacccaagaactctgtgatatgtttccaagcttaatattcattcttgagaacttaaatgtcaattatattttgacattcttgcaaatagaattgtatgccttctttgcttcttgatttaatttcttttgtttactttttaatgatgaattgcgaagatgtaaagatgatgtcgaaacttaaaaaactatgtactatggtaggaacatacaaagagattcacctggctattgcagacatatatattttagaaattttaacattgcctgtattaaacatgaacgctaccagttgtaaatagttacataaaaaattgttaattaccttgcgttatcatctataggtttcttagttcttcttaatgtatgttattaaataacaatttagatataagatttttgaaaaaaaagttgcagaaatttaaacttgcttataattgtccccgataatatatgtgaaaatccttagaatttatttctaccggaaggagacccaagaatgctgtgatatgt

SEQ ID NO: 3666 - DNA, 6000 bp, Homo sapiens
ccttagtcccggcaaactgggatggtcactgtccactctcaggctgctactatcaccatattcagtagtcactgccagactgggaaggctaggccatatttattcattcaacaaacttttgctgaccctggaaatacaatgcctgcaaagcatacacagtccctacccttacagactacgtgaaattctttatttgcatttaagtgatttttttttgagacggagtttcactcttgtcacccaggctaaagtgcaattgcacgatctcagatcactgcgacctctgcctcctgggatcaggcgattctcctgcctcagcctcccaagtagctgggatctcggctcactgcaacctccgcctcttgggttcaagctattctcctgcctcagtctcctgagtaagggggattacagacatgcgtcaccacacccggataatttttgtatttttagtagagacggggtttcaccatgttggccaggctggtctcaaactcctgacctcaagtgatctgcacgcttcagcctcccaaaatgctgggattacaggcgtgaccaccaggcatggccttgcatttaagtgatactaatcaagctggatatccaaaaagaaaaacaaaaaagaaaatgacaaagcctttttttcctttagtatcttggttgaaaatgtgaaaagtaagaaaagtgtaaaaaggcaggaataaaaaatattagcagatttcctttcagtatttttcctgcatgtttcccaagttacttcctatcagtgtcctaaaaaatgcaagttaattttaactttggccgcaaaccaagaacaaaaaggttaagtgtattgaattaatttttcaagccaaagttaaaggatctgaggatgatctgctgtctccaaggctccagtccctgtttttttcctttagcaggtgtgatcacacgctggctgagatgagtaatgactttccctctcctcagcacgcttgctgctgtacaatttttttctttttacaaattaaaatgctgcattcacctgataataaaaatcaagtagaggctgggtgcagtggctcacgcctgtaatcccagcactttgggaagctgaggcgggtgaatcacctgaggttgggagttcgacaccagcctgaccaacatggtgaaaccccgtctcttccaaaaatacaaaaattagcctggcatggtggtgggtgcctgtaatcccagctactcaggaggctgagacaggagaatcgcttgaacccgggaggcagaggttgcagtgggctgagatcacaccattgcgctccagcctgagtgatgagagtgaaactccatcttaaaaaaaaataggccgggcgcggtggcttatgcctgtaatcccagcactttgggaggccagggcgggtggatcacgagatcaagagtttgagaccagcctggccaacatggtgaaaccctgtctctactaaaaatgcaaaaattagccaggcatggtggtgcacgcctgtaatcccagctacttaggaggctgaggcaggagaatcacttgaacctgggagggagaggttgcagtgagccaagattgtgccactgtactccagcctgggtgacagagcgagactccgtctcaaaaaaaaaaaaaaaaaaaaaaaaaaaagtgaaaattgtgggcatttgcagtctttgctgccattaagtcttctggatttttctacaggttgactctaaaagttgaaatccagtcaaagatatttacattattatggccacatgaacgttgtttaccctcaggccaaacaatgggctggaattacacttgcttctccacacactccatcccataatccatgtgtcactcaaaggacaatgtggcaagcaagcactaaggccctaaattgatactgtatcaattaaatacaattatgttgtgttatagcttgtgtttcatttattttattttattttttatttttatttttctgagagatgaactctcactctgtcgcccaggctggagtgcagtggcacaatctcgcctcactgcgacctctgcctcccaggttcaagtgattctcctgcctcagcctctcgagtagctgggattacaggcgtgcgccaccatgcccggctaatttttgtatttttagtagagacagggtttcaccatgttggccaggctggtctcaaactcttgatctcgtgatccacctgccttggcctcccaaagtgctgggattacaggcatgagccactgcgcccggcctatttattttatttcaagcagttctcctgcctcagcttcccaagtagctggaacttcaggcgtgcaccaccatgcccagctaatttttgtattttttagtagagatggtgtttcactacatgttggccaggctggtctcgaactcctgacctcaggtgatccacccaccttggcctcccaaagtgctgggattacaggcatgagccactgtgcccggcctatttattttattttttatagagacagggtctcactctgctgccgaggcttcggttcaatggggtgatcatagctcactgcaacctcaaactcctgggatcaagtgatcctcctgacttagcctccacagtagctgggactacaggagcatgccatcgcacctggataatttttcttgtattttttgtagagatggaaaggggttctcactattttgcccaggctggtcttgaactcctggcctcaagagatcctctcgtctcaacctctcaaagctctagggttacaggcgtgagccatgatgccctgcccgtatttatttatttttattttattatttatttattatctttttttttttttgagacagggtcttcctctgcagcccaagctggagttcagtgcccagatcatagctcatggcaacctggaattcctgggctcaagcgatcctcctgcctcagtttccccagtagctgggactacaggtgcacaccatgatgcccagcctgttttgttgcttttttttttttttttttttttttttttgagatggagtcttgctctgtcgcccaggctggagtgcagtcatgcgatctcggctcattgcaacctccacctcccgggttcaagcaattctctgcctcagcctcccgagtagctgagattacaggtgcccgccaccgtgcccagctaatttttgtttttttagtagagacagggtttcaccatcttggccaggctagtcttgaactcctgaccttgtgatccaccgaccttggcctcccaaagtgctgggattacaggcgtgagccaccacaactggccccagctgtttcttatttacattgtgatttcagttttgaaaattttctggagattctaactgcttttctttctttgcatactcttttttttttttttttttttgacagggtcttactctgttgctcgtgttggaatgcagtggtgtgatcacagctcactgcagcctcaacctcccaggctcaggtgatcctcccatctcaacctcctgagtagctgggactacaggcatgcaccaccatgcccagctctatggatgctttttcttgactctctttaagtatattaggtagtactctttgtatcctgaattatctctgtttcctccaatgtcaaattttgtttgttaattttggtctttctttctttttttttttttttgagatagggtcttgctgtgttgcccaggctggagtgtggtggcgtgatctcagctctctgcaacctctgtctcctgggttcaagcaattctctgcctcagcttcccgagtagctgggaactacaggcgcctgccaccacgtccggctaatttttttgtatttttattagagacagggtttcaccatcttggccaggcaggtctcgatctcctgacctcgtgatccacccgcctcagcctcccaaagtgctgcgattacaggcgtgaaccatcgcgcccagccaattttggtccttccttccttccttccttccttccttccttccttccttccttccctccttccctccctccctccctccctcctttctttctttcttcctttctttctttctttttgagacaaggtctgttgcccaggctggagtgtagtggtgcaatcacagctcactgcagcctcaaactcctgggctcaaacaatcctcctacctcggcctcctgagtagctgggactacaggcgtgggctaattttttaaaacttttctgtagagatggggtcttgctcttgcccaggctgatcttgaactcctggcccccagccttggccttctgggattacaggcgtaagccacctgccggaccaattttggtgtttcttttgcatgctgctggtcctcctcagatgcttggcaatcattggtaatgatgggcttcagaacgtgctaccggcacagtgagtgttttaagctgaaggaatttgagaaaaccgcagaagccgaaggatctttcttaccttctcctgcccttcttccctgaaccaggtcatacaacctggaactccctgcccttttcctgaagaagcaaataacagcctcctgcgagaggcgccctccctgcacctgggggaaaggagggtccttatctctgaagacacagggacacagaagaatctgaaccaacaggccttcctgagttccccacctccccgcaggaggtgcccgcacacgcatagccccgtcgctcccgcggccgcacgcaacggacctcgccctggtggtgcacgcccgggctgggcgctcagaggtcgggtgggcgcccactccgttcgctgcgcgcacagcgcccggcgagaggctcggagtttgatcacacacagcgtccggcttcctgtccccagcgccccctcccgccccgtttcccttgcccctccctctccccggcccgatccgcccgccggctccccctcccccgatccctcgggtcccgggatgggggggcggtgaggcaggcacagccccccgcccccatggccgcccgtcggagccagaggcggagggggcgccggggggagccgggcaccgccctgctggtcccgctcgcgctgggcctgggcctggcgctggcctgcctcggcctcctgctggccgtggtcagtttggggagccgggcatcgctgtccgcccaggtgaggccccgctgcgcaccccttcttgggcacatcaggagctgagactgcagaggggccgctgggggccgcgtgggctgaaggcaaggggaagggaggatgggtggagggtgagatgtcaggtggagcggcacagggtgacgctccctccttcccagcaggagcctgcccaggaggagctggtggcagaggaggaccaggacccgtcggtgagtgggcgtgggcgcggtctgcaggctgctggggcatgggaagtgtgcacagccgaggctgcaggtgtgtgcagctgtgccagccgtactcgaggtgtgtgcagggtgtgtgtgaacacagtgcgtgcatgggtgcgtgtctgcaggggtgtgtgtgcgtggtgacaactctgtgtgaggggtttgtgctggggttgtgccacctgagtctgaggtgtttattggctgggggtgacgtggttgtataagatatgtgagtctgcgtggaagaggggtgcggttgtgtacagggtgtgtatcctctgtgcgtggtgactgggtgcgggcatgtgtgcaatgtgccaattgaatgcagggtctgcgttggttgtgtgtgtgggtgggaaagtgtagctggtctagaggaaagggtgaggactggggcctgactcccagcttcacctttgcccggggccccagctgtagttggctgaggggcttaatctgtccctgacttctgtgtctattgctggctggtggctctcctgacaggccccgtatgtctcactttatatctctgggagtctgtggttgaaccctgccctaattcccctaggaactgaatccccagacagaagaaagccaggatcctgcgcctttcctga

SEQ ID NO: 3667 - DNA, 6000 bp, Homo sapiens
ataccaggcaagccctccgtgctcctgggcacaccatgcccttaggctacaagcagcctttgcttaggctggcttcgtagctaggaatgccctctcttctctgccctccctactcttcatgcccagatcagccttcctcccctctgtatagaccacttattttggcaattatccagacattcattcattcattgactcaacaggcattgaagacctactgtttgctaggggccaggctaggtgcccacagcaactaatatccagactcttttttttttttttttttttttttgagatggagtctcactctgtcgcccaggctggagtgtagtggcgcgatctcggcttactgcaagctccgcctcctgggttcatgccattctcctgcctcagcctcccaagtagctgggactacaggcgcccgccaccacgcctggctaatttttttttattttttagtagagacggggtttcaccgtgttagccaggatggtctcgatctcctgacctcgtgatccacccaactcggcctcccaaagtgctgggattacaggcgtgagccaccgcgcccagccggtcagacccatttttttttttgagatggagttttgctcttgttgccccagctggagtgcagtggcgccatctcggctcactgcagccttctcgggttcaagtgattctcctgcctcagtctcccgagtagctgggactacaggcgcctgccaccacgcctggctaattttttttttatgttttagtagagacggggtttcaccgtgttagccaggagcgtctcgatctcctgacctcgtgatccacccaccttggcctcccaaggtgctgggattacaggcgtgagccactgtgcccagcctcagaccaactcttaaggagtcactgtctaggagaggaaacaagcatataaatttgtaattacaggaacatacaaaaaaaattagccaggtttggtggcacatgcctgtaatcccagctactcaggaggctgaagcatgagaatcacttgaacccgggaggcggaggctgcagtgagccgagattgtgccactgcactccagcctgggtgacaagagtgagactccatctcaaaaaaaaatttgtaattacagtggaatatgacaagaacaataataaaagtggccaagatacctggcaacacaggggaagacagacatggctgtggagtcagggattctctccctgcatcgcaaggtgccgctgggccttgaagcaggagcgtaagacaagacaggcaaggggtcaagaatggtgggtgcaagcagaagcagcccctggggcaaaagccccgggtttgcccagagcatgatgaggctgggggactctaagttcagcgtggcagaagcagaaagtgctagaggagcgagatggggatgaggctggagacagaagccaggccacacggtggcatgtgggaactattctgaggtgagccatcggaaggaggaaggcgaggcgaggcgggcttacgtctgcatcttagagactcattctgtggctttgtgtagggaataaactggaggaagccagaatggaaacagggaatgctgtgaaaaccagacagaggcaccagatgggggagagaggggagagagctatttaggaggcaggatagataggaactggtgatcgattaatgatgtaggtaaaggagagggaggcttgaatatccccctggtggcaaaaccagaagccaaatgtggaaaacagacagtaaagcaagagtgggatgaggggggtcagctcagtgttggttgagatgagtttgaggggctattgctgttcagatggtgcagttggcagggtaaggaagggaaggaaacttcagggctggagactctgcagagcacaggttgtgggaacccattggtggaaataaaaatgcccagtgagcgttttttttgtttttttttttttttggagacagagtctagctctgttgcccaggctggagtgcagtggcatgatcttggttcactgcaacctccccatcccaggttcaagtaattctcctgcctcagcctcccatgtagctaggattacaggtgcctgccaccatgccctgctagtttttgtatttttagtagagacggggtttcaccttgttggccaggctggtctcgaactcccgacctcaggtgatccgcccaccttggcctctcaaaatgccgggatgacaggcgtgagccactgcacctggctgagcatgatgttttcaaggcacatctgtgccatagtgtgtatcagtacttcactctttttatggccaaataatattccattatatggatagacattttgttgatggacaattgggtttcattttattatttttagttgtactaattcagataatgtatgtttacatcctccatataaaagaagcaaataatatagatatccatgaagtaaaacattaaatcccctcacgcttctccttcagttctactcttctccccagaagtgactgcaggtgacaatctgccctgaatgtctctggccatatacattagattttttcacataacttcctagtcaactatgggcatcataggggatgggtcctcccttgcccggggtgatctatgtgtcttctgggtaaagtgggcgccgaatgttcatatgctcaatggatccctggggagtgtgggggagtcctgtagagagacgtttccttatctctgagcatccgtgttcaggtgtggacgggacagtgagtggctgggaggaagccagaatcaacagctccagccctctgcgctacaaccgccagatcggggagtttatagtcacccgggctgggctctactacctgtactgtcaggtaagccccatctggctgcatgggtaacgcagtaagagagtggcgaagggtttgccaggagagtgggggacaagctacagggctgggagggtgagttggggtttgggtgggatgggatgcctgcgtcgctgaggaaattggaaattgaggcgagggcaggcagaggcctggactcggcctgttgtccccaccccaggtgcactttgatgaggggaaggctgtctacctgaagctggacttgctggtggatggtgtgctggccctgcgctgcctggaggaattctcagccactgcggcgagttccctcgggccccagctccgcctctgccaggtgtctggtctgttggccctgcggccagggtcctccctgcggatccgcaccctcccctgggcccatctcaaggctgcccccttcctcacctacttcggactcttccaggttcactgaggggccctggtctccccgcagtcgtcccaggctgccggctcccctcgacagctctctgggcacccggtcccctctgccccaccctcagccgctctttgctccagacctgcccctccctctagaggctgcctgggcctgttcacgtgttttccatcccacataaatacagtattcccactcttatcttacaactcccccaccgcccactctccacctcactagctccccaatccctgaccctttgaggcccccagtgatctcgactcccccctggccacagacccccagggcattgtgttcactgtactctgtgggcaaggatgggtccagaagaccccacttcaggcactaagaggggctggacctggcggcaggaagccaaagagactgggcctaggccaggagttcccaaatgtgaggggcgagaaacaagacaagctcctcccttgagaattccctgtggatttttaaaacagatattatttttattattattgtgacaaaatgttgataaatggatattaaatagaataagtcatagtctctctctttattggggctcaggggacactctcagggtagctgggggccacgtgaaggggggcgttgcggagcggcacagctggaactccgggatgatgttcaggcttgggggcggggacctccatgcctccagcccccaggtgggagcagaggtaggaaggcacactgcccaggaaaaaaatcaatcctccgcccaaggtacagcagaagcggcctccttggcctaggaggcagacttcctcctgcggggaaatcccttcctggctgggaggagcaggggcccttcctcttggtggcctcggacattcagcaggtgctggcacaggccctggctgggaggtggggcgggcaggagccagcctggaggaggggctgagagtcagcaggcacacgggaacccggaaccctgtgtgctggggaggaatcccgcagtggccggggggcttgaggccgctgctttgtctcttcgtccagagccttatgtaagagcttttctcgggaaacaggaagtcctgcttgccaatttcagcacagggagtagtgcaggccttattccaacacacccggcccagccttaaccccagaactcagccagtttcttgcttccgtgcccctggttctcctccccatcgagcccacccctcctttcccaccttcagtcacccctagtgaactgccccagcgatctctgctgtgcttgaccccgagggtcttccaccctcgccctgaccctggacactgcccagcttggccccccatcctgctcctggcacaatgccctctagccagccaaccttccctcccccaaccctggggccgccccagggttcctgcgcactgcctgttcctcctgggtgtcactggcagccctgtccttcctagagggactggaacctaattctcctgaggctgagggagggtggagggtctcaaggcaacgctggccccacgacggagtgccaggagcactaacagtacccttagcttgctttcctcctccctcctttttattttcaagttcctttttatttctccttgcgtaacaaccttcttcccttctgcaccactgcccgtacccttacccgccccgccacctccttgctaccccactcttgaaaccacagctgttggcagggtccccagctcatgccagcctcatctcctttcttgctagcccccaaagggcctccaggcaacatggggggcccagtcagagagccggcactctcagttgccctctggttgagttggggggcagctctgggggccgtggcttgtgccatggctctgctgacccaacaaacagagctgcagagcctcaggagagaggtgagccggctgcaggggacaggaggcccctcccagaatggggaagggtatccctggcagagtctcccggagcaggtgagtgaggggaggagggtgtctgggagaggatggttagcatggggggtctctgggcctcctggtctgcaaagtttcaagggggtgcaagagagggtctccggtttggaagtcaggggcgcggccattccaggaaaggaaactgttaaaggttaatgcttctcatacctaacaaatcctggagggcagccagcaccaacactcagggtgctgggaaaaggtgcgtgagagatctgaggcatctcgggggcaggggagggctgggaaggcaggctggctgggaccctcgcatcttaacctaaccttgaccctctttccatgagcagagttccgatgccctggaagcctgggagaatggggagagatcccggaaaaggagagcagtgctcacccaaaaacagaagagtgaggcttccagggtgcagcaggggtgggaggtgatcaagcagcgtggggattgtaagcccgagtcagggtgagggtggaggctgccaacagcacaacgggggaaagtggatgcggctgagattccctccttctctcctcagagcagcactctgtcctgcacctggttcccattaacgccacctccaagggtgagcactattttaaataatggctttggggaggggcaataaccaggaactcgggctggcacttgggctcaaggggtccttataggtgaaagggaaagaaccaaaaagcacctgagagtgccaagaagtcctgaccgacacactct

SEQ ID NO: 3668 - DNA, 6000 bp, Homo sapiens
agggccaggcctggcccacgccctccactctcgcctctgcagatcacgcgatggaagccggcagccctgtgagcacatcccccgagccagtggagacctgcagcttctgcttccctgagtgcagggcgcccacgcaggagagcgcagtcacgcctgggacccccgaccccacttgtgctggaaggtgggggtgccacaccaggaccacagtcctgcagccttgcccacacatcccagacagtggccttggcattgtgtgtgtgcctgcccaggaggggggcccaggtgcataaatgggggtcagggagggaaaggaggagggagagagatggagaggaggggagagagaaagagaggtggggagaggggagagagatatgaggagagagagacagaggaggcagagagggagagaaacagaggagacagagagggagagagagacagagggagagagagacagaggggaagagaggcagagagggaaagaggcagagaaggaaagagacaggcagagaaggagagaggcagagagggagagaggcagagagggagagaggcagagagacagagagggagagagggacagagagagatagagcaggaggtcggggcactctgagtcccagttcccagtgcagctgtaggtcgtcatcacctaaccacacgtgcaataaagtcctcgtgcctgctgctcacagcccccgagagcccctcctcctggagaataaaacctttggcagctgcccttcctcactgcattgtggttgggtctttgatgaactgagacatcttgtctatcactttcctgggcatcaggctccactgaacgctgcccccttggtttgggaggccctgtggtgcccccatctcaccaggctctcgaggaagcttgtgaccttgggttgagccctaagcagccgggtacccactggggctctgcttctctctttcactaagagagagaaagagaccaaagaaaggtctgcagggagggtgcctgtgcaaacacccagggaaccaggggcttgagccatcttcatttccttacagacacacattcccttccatgcctccttagtaagggcatgacgcacagtgtgtgtgtgtgtgtgtgtgtgtgtgtgtgcaggtgtgtgcatgcatatgtgtgtgcatgtatgcgtgtgcatgtacgtatatgtgtgtgcgtgtggatgtctgtgcatgtatgtatgtatatgtgtgtgtgttgtggggatgtgcagtggacaggaaggggagggcagctgtagctgaaagctgcgagtctctctggaaaaaacatcaagattccctggaccacagcaagagaatgttttcatttgagtccactttttgttagcatttaaagctatatcttgagtagcatgtaaaccttaagtaaactattcttagaagcattttcacagtaagataaatccataataatgtacattgaaattatgcaccctgcacctcctaaaattatcttgcaaacctgcacccaccaaaggatcccgtagcgcactttgggaggtgtagacaggaagcctggggctccgtcgctcattccatcttttcaccagctgtgggctaccacgctgcattggtttgcttgggcttccttaaagtaccacagactgggcagcttcagcaacagaatctcactgtctcacagtcctgcaggctgtaggtccaagatcaaggtgtcggcagggaaggtcccttttcagggcggtgcgggaaggctctgttccaggcctctctcctggcaggtaggtggccttcccggtgtctcttcacctcgtcttccctctgtgtgtctctgtccacatttccttttcttataataacgacaccagtagttagattgggggcccccctactgacctcatttttcattttaacttatttctataagatgatatctgtaaataagatcacattctcaagcactggggcttaggacatcaacacaggaatttcgggggacaaattcaacccatcacacaggccgtcctcgaggccacctctgcgtcatctttgtctacaggcaagttggcatctaaaaagtgtctgcccaagacatgcgtctggcccatggtacagccagtccacacggccaatggtgagatccgggtggcattgtttcctcaccgccatgcctcacgcaagcagctgccttcttacaacaaggtggacacaaatcccagaactggcgcagacgcttgctggctgtgggtgaagtagccccacgtcagcgtcctgcaaatatgcggcttagaatgttacggcttgtgtgaaagatatgcagatttctattccttccgatccatggtttcaagttctgctcgtctgaacccaaggggctctgtaggtgcctctggaacagccggggttttaggggtgttgaaaacacaaggtacccaggctcaaccccagcttcaatcacacaaataatcttgtggtggtgtttctttggtcagtttttaaaattgatcttttgtactcttttttttttttagaaagggatcctttggtagaaagaaaatctgaaactctaaatactgtccattttatctatgtattgttggtcctttccccaaaatatatcctgattccagccacttgtcatgatagttttaatctgagctctcatcgtttttcacctggattactgtaccagcctccccactggcctccccgctgccacctggcccctccccagggctcagcaagatttttctgcaaaggacctggtagtaagcatcttgggcttcgtggaccctgtggtctttgttgcacctactcagcagttactcagcttcgccactgcagccctaagtagccacagacaagaagtgaacacaggggaggaactgtggctccaataaacctttattcaccatgacaggaggggactgcatctggattgtgggccatagtttgccaacccctgcctgacttcatggcaacactgaaattcgtatttatgcttcttaaaaacatgtctaagccaagtgcagtggctcatccctgtaatcccaacacttccagctgagcctggaggattgcttggggacaggaggtccagatcagcctgggtaacacagcaggatcccatttctacaacaaaccatttcaaaagcagccaggcatgggggcccacacatgtagtcccagctactcaggagactgaggtgggaggattgcttgagcctgggaagtcaaggctgtatagtgagctgtgtttgggccactgcacttcagcctgggcgacagagtgagacctcctctctctctattatatatatatacatacacacatatatatatctgtatatatatatatatatgtgtgtgtgtgtgtgtgagagtgtgtgtgtaatggttgtctgcaagaaacacctttaattaatcacagccaaccctcaaataatacgcatagtataggacccttacaatgctacactcccaactcttctccccacccaccttttgttttctttccttccacggattctgtgacatcttcctctcctcattgactctgcatgaaggggattcctggtgggggaagggtagctggtgagaaatgaggtatcaagaaactagcaaagcatcttctggctgtctgtggacagttcttgtgtggtccccagcctagtctcaagggttctgggctggtcaccctgcagcctctgtgctgtgtcaccagattcgggctctgagggaagggccctgggaggcccaacagagcggggtgccttgtctaacatccccccgttcctctggctgtgtggctcaggaataggcccagacagtgtgtccaggtggtgccaggtcacctcactgccccctttgagatgggcccagagggttttgtggggtgagcatgaagctgggcacccaaagcctggggccgagtgcccctccctgtgtcccagaggaggggccctgacctgagaagatccccagtgcctggcttatgggtgccaatgtggggaggggtggctctgaggactgaagcgggtcactgaaagaagacattgagctccatggctcagggaccttggcagtagaggcctggtaagcagagactaggacactgggacttggtcacaaaaaatatgatcagaaagggcatggccatcagagagttggtcaggcggcctggtcattgagggactgtcagtgaggacctggtcactgggtgcttggtcaatgggtcttggtcagtggggacctggtaagtggagatctgattactgggggcttggtcatcaagagcctggtcagtcaggacctggtcagtgaggacctggtcagtgaaggacttgtgggggggcattggtcagcagcggccttgtcgggggaggcttggtcagtgggggcctagttagtggggtcctggccagccggctgctgggtgacctcatgcaggggtttgtccttggagcttgcttgccgccatctgtagtggggatgagtcacatcaccccagagggctactgggaggaggagatgagcaggtgtgtggaatccggccctgcccaacagacctagcactttacaccctagctgagtcccctgctaaagagggggcctgctctctgccctccaccctcaattctctgctccccgtccacaggactgccccacctagggagggctgaggttggggaacacctgtggacactctgatgctggccacaggcccagggccgggcgtgacagtgacaaggacctgagtgcgtacatgaatggggccacctggcccagccacagaagcaacacaccatatgcacgtgttcacccacatatatgtgcacgctcacatttacaaacacactgcatgcacacatgttgatgcttcgggggtggaggacggtgactgtgggccctgctgacccaggcgggggcccattgtgatgggtgccgtgatcccgtaatgtcactggtgctgagtacccacccgcctacctggctgccttctctgtgtctggagctcttagagacaagataaacagcgatgtctggttctgctcagaggaggctttcttaagtgagaggcacagttggatcagcagactcagctgagtgtgacctgctctgttccctccctgctgacctgggacagtcgctaccaggcagtgctggcctctgggcgggtgccgaggagggtcatccctgagcactcaccaggtaggtgcctgttctgcactgacggtatagatgttcgtcttgttggtcgtcacagtgacgctggtgggggtgggtgctgtcccctaatgtacccattccacaggtgagatgtctagggtcagagaggcagcgactggtccagagacccagatgtgaccctgggccatgctcttagccctgccctgtgctacgctggactcaagccctgacctctgtggcctccctgccctggattccaaatccatccggggttccagcccctgatggggcagagtctggccctggaagagccactgggacagagatcctatgggtgaggtggagggggtggtcctcagtccaagtctgtgccctaagctgggaccccgcgggaggtctcaccaactcagacttcacatgtggtcactgagggtcattgtgggacccactggacacagggggtcccttgtctgggagtggggtgaagagccttctgcccttgggcagttaggtaggggactttgagcactgctgctttgggacctgggaagtggggacctgggcagcggggtcctcgtcattgagaacatggtcagtgagagatttggtcatcatgggttgggtcaggggggcctggtcagcagagacttggacactggggcttagtgaaaatatgatcagtggggaaatagtcacggggcctgctcagtagggcctggctagcagaggcctggccagctggccactggatgacctgacagggggtttgtccttggagcctctttgcctctattcatagtggggatgagtcatagc

SEQ ID NO: 3669 - DNA, 6000 bp, Homo sapiens
ttcaaaagatgcagccatggaaaatgtcttataagcaccagggccatttaaatgtggactagatgtcagatggtcttattgaactatgattgactttcttagatgtgatcatgacagtctatgtgagagaatgtccattttcttaggaggtgccttgtggacacacttaggactgcagtgtcgggatgtctgcaaattgccttcagggtctcagccagaaggcaggcaggaagagacagagatggatggagccatgcagacaccaaggtgaagagctactgaatcttggtggagggtccctgagtcttcattataattttaactttcttgaagttttgaagttttcataataaaaagttaggagggaaacattttaaagtagagaaactagatcttcccacagaacactggggacccttattattattattttaaaccctgctctttgctttttcaaagtgagttttgctaaaataatggtatctagcatttctgagaaattagcacaaatgtacagctacattagcaacaggaaattcagcacatctgagtcatctatgtaaatggcaataatgaaaatgagggctttcgctgcatgtctaagaaatgtcctcttttggagactcttccttttgttttacacccagaactgtctcagaggaggttcaacagcagggcctcaagggaccaggagtaggtggcagacatgagggagctcaaagagaccacagcacctgcagggatgtgggtctttagggccaaaataccacggacatgctagtgcagagtggaaccatctccctgggaaatattgatcaacaggccagtgttgcctttcttcaaacaatttaacttaaggagctcatgcccctcaaggtgacaaagacggtaaaatgtgaattaaatgagcagatgttacgtgtttagaacagtgccctaagttttccctgttgttactcccaatgatcactgtaggagttcatttcaaaagctaagaactgtccggcaggctatactaaatggaaaaggtggcatgctaaacagcaaccttgatctgtataagccagcagttgtgttaaaaaaaaaaaaaaaaggtatggagggggagggagaggtgaaatatatcctctagcgacacgcacatgctcagaaatgcctaggctttgctgggaggctgtatgaacaaggtccactaagggttgccgcctttgagtagggacatcatgggcctaggataaccagacaggagagaaatttacttccgccatattcttttactgcttgaatttttttctttactatgtgtgcattttaactcgctaattatacatatataaatgaaccaggtccaaaaccttaaggtatatgagttatctctactctgggttctaaatctcttctgtcaccttggctgtggagcttaaaattagaatcccgcatcctcttgggagacagctcaaaaaaaggctggtctcagaatgagctttagaaacctccagcacctgttcaatcttctgggggagccagtgcagagggggaatctatttttgtgtttcatgaaacgatcccatttgtatgtttccatttatacaaagtttggggaacaagcaaaatgaatctgtggtggcaggagtcagaattgtgactctcttggggatggagtggggtgtgctggctggaaggggcagtgagggaccttctgggggctgtgcatgctctgagttgtgatctgagttgtggttgcctgggtgtgcatgtatgagaacacttactgaacttcccattttaaaagggtgcatttcactgtctgtaaattacaccatctaattaaagaaaatagaaagcaaattaaatccattctctgtaaactgcatttgagcaaaagcattaacaagctgtgattggcagtaagacattagggaactctgtcattcaattctcagccactccccaaatcaggctggattttgtttgtttttcatttcaggcataacaggtattggctttaaaactccaggacaatgtgtgtggctgcagagagcagcattcagtcccatggaagcacagtctggaagcacagtctgctcactggacaaagctgaacttgctgtctttccttcttctccttccttctcctctttctccttctccttcttcttcctcctcctcctttttttgcgacaggttctcattctgtagcccaggctggagtgcagtggtgtgatcatagctcactgtagccttgaactcctgagctccagcccagtgttgcaatcctccagcctcccaagttgctaggactacgggtgcacaccaccacacccagctaattaaaaaaaaaattaggctgggtgcagtggctaacgcctgtaatcccagcactttgggaggccaagacgggtagatcacttgaggtcaggagttcgagaccagcctggacaacatggtgaaaccctgtctccaataaaaatacaaaaattagccgggagtggtggctcactcctctagtcccagctactcaggaggctgaggcacgagaatcgcttgaacccaggaggtggaggttgtagtgagctgagatcacgccaccacactccagcctgggcaacagagtgagactcggtctcaaaaaaaaaaaaattatagagacagggtcgctatgttgcccaggctagagctgagctttctaaccatcagagctaccccccagggagccagctgctccgtgaggtggtgagagccctgaccctgggggtatgcaaacaggaggtgaggggggactcagtgagggcatcctgtagtgactttgggcttgcccatttcaacaggcagaaagttcctggcaatgggatctctttcttacctctctcttagaaatccactgccagagcccagctatggttttgtcactgttcattgacacaagtaattaaatgtaaacaagtaattaaatgtaaaacccctacaaatgtaaaagccctaaatgtaaaatgtttagccctacaaatagggctaaagtcccctttgacggtcacccccagtcctggttccctcttgccccacccggcgagagccagtttcgtcatgcatgtctttgcagacttcttatgcttcacagtcatgtgtgcgtgatcacagacaacacagcgctgtactgtgtgtgtgtgtgtgtgcatgttgtttgcttttggttttgttttactaaaaggcatcatgctgtaaggctcatgctataagctacttttatttactcagcgtctgtcctgaaagcttcgagatttctcattcttttaactgtgcaatagattcctggctctggcctgtgcaccctgcttattcaggcatcctctgctgcatggacatttacattgtttcccgtttctcgctgtcatgaggaggctcacggaggaggagaatttctggggggtgggttaggtgtgtgttgtgcatttaactgaccctggctggttactctccagaacgctgctgccagctccctccctccagtgggccctgagttcatgcttctgtagatcacccccctgcccttgatgttaccaactttaaaactttgcaacctgatggctgaaagttagtttttcattgttcagttgtttttctgatttttgggagactggacattttcctgtgtttgctgaccgtctgcatctcctctcctgctctgtgcaccatcaccctgctccagctgcttcctgcagcctccctccttcctctccacctctccatgtcctcctcgtccttcagtttcttcctaagggcccatgggctttctttggcttttacgttcctctcactccgcctttggctgttgctgggcctcccatcccctgggaggtttcagacgatggggaagacacaggagtgcagtcgccatgcagtgcaatacgggctgtaatgttcctcctccacggcctttattgaggacttactgtgtgccaagaacctgctctaagaatgtaactgtgctccctccctcatttcatgctcataaccgcctgtgaggcgggcaatgttctcatccttttttttttttttttttttgagatggcatctctgttgcccaggctggagtgcaatggcacgatctcggctcactacaacctctgactcccaggttcattctcctgccacagcctcccaaatagatgggactacaggcacgcgccaccacacccggctaattttttgtatttttttttagtagagatggggtttcaccgtgttgcccaggatggtctcgaactcctgagctcagacaatccacctgcctcggcctcccaaagtgctaggattacaggcgtgagccaccatgcccgacctcatccttgttttacacagagaacatggaggcacagaagagttccataaattgccaccaaggccttctgctagtatgcagcagagtcaagattcaaacgcaggctgtccggtcctggggttcagcctctccagtgctctgctaggtgttggagagggtcaaggagatacagagaatgagtaccacctgacaggctgggacagtcagggatggcttcctggaggaggtgacacctcaatggagccttgaaggaagagcaggaggagccgaccaggcaatgaatagaataagtatacccaggaagagggaaaggcctgagtgatgctgggagggtggagagctggcctggcttggggtgtgtgccggcgggcaggagatgaggaccaagggatggccaaggccagatctagaagagcctgggccatcccatagtcaatacctcatcgcaaggcccggcaggccttccactgctctgtgtgtaccccatgggacgccaggagcctgggccgcagccacccacctgggctcctgagacccaatgcacaggcatgggggcgggagtgggtgtggctgatttacatccaacaggttgaggggaaaacccaggaagtgcagcccaagcactaatcaaatctaagactagtaataagcatcctgagtaatgagtggcctgggccggagcaggcgaggtggccggagccgtgtggaccaggaggagcgctgtgagtagccgggcaggagggcaggagggcaggtgggaggtgtgaggagggttgggcctgagtgccgtgggggttgcaaggtccagcaggtgcaaagcccacagcagatccacacactggggcagtcccagcctccccaagctcctgcacatggagagccccgagtctggatgcctctgggatgtggggcttgccttccgtgacagaagccactgaggttgcagggttggccacaccggcaggaattccctttgtcaccatggcccctgcacagcccccattttcccccttacatgcccgctggaccattttaatgctaatctcaaataccagattgtttgagttgtggagaccacaggatttattccttaagaacacaaaccctaaaaacaaaacaaaaaactaagcatcataccttcacccctgctgaaacaacaattcctgaacatcatcacatagcccgccagggttcaaactgtaccaactgtctcaccaatgtctttctcagttgacttgttcaaatcagcctgtcccacattagacttttggctatgttttaatctataacagtttccacccattttttctgttatatatttatatttatatttatcctatagctttctttttttttgttttgttgttttgtttttgtttttgttttttgagacagagtcttgctctgtcacccaggttggagtgcaatggcatgatctcggctttctgcaacctccgcctcccgggttcaagccattctcctgcctcagcctcccgagtggctgagattataggtgcccaccaccacgcccggctaattttttgtatttttagtagagataggctttcgccacgttggccaggctgatctcaaactcctgacctcaggtgatccacctgcctcagcctcccaaagtattgggattacaggcatgagccacg

SEQ ID NO: 3670 - DNA, 6000 bp, Homo sapiens
aatactttgcttcagccatcaattccttgatttcttgccggttctgagggagggtgatggtgtcatctcggaggtaattcaaaatggtgccaaagtgctttccacaacggtctatgaggatccagcctaggggtgcagaaggccctacagggttagtttgccgccaggtacctccgaggcaggcaaaggccacctgacaagctggcggcaggtggcagggaagggggtccacgagcacaaagcccttacgcagggtgacagaggcggggatggaggttctagcactcaggcccatggctgctcttcacccttcctctctgaaacccagaactggcacatcccacgggggatacagccctccaggctgtagaagccacaggggcctaggctcagggtaccaggcccagcccaacacagaaaccaccagccactgccggccttctgcccgctgcccagtcttaaggtgacggctcctatgagaatcttgtcctatttaaatattttaaaagtatggctcttcttcctggaaaatgcataaacacagcattccatatacaatttcacagaattctgaagctctactagggactccaggtgaagacaccctacataaagtgaagaggaaaagtgactgaattctagatctggtcatttccttgggaactcctcctgccctccccaccccgagcggcagccccagtgcctcaccttctttgtcggtcagcacctccatgcgcccactgaacatggccttgagcatggtgtcgtggcgggtcagggcccgcacagtggtgtagtacagagagccgcccacgttgagctggacatacttgttgcccaaccctcctcccttgaagccactgagcttgggcttggcccctgaggctgggcacaggcaggtgtcccccgacatctcccgctgcaggtagatcaccacacggcaggaggtaggcttggaaggctccgccgtggtggaaagggtcacgagtgagtggccagtggaggccagagcctcataatctcagtgctgtacatgggagagggaagagaagacacgaaccagctgagacagcccaggaggagacaatagcagaaacacgaccgtactcattctctccctgacaagcccaagcactgctccctggcagaggctaagtccctgccattttgctttcttttttttttttttttttcttagagacagggtctcactctgtcacccaggctggagtgcagtggtgccatctcggctcactgcagcctttgcctcccaggctcaagtgatcctcccacctcagcctcctgagtagctgggaccacaggtgcacaccaccacacccagctaattttttttttttttttttttggtagagacagggttttaccatgctgcccaggctggtctcgaattcctgagcgcaggcgatccgcccacctcagtctcccaaagtgctgggattataagtatgaatcaccgcgtctggcctccctgccatttttactatagcaggaaccagggctggaggcagtctcccagactcctgccctggtcacctcatcagcctccctgagactcagctccactcagggcagcgaggaagacaagcaaacccatggaaccagttagagagggccagaggaacagatcaccctagagatctaccagtcagattccagttactttcttgtcaaggttcccaggatcccagacttccaaccaaacctactgggaatccagccagtctaggagtttcccaggagccagagggacaggatgcacttcctttctaaagattccagcctccagagcagtctgtgccagtgtttattttgagcaccaccgagagtctggcttcaggaaggaaagtaaaagcagcttcaggagagaatgcagtaagccagggtcgggggtgccggccagtgttcttggtgcaggttacctgggcttcggctggggcttcctgaccttcccctttcttggcaccagccttgtcccaagttcctgaaattgtcaccatttttcagggaagaacagctataggatggctgttttcctttctttttcctgagagggagcccagccctactctcctcttccctcccaataagaatgggagaagaaaggactagaaaagatcagaggataaatctaaaaacaatgaggtgagatgtgtgctgccacctgcctgtactcctggctactcagtaggccgaggtgggaggatctcttgagcccaggagtcaagaccagccttggcaacatagcaagaccccatctcttggcatttaatatgtactagctcatttaactcattcagcaattaaactactgagtgcctactatgttaagcagtagggaacaatgaaaaaatattgtctttgccttcaaacagttcaaagaagcatcataacaggaatttttaaaaagagagaaagctagcatttattgtacccctacgtgccaggcattgggtactcagaagagaacacatatagaaagtcatgtccacatggagcttacattctagtggaaggaaacagactagcaacaaggacttaaataaataagcagataattccagaacctgataaatgcaataaagataataaaacagtgatatgagagtgattagggagaggcactaatttagacaaagggacaggaaaagcatctttgggatggtgacatttcagctgaggtttgaagagagcattgtagacagatggaagagtaagtgcaaagttcctgttagaaacaagttttagggggcgggtgtggtggctcacacctgtaatcctagcactttaggaggccgaagtgggtggattgcttgagcccaggagttcaagaccagtctgggcaacatagtgagagtttgtttctacaaataaaaaaaaattagccagatatggtggctcatgcctgtggtcccagctgctcgggaggctgaggtgggatgactgcttgagcctgggaaagtcagcctgggtgacatagggaaatctcatctcaacaatgacaaaattaaaacaagtttgaggatcagaaatacggtcataatggctggtgcacagacagtagggggaagttggtttgatgtcaagtcagggaaggcaggcgttagatgataacaaaggtggatttcatactaattgctatatagtatatgaatcaattggagggttgcaagcaggggagtgatatgatctgacttgcttgtagtgtattttgaaaagataacttgctgctgggtagagaatgaattgtaaaggtgcaagagagaaagtgggaagaccagaggaagcagtagtctaggcaagaagagatgatggcagcctggaccacattggtaataatggagacagaaaaaaagtggaatgatttcaccgaatgctcatcacatgcaggagtttacagttgctcatgccttgtaagtgcaacccagaagcagggcactggtttcccaagtttaccgctgtgttcccctaatggtgctcagcacaatgccatgcacattttaagtatttaacatacgtcagtttgttagactgaaattgtccctgaaaagatttaggtaagtccctgggaagaatgtccaaggaagtggacagccagcgtgggtgctgtgtgaagcagtgaattcctttggcggcttgtctgggagactctttcatttgccacaggggttgggtatgggaggtgagccctcaccaggaggttgccaatgactaagaaacactagaatggtatgagatcaccttcccttttcccgcccacctcaaaggaataaatccacctctctaacaggtattagcaagttccctgtgtattttgtgtctagtcctagttttcccaggatcagagaaagcacacatacatgttctgccaatgcaaaggagctcaaaggataggcctgccaagagaggtcggcggatccagagctaatctcttcctttcctacaaagcaattgctttgagcccctggatgacgtcaatcacattccgcccagaccaatgggttccaggaattctgtggcaggtgacgccccagaaagtaattccagtgagaatgaagtttccactgatagccacagtgctcttccttccgcactttgtgtgtggatatttggggatgcccggggctaagggcggatccgtggctcacgcaacgaagctaatgggaacccaagcacaacaaagggcaaacagccgcggaggtggaaagaggaggggtctaaaaggaagaaggacccagaaatccgtcagacacggaggacggcgggaggaaagctgagggctagagtggcggatctagcagaaaccctaggtgtaaaggttaagcgtcacccaaaaagtcctgggaaatgtggccggtgtgggctcttctctagcccggaccactcctcactaccgagaaacccacaccggttctcacgcccaccctccgtgggagatcggagctctccatctcccctacgccgcccgcgccttttcccccaggacccggccgggctcgctctactccagcaggggccgtccatcccttccccgagggcatcggcgggcccggctctcaccgtccccgggggcgcctctcctctcagctgggtggccagcggactccgagccgcccctagcctgcagccgcctgcccctcagcagtcccaagctgtgagctcacatcctgcgctcgtcgactccgcccggagtgctgcccagcccagccggctggggagcctgagactacaagtccctgcatgcatagcgctctatccgggaaagggtggaggcggaatcccccgagggtcttcgcggagagagcagagctacttctggccgccttgccggcgctaaggcttctgggtcttgtaggccgggcctcccctcgggcctctgtttcccagcaggctctgtggaatgggggctgtaagtgcttccggagtcaggaaggtagtgacgtcataggtaaacaggctctgtatccgtggcagcggccgtggcaggctggctgggtaccggctgtcgctgacccaggagaagctgcctgtctacatcagcctgggctgcagcgcgctgccgccgcggggccggcaggtaggctgacctcgggtcgggggacgcgggcggaccaggggcgagaggagcctgacaggcccgcgtcctgaggaaaggcagtaccgggcggggagagacgtgggaattccgccccactctcaggggggcgctttcacacccagcttaggcctggagtttgatgcgttgatgcttgccacgatcttacgaggaaactgcggctcggataagttcggggagtttacatagtaaagagtcggctcgcagtgcctcgcatgcatctgggagagccggggcgcagaaagtatgccaccgcctcatgctcagggagcttagtcccagctcttgggccaggtgttgctcagatgctcagacacgcgtgtgatgggagttggtagataatctgtgaactctttccctgcacctcttcttccatcttacctatctctttaagccagcccttccaatcagataggtgggccaagccagattcatgggagtcatgcctgacttgtttttctcttatccccaaacccccacattcagtcagtccattgctaagccccatcacctcgacttacaaaacatctcaactcggaacacttgtgttcggctgccagccttggttactgcaatagtctcctgtttccacggtcattcattccacaaacatttactgagtgccagttatgtgtgggcaccatgctaggtgctagggttagagtgatgaacaagaaggtacttggggctttgccctctcttgttccctccaatcggttctctcaggctgagcaagagtgatctttctaagtctgattttgttggtctgctgagaacccgctggctgtcccattacccttctgataaaatccaagctcatgactgcgtctttcagagccttcggtgatccagctgttgtctccctg

SEQ ID NO: 3671 - DNA, 6000 bp, Homo sapiens
agagaagggtggccagctggaccagggcatactcggaccttgcatccccactgagccagccagccgctatgacctccggctatgaaagcactaggcccttgctgggctcattctccagacagaccccaaccctgcttccccaggagtgacaggaagcactgttgttcacaaaagggcagcctcaggacacaagcgctgcctctggactagctacaggtatgacaccagatttcaattaacagtggggatgggggcttcccacttgtaaccacaaaaaagcaagctcacagcattaagtgcctaatctcccactcactttctccaatgtcctggatgtgacaatttactgaggggaaactaaggcccagagaggtgtgtgcatggcacagcaatcacaggttagtgacagaacccaagctacctttcactaaccaagctctctccacaacctaggaaaccccccagaaagctcagaagtcccttgttctagctagatctggctctgtacgggcattgggcttgcttggctgctgggacaggaggcttcctgaagatttccagccaaaagatgacttcagtaagtctgttgagctgcttctagaaacttcacctatcacttctaactccaaataacagagaacctgcccctgagaagactttctctgaagaaatcaaatcatgagtacataattctatttcccacacccaagccatggttgtgttcccagaaagtttaaggtttctaagagcaagaaatgaaagatggcatatctaaagacaccctcccctccccatcccggtgtttggtttgactggtgccctgttggggacacatgagagcacaagagggcagacagaaaagggtggcacgtgggaactcacagacgccagattcaacctccagggagccagcagctccactgtggcagggccaagatgagcctggggtacagttgaaatggcagctcaaagctgagtggcactgtatctccccaatactcactgtccacaaagtctttgcactcttccttcagctctatggtctgctgggtaacctctgggtccaacaccctcagcttgttcagttcatcaaagtgtagccctgcttcacccaggatgtccttggccatggctgtaaagaaacaggcccaattcctcatcacttcccagccacccaaggaaatgcctgctgccaagccagccccactcctgcccttggacaccaatgccaaaaacccaggtgttccaaaggatccccgttccctctgccaccacctctctgagcctcacctgtttcccatccaggttccctagaggagttctgctctgaaggagtgacagtggcagtcaggaggaggtgtgtcataggagcaagggtcaggaaagaataaagtccgcttgcttgtcacaggcatcgttcattcaacacacatttcttgagtgcctactacatgccaacactgctagatgctgggggtacaaagatgaatgcaacacggtgcccgccctgaagagcacatagttcagctggaagaagacagacacggaaactgaaaaaccacactgcgttaaatgcttgtttagaaacatcagtaaagagccagaggaggacagagccattaatgaaggagtgacatgtgaactaagttgtaagccatcagtgtatttactttatatatcaccagttatgtactgaaaagcacatgaaaaggcttctcaaatacatatactggaacaacacaaaaaccaaataaaggaaatccgagtaaattaaaaattatggttaaaaaataaaaagtcaggagtaagaatattactcaaaacgtatgcttgcctgaattgggaatcaaagttgggtcattctcttcctagcagaaaacacaaaaaggaatgaagtatcagcaagaacatatcaaggcaggagaacagggataggtattccaagcagagaaaacagcatggacaaaggcctgaagtcactgaaaggacctatctcacctaaggacgagaggaaaaagaatggagctggaaaggtgagctggagccagaccaggaagaccctgcatgccaagctaaggagtttggattttttctgtaggcaacagagaactaacagagatatcttctcccttaccaagccaccttgcattcctgttccaaaggatgcctcaattctaggaaggaaatactgaaaactcactcttgttctggctcaaaacacacacacacacacacacacacacacacacacaattaaacatagacatctttatgacctgtttaaaaagggaggcaatgctacttacatctagcaattggctgctatgccaattctaaaacccaggtgctccaaagtctaccatcacctggacttgcaccagccccttccctctgcccccactgcccccagcctcagctgtttcccttctggcttccttagagaagtcctgttctgaatggggtgattctggggttggctgtccagggcaggtgtgccaaggaggagcaatggctggaaaataatcaagtctcactgtttccagaacttctggtttttaagatgaccagaaatccagtacctcaatgttggtatgtaatccaaaaattttaagtaagggggaaaacccacatccaacactgcatgggccaactaatacatgtctatgagctgtctgtagacgactctggcctttggcctcactggaatccactgatgtaagtgagctagcatcatccttttgaagcattttgttcatctgtagcttccttaaaatagggctttttaaaaagatctggccagtgcagtagctcatgcctgtaatcccagcactttgggagactgaggtgggaggatcacttgggcacaggagtctgaaaccagcctgggcaatgtggcaaaataccgtctctacaaaagatttctaagatagccagacctggtgacaggtgcctgtagtcccagctacttgggagggtaagctgggaggatcgcttaagcccaggaggtggaggctgcagtgagccgtgttcacaccactgcactccagcctgggcaacagagtgagaccctgtctcaaaaaaaaaaccaaaaaatctgtctttcgcagctacaggtcattaatctgaccagctgctccagaaagattgaagtaacatgagggagcaaatatctgcttcaacttccacccccttccctgagagcatgcatttattcagaaacatccactcagtccctgctctggggacagactagtgaaaacaatgcctctggacagatggtaaagaaataatcacaaatcgtgatattactataaggaaaagtacatggtgctgtgtgaagtgctgcaggaggacacagttcatggggggcggacttggaggggagggccaacagaggccttctgaaaaaaatgacacttaaacagacctaaagactgtccaaaagtatgtcaagtgaaaggggaagcaaggcattgcaggcagaaggaaacacgtatgtgaagatcctgaggcaacaggaaatttgatgcattccgagaacagagactgagcaagagaagggaacagaatgaggctagacagggagacaacagctggatcaccgaaggctctgaaagacgcagtcatgagcttggattttatcagaagggtaatgggacagccagcgggttctcagcagaccaacaaaatcagacttagaaagatcactcttgctcagcctgagagaaccgattggagggaacaagagagggcaaagccccaagtaccttcttgttcatcactctaaccctagcacctagcatggtgcccacacataactggcactcagtaaatgtttgtggaatgaatgaccgtggaaacaggagactattgcagtaaccaaggctggcagccgaacacaagtgttccgagttgagatgttttgtaagtcgaggtgatggggcttagcaatggactgactgaatgtgggggtttggggataagagaaaaacaagtcaggcatgactcccatgaatctggcttggcccacctatctgattggaagggctggcttaaagagataggtaagatggaagaagaggtgcagggaaagagttcacagattatctaccaactcccatcacacgcgtgtctgagcatctgagcaacacctggcccaagagctgggactaagctccctgagcatgaggcggtggcatactttctgcgccccggctctcccagatgcatgcgaggcactgcgagccgactctttactatgtaaactccccgaacttatccgagccgcagtttcctcgtaagatcgtggcaagcatcaacgcatcaaactccaggcctaagctgggtgtgaaagcgcccccctgagagtggggcggaattcccacgtctctccccgcccggtactgcctttcctcaggacgcgggcctgtcaggctcctctcgcccctggtccgcccgcgtcccccgacccgaggtcagcctacctgccggccccgcggcggcagcgcgctgcagcccaggctgatgtagacaggcagcttctcctgggtcagcgacagccggtacccagccagcctgccacggccgctgccacggatacagagcctgtttacctatgacgtcactaccttcctgactccggaagcacttacagcccccattccacagagcctgctgggaaacagaggcccgaggggaggcccggcctacaagacccagaagccttagcgccggcaaggcggccagaagtagctctgctctctccgcgaagaccctcgggggattccgcctccaccctttcccggatagagcgctatgcatgcagggacttgtagtctcaggctccccagccggctgggctgggcagcactccgggcggagtcgacgagcgcaggatgtgagctcacagcttgggactgctgaggggcaggcggctgcaggctaggggcggctcggagtccgctggccacccagctgagaggagaggcgcccccggggacggtgagagccgggcccgccgatgccctcggggaagggatggacggcccctgctggagtagagcgagcccggccgggtcctgggggaaaaggcgcgggcggcgtaggggagatggagagctccgatctcccacggagggtgggcgtgagaaccggtgtgggtttctcggtagtgaggagtggtccgggctagagaagagcccacaccggccacatttcccaggactttttgggtgacgcttaacctttacacctagggtttctgctagatccgccactctagccctcagctttcctcccgccgtcctccgtgtctgacggatttctgggtccttcttccttttagacccctcctctttccacctccgcggctgtttgccctttgttgtgcttgggttcccattagcttcgttgcgtgagccacggatccgcccttagccccgggcatccccaaatatccacacacaaagtgcggaaggaagagcactgtggctatcagtggaaacttcattctcactggaattactttctggggcgtcacctgccacagaattcctggaacccattggtctgggcggaatgtgattgacgtcatccaggggctcaaagcaattgctttgtaggaaaggaagagattagctctggatccgccgacctctcttggcaggcctatcctttgagctcctttgcattggcagaacatgtatgtgtgctttctctgatcctgggaaaactaggactagacacaaaatacacagggaacttgctaatacctgttagagaggtggatttattcctttgaggtgggcgggaaaagggaaggtgatctcataccattctagtgtttcttagtcattggcaacctcctggtgagggctcacctcccatacccaacccctgtggcaaatgaaagagtctcccagacaagccgccaaaggaattcactgcttcacacagcacccacgctggctgtccacttccttggacattcttcccagggac

SEQ ID NO: 3672 - DNA, 6000 bp, Homo sapiens
gccatgggcctgagtgctagaacctccatccccgcctctgtcaccctgcgtaagggctttgtgctcgtggacccccttccctgccacctgccgccagcttgtcaggtggcctttgcctgcctcggaggtacctggcggcaaactaaccctgtagggccttctgcacccctaggctggatcctcatagaccgttgtggaaagcactttggcaccattttgaattacctccgagatgacaccatcaccctccctcagaaccggcaagaaatcaaggaattgatggctgaagcaaagtattacctcatccaggggctggtgaatatgtgccagagtgccctgcaggtacatgggtggggcggagcagggcgggcagatgaggtcaggagttgcccccttcttgtgggatggaggactctggttcctggcaggttgtgtgggaggcgtggttgatgagtgcaaacctaatgagacaagtgagatgccacccaggcccaccaacctggcagccaggtgttcacacttggcagcgtgagtaggccctgcttctggtttctatgctttgctacccggattttagggggtttttctgtttttgcttttgtttctgtttttgtttttgttttttgagacagggtttcactcctgtcacccaggctggagtgcagtggtgcgatgtcagctcactgcaacttctgcctcctgggttcaagtgattctcgtgatttggccttcagagtagctgggaatgccagcatgcgccatggcacccagctaatctttgtattttttgtagagatgaggtttcaccatgttttccaggctagtctcgaactgctgggctcaagtgatctgcctgcctcagcctcccaaagtgctgggattgcaggtgtgagctaccgcacccggcctggatcttgggttttctaactgggggtctgctttccagctggcagtttctattgtcaggggcctcatgatctgtatctgacacttcctcaccaagcagcgggtggccatggcagaggggctccagaggtatacctcgataagcctgggaagcagaagatcctaaagagggttctctgttctgtgtcgcacaggacaagaaggactcctaccagcctgtgtgcaacatccccatcatcacatccctaaaggaggaggagcggctcatcgaatcctccaccaaggtaccaggacctctgaggggtgcgggccggggatgccagtcccctggcctggcccctcactctgaactccttcacagcccgtggtgaagctgctgtacaacagaagcaacaacaagtattcctacaccaggtagggtgcgtcacagggctcaacagacactgggcagcagacccaaggagtactgcctgtactcccagcacggtcggcgtgggtctgggcctgggtcttggaactggctgtgccaagttggggaaaaacagaaagtagaagggaaattgggacagaggcctttggaactcagcagggtgccctggctgggatataaatgattgaaggtgaaatgcgccctcaacgtgtatcacgaaggcagcatggcaggtgttttcacacgtgtcatcctaccgggtggaggggatgctaggaggccggtgagctgggagtcccccaagccagcctgtgcagttcacactgggccgattccctccccacaccctccaggccatgtcctctccataggccacagttaggtagacgcaggtggctgcaggttcagagtcccaaaccctccctatgattccctgtggccaggcatattgccactgtcacccccacagtaagggaaggaatgcctcccactgacatagcagccttgtctccttccttccagggttagtgaggggagacctccttcctcagctgtccctactttgacttaaaaccaactgagttccttttcctcacaggccccccaacccagagggtaccctatgatcctttctctcctggccccctggcatcttgctttcatttcggcaggacaggatgggggaagggagggaggggagggccccacttgtctagcaccctcccttggactggaacctcactcccagccgcttggccctcatgtttttttcagcaactctgacgaccacctgctgaaaaacatcgagctgtttgacaagctctccctgcgcttcaacggccgcgtgctcttcatcaaggatgtcattggtgacgagatctgctgctggtccttttatggccagggccgtaagctggcagaggtgtgctgtacctccatcgtgtatgccacggagaagaagcagaccaaggtgtgggggattgcccctgcctgggtaggggaggacacacacccactgtgcgggggacgtggtcgggctgtgaccagcacggagcaaaaggggcatggacttggctcttttttccaaacacggtaatggtgctgggcaaggacaaggccagaacaaggggtgtggggaatggacgggaactgctttgttcctgacagcgcagggcaggggccgttgaccaccaggaagtagcctagtacagtgggaaggactgggtctttgaagttggcccaattcaggtttgaacgctggctcacaccacttgccagttttctgactttggataagccacttaagccatctgggcctcaggttcctcatttgcagacatggggatgatagtatgaatttaacgagatatgaaaatgatacaactctttggagcagcagtgtggtgtagaaacagcttgggctttcgtgttagaatgctgttcagatctcctgtctgagccagggacacaggtgggcacagcacttgagcccaggagttcaagaccaccctggacaacatggtgaaaccccgtctttacaaaaaatagaaaaattagccaggcatcgtggcacatgcctgtagtcccaagtactcaggaggctgctgtgggaagatcccttgagcccaggagtttgaggccagcctaagcaaaatagcaagattccacttccaaacacttttaataataataaaataaaatctccttactggccccaaccagctgggggtttctggctaatcaacttagtgccaggtacacaggaggcatttgataggtgacagtcatcacaaactcaggtggcccctctcccccaggctgcagtcagttaccccagagagtagctgcctcctgtgagtgcaggtcctggagatgatacgctggggtggatggcaggtcatccaggaagggccatgtgggtgtgaagagctcaaagtagccagacttgccaagcaacttgtcgacccccaaactactccaggtgcctccagctgggagatctgcagagggtttggggaaggccaacttacaggtggccctgcttccttctgcggtttttggtgtaggggtgggagggagggcgacaggtggttcctgaccctatcggtggtgaaagggttcaggggcaggtctccagtggctggtgatgctgcgacggaagtggcagcgcacctggcatcttcttaagtgtgttgtctttcatgaactcgtgtgacccctcacaacatgcctgtgagacacgcagggctagagccactctccccatgtgacagatgagtgaacagaagctcagtccaacagagcaggtctggctagaattcaggtgcttgactgccttccctttctccttcctccaggcaggtcatgccggtgacacactgcgtcaggcaggcagagaaaggcagcataaccactcagcatagcagctgctctgtgtatgcctctgcttggtggtttgctgtgtgccaatcttctgctaagcaatcacatctttcccgtaatgttgacagcaactctcaggggttgagctgaaccaaccttttgtacatatgggagctgcagcccagaagggttcagcccaaggctccacagctagcaagtggtagagctgtgttgggacctagctctggcccaccctctatgcccactagtcccttggtctcaggctggggcaggggtgtggaggatgttggtcttccctgtcctcatgtctgtagagtacatcccctcaccccgccttcggagggaggctggctttccctggagacggaccgccacctgttttatgagaggtagcggaggccttatggagcctcagggccagccgctctgacgcatggcttcctcttgaagatgaaaccttgctccaccttcttcctccctaaccccaggtggaattcccagaggcccgaatctatgaggagacactcaacgtcctactctatgagactccccgcgtccccgacaactccttgttggaggccacaagccgtagccgcagccaggcttcccccagtgaagatgaggagacctttgaactgcgggaccgtgtccgccgcatccacgtcaagcgctacagcacttacgatgaccggcagctcggccaccagtctacccatcgcgactgaccagaccctcagggagtcagggcacgggaggccctatctcccatcctgtggaacccgccccattggccaccccatgctgctgctgcctgggtctctgctctagcacccagaggcatgacaggccctgctcagaggtcagagggtctgggcagaggagggaccacattcccctgccttgcccctgagcacttctggagactgcgtcctgtcctatctgctcaccatcacccttcctgcccgacggagctgcttctgctccctggggcatatggactgacccacctcctgctgagaaccttcccctaggccctgtgcagaaggctactgccccttaggcctcagctgggggaaaggcagttctggtgctgtagaggccctggtgcagaaagtgggacgtcttttttcctaaggtgtttaagcacaggcttgataagtttggtttttaaaaaataatctaggaaatgaataattctaaatctagtaatgaggaaactgagcatttcttttgccctccagggtgccaagaccctacatatgacagaacccttggcccttctccatgcctgtgggatctgtttctttaaagcactttgtactgttattcaggaggttgataatctccttgacccatgtctttctaccctaatccccacttccctgcagaatcaatctgagggaggggataaagaggaagcaataaaaaaaaaacatccgacagagcagctctggctttgcagcctggccagcagctcagagtgcaccgaggagggaaggatggctaagctgggaccggcagtcctcacagggtgcctgtgagaaaggacattttacccccacatcatagtcacatcactgactcctaggtctagcacgactgctctttgtgattctcttgagtacccttggcttccagccatgctgtcctcacatacggtaaagccaaagagctgtcacatgggccagaaacatgagccacggcaggaagaccgtggagcccgtgggcactgcatggtgttggctggcatgcccatcagctgaggacagcaaactcccagcagcccctacagaggtggcacatgcttggccacacatctactccctgcccacaccatctatgctcttggttggtgctggctgggatggcggttctgcccagtggtgtctctgagcgcgggatgacaggagcaaccgaagcaccctgaaggccttcactccttgttgggtaactcagccatggagatgccaagcactagccaggaggtgagttcctctttagggctttggttttcattcctttttgtttggcttggccaaaccagaattcagcttatctgaattattttccaaaggaatgctgtcagggagggactgttctgccagcctaacaaagcaacgtagccacgtatagtacccactttctgctctttggagagaacacaggttatcaagttcatctctcttgactactcttatgatagctgatgccacagagcctatgggcaaatgccagacccagggttagacacaaggacctga

SEQ ID NO: 3673 - DNA, 6000 bp, Homo sapiens
tttgagggtatctgtgctttttttatactacggcaatgcttcagaggatatccttgaacttacttatttgagcacccttctaagtttatctgtaggagaaactcctagaagaaagattagggggtcaaagggtatttgcattctgtgagcgaacacaccctcccttccagagaggctgtaccataaaatcactttccttaaggtcaacaaatacaatcaggctttcattggattttcattctccttgtcttctttgcatcctcagagacttcaccatagactccttttggaaattctctttagtttctgtggctctgcataaaggacaagacattctttattgaatcattcattcatatgttgacatgcatttactcactcatttcatagttaagtgcttggaactggggagtccaccagggggccctcccatcttatttatcaagtaaaatattgcctagtcgatcagtatatgcctgtctccatgtaactgaaaacattcattgccaaaacaggagagtaaatattcagaggtgaggaaactgaggcatagggaaattaaatggcttgatagagttgcaaggcacacgtgtacatggcctcaggggagacttctgtggaaaggcatggcttcctggaagagggaacgcccttaccctcctggttttctgcaggtgtgaggaccataaagaaacctattcacctggtgtgtccttgcagctgccagtcctgatctccacctgtcccaagctgctcagaacgtggcagcgccatccaggagccacgagcatgggccagtggccagggaggctggatctgtctgccaagtttccacttttccatcttagcagcttctccgaagctctgtggagactctccccactcccaccccttggcagtgggacgtcaccatcggagccggccggtcgctacccttgggaacagaattcaaagtttgcaataccaatctctgcccttgtgggatgactgggcagcccgacccaaaatagctgggaaaggcgggatgttagggccgcggtgggaaaactcacagtgctgctaatgacatgctgtgcttatctggaaccgagtgtcttgcagactttaactgagatcacattgctttttccagcaataagtaaacagacccagcgagtggtggtgacaggcccagggagagagaaagaattaccaaatcagggagggcacagaacgtgctgccttccctgccaggggttccaggaaatatttcttcccattctaggatctacccttgactaagaatatgggatgatttgggaatattcaggaagcctttaggggttttgacccagacaccttgtgtagatgtgagctcctagggagttttaggatgggtttgtgggggctaagagagagaccttggggaggggactcagtctttctggaagttggctttgacttctgacccataatctcagggctgatgaaatcccccaggcactgtggctgatttttatttttgatttctgttgttgttgcccaacaggaaaggattttgccaaagggaaaacactctgcctcttgttgcttgggggcacctaaggctgagaaggaagaaaatcagccactctgcaaggacatcccttgcttgccaaagtttccatctttcctacttaaaattacaaagcagaagtgaagttgatgacaaagagcattaggaacctggcatgctctctattttggattttttttttcactttattgaggacaagcttgtattctctgggagctggccttgtgagtctttgcccattgcctgctgccttgagttgtgagccatgatggtggcacctaagacatgtgctcagacctcaactcctattctttggaagttcccatgcctccgagccttgggtctcacacaagatcttgggaaaccccaggctctctttgttaccgtttgataccactcctccctatccccagtttctgcctcaaggaaaatgagtaatcccttttctaatctcctccttccctcctcttcccaagaggatggaaggaagattatacttgtaataatggtagttgcaatgaacaatgtgtctgttccaccaacctttttattaatcatgtgagaagctacaggttcacaatcacttctccaaaatccctgaaatgcaaaaaatctgaaaccttagtttttccctaaagttggcacacacaaatttgacagaacaatgtggcttgaactatcctgagactatggatgccttcatcccactgccgaatattcaagtgtttaacgaaggggcgctgcccgaagcccactgggtaagatgctttgtgggatatttgcatctgactctgaacatatctgacctccttggttccagataagagaccctggacctatctctgctttgtagataaggaagctaaggcccactgaagtttggtagcatccccaggctgcctcaaggtaggacagagccgggacaagacctcctagtaggatgagccaggtgcacctggaagagatgaccagccttcagctgtctttctagaactttgcactatattgggcctctgagttctgtcttggaattgtgttaaagataactgttttccagttcttcaacaccaaagccatcttggatggggtaaagagaaagaataaatattccatcatccacaacttttttttttttttttgagatgggggtcttgctctgttgcccaggctggaatgcaatgccatgattagggctcactgcagccttgacctcctgggctcaagggatcctctcacctcagcctcctgagtagctgggattacaggtgtgtgctgccaagcccagctaattgttttatattttgtagagacaaggtctcactatgttgcccaggctggttttaaactcctgggctcaagtgatcctcccgcctcagcctcccaaagtgctgggattaaaggtgtgagccaccacacccagcccatcatctgcatctctttctctttcaagctgtgtgtcccgctttgtgaattctggtatctgcccacgactttcctgagtctgaggctcccaggcagggcaacaagaagccttctcattgcactgagggatttcctagctcgtaagagttctagaaagtcccagattctctgaagtatggacgaaggtctcataagggctgcaaaaaatgctgttgttttctctggtatccctgcaccaagggctatttgaggacagagtaactaaggaaaggtcagtccgtgtgctaagccttgctcctggtgactgggaaacttcctcatgtcacttacaggaatggagacaagcttatctctggcttttcctgtatcaataagcaaccagggatgtaggttttgccaagcctcagacacgtatgccaagaacacaagcaacccctgatcttctaagcctagcggaggctgcatctctagttggttaagtagtgttgacttcatatccccatcgtgtcctctgagttccccctgggtgctggaggcctggcagcctttctccctgtactcacaggaggggttgacgcatgcagtcagggcctctgtggagtggcttttgggcgcctcgcctgcccggaagcctccccttctgttctcatctccatttgtcctcagctctacctgagtgctggcctcgcccagcctggggcaaggcagtgggcattgtgcttgcaccctcttcttcctctcctttttgattcttttcatctgtccagttgttggtgcggcggatgggaggacactccaggcagggaaaggtgaggcctcttagttttgctctgaatgtcccaaccagcatccccattttcgcatctcctgtttgtccagagacagaccctcacaggagggataacaaaacaaaaaaatccagctgcaacatcgaggtgaggggcagctcggagagaacagggcagaggggggaaaaaagaagcaaaaaaagggggaatgctgttatcatcagagctggcttctgcttctctggccaaatccttcccctgctagtgatatggtaagtttccagagcaagctgggctgacgcagagtctagggatggagactgggtcccaaccagggccggctctggagcagcctggatcagggatcaggatgggagggcagcctacgggccttgttcagaaaaaatatttgtgtatgactgagaaaatgtcaggttttcatatcaaggaatgagaggcctgatagagactgaggagtgcttccagccatcctgggctcaccactgtactcgtgctgttctctagaaaatggaaatcttcccggcaggggctccttcctaacctttagatcacagagctctcaagactctgaacaaaacagtggaccatcaccttccaaaggtgatgcgcgcgcgcgcacacacacacacacacacacacacacacacacagtttggcattttgttatagggggttcacagattcccccaaacctgtctgagtccccgataatgcacagggcgtctcaggtctgccactgtttggagacctgacccctcagggttggccacagcggatcccggaggccttggggctcatccctctgctaccaagtgactaggagcgctcagccttgctgggcacccccatcctgcggggggcattctcgtccggggctcgcagcccctccgcctctggacggacctccagactcacggaatctgccccacccccactctcagcctggcgggctccccagggggccgggaggaggcggccgctggatttccctgaggcgcggcgcggggcacacacggttaatcctccgcggctgctgtttggacgaaaagcgctgggggtgttggaggctcctcgctgctcacatctggctgggcttcgctccttgcgcgtctgtcccactttctccctctcttcctttactttcgagaaaccgcgcttccgcttctggtcgcagagacctcggagaccgcgccggggagacggaggtgctgtgggtgggggggacctgtggctgctcgtaccgccccccaccctcctcttctgcactgccgtcctccggaagaccttttcccctgctctgtttccttcaccgagtctgtgcatcgccccggacctggccgggaggaggcttggccggcgggagatgctctacgggcggcgcgggaggagcggccggcgggacggaggtaggtggccgggccgggggacccagcgctgccccgccccatcctcgtggcttcagcctggtggccagggcggggatggcagacacctgggccgggacggacggagagcgccgtgggaggggccggttggcggtggcggcgcaggggcggaaagacccgggttttcgggggcagccctggcgtctggctctggctcagcccccgccataggcgcctttgcgcgggggtcataatggtcccgggtctccctgactgtggaggagcggggcttttctgcacgtggatactaacgggaggaattgcaccttccccctagttttttgtggggtgtttatcttgtttcactgttctctggtgcctttctgagggtgtggaaggaagaggaatggtactaatgcccgcggctgcacctggcggggatgccctcaccccactccttatcactgggaccacctgaccgccgggtctgtccagtcctgtctgtggccaacctggaccttcacggaataggaagcgctgactttggccccccgcatctgacagccttggtgtcctggagggggtccagcttgggcaggaaaaaacggtgttgcttccccggggccctcctgggaagcgaagctgcctgtgccgctgggagtggcccccccggcctggggctggagcctctgagccgccctggggcttctggacctcgcaggtggacccaccgcccaccacccagccctccatggcttctccaccggtgcaggtgtggtccccactgttagcccgggcctcgcggggccaatacccgggccacactctt

SEQ ID NO: 3674 - DNA, 6000 bp, Homo sapiens
tttgtgggggctaagagagagaccttggggaggggactcagtctttctggaagttggctttgacttctgacccataatctcagggctgatgaaatcccccaggcactgtggctgatttttatttttgatttctgttgttgttgcccaacaggaaaggattttgccaaagggaaaacactctgcctcttgttgcttgggggcacctaaggctgagaaggaagaaaatcagccactctgcaaggacatcccttgcttgccaaagtttccatctttcctacttaaaattacaaagcagaagtgaagttgatgacaaagagcattaggaacctggcatgctctctattttggattttttttttcactttattgaggacaagcttgtattctctgggagctggccttgtgagtctttgcccattgcctgctgccttgagttgtgagccatgatggtggcacctaagacatgtgctcagacctcaactcctattctttggaagttcccatgcctccgagccttgggtctcacacaagatcttgggaaaccccaggctctctttgttaccgtttgataccactcctccctatccccagtttctgcctcaaggaaaatgagtaatcccttttctaatctcctccttccctcctcttcccaagaggatggaaggaagattatacttgtaataatggtagttgcaatgaacaatgtgtctgttccaccaacctttttattaatcatgtgagaagctacaggttcacaatcacttctccaaaatccctgaaatgcaaaaaatctgaaaccttagtttttccctaaagttggcacacacaaatttgacagaacaatgtggcttgaactatcctgagactatggatgccttcatcccactgccgaatattcaagtgtttaacgaaggggcgctgcccgaagcccactgggtaagatgctttgtgggatatttgcatctgactctgaacatatctgacctccttggttccagataagagaccctggacctatctctgctttgtagataaggaagctaaggcccactgaagtttggtagcatccccaggctgcctcaaggtaggacagagccgggacaagacctcctagtaggatgagccaggtgcacctggaagagatgaccagccttcagctgtctttctagaactttgcactatattgggcctctgagttctgtcttggaattgtgttaaagataactgttttccagttcttcaacaccaaagccatcttggatggggtaaagagaaagaataaatattccatcatccacaacttttttttttttttttgagatgggggtcttgctctgttgcccaggctggaatgcaatgccatgattagggctcactgcagccttgacctcctgggctcaagggatcctctcacctcagcctcctgagtagctgggattacaggtgtgtgctgccaagcccagctaattgttttatattttgtagagacaaggtctcactatgttgcccaggctggttttaaactcctgggctcaagtgatcctcccgcctcagcctcccaaagtgctgggattaaaggtgtgagccaccacacccagcccatcatctgcatctctttctctttcaagctgtgtgtcccgctttgtgaattctggtatctgcccacgactttcctgagtctgaggctcccaggcagggcaacaagaagccttctcattgcactgagggatttcctagctcgtaagagttctagaaagtcccagattctctgaagtatggacgaaggtctcataagggctgcaaaaaatgctgttgttttctctggtatccctgcaccaagggctatttgaggacagagtaactaaggaaaggtcagtccgtgtgctaagccttgctcctggtgactgggaaacttcctcatgtcacttacaggaatggagacaagcttatctctggcttttcctgtatcaataagcaaccagggatgtaggttttgccaagcctcagacacgtatgccaagaacacaagcaacccctgatcttctaagcctagcggaggctgcatctctagttggttaagtagtgttgacttcatatccccatcgtgtcctctgagttccccctgggtgctggaggcctggcagcctttctccctgtactcacaggaggggttgacgcatgcagtcagggcctctgtggagtggcttttgggcgcctcgcctgcccggaagcctccccttctgttctcatctccatttgtcctcagctctacctgagtgctggcctcgcccagcctggggcaaggcagtgggcattgtgcttgcaccctcttcttcctctcctttttgattcttttcatctgtccagttgttggtgcggcggatgggaggacactccaggcagggaaaggtgaggcctcttagttttgctctgaatgtcccaaccagcatccccattttcgcatctcctgtttgtccagagacagaccctcacaggagggataacaaaacaaaaaaatccagctgcaacatcgaggtgaggggcagctcggagagaacagggcagaggggggaaaaaagaagcaaaaaaagggggaatgctgttatcatcagagctggcttctgcttctctggccaaatccttcccctgctagtgatatggtaagtttccagagcaagctgggctgacgcagagtctagggatggagactgggtcccaaccagggccggctctggagcagcctggatcagggatcaggatgggagggcagcctacgggccttgttcagaaaaaatatttgtgtatgactgagaaaatgtcaggttttcatatcaaggaatgagaggcctgatagagactgaggagtgcttccagccatcctgggctcaccactgtactcgtgctgttctctagaaaatggaaatcttcccggcaggggctccttcctaacctttagatcacagagctctcaagactctgaacaaaacagtggaccatcaccttccaaaggtgatgcgcgcgcgcgcacacacacacacacacacacacacacacacacagtttggcattttgttatagggggttcacagattcccccaaacctgtctgagtccccgataatgcacagggcgtctcaggtctgccactgtttggagacctgacccctcagggttggccacagcggatcccggaggccttggggctcatccctctgctaccaagtgactaggagcgctcagccttgctgggcacccccatcctgcggggggcattctcgtccggggctcgcagcccctccgcctctggacggacctccagactcacggaatctgccccacccccactctcagcctggcgggctccccagggggccgggaggaggcggccgctggatttccctgaggcgcggcgcggggcacacacggttaatcctccgcggctgctgtttggacgaaaagcgctgggggtgttggaggctcctcgctgctcacatctggctgggcttcgctccttgcgcgtctgtcccactttctccctctcttcctttactttcgagaaaccgcgcttccgcttctggtcgcagagacctcggagaccgcgccggggagacggaggtgctgtgggtgggggggacctgtggctgctcgtaccgccccccaccctcctcttctgcactgccgtcctccggaagaccttttcccctgctctgtttccttcaccgagtctgtgcatcgccccggacctggccgggaggaggcttggccggcgggagatgctctacgggcggcgcgggaggagcggccggcgggacggaggtaggtggccgggccgggggacccagcgctgccccgccccatcctcgtggcttcagcctggtggccagggcggggatggcagacacctgggccgggacggacggagagcgccgtgggaggggccggttggcggtggcggcgcaggggcggaaagacccgggttttcgggggcagccctggcgtctggctctggctcagcccccgccataggcgcctttgcgcgggggtcataatggtcccgggtctccctgactgtggaggagcggggcttttctgcacgtggatactaacgggaggaattgcaccttccccctagttttttgtggggtgtttatcttgtttcactgttctctggtgcctttctgagggtgtggaaggaagaggaatggtactaatgcccgcggctgcacctggcggggatgccctcaccccactccttatcactgggaccacctgaccgccgggtctgtccagtcctgtctgtggccaacctggaccttcacggaataggaagcgctgactttggccccccgcatctgacagccttggtgtcctggagggggtccagcttgggcaggaaaaaacggtgttgcttccccggggccctcctgggaagcgaagctgcctgtgccgctgggagtggcccccccggcctggggctggagcctctgagccgccctggggcttctggacctcgcaggtggacccaccgcccaccacccagccctccatggcttctccaccggtgcaggtgtggtccccactgttagcccgggcctcgcggggccaatacccgggccacactcttccagccccagaaagccagattatcttctctggaccctccgcgtgcttcaggcacccttgggccgactcatccctgcttgggagggagggaggaagccgcccccctctgtgaggtgttcctgactcttctaccccacctagtttctaggaaaggaggcaacatgacgtgctgggagctttctggtcctgagctttgaacatgagaaatgccgtgagaaactgttttctccaccgctggccacttcacagccccaggggagcatgtgatgtccttacaggctgcccggcctctgctttttatagtgcaggaaagtacacactccctggcaggccgtgcagccatgaacagccacagatagacgcacttggctgtggtgtgtgctgcagggagcgggaggacatgggaggacgtgctccaggaggcctctccagcacctgccaaccggggaggagggaaccaagacagggagatgggagccgaggtctgaggacaagcagaagcttccccaccctccctcttagagctgcagagctggagaggcccctagagtccacccaacaacaacagtggcaatcatcatcaccatcatcatcatcatcaccatcatcatcatcatcatgatgtcagccacaggtttgtgtgtctgcttctcacatggcaggcgctcaacattatattaataattataataattattataatagttaattctcaacacttctatcaagggaactctcacttgtggaaagagcagagctgcaaagctcaagaggctcacggcttgcttgaggtctcagagacagggatggaggactcaagactccaatctgtgtctttatcccaagtgcgtcatatgcttctttttttttttgagacagagtttcgcttttgtcatccaggctggagtgcaaggccaaatctcggctcactgcaacctccacctcccaggttcaagcgattctcctgcctcagcctcccaagtagctggattagaggtgtgtaccaccacgcctggctaattttgtatttttagtagagactgggtttcaccctgttggtcaggctggtctcaaactcttgacctcaagtgatccacccgcttcaaccttccaaagtgctgggattacaggggtgagccaccgcgcctggcctccggggcgtatacttttaaccttcctatctggtgttgggaacatggcactcagctcgccaagctgatgctgggaacttctctctcccagctgctaacagagaatgcccaggggcaggaaggacacaggtccgctacccagggactctctacttctcctcccgcctccctctcctcctcttgtgttgccaagggtggtgtccccagtgagctcattcagggaggca

SEQ ID NO: 3675 - DNA, 6000 bp, Homo sapiens
ggaaggcaccatggccagagtctggctctcagtggtggcttttcaggggtagcggggctttgtcagaaggaatctctgataaacattgggctactcctgggtccaggaacatgctggccattgcacatcacgcacaggatgggctgcaggacggggctccgtttccttctgtttcacggctgcaggccaccggccctactcaggcagcctccttcaacagcaagggccaaagacgaacaaagcccctcactgctaggaaacgggttctctctggctcgcctaattccagcctggatgaagtgccaccctgctgggctccctaccacctgtgctgttcctggtcctaacacatcccataccatagctgccagggactctactgcccaagggaaagggcatcttgttccgttcgtcccaagaatccagctccctgctgggtaggtagtagacactcaataaacacctgttgaacaaatgagcaaaagagcgtgagacttcagcactaggtcaacttgtattccccgtggttccgcttgagcctcaaacgatgcaatataacaagctctcttttctccccatcctactcttctatgcatctagtcgagtttcctggaataaacaaaatgctcccttagtccccagggtggggcttatttgtcatttttctagtggaaaataatgtgtacttactgtgaaaaaggacgtgactgttacaggggaaagaaacagagaggccaaaataagaaaatggtaagcatctgtattttcatcaccgcagataattgctgttggcagcctggtgggtggcctttgggtctttgtggttttgtgtgtgtgtgtgtgtgtgtgtgtgtatgtgtatgtgtgtgcctgtatgtgcgtgtgtttgggtctgcatgttttcattctgcattttcaaaactcattactgctttacaaactttctctctctttcttctttctttcttttctttctttctttctttctttctttttctttctttctttctttctttctttctttctttctttctttcttctttctttctttttctttctttcctctctttctctctctcttttccttccttcctttctttttcttttcttttctttttcttttttgagacagagtcttgctatgttgtccgggctggagggcagtggcgtgatctcagctcactgcaatctccatctcctgggttcaagcgattctcctgcctcagccttccgactagctgggattttaggcacacgccaccacacccagctaatttttgtactttttagtagagacggggttttaccatgttggtcaggatgatattgaactcctgacctcaagcgatccgcctgcctcggcctcccagagtgctgggattacaggcgtgagctactgtgcccggcccaaacatctttccatgtcagtaaatattcacctatttacagagacgcctaactggtgctgctggctgattctgctccccagtccctccatattatttcttttcttttctttttttttttttttgagatggagtcttgcactgtcgcccaggctggagtgcagtggcatgatcttggctcactgcaagctccacctgacaggttcatgccattctcctgcctcagcctcccaagtagctgggactacaggtgtctgccaccacgcccggctaattttttgtatttttagtagagacggggtttcaccatgttagccaggatggtctccatctcctgacctcgtgatctgcctgcctcggcctcccaaagtgatgggattacaggcgtgagccaccgtgcccagcccatattatttctttaaatgtctttagaaagaacgcgtttactggtttaccacaatccccatccctccctattgctgatttcaccactctcatcaaccaccttgtttttctagtttccatcatatggatggatgcactgtaaattttttgttttctttttttgagatggagtttcactctgtcacccaggctggagtgcagtggtgctatttcacctcactgcatcctcgcctcccaggttcaagcaattctcctgcctcagcctcccgagtagctgggattacaggcatgtgccatgcctggctaaattttgtatttttagtagagacaaagtttcaccatgtcggccaggctggtcttgaactcctgacctcaggtgatctgcctgcctcagcctcccaaagtgctgggattacaggcgtgagccactgcacccagccatgtatttcattagactgtcttcctggacatgtaggtggtttgtaaccttggtgaatggaggcagtggtttcatctctttgaagcaatagactttctgagtgcagataagaggagcgtttctagggaagatggctacatggccacaccaggagtcagcactctggtgacagtgatgtaccttggatctctgtgtccccagctggaattagagagagatttggacaggcttgtggctgaggcatgtcatctttggacgatggctctgtacttgggattgattgaaggtgaggagagcattggagccctgttgagagttagacaccggatgctggtgatgcctgagaaatgagatggggctcccatttcccaggggcttggagtcttggggacaggacgaggaaaccaaggactgtagaccggttcgtccggatgctgggggaggggcacctacagcacacccaggtctgggcaacttcccggaggaggtggcctcaggctgagctctggagaatacacggatggagaaggtggaggagaaacaggcatccagacagaggaaagagcgggtgccagaggacgagacctcaagtgtgatctgttagggactgagtagctccagggagctggactgaaagggactcacgcggggtggtgaagggccagatggaaacgctcagggcttactccctcctttactggcataggaagcccttggagccaggggtggcattcagatttgcgtttttcagagctgcctctggaagcagcgtgggagacagatgggaggcagaaaaccagccagggctggggaagaagtgatggagaggagaggagacctgcagggggctggcgatggatgagatgtggcgggtgcaaggaaggtggcatccaagtggcttgcaggcttctggcccgggaccccgcgtgatggcatgcatagctttcaccaagctgcaagccacaggaggagaagctaatgtggtaaggacgggggagaaggatatgagttaattgggggcttaaaagccttagggcagagcagcctggtgcggtggctcacacctgtaatcccagcactttaggaggccgaggcgggtggatcgctttgaggttaggagttcgagaccagcctgacaaacatggcaaaaccccatctctactaaaaatacaaaaattagctgggcgtggtggtgggcacctgtaatcccagctactttggaggctgaggcaggagaattgcttgaacccaggaggcggaggttgcagcgagccaagattgtaccattgtactcctgcctgggtgacaagagcaaaactctgtctcaaaaaaaaaaaaaaaaaaaagtcttagcgcagagcaaagaggaggtgttcagcagatgattgcatatgtgggtctagaccagcgctgcccagcagaaccttcagctgtggtgcaaggtgctaagagctgtgctgtctagtatggcagctgctagtcacgtgagcacttaaaatgtggctccttggccgagaactggatgtttcattttgtttaactgacatagctccatgtggctcgtagccactgtactgacttaaacatttgcaagcccaggtctcagcagccaggtcagtggtggggacatggaatggggcattgtcagctgaagatgtggtgtggaccaggacaggcagaaagaggtcaggcacggtggcttcacgctgataatcctacccgctttgggaggccaaggctggaggattgcttgagaccagcctgggaaacatagtgagatcctgtctctaaaaaaaaaaaatttttttttttaattagctggatgtggtggcatgtgcttgtagttccagctacccgggaggctgagatgggaggatcacttgggtccaagggtttgaagctgcagtgagccatgactgtaccactgcactccagcctgggtgacaggagaccctgtctcctaaataaataaataaataaatgtagaattaggagcaagaggagctgagagctgaggaacagcctgggagagcacctgtctttgggggttgatcaggaaggctaaacactgggagacagtgtgggccaaaccccatggctgaagaagagggcagtcgacattggcagatgcttacagtgcgcacgaaagaggaatgcagaagggtgttgggtgccacgagggtcgtgggtgatcgtagccaagcagtcggggcggggccagcaggaggagggccagtgggatgctgtgctgattatattcctgacctagaagccccaggctggggataaagccctgtcttatgccaggcttcctcaggagctgcctggaaaatgctggggcttgtccaggccccagacaaccaaatacgtttgtgctgcttgtaaagggctgggtgcgacggggcaccaggccatagaattcccaggttctttcctccctctgttttgggagcggtcggtccccgagggcgtccccgctgctggtgctagggaagtgggcggcgggccaggccacctgcagagtgggctcaggacagctgttggtgcctcttctctctcacacggttctcaaagcaggggcaagcctgccgcccgaggccttccagctgggaggtgagctgaggacagctgctctactcaaggaaatctttgtttccactgggacggaatcggagctctggaggctgggctggccaagcgccccgaaggcccgatgcctgacggctcatgcggcctccttgtttgcagggcctgggcaaaaatttacactgagtcccactcttcgctccaggtgagtccttcctggtgaaggtgcagttgctccaagatgggagggagatgctttaggatgggagaattcttggcctatcttcgcttcacttttttgtcccaagccagacctcattcccctccagggaagaggaaaccgttgctaattaagtagcaagtaaccctggaagagtctgtattcatccctggacttgggctttggaagtaaccaaataaacacctaagccttaaaaacaaaccctccttctgcaagacagagggcagctttttggaaacaggagagagggagattgagagaggagataggctccaggaccccagcatctctcaggaaaaggggctgctcggctccatctggcgagaattccttccataagggacccccatccaccacgaggttgagggaaagagggagagtctgagaccagtgggggcagtgcagttagagcagggaatattagctattaaatgggcttctagaagaggtaaacacacatcactcatcaaatgggagccactctgcccgcctcctgcccatcaccggaggagtttggtcattgggcaattagtgtgatgaatgaatggcttctggcagggaggaaagggctatgagcagatgtcacctgtcagaaggacaccccaacgtggcaccttcctctttcttggcaccccagtacctgaatcctcttgcagcaacaggagagctctaagcttctcaacaggagaattctaccagacgtcagagccgagggggagtggactcagggcttctcttctggttgggaggattctggggatgttccaaaggtggctggaggggatggcacgaaggggtggtgatggctaaggggccgttgaggctgtgtagaaaccaggagtgtttgagttctgggctgaatcgtatttttttttttttttgagacagtctcactttgttgcacaggttggagtgcagtgatg

SEQ ID NO: 3676 - DNA, 6000 bp, Homo sapiens
tcttttttttgagacaaggtctcactctatcgcccaggctggagggcagtggcatgatctcggctcactgcagcctctgcctcctgggctcaagcgattcttgtgcctcagccttccgagcagctgggattataggtgtgcaccaccatgcctggttacttttttgtattttttgtagagatggattttcatcacattgcccaggctggtctcaaacttgtgagctcaaatgatgctcctgcctcagcctcccaaagtgctgggattacaggtgtgagcccccatggccgggctcaggactttattctcgctctctgtgagtgtacatggacattgtaatgtaggagaaagagctgagctggtcaggaggcctgaattccagtaccaactgtttcatttactgcttctgtattttgtcctatgactgtattttctcttctgtaagataggaataataatatctgacccttcaagttgtataactgaagagcacattttgaaagtataaatagcactacagatgtataaggtattacaattgtgggcaatgaaaatttaggttacaacattaaaaaatatgctgttttttttttttcctttctggtgcacttttctaggtgaatgtgcctcttaggagcacttgtccagaagtgtctgggaaaagcttgggctgcacagtgatggtgctccctgaaagactcagagcagcacagccagtacctccagagtatgaagcatgaagtacacttattctacaagaataagaagtaaatataaaaaaagtcaaggattcaatttttaataaagtaacaaaatcaacaaaacaaaatcatattcagagtaacatggacttcacagcactttgaaaaagacatttaaatgttgatttgagttgttcagacattttaaatatgaagtcatagagtaaaaatacaatcaatgactgaaattgggaacaaaatatcctgaacataaaggcatttgaatctttggattttttttttttctctttgagacggactctcactctgtcaccctggctggagtgcagtggtacaatcttggctcacagcaatctccacttcctgggttcaagcgattctcctgcctcagcctcccgagtagctgggattacaggcatgcatcaccatgcctggctaattttctttgcatttttagtagagacgaggtttcaccatgttggccagactggtctcgaactcatggcctcaagcgatctgcctgcgttggcttcccaaagtgttgggattacaggtatgagccactgcgcctggcctcaaatctttgaatttgaattgaaaatgagaaaatgggacagtgctgttattccacaggggtgctagaactccactgagaagatatcaatggctggtagcctttgagtggtcagcagtcactttcagagtgttgtgatgatggatgacggtaaggcttatcaattttttttcttcttttttgagatgaaggctcactcttgtcacccaggctggggtgcaatggcgtgatctcggctcactgcacgctccgcctcccgggttcaagtgattcccctgcctcagcctcccgagtagctgggattacaggtgcctgccaccatgcccagctaatttttgtatttttagtagagacaggtttttgccatgttggccaggctggtctcgaactcctgacctcaggtgatctgcccgcctcggcctcccaaactgctgggattacaggcgtgagccaccatgcctggccagcttatcaaaactttaaggagtactgaaaatcatttagaagttagtaagttatagtctttatacaaaaaagagtcaagtgttcatgttgtataactacacttagaagacagctaggattttaaagattttcctttattttgtgtagagaagaaacatcacacaatattctacttgtcatctttcctcaacttaattacatatatgctcacacaggcaaaatatttaagtatatcataccatgaattgttacttggcaataaaaaaaaaagcccttctgttggatataactgtcttgtgatacagtgcagtaatgtctccctctcaaaatgtgtatatgttaaaaaaaatcatcactcaaggaaaatcctagtgttgcaaatttgtttttaagaatgtatcttttggccgggcacagtggctcacacctgtaatcccagcgcttttggaggctgaggcgggtggaccactgaagtcaggagtttgagaccagcctggccaacatggtaaaaccctgtctttactaaaaatacaaaaattagccaggcatggtagcgtgtgcctgtaatcccagctactcgggaggccgaggcacgagaatcatctcaacccaggaggcggaagttgcagtgagctgaaatcgcggcactgaccctagcctgggagacagggtgagactctgtctcaattaaaaaaaaaaaaaaaatgcatctttttccattgattagagggatgactaaaaaaagaagaatgcatcttttaaaagataaagtttggatttcctttactcacttcctccttccctgtattgttgtcttcaagatttatttactgctctatgccagggttagcaggttaatggctcatagattcctcagtttattaacccatttatcttgtttactggtgggtaaggcaaagataaaaatgtgtttggctgtagttgtccaagtgcaatgggcagcagtatcccataaggccaggaggtggtagtgttgtccataaaagtagaccttcattttttttcctggattgttcaaaatattttaaaccagtctgtatttgcaaaatccacacaggataaacttttgaaatagcaaaatttgggaatgtttgtctgtttttaatcaagaggacagagatatatttatatgtatatagtgtcacacataaggaattacatgtttgcctctctgggctttggcacacatagatactgcattgctacaaatgagattatgaacctataattaagtgatgctactttaaggggttgttttgtctctctcgtactgaaattataataagttgcctggggagctttcttctcctctttcaatttattatttatttttttgagacagactctcgctctgtcccccaggctggagtgcagtggtgtgatcttggctcattgcaacttccacctcccaggttcaagcgattctcctgcctcagcctcccgggtagctgggattacaagcgtgcgtcaccacactcggctaattttctttgtatttttagtagagacagggtttccccatgttggccaggctggtctcgaactcctgacctcagtgatctgcccgcctcagcctcccaaagtgctgggattacaggcctaagccactgcgcacggccctctttcaatttcttaattttccttttcgtcctgttgcttttctccctcctccccattcccagctgtatgtaagatggtatctcattttaatagactgttgttatttaaatagactgttgtagtttctaccgcaagatgcaattgttgagagcgtgatttctaacattttacataaaactgccgtaaaaggtttactggaacttaatatacattgcctatttggttgatgctttcaacactctgtagggctttcacacaggactagcctcagtggaattttatcgattaaattaatctaccaatgggtgattaagaattatctgttttattgcatatttaataggttgggggggcggaattctttctttctacggctaattgccctcagttcaattttaccactgtgatattcattccacatgctctgatgagtgtggtacttgagacattaccttagtgagggaagggaccaatgttacaaatgaatccggaaggacgctaaaactaacacctgcaaattatgtacatgtttatattccaggcgctggtttagcttttgggagaagtcagtgaggaaaacccgtaaagatccccgtctttacggtgcttaccctgaagatgggagtggagagggaggtattcaaccagcaagaaatcggaaaacgcgcagagcggccgcggggtcacgggaaactgccggaggctttcagggcccagggcccggcggggaggcttcagcgggcctgcattttcttaggcatccgctccaggcgggttcaagttttcaaccagaccttcggcgatccagcgcctagggaacgtcaatgcgggtgacttctcccgctgtgcagggcggtgacccgggttggcgcgcccagttccccgccagagtcggccggggacttccctgataaatgcgacaccctcttgcccctgcgccccccgaccgcgcgcccggccccgcgtgtcccccacgccccacaaccctgcacgccctacccggccgcgcatcccctccggaccgtgcgtcgccgccctcaccattgcgcccccagctgtgtgtcccttgcgaccgggccccccgaccgggcgtcaccgcctgcgactctgagagccctgcgggctagagaccgtgcggccatctcgcctcgaggcgaggccctcctgcctggtcctcacctccagagcgtgcatcccccggcccgtgcggccccctaaggggcgggcgctgggcggcgctggacggcgcgaggcggggcggggcggggcggggcgccggacgccatcgcgtcgctaccggccggcggctgtctgaccgggactgcagccgtgtcctcgccgccctcctcttgcccacgcctcccgggcactcgcctggtcccggcggcggcgcgcgcggccgcgttgggcggcggcggttccggggatggtgaggcggcggcgcgcgacgacgatgctccggagctgaggagacgccggcacacggcgcgactgccgagcgcagcgcccacccgcgggatggctcaggcggctggcccggcgggcggcggggagccgcggactgaggcagtgggcggcgaggggccgcgggagcccggggcagccggcggcgcggccgggggctcccgggacgcgctgagcctggaggagatcctgcggctgtacaaccagcccatcaacgaggagcaggcgtgggccgtgtgctaccagtgctgcggttccctgcgcgccgccgcccgccgccgccagccccgccaccgtgtgcgctcggccgcgcagatccgcgtctggagggacggcgccgtcaccctggcgcccgcggccgacgacgcgggagagccgcccccagttgcgggtgaggccgccgggcccctttccctcgtagttcttggaacacccgcggctgggccgccttaccctcagcgtccccggcccttccgcccccgccgtccccccccattttgccacgggagacccccgggaggatccggcggggacccgcaggggaggacggcgtcaggccgtggctggccggggcccctcggaggtcagagcctcgtggcgggcgacggcgcaaatccgctgtgcggaggacgtttgggtgggcctgggcctgcgggccgcggggcgctcgtcattgtgctgcccgcgggacagctgcccgcggcgcgtttgggagcggtgggctgggccctgctccgggccagcggcctgtgcgcctcacgccgtggctgctgacacacggccgggttcacggggtggggagggcatcgcaggcttcacgcgggggctccgcacggatcctcagtgccgctgtcggaaacaccgcactcctcacgggaaactagcagtattccacattagacagcctttcctcggttcggaaatgtaaagatgattctgaaccgtgagaattctgctctttggggagaaatggaaaaatagactaaatagtgatttttggctcctggacgttagaaaatactgattgcattcctgtatgtgaaaatttgttgtgatgaaaaacaggcttgtaaagtgaaaagttgacaggatgtcgggatacaaagagaaaatgggccttagttacgtcattgt

SEQ ID NO: 3677 - DNA, 6000 bp, Homo sapiens
agtattactcagccaaaaatgccgacagtgccagttaagaaactctgaccttgacatttaccccaattcttggtaaaaacataaaacagatggactagagacagtatagtggtgagaaaggaccacaggattagaggaagaaggaaactaaaacctactgagtacctgctatacagcaagtcttgccacttgacatatattatcctcacttatgccccaatcctgtgaaaacaacaatatattctgattttacacagaaggctagactcagggtgattggggaacttactcactgtcacttatctaaggggaagaatcacaaaacaaattcaaaccaaatgtttcattccacaacactactaagcctagacactaaaagaccaagatttgattcaaagagttactaatcacttaacttccctaaacgtccatttagaaaatatatcaggccgggcgtggtggcttacacctgtaatcccagcactttgggaggccaaggctggtggatcactgaggtcgggagttcgtgaccagcctgggcaacatggggaaaccccgtctctactaaaaatacaaaattagccaggcgtggtagtgcatgtctggaatcccagctactcgggaggctgaggcaggagaatctcttgaacccgggaggcggaagtggcagtgagccaagattgcgccattgcactccagcctgggcaacaagagcaaaactccgtctcaaaaaaaaaaaagaaagaaagaaacagaaatcaatggatgtgaaaacataaacgttgcagattgctaactacatataatcatgataaatacaatgaaaaagaaagtgtggccaggcaccgtggctcacttctgtaatcccagcactgtgggaggctgaggcgggtggatcacctgaggtcaggagtttgagaccagctcagccaacatggtgaaaacccttctctactaaaaatacaaaaattagctgggcatggtggtacacacctgtaatcccagctacttgggaggctgaggtaggagaattgcttgaaccctggaggcggaggttgcagtcagccgagactgcaccactgcactccagcctgggcgacaaagtgagactccacctcaaaaaaaaaaaaaaaaaaaaaaaaatttggctgggcacggtggctcacgcctgtaatcccagcactttgggaggccgagacgggcggatcacgaggtcaggagatcgagaccatcctggctaacatggtgaaaccccgtctctactaaaaatacaaaaaaattagccaggcatggtggcaggcatctttagtcccagctactcgggaggctgaggtaggagaatggcatgcacctgggaggcggagcttgcaagcttgcagtgagctgagatcgcgccaccacactccagcctgggcgactgagcgagactccgtctcaaaaaaaaaaaaattatttttacttattttccccaactcttccctacaatggaagtctcatgaatacaaacgttccttaaaactgaaacgagaagtcaggcgcagtggctcacgcctgcaatcccagcactttgggaggccgaggcaggcggatcatgaggtcaagagatcaagaccatcctggccaacatggcgaaaccccatttctaccaaaaatacaaaaattagctgggcgtggtggcatgcgcctatagtcccagctgctcgggaggctgaggcaagagaatcacttgaactcaggaggcagaggttgcagtgagccaagactgttctacagcactccagcctggcaacagagggagactccatctcaaaaaaaaaaagaaagaaagaaaagaaaagaaaaagaaaagagagactgggcaaggtgggttacacctgtaaccccagcactttagcaggccaaggcagttggatcacttaagcccaggagttccaggctgcaatgagctatgactacagcactgcactccagccttcagcagcctgggcaatacagcaagaccctgtcaaaaaaaaaaaagaagaaaagaaaaagagagagagagagagaaagagaaagaaataaagcgaaagaaagaaggaaggaatagaatttttaagtgtgcacaccaccaaattattcatcaagtgtaagaatcaagataaaatcttcagaagactgtatcttcctgagccacgcaactattcttaaagccaatgaggaaataaactaatgttttagtatgaacttcttaaataattttaggcaacagaaaatgctcaagtctctatcaacaactttgattaggcctcctccataactggtagcgcaggtcatgagcagaactgagaaagagaattataaacctattgcgaattgtggagaacaactccactcactattttctccataaaggcagtttattacactgagatcaacatgttatcactcacactagtgatgtaaaaaataatccaattcaacataagattcagaccaaaaaaaaagaaaaaacccatccacgagaatctatcaatctttgacaacaaaactacacgattttgggattaaatttaagtgacaagacaatgtaaactgggggcttgttctctccggaaatcaccactaccaacgctgcttctaaaagcaggctgcacacaaccatttttcctctggaaatagctaaatcccaaggcacgatattgctgtatttttttttgagacggcgtctcgctctgtcacccaggctggagtgcagtggcgcgatctcagctcactacagcctccacctcccaggttcaagcaattctcccacctcagcctcccgagtagctggtattccagcggcacaacaccacgcccggctaatttttgtatttttaatagagacggggtttcaccatgttggccaggctggtctcgaactcctgacctcaggtgatccacctgcctcggcatcccaaagtgctgggattacaggcttgagccaccgcacctggcagacattgctgtattttataaatgtatcttttgtaccatttaatacactataaattataattgcaagtatttcccactaagattaagtccaagtttaaaagcaataagcccatcaaagaaacaaaaatactatttgaaatagtttcaaaagaacaattaaaaagatggctttaaataaaaaatcgtttacctgacgctaaaaaataaaagataaaagcatgtaaataaaaatgtgtttacctgacactaaaaaataaaagataaaaacgttctggtggaactgaaagaataactataaccttgaatattgttttaatcaagttagacaagggttttcattaaatgtcattttactaattcgaaattacatctttcaccttaagcattttgacatttccatcaactttctaaaagtgagggtagattgtttttctatgtttttaatagacttgcctctcaaaagaatgaattagataaaaactgatgggagaaaccttttctcaacctcctcctcctcttcaatgagcatctgagtaaaccctggctataaattactgtttaggtcataatcctgaaaattttacattagacaatgacgtaactaaggcccattttctctttgtatcccgacatcctgtcaacttttcactttacaagcctgtttttcatcacaacaaattttcacatacaggaatgcaatcagtattttctaacgtccaggagccaaaaatcactatttagtctatttttccatttctccccaaagagcagaattctcacggttcagaatcatctttacatttccgaaccgaggaaaggctgtctaatgtggaatactgctagtttcccgtgaggagtgcggtgtttccgacagcggcactgaggatccgtgcggagcccccgcgtgaagcctgcgatgccctccccaccccgtgaacccggccgtgtgtcagcagccacggcgtgaggcgcacaggccgctggcccggagcagggcccagcccaccgctcccaaacgcgccgcgggcagctgtcccgcgggcagcacaatgacgagcgccccgcggcccgcaggcccaggcccacccaaacgtcctccgcacagcggatttgcgccgtcgcccgccacgaggctctgacctccgaggggccccggccagccacggcctgacgccgtcctcccctgcgggtccccgccggatcctcccgggggtctcccgtggcaaaatggggggggacggcgggggcggaagggccggggacgctgagggtaaggcggcccagccgcgggtgttccaagaactacgagggaaaggggcccggcggcctcacccgcaactgggggcggctctcccgcgtcgtcggccgcgggcgccagggtgacggcgccgtccctccagacgcggatctgcgcggccgagcgcacacggtggcggggctggcggcggcgggcggcggcgcgcagggaaccgcagcactggtagcacacggcccacgcctgctcctcgttgatgggctggttgtacagccgcaggatctcctccaggctcagcgcgtcccgggagcccccggccgcgccgccggctgccccgggctcccgcggcccctcgccgcccactgcctcagtccgcggctccccgccgcccgccgggccagccgcctgagccatcccgcgggtgggcgctgcgctcggcagtcgcgccgtgtgccggcgtctcctcagctccggagcatcgtcgtcgcgcgccgccgcctcaccatccccggaaccgccgccgcccaacgcggccgcgcgcgccgccgccgggaccaggcgagtgcccgggaggcgtgggcaagaggagggcggcgaggacacggctgcagtcccggtcagacagccgccggccggtagcgacgcgatggcgtccggcgccccgccccgccccgccccgcctcgcgccgtccagcgccgcccagcgcccgccccttagggggccgcacgggccgggggatgcacgctctggaggtgaggaccaggcaggagggcctcgcctcgaggcgagatggccgcacggtctctagcccgcagggctctcagagtcgcaggcggtgacgcccggtcggggggcccggtcgcaagggacacacagctgggggcgcaatggtgagggcggcgacgcacggtccggaggggatgcgcggccgggtagggcgtgcagggttgtggggcgtgggggacacgcggggccgggcgcgcggtcggggggcgcaggggcaagagggtgtcgcatttatcagggaagtccccggccgactctggcggggaactgggcgcgccaacccgggtcaccgccctgcacagcgggagaagtcacccgcattgacgttccctaggcgctggatcgccgaaggtctggttgaaaacttgaacccgcctggagcggatgcctaagaaaatgcaggcccgctgaagcctccccgccgggccctgggccctgaaagcctccggcagtttcccgtgaccccgcggccgctctgcgcgttttccgatttcttgctggttgaatacctccctctccactcccatcttcagggtaagcaccgtaaagacggggatctttacgggttttcctcactgacttctcccaaaagctaaaccagcgcctggaatataaacatgtacataatttgcaggtgttagttttagcgtccttccggattcatttgtaacattggtcccttccctcactaaggtaatgtctcaagtaccacactcatcagagcatgtggaatgaatatcacagtggtaaaattgaactgagggcaattagccgtagaaagaaagaattccgcccccccaacctattaaatatgcaataaaacagataattcttaatcacccattggtagattaatttaatcgataaaattccactgaggctagtcctgtgtgaaagccctacagagtgttgaaagcatcaaccaaataggcaatgtatattaagttccagtaaaccttttacggcagttttatgtaaa

SEQ ID NO: 3678 - DNA, 6000 bp, Homo sapiens
acgaaattataccacactacatattcagttaggccaacataaaagaatacttttattaaacagtaaataataagcttatataaaaccaaagagaacaatttgctaatgtctcagaaagcatgcaaaaaactggaaatacaagtacagtcctatttctatcactaacttttcagaagactggcaaattgtgatgagttatccagtaacttacagcatatcagtgctttctgattcataagataagtctgttctttaaaagtacttaactaaagtatatgctactacaataaaaagccttcaagtatgtcaatattaatccccaaactacctcaagaaatccctttaacctccagaaattatcactgtataattgacatacaactgaaaaatacagcacatcgaatctagcaatttatcctattaattgccttattaaggtaacatctttcaaagggaaaaaaataaattttagtaatgtttcagtcatctttaaatctaaaattgtgaagacattctgaaactttgcttagtttacaaatataaagatttccatactgacaattacaaaatacaaaatacctttactgaaagaaacatagtgtaaaacaattacaggaatcaagtagcataaaatttagttatgagaattacatgctttattggagaaataagaaaaaaaagaaaaaattaaaatgacagttatatgttcacatctaaatttgactttttattttatttatatttatttgtaagtatttataaaaatttattagaagtttttataaataatttataaatatttattcatttatttatttatttaaacagagtctcactctgttgcccaggctggagtgcaatggggtgatctcggctcattacacgcgcctgccaccatgcccggctagaaattttgtatttctagtagagacagggtttcgacatgttggctaggctggtctcaaactcctgacctcaggtgacccacctgccttggcctcccaaagtgctgggattacaggcatgagccaccacacccagcctattttttattttttgtagagacaatgtctcactttgcccagacttgtcttgaactcctggcttcaaatgattctctcacctagacctcccaaagtgttgggatttcagctgtgagtcaccgtgctcagcctaaacttcgacttttaaaagttacataacatcatcaatctggttatattttataaatgagaaggaccatgtctcattttccactatatcatcccagcacctgcctagcataacactatgcacataataggtatttaagtgtgtattactaaagaatcaacaatgaaaacagtcaaaaaataatatccagggaaaatgaatagcaaacagaatattgcaagaaggtggatagtagtttaaattgaaaagagcagtgggaaacaaaatagagattcctccattataaatctctccttacagaaaaagtcattattattgtttcacaataaaacataacaaagatttactcaattaaatgacaatttattactgtttcttacccaagctttctctgtgtacttcaagtaaaaagccatcatgaaaatctggttcacaggcacatggaacaggtttagaacgaaaacgttggtttcgataatgtaaacataaagtaaacgttgaacaaacttgtccaggtaaaggctcaggttcttgcagatgttccaagaaagcttttccacccaaaacctgaaggtaaagatacctccgtgttggatcaatattagctgtaaagtgtagcaatatatatgaggaaactgccaaataacttaaaagaatgtgatcaagacattaggaaataaaaacttgacagataaaaacccaataccaaagactaaaaaaaaagcaaaagagtaacaaatttattactgtatatgccagaatcatttgcactctggggagaagatacacaaaatatgatattcttttctgagtttacatccaggctactttctcccagctggaaaaggcatcagagccaatatgtagtatacttttgctttttaactgcttatccaacattcctccaccttcacaaaccaactcatataattatcaattcagcaagtgtatttgtcaattatattaatatttaaaagcaaggctgtacagtttttataaaacatattattaaaacacaagaaactggtgatgctgtttttgcttctaccgtgctatacattaactcttctgatatacttcatgcaaaacaatctgttttagccaaccataaaattttaagtattttattttggggggaaaaaatggaaatgtcttctatcaaatacgaaagactacaccacatcaatatttactattaaccacaactaaattaatgttaaaatatacatacttttttttaatgtcgattgtctatcaaaacaaataggttgttttggagaggaagggagttcttgctcaacactgtcctagaaaggcaggaaaaaaaaatcaaaacaaattagaaaacaattataggttaaggaaatgtcaataaacatgactaagcactgaacctaaagtcaacagggtaaggccctttcaaagaaccccttattttcctagcctaattaaaataatgaaaataaaagcctgcataaaagatgatgtaaactgatcactcctaaaatcaaatgctaaggaattaaactgtcttcaagtaatactatccacataaagctaaaaacaaatccttaataccttcaacaaggttaaactttctgtaaaccttatgtaacagttggcttataattccactatgagctgattttaataaagtgtcatcacagagtagaagctgttattaggtcaatttttataacaaacgggttcataaacttcaaaaaccaaaaaaaggtgctgtattaaaatacttattccctattgtattatgaagtccatccaattttcacattatattacccaggtattgaggtcacagtttccattattgcctcactttcaaatgaaggcctacttactaattgtgcactgagagactatcatcccattattgacctatttgtattaaaagatttgaggactcttatgcagtcaattattttcttaaagaaatttgtaatttgttaatcatagagaatataatcccaaaagagtgcttattttaaaaatacgcttaatctaaaaaagttacagatcataatgaaaaagaactttgttatggtgaactaattggactaaagtatgtatattcaaatttacagacctagaaaataagagaaaattctgtcactgtagagacaggaataagatatctaacacaaatttcattgatacacaaaactattcagtatattcaagggcagagctagcctatacttgaaacaaggacactagtaaacagaatgaccttgaagtggttttactaaaacgaaaggccccacatcggaaccttataagtagtgttacgcattagtatatacatatatactctcatttatttccctaaaagattactcacagtaacaaaattaagttctttcatcacatcgtcaatgattcctcgacgtctaagggctttgatcaaatcttctgttgataaatgctgttgatcaggtgccaattcttcccgtatagtctcagcaaggatttctcttattctaccatggacatccatctatgtagaaaactcatattacaatttataacatcacaaagcagtcaaatactgcttctgaagttttaaggttctccagctaacagtaaatgcacaattgttaccacaattgaatgggaacaaaggtaagcttttaaagaatgaatcttttgagtacaaattctagaaatagtctccactggttatctggcacctttgttaccatttctccacaaacaacactcaaccaaaaggaatcttctgagagggagtatagtataatcagaagaacacggactgggagtaggcagatcaaagtatgatcttattactttcatactttgatctgcctaatgataagggaatcttaccagctttcaacttagtagatgtgtaacctcaagccaacttatttaccctttataaatctgtttcgtcaccgataagaatggaaaaacctagtgtagtgccctctcacgatagtgttgtgaggattaaagatactagacagcacaaagcctggcacacaagggcaccataaatggtcgcttttatcacttcagcatcttgcactcagtcgagcgagcgctgcagaaactggaggttcttctggagctccgaaatattaacaaattccgtcattacaaaccctttagtaacttctcttccatgacttatttgagaattgctgattgaagctcctggttcaacttcgctgatacccacatgtttcagcggtaaagaaaccctgatatctgccgggcgcggaggctcacgcctgtaatcccagcactttaggaggccgaggcggccggatcacgaagtcaggagttcgggaccagccacaccaacatggtgaaaccgtctctactaaaaatacaaaaattagccgagcgtggtggcgcgcgcctgtaatcccagctactcgggaggctgaggcggagaatcgcttaaacctgggaggcggaggttgcagtgagccgagatcgtgccactgcactccagcctgggcaacagagagactccgtctcaagaaagaaaaaaaacctgatatcttacagcagaatataaacctccaaatacaacttacactcgatccgacttccagaagtcgctcgctaagcgcttcattctcacggccgtcctaaaacgccaagaccgctcgttctatcgccccagactcttgctagcacctgctcggctcgttttctttctcggagacgaggacgctctcctgcctcaaactcaaagctctgcctactctgcgttgcgcaccccacaatcctcgctacagtcccggcaagcagatgccgctgtcggcccggggccgccgggcaggagggaaaggttatgggtcggcccggcggtctctcccagcacccgcgactctcaccttgctcagctgctggtggatgagctgcttcagctcggaggctttctccggaggcagcgacatgctggcagccggcgtctccccgccgcttctccccgcctcagatgccctaactgcgcggccccggccgggccagggagcgttaggagcgactggagcacaaagcgccgcagccgttcgcctagcgcagctcccgggggacgcaacgccgcgtcaggccgggggctgacctggaaatgaggccccggcggcggcggcgccaactgttttcaaacagtggcggacaaacagggcttggggctggcccgcacgctgcctgatcgtttccgcccgccgctccacctccccgcgggccccgcaccccgagacctcagcgcaccccatcgccttgcttgccagggtctccgaaagcgctgctggcccctcttcgcggccacccggcggcctctttccgccctctgaaccggcagttagctggacgggcctcaagggcccggcgcccagggactcaaaggaccctcccgcgccccgcgaggctccggggtctcgggcttccgccttcttgctgccctcgttcttgccagggccgcggttagtccctgctggccaccccactgcgaccatgttcgttccctgcggggagtcggcccccgaccttgccggcttcaccctcctaatggtgagtctccatttgcgctcggggctgccgcctcccgaggcccctgcggtgtcgccaccccgacgcggggtgtttggcggtgccttgggagaaatagggcactagtttctatttcatgttttcggccggaaaaaacagggaggttgtagccggaggcagccgtccaaacagaacctttgtcggctgtaaaaccaaacgtagtcaagtctacaatttgtagtctctgtttcctgtaaaacgtgatgtgttcgtacgttctag

SEQ ID NO: 3679 - DNA, 6000 bp, Homo sapiens
ctggtgctgtgctgcattataaccagtgttccctgattaatcaagcctgatagtccaatgaggaattacaaagatttacagtatgggaaaagcctacacctattagtggcatcaggcaagtcaatctctttgagccttatctataccatattattatggatcctataatggaagaagatgactacgaggataagacttagttgacgtaacatatattaaacctacaagactgagtccagcgcaatctacttttcgcctttccatattattagtgatggttacacataccagtaagaacaggagataaaactgaggatagaaggaaaaaaatccatgttgaaaaacaaggaaatttaaaaattctagaaaagatacaagtatgggctgggcacggtggctcacacctgtaatcccagcactttggaaggctgaggcggttggatcacgaagtcagaatattgagaccatcctggctaacacagtgaaacccccgtctctactaaaaaaatacaaaaaattagccaggtgcggtggcaggcacctgtagtcccagctactcgggaggctgaggtaggagaatggcgtgaacccgggaggcggagcttgcagtgagcggagatcgcgtcactgcactccagcctgggcaagagagcgagactccgtctcaaaaataataaaaaaaaaaaagatacaagtatgatcttattctcaaccttcgtaagacttgccatttacaagaggctaacaacaactaaaaccaggacataaaagaataggacaatgtgattgggttgtgaactctacacaaagttggcactaagtaaacatttgctacaaaacaattatcaataaagtctatttctaatttaaaacaactctactttgtagtggaaaaatacaaggtaaagtcttacataccttcagcatttatgctaagttctgttgaatttccttctgtggtcgcatatggattgtttccaaccattggcacaagacaatcggtatagaagtaaccaatcttagacatattcagtgtagaaataatcagatccattgcaagctggccaacatttccaacagatactgctggctgaaattataaaagatatgttcagtaagtcaccaaaattagcagcactttattttattttttgaaacagagtctgcctctgtctcccaggctggagtacagtggcgtgatcttggctcactgcagcctctgcctcctggcttgaagcaattctcctgcctcagcctcctgagtagctgagattataggcgcgcaccaccacacccagctaatttttgtatttttagtagagacggagtttcaccatgttggccaggctggtctcaaactcctgacctcaggtgatccaccgacctcaggtgatccacccgcctcagcctcccaaagtgctgggattacaggcgtgagccaacacgcctggcccacagcacttcaaaaagtttagacagaatacaatagttatattagtactgaaagcatcataacatcatagctagatattgattttcattaactacaactgctggggcctcctccacctttgagactatttaacaaatacttattgaatgcctactatatgtcaattgttgctctaggcactgggaatgcagtaaaataaaccaacaaaagttcatgccctcatggaacttccattccagtgagagtggtttacctgtaataaacaaaacaaacactaaaatatacagtggtaattgctacggagaaaaataaagtgagtgtgaggatgtgtgtacatggttgattgcaattttaagtagagtgttcgaggaaagactcaccctaggtgacaaatgactagagacctgaaaaaggtaaaggagacagccgtacagagatctgggaaagaacattccaggcagtgggaaagcaagtgtaaaggcttcgaggtatgaacagaagcactcttgggtctgcttaccatttgctttattagtgcctctttacccattccgaaaggttgaagtgatcttttcacactaaacacacacacacacacacacacacacactctctctctctctctctctctctctctctctttttcccatgacttaaaataatgaagctgccaaatccctacctacatcccagaacacgtaggagctccacaacctaatggacgtctccacatggttaggtcacaggaaactcacattccacatgtccaaaactataaacttttgcccaaatttttccccatattttgtattttagaaaagggcgccgggcatggtgtctcatgcctgtaatcccagcactttgggaggccgaggcaggtggatcacctgaggttaggagtttgagaccagcctggcctacatggtgaaaccctgtctctaccaaaaatacaaaattagctgggcgtggtggtgcatgcctataatcccagctactcgggaggcagaggcaggagaatcacttgaacccaggaggcagaggttgcagtgagccaagatcgtgccattgcactccagactgggcaaaaaagagcaaaactccatctcaaaaaaaaaaaaaagttcaatattattcaatctacctaaacttcttcccattcccttaccaactacatctaatacatgcctaatttttattgaggctatcccccaagtatccttttaatgtagctcctcctttgcattcttccaacaactccttttgttttctgtccttcgggtgttccctcagcatgttctcccacttttcactgttgtcacctaccaattgcctagttacctcctgcaattcccttctcaacgattttgctacttgggttaaactcttctgtaccatccttcttttcctcacaatattgtattattcccatcagcacgtaaacatgctctaatatctttcattctaaaaggctctcccttgaccccacatagccctctaactgcaacctcatttcttgtttctctatgtagcaaaaattctccaagtcgtccacgaaaacataagcagaaactttatctcttattaaaaaaaagttttttgagacagggtctcactctgtcgcccaggctggagtgcagtggcacgatttcagctcactgcagcctctgcttcctgggctcaagtgatcctcccacctcagcttcccgagtagctgagatacaggtgcaggaaaccacacctggctaatttttatttatttttttgtagagatgaggtatcactatgtcgcccaggctggtcttgaactcctgagctcaagcgatcctcctgtactcggccttctaaagtgctgggattacaggcatgagccatcatgcctgtctctgaattaatgactgaatatatattatacaacccaaatctttaacttgttttctatcattcattcaacccactccaatatggctttcctcttcaccacttcactggtaactgtttgtccaggtgaccatcattaacatgtcgctaaatccaaacatacactttcttcaccttacacatctctgggctacttttgacatggccactccctcctttttgaaacactcttctctggggctgtgtgttttatatgtaatgaataaggatgacacttccagctctctccagccttataccactccaaacagtgcattttccaatggtgccttctgggttcacagggcctacagcctattctctctcaatgtgtcattccaaattcttggcagtcttcaagtccccctgcttactgactctgttttagacatccatctttctgaaacgcctactttcccctactcccagcccacgggccctccatcttttgcatactactttctctataaagcctttcttaacaagccatctgtccctcccctcccaattatctcaggacctttctataccctttcaagcttctagcctagcatttattgctcttagattacatgtttccaactacagtgtaaattctttgagggcacgcacctagtcttattctaatactcgcacataacagactttattaaaacaatgaatgaatataaagagcgataaaactgcgctaactaccggcaagagttaatgtttattgccctatcagtagttctccggttaacaacgataatatgctagcttaagactaattctaaaactagtcgtagaaagactttctaggataaaactgaaggatgccctgcaaaacataagtacagtgtatctagaacgtacgaacacatcacgttttacaggaaacagagactacaaattgtagacttgactacgtttggttttacagccgacaaaggttctgtttggacggctgcctccggctacaacctccctgttttttccggccgaaaacatgaaatagaaactagtgccctatttctcccaaggcaccgccaaacaccccgcgtcggggtggcgacaccgcaggggcctcgggaggcggcagccccgagcgcaaatggagactcaccattaggagggtgaagccggcaaggtcgggggccgactccccgcagggaacgaacatggtcgcagtggggtggccagcagggactaaccgcggccctggcaagaacgagggcagcaagaaggcggaagcccgagaccccggagcctcgcggggcgcgggagggtcctttgagtccctgggcgccgggcccttgaggcccgtccagctaactgccggttcagagggcggaaagaggccgccgggtggccgcgaagaggggccagcagcgctttcggagaccctggcaagcaaggcgatggggtgcgctgaggtctcggggtgcggggcccgcggggaggtggagcggcgggcggaaacgatcaggcagcgtgcgggccagccccaagccctgtttgtccgccactgtttgaaaacagttggcgccgccgccgccggggcctcatttccaggtcagcccccggcctgacgcggcgttgcgtcccccgggagctgcgctaggcgaacggctgcggcgctttgtgctccagtcgctcctaacgctccctggcccggccggggccgcgcagttagggcatctgaggcggggagaagcggcggggagacgccggctgccagcatgtcgctgcctccggagaaagcctccgagctgaagcagctcatccaccagcagctgagcaaggtgagagtcgcgggtgctgggagagaccgccgggccgacccataacctttccctcctgcccggcggccccgggccgacagcggcatctgcttgccgggactgtagcgaggattgtggggtgcgcaacgcagagtaggcagagctttgagtttgaggcaggagagcgtcctcgtctccgagaaagaaaacgagccgagcaggtgctagcaagagtctggggcgatagaacgagcggtcttggcgttttaggacggccgtgagaatgaagcgcttagcgagcgacttctggaagtcggatcgagtgtaagttgtatttggaggtttatattctgctgtaagatatcaggttttttttctttcttgagacggagtctctctgttgcccaggctggagtgcagtggcacgatctcggctcactgcaacctccgcctcccaggtttaagcgattctccgcctcagcctcccgagtagctgggattacaggcgcgcgccaccacgctcggctaatttttgtatttttagtagagacggtttcaccatgttggtgtggctggtcccgaactcctgacttcgtgatccggccgcctcggcctcctaaagtgctgggattacaggcgtgagcctccgcgcccggcagatatcagggtttctttaccgctgaaacatgtgggtatcagcgaagttgaaccaggagcttcaatcagcaattctcaaataagtcatggaagagaagttactaaagggtttgtaatgacggaatttgttaatatttcggagctccagaagaacctccagtttctgcagcgctcgctcgactgagtgcaagatgctgaagtgataaaagc

SEQ ID NO: 3680 - DNA, 6000 bp, Homo sapiens
tttattggagaaataagaaaaaaaagaaaaaattaaaatgacagttatatgttcacatctaaatttgactttttattttatttatatttatttgtaagtatttataaaaatttattagaagtttttataaataatttataaatatttattcatttatttatttatttaaacagagtctcactctgttgcccaggctggagtgcaatggggtgatctcggctcattacacgcgcctgccaccatgcccggctagaaattttgtatttctagtagagacagggtttcgacatgttggctaggctggtctcaaactcctgacctcaggtgacccacctgccttggcctcccaaagtgctgggattacaggcatgagccaccacacccagcctattttttattttttgtagagacaatgtctcactttgcccagacttgtcttgaactcctggcttcaaatgattctctcacctagacctcccaaagtgttgggatttcagctgtgagtcaccgtgctcagcctaaacttcgacttttaaaagttacataacatcatcaatctggttatattttataaatgagaaggaccatgtctcattttccactatatcatcccagcacctgcctagcataacactatgcacataataggtatttaagtgtgtattactaaagaatcaacaatgaaaacagtcaaaaaataatatccagggaaaatgaatagcaaacagaatattgcaagaaggtggatagtagtttaaattgaaaagagcagtgggaaacaaaatagagattcctccattataaatctctccttacagaaaaagtcattattattgtttcacaataaaacataacaaagatttactcaattaaatgacaatttattactgtttcttacccaagctttctctgtgtacttcaagtaaaaagccatcatgaaaatctggttcacaggcacatggaacaggtttagaacgaaaacgttggtttcgataatgtaaacataaagtaaacgttgaacaaacttgtccaggtaaaggctcaggttcttgcagatgttccaagaaagcttttccacccaaaacctgaaggtaaagatacctccgtgttggatcaatattagctgtaaagtgtagcaatatatatgaggaaactgccaaataacttaaaagaatgtgatcaagacattaggaaataaaaacttgacagataaaaacccaataccaaagactaaaaaaaaagcaaaagagtaacaaatttattactgtatatgccagaatcatttgcactctggggagaagatacacaaaatatgatattcttttctgagtttacatccaggctactttctcccagctggaaaaggcatcagagccaatatgtagtatacttttgctttttaactgcttatccaacattcctccaccttcacaaaccaactcatataattatcaattcagcaagtgtatttgtcaattatattaatatttaaaagcaaggctgtacagtttttataaaacatattattaaaacacaagaaactggtgatgctgtttttgcttctaccgtgctatacattaactcttctgatatacttcatgcaaaacaatctgttttagccaaccataaaattttaagtattttattttggggggaaaaaatggaaatgtcttctatcaaatacgaaagactacaccacatcaatatttactattaaccacaactaaattaatgttaaaatatacatacttttttttaatgtcgattgtctatcaaaacaaataggttgttttggagaggaagggagttcttgctcaacactgtcctagaaaggcaggaaaaaaaaatcaaaacaaattagaaaacaattataggttaaggaaatgtcaataaacatgactaagcactgaacctaaagtcaacagggtaaggccctttcaaagaaccccttattttcctagcctaattaaaataatgaaaataaaagcctgcataaaagatgatgtaaactgatcactcctaaaatcaaatgctaaggaattaaactgtcttcaagtaatactatccacataaagctaaaaacaaatccttaataccttcaacaaggttaaactttctgtaaaccttatgtaacagttggcttataattccactatgagctgattttaataaagtgtcatcacagagtagaagctgttattaggtcaatttttataacaaacgggttcataaacttcaaaaaccaaaaaaaggtgctgtattaaaatacttattccctattgtattatgaagtccatccaattttcacattatattacccaggtattgaggtcacagtttccattattgcctcactttcaaatgaaggcctacttactaattgtgcactgagagactatcatcccattattgacctatttgtattaaaagatttgaggactcttatgcagtcaattattttcttaaagaaatttgtaatttgttaatcatagagaatataatcccaaaagagtgcttattttaaaaatacgcttaatctaaaaaagttacagatcataatgaaaaagaactttgttatggtgaactaattggactaaagtatgtatattcaaatttacagacctagaaaataagagaaaattctgtcactgtagagacaggaataagatatctaacacaaatttcattgatacacaaaactattcagtatattcaagggcagagctagcctatacttgaaacaaggacactagtaaacagaatgaccttgaagtggttttactaaaacgaaaggccccacatcggaaccttataagtagtgttacgcattagtatatacatatatactctcatttatttccctaaaagattactcacagtaacaaaattaagttctttcatcacatcgtcaatgattcctcgacgtctaagggctttgatcaaatcttctgttgataaatgctgttgatcaggtgccaattcttcccgtatagtctcagcaaggatttctcttattctaccatggacatccatctatgtagaaaactcatattacaatttataacatcacaaagcagtcaaatactgcttctgaagttttaaggttctccagctaacagtaaatgcacaattgttaccacaattgaatgggaacaaaggtaagcttttaaagaatgaatcttttgagtacaaattctagaaatagtctccactggttatctggcacctttgttaccatttctccacaaacaacactcaaccaaaaggaatcttctgagagggagtatagtataatcagaagaacacggactgggagtaggcagatcaaagtatgatcttattactttcatactttgatctgcctaatgataagggaatcttaccagctttcaacttagtagatgtgtaacctcaagccaacttatttaccctttataaatctgtttcgtcaccgataagaatggaaaaacctagtgtagtgccctctcacgatagtgttgtgaggattaaagatactagacagcacaaagcctggcacacaagggcaccataaatggtcgcttttatcacttcagcatcttgcactcagtcgagcgagcgctgcagaaactggaggttcttctggagctccgaaatattaacaaattccgtcattacaaaccctttagtaacttctcttccatgacttatttgagaattgctgattgaagctcctggttcaacttcgctgatacccacatgtttcagcggtaaagaaaccctgatatctgccgggcgcggaggctcacgcctgtaatcccagcactttaggaggccgaggcggccggatcacgaagtcaggagttcgggaccagccacaccaacatggtgaaaccgtctctactaaaaatacaaaaattagccgagcgtggtggcgcgcgcctgtaatcccagctactcgggaggctgaggcggagaatcgcttaaacctgggaggcggaggttgcagtgagccgagatcgtgccactgcactccagcctgggcaacagagagactccgtctcaagaaagaaaaaaaacctgatatcttacagcagaatataaacctccaaatacaacttacactcgatccgacttccagaagtcgctcgctaagcgcttcattctcacggccgtcctaaaacgccaagaccgctcgttctatcgccccagactcttgctagcacctgctcggctcgttttctttctcggagacgaggacgctctcctgcctcaaactcaaagctctgcctactctgcgttgcgcaccccacaatcctcgctacagtcccggcaagcagatgccgctgtcggcccggggccgccgggcaggagggaaaggttatgggtcggcccggcggtctctcccagcacccgcgactctcaccttgctcagctgctggtggatgagctgcttcagctcggaggctttctccggaggcagcgacatgctggcagccggcgtctccccgccgcttctccccgcctcagatgccctaactgcgcggccccggccgggccagggagcgttaggagcgactggagcacaaagcgccgcagccgttcgcctagcgcagctcccgggggacgcaacgccgcgtcaggccgggggctgacctggaaatgaggccccggcggcggcggcgccaactgttttcaaacagtggcggacaaacagggcttggggctggcccgcacgctgcctgatcgtttccgcccgccgctccacctccccgcgggccccgcaccccgagacctcagcgcaccccatcgccttgcttgccagggtctccgaaagcgctgctggcccctcttcgcggccacccggcggcctctttccgccctctgaaccggcagttagctggacgggcctcaagggcccggcgcccagggactcaaaggaccctcccgcgccccgcgaggctccggggtctcgggcttccgccttcttgctgccctcgttcttgccagggccgcggttagtccctgctggccaccccactgcgaccatgttcgttccctgcggggagtcggcccccgaccttgccggcttcaccctcctaatggtgagtctccatttgcgctcggggctgccgcctcccgaggcccctgcggtgtcgccaccccgacgcggggtgtttggcggtgccttgggagaaatagggcactagtttctatttcatgttttcggccggaaaaaacagggaggttgtagccggaggcagccgtccaaacagaacctttgtcggctgtaaaaccaaacgtagtcaagtctacaatttgtagtctctgtttcctgtaaaacgtgatgtgttcgtacgttctagatacactgtacttatgttttgcagggcatccttcagttttatcctagaaagtctttctacgactagttttagaattagtcttaagctagcatattatcgttgttaaccggagaactactgatagggcaataaacattaactcttgccggtagttagcgcagttttatcgctctttatattcattcattgttttaataaagtctgttatgtgcgagtattagaataagactaggtgcgtgccctcaaagaatttacactgtagttggaaacatgtaatctaagagcaataaatgctaggctagaagcttgaaagggtatagaaaggtcctgagataattgggaggggagggacagatggcttgttaagaaaggctttatagagaaagtagtatgcaaaagatggagggcccgtgggctgggagtaggggaaagtaggcgtttcagaaagatggatgtctaaaacagagtcagtaagcagggggacttgaagactgccaagaatttggaatgacacattgagagagaataggctgtaggccctgtgaacccagaaggcaccattggaaaatgcactgtttggagtggtataaggctggagagagctggaagtgtcatccttattcattacatataaaacacacagccccagagaaga

SEQ ID NO: 3681 - DNA, 6000 bp, Homo sapiens
tgaaaaccaaacacttcgtgcagaattgagaagtggggatttccagcatgaggtgcacactatccatgtagaagagttttcatatcaatctatgattcctgaataggtataatgtgctctttttttcccccagagaaaataaagaagttcattgtcagttgattactttttaaaaatggaaaacatttagctttaataaatattaaagctaatatttttaaatattgtttaaaaatattttaattttgaaaattgtttaaaatatatttttacatttgttacatataactaaattttattgtatatgtgcttataagtgtgtgtgtgtgtgtgtgtgtgtgtgtgtgtgtgttgagacagagtcaccttctgttacccaggctggagtgcagtggcgcaatctcggctcactgcaacctccgccctcctgggtgcaagcaatttttgtgcctcagtcttctgagtagctgggattacaggtgtgcactaccacgcccggctaatttttgtatttttagtagagacggggtttcaccatattggccaggctggtctccaactcctgacccacgtgatccacccaccttggcctccgtgctggggttacaggcgtgggccaccacaccccgccaaatgtcggtttttaaaatcacaaacaacattgaaactagtttttgcaaatgagagcaatcaccttagctatgtgtttattcttcagtgaatatagaaaaacagtatttgagatcaattacttccatgtttctcatgataatgctctatgtataggaaagataacatcctcaagcctattttcttggattttattattgtattgtattatacattaatatttataaaatattggaattatttgagtgatagttctgtagagatatctttaagagtaatttaattttaaaaaattttaaattattagtagatttaatgtgttaacataggcattctgctgttcaaaagtgcttccaaaatcagcacactcacctctggggctttccaagcagaagttttaagtcccctactcttcttagaaaatagaagggggtaatgttggaagtgtgccaggagtaagccttggtatttttcatgaagtgccacggtgaaagtaccttctcccacaagtcagttccttttagcaaaataataatctcatctagctttcctaaccgtgcttttcccagaaagcctgtctcctcattgaagatggcgacacactagataattcagtattattttgtctgtgcttgtgaccattcctgtacttacttcatttagagttttaacatctatttaccaagtttacacaactgccagttaaaaatgcaaaagtgcattttcctcaatgtaaatagtttagaaacatcaaaaataaaagtgtgagtttctccttttccttctgccgctcacctgatgttaaaaatgtggtgcttagtgaagcaggactcccacccccgagtcagagaaccaggattggaatcacagctctgccactgattggcaagtgactccaggtaagtttttaatctcaccgtacctcagtatcctcatttgtaaaatggaagtagtaattgtactctttacacgcctgttgtgaggattaaatggatttttaagtgtgactatgctattagtgtttcctattatcctttctagaaactttctttgcttatatagataaaatcatgtttacggttctttagaaacatgggatgatattgctctgtaacttacttcttttacttcataatcatgaacatctttccaaaactacataatattcttaagtagctgcattatattcaaaactgtgataggcaataatactttccaccatttgtatattaacagctattcacattttttctttttgtggttttataaaaatgctatactaaacatccttttgtctctttctttatgtattgatatgtttgattcccagatacagaattgcttcatcaaatgatatttgcaatttttaatttttaaaatcaacactgccagatcactttctaaaaagcacaaaagcaactcagcagtgcaccaattaggctgtacagtagggagttaaaaagccagccaagtagtatgactatggtagcacaaagggagggagggagaaagtggcagaattttatctgaaggtagactgtgataaattatggatgtgcattgtaaacccagagctgccaccaaaataataaaacaaggatgcatataaaacaaactaacatgaagagaaaacagaatcctaaaaatgctcaaaccaaaagaaagtaggaaaagaggaaaaaaaggaacaaatagaaaaacggatggaaaaaatagaaaaatagcacaatggtagacttaaacttcaccatatctataatcgcattacatgtgaacaatctaaacactccaatcaaaaggcagagattgtcaaaatgggtaaaatgggaaaaaagagccaaatgtaatgctgtcactttaaatgatatagataaattaaaagtaaaaagatagattgagatagatcatctaaatgctattcataagaaaggtgaaatggctatataattaatatcaaagtggacatgagaatttgattttaccaccaatcaaggaagacatataataatgataaacgtctcaattcatcaggaagacataataattctaaatgtttatacctctaagtagagcttcaagaatatgaaaaaactgacagaaataaaaggaaaaatagacaaatacagttattgttggaaatttccacactttttctcagaacaagtaacggaaaatcagtatggatatttcagcctatttgacctgattgacactcataatgtactttactgacaacagcaaaatacatagctttttcaagtgcacatggaattttgaccaagatatgccatgtgctgggctaaaagtaaggcaagtgaatagttctggcaatccaggaattcaaaacaggttatattctattggcatgggacaagtatcttcatataaacagttaccttatgatatggtttggctctgtccccaccccaaatctcatcttcaattcccacgtgttgtggcagggacctggtgggaggtaattgaatcatggctgcaggtctttcccgtgctgttcttgtgaagtgagtaagtctcatgagatctgatggttttaaaaatgggagtttccttgcacaagctctctctttgcctgctgccatccaggaaagatgtgacttgctcctccttgcctttcaccatgattgtgagacctccccagccacatggaactgtaagtccgttaaacctctttcttttgtaaattgccctgtctttatcagcagcatgaaaacggactaatacatgatacaaaggagggattatacgtatggatccaacatcgacctagaatgtgaggaaagacacaatcctaagcaagtaatgacaaacaaaaacaacaggatgctattgagatggagcaggaacccatcttaggagcctgtggagcacccctaagcatggaaataaaggaaaatcttgagttccttcaagggaaattccaggtacctagctagccctaagaagtaaataagtaacttgataagcaagaaggtaattatagcttaaaacaataaccaaggaagttagattccctatagaaacgaaagataacatcttaacatatgtccctgaattgtttctcagaaacccagacccccaacaaaacagatccactggcatgcagacctcagacaagggggaaatgaggacggaactgaccaccattctttcttctaaatttcttcctgaagggcaaggaggaagtcacacccacgagccagagctaacattcatttttgctgaccccaaatttttaacaaagcttctcttccttcactgatggcaagtcagaaaatctttgaatgtataacctataagcaccctcactttaaagattttcaagatatcccagcttgttagaccaaaccaatgtgcaacctccgtgtattatgattttgcctgtaacttctgctttcttgaaattaaccctgcgtttaaaaatccttacttgcaagccaactgaaggtcaggatttaagcaagagctgccccattctccttgcctggagctctgcagataagcgccctcttttctcccagtgcaaaccttagtgcggatggcttggccttactgcaccagaagaacggacctcagtttttaggtaacactgtgccccagacatctggccactttatgtctgaaagggccaatgtggtgatgggggctgggggacgcctcaaggctggcggagcctggtgcctttctagaatttggtgggtgcaggacgggtgaggggcggaggcagaggatcaggagaagaaaaagagatagtggctgctggccccaacattttgaagcaaagaacaagaggagtattttacgaagattggcggatggtgtattgtgttgatgccttaactgcagtcgacgaaatctccaggaaggatcctcctcccgttcattctcgacggtggcgcatccactttcggaaggccgggcctcgaagggtgggcgcgcggggcaggagcaggaccaccccgatgcccccattccttcccgggaggcggggcccacaggcctggggtgcggcaaggcaggagccagtgccgtgaagggcaacccagggctggtctcccgccaacctgtctgcagcccgagcacctgggccaggggcggagaccggaccaaggaggcaccgggcgcggcgaacacccccggggcccctccccgagcggggccccgcgtcccaccgcaaaccaggggagcttgggcaccacctggctggcaccgccgggcccggccggaggggggcgcaggagggcggcgcgggggcaggtgcggggcggggcacgggggcgggaccacacagggccgcggcagccgcgcccgctgggccacagaggccgctgaggccgcggcgcccgccagcctgtcccgcgccatggccccgcgcgcccggcggcgccgcccgctgttcgcgctgctgctgctctgcgcgctgctcgcccggctgcaggtaaggagcgcccgcgcctgccgggccgcgcggcccgacgcctcctcgggagccccgggaagggccggggccggcggcatcctggctcctccgccttccgagaggagccggagttttggggagcggaggccgtgggaagctggggaggcgcttccagagttggacggcggagggcgggaaagggcaagcggagggaaactggggcgcagaaggagcaggttggcgggaccgcaacacccgaaacgggctcttccaaaagcccctcttagccgcaggctttgatgctgtcattttctccaaatgcttcttgagcacctactaagcgcttgcgccgggcggtgccgcgggagacagcgccgtgggcacctcacttgcggcagataaccgttcccgatacgatttctcccgggtggcctccgtcccaaatttccacccggaaagagacatgattccctccgtccctgaactgcgggcttgcctttgcctcccctgagccccttcggggacacccctgccagctcgcctggaggccccgcacggcggggagagactgcgcgcgcgccccggggatgctggacttgaccctcgcagacccgagtggcttcccggtcctctcggaacaggtttctcagtacagttagcaagcgaatgcagccaggcacggactttctgcctcgtggaggagggccgcagagggaagcacacccagcacaacaaacgctttaaaaatcgttgatacgaacttgaaagctctcacagggaagggcgagtggtggttttcttggtttcggctgggtcagatttcccctctgttaacactaggttaggctgctgccgtccctccgcagccgggcacggaacccggagaggcgtggggagggacgcatggagaatcgtgtttgggtgagaagaga

SEQ ID NO: 3682 - DNA, 6000 bp, Homo sapiens
ctgggcctcccaatgtgttgagatcacaggcgtgagccaccaccccagccttaagttactctaccatcctgagccaggtgtgtgccaaaatggtagcttttttgttttagagacagagtctctgtcatccaggctggagtgcagtggtgtgatcacaactcactacagcctcaacctcctgggctcaagcaatcctcccacctcggcctcctaagtagctgagaataaaggcacgcagcacacgcccaactaatattttaattttttctgtagagatgggatcttgctgtgttgcccaggttggtctcaaactcctggcctcaagtgatcctcccacctcagtctcccaaagtgctgggattacaaacatgacaaacgtgagccaccgcacagggcagggggctccatttattacatttattgtcttctttttttttttctaagacagggccttgctctgttgcccaggctggagtgcagtggcatgatctctgctcactgcaacctccacctcctgggttcaagcgattctcctgccccagcctcccgagtagctgggctcacaggcataagccaacatacccggctaatttttttgtattttttagtagagatggggtttcaccatgttggccaggctggtcttgaactcctgccctcaggtgatctgcccacctcggcctcccaaagtgctgggattacaggcgtgagccacagtgcccagcctaatttttgtatttttaatggagaggggtttcaccatgttggctaggctggtcttgaactcctgacctaggtgatccacccgccttggcctcccaaagtgctgggattacaggcgtgagccaccgcacagggcaaggggttccatttatggtcataaactcctcactatgtgcctaacacgtttccgtattctgtagatattaattcctatcagctccaggagtggaaaagcggaggcccagagaggttaggggcagggcaccagcctcaccattagcagaggtgaactcagaccctgaggcttcggagcccacgcggcacctgcacccaaccccaccccctccggcctccccgccccctccaggcccccagcccccgacccccagcccctctgaccacaccttggtcagaagggctcccctcctagcacctgcccacagttcccacggcctggacccccctcggttcctctggagctcctactcgacccgcacagcccaagtcctctgccccaccccccatccgccggacaccccggtcctgccccgccccgaggccactgccggggcagctgcgccggctccggtcccccagcgcgggggtctctgcgggcgggcggaaccgaggcgtctcccccgggccccagcgcgacccccacccacctccacgaagtagaagcagggcagaagcgtcatgctgtccttcgggatcttgttcttctccttggtggagatcatggtgccgcgggcgccgcaggccgtggctggaggggagaaagcggcgctggaggggggcgcgcaggcggagcccgggggagacacggtggccggcgccggcgggggaggggcggtcggggaaactgaggctgcagagagcggcgtccgcgtggcctccccgcgccccggcccagcacgcggcttccgggcgcccctacacccgggatcggggggtcggggccgggatcgccgaggagggcggggggtctccgggcgggagccagtccccgcgtggtggtggggggcatccgggagaactggggttccgggcggcggaggagactgggtccgcgcccccagccccacagcccctcacctggcgcggccggcgcccagcacaaagcgcgtctcctccgtggggcggggccgggagccgggaaggggagggggacgggggaggggagggtccggcccggagacccccgcgcgcgcccagacgccgcagcccagacgccgcagccaggggcgggggctctttgtctgggcgcgtcctccgcaggccccgcgcaccgtccccgcctccctggcgccgcctcccaccgccgggggtctcgggggtctcaggtctgcgcgagcggctggcggggctcgggggtcgcgtcctcctcccttcgggcctgcggcggtgacggtcccgtcctcccctcccgggtggctgcggtcggcccggggggcgccatcgagacgggggcggaggcgggggcgggggttggggtttcggggtctctgactgtctccgtgtctctcacggtctctcgccggctccgactgcccccgccccgcgcctccgcccgcccctccgcggagcccgccgctcgctggtgcgcgtttccatggcgaggctcccagggcgcccggagcatcggagacaaaagagctgggggagggggactggggggtctcccggtgcctccctcccttccccccgcactcaccctcgccccctccgccgcgccggggtccaccctccgcctggccgcagccgctcggtgcgcacggcgggattgcggggcgcggggctgggggctgggggctgcgggatgcgggcagggccctcgggacccgcactcgggcagtgcctgctgtctgcgtgcatttcctcctccatatgcgcagccctgcggggtaggggctggttgacccccgttgtagggatggggaaactgaggcttgggcaccctgggtcgcaatccgaggtctccgggccccaaacggcaggatttacaaaaatcggtttttgggccgtgcgcggtggctcaggcctgtaatcccagcactttgggaggtcgaggcgggcggatcacgagggcaggagttcgagaccagcctggacaacatggtgaaaccccgtctctactaaaaatacaaaaatttttagggtgtggtggctcatgcctgtaatcccagctactcgggaggctgaggcaggagaatcgcttgaacctgggaagcggaggttgcagtgagccgagatcgtgccactgcactccagcctgggcaacaagagcgagactctgtctcaaaacaaacaaacaaacaaacaaacaaagagtgacttccaggctgggtgcagtggctcaggcctataatcccagcactttgggaggcagaggcgggaggatcccttgaggccaggagttccagaccagcctggccaacatggtgaaaccccatctctactaaaaatataaaaattagccggacatggtggcaggcgcctgtaatcccagccagatgggaggctgaggcaggagaattgcttgaacctgggaggcggaggttgcagtgagccgagatggcaccattgccctccagcctgggcgacagaaggagactctatctcaaaaaaaaaaaaaaaaacaaacaaacagtgactccagagggttggagccctgctagataccttagtttgctcataacaggcactgctgcccccgggaagagggtcgcctgccataaatgcggaaacagttaaatggcgatgggaataggatgggaactcaatggtgttgctacctttggatggactcggaggcagcccagcttcctgggacaggactgcacggactgcctggggaggggtctttggccccccggttcctgcaggggggctcggggaggccctgtgagcagttggtcacaggtgggtcccattcgatgcgatcctgttcctccccaacagccctggagaagggggacgttgcctgctgtggctgcggctgttttcctggcctgtgagaggcggggccagagtggccgttgggaatctgggtgttgcaaggtgaccacaaacagctctctgggggaggaggaggaaaatgcaattgattttcaggagccttctgaggtcaggagtgggagagtgtgcagggggaccctcctggcagcttgggggtccaacagaagatctgggggagtctcagggtcttctccccctaggatcaccagtggtggagatggggcaggcctggccatggagggcacgttgcttggctgaggggcctgggcttgagtgtggggcctgggcttgagtgatgggagagttccgagcaggccggaggggttgagcgtaccagacgctgctcaaaacttttatttaaaaatgattattattattattactattattttgagatggactcttgctctgtcgcccaggctggagtgcaatcgtgcgatttcagctcactgcaacctcccacctcctgggttcaagtgattctccctcctcagcctcccgagtagttgggattataggcgcctgccaccacgacgggctaatttttgtatttttagtagaaagaggatctccccatgttggtcaggctggtgttgatctcctgacctcagctgatctgctgcctcagcctcccaaagtactgggatgacaggggagccacggagcccagcctttttttttttttttgggagacggagttgcactctgtcgtctaggctggagtgcagtggcgcgatctcggctcactgcaagctccacctcccgggttcacgccattctcctgcctcagcctcccgagtagctgggaccgcaggcgcccaggactatgcccgggtaattcttttgtatttttagtagagacggtgtttcaccgtgttagccaggatggtcttgatctcctgacctcgtgatccgcccgtcttggcctcccaaagtgctgggattacaggcgtgagccaccgcgcccagctttttttttttttttttaatagagagagggtctcaccatgttgccaaggctggtctcaaactcctgggctcaagtgatcctcccacctcggcctcccaaggcactgggattacaggcgtgagccaccacgcccggcctcaaaaacttttcagaatatgaaccccactccatgctcagcactgttctgtctagaaggcagagtctatccctgtctcagggcacactgacgtgcagacagcgagctcgccctgaggtcatgcgactgggagggacagagcttccggctcccggcagaggggaaatggggcctggcccacgggagagctgaggcccacgtttggccaggacagggtggatggaggctggggcctccgcagggaagatggacaggtaggatccggggtgggcagagagggagagctggcttggacggaggcagggatctgggggctgtgccatggaccctgtgaggtggctgggctgtgaaactcagtggagaccggaattattattattattattatttttttgagatggagtctcactgtctcccgggctggagtgcagtggcacgatctcggctcactgcaagctccgcctcctgggttcacgccattctcctgcctcagcctcctgagtagctgggactacaggcgcccaccaccacgcccggctaattttttgtatctttagtagagatggggtttcaccgtgttagccaggaaggtcttgatctcctgacctcatgatccgcccgcctcggcctcccaaagtgctgagattacaggtgtgagccaccgctcccggcctggagaccagatttgagccctgggaccctacattcccgatgggcagcggacctcaaggcacaccggccccgcctccctggactctccccgtatccgccccttggaggggcaaactgccctcagagggctcccacaggcccagacacaaactggtgtccccaagggtgtgggggacacggtaagctccagacctcagtttcaccttggaaatgagcccctttgtaaaaaatggaggtgagtttggacgcagtagctcacacctgtgctcccagcactttgggaggccgaggcaggtggattgcttgagcttaggagtttcaaaccagcccgagcaacatagtgagactccacctctacaaaaaaatacaaaaattagccgggcatggtggcatgtgcctatggtcccagctacctgggaggctgaggcaggaggattgctggaacccgggaatcggaggctgcagcgagctgagatcgtgc

SEQ ID NO: 3683 - DNA, 6000 bp, Homo sapiens
ccgtgcgcggtggctcaggcctgtaatcccagcactttgggaggtcgaggcgggcggatcacgagggcaggagttcgagaccagcctggacaacatggtgaaaccccgtctctactaaaaatacaaaaatttttagggtgtggtggctcatgcctgtaatcccagctactcgggaggctgaggcaggagaatcgcttgaacctgggaagcggaggttgcagtgagccgagatcgtgccactgcactccagcctgggcaacaagagcgagactctgtctcaaaacaaacaaacaaacaaacaaacaaagagtgacttccaggctgggtgcagtggctcaggcctataatcccagcactttgggaggcagaggcgggaggatcccttgaggccaggagttccagaccagcctggccaacatggtgaaaccccatctctactaaaaatataaaaattagccggacatggtggcaggcgcctgtaatcccagccagatgggaggctgaggcaggagaattgcttgaacctgggaggcggaggttgcagtgagccgagatggcaccattgccctccagcctgggcgacagaaggagactctatctcaaaaaaaaaaaaaaaaacaaacaaacagtgactccagagggttggagccctgctagataccttagtttgctcataacaggcactgctgcccccgggaagagggtcgcctgccataaatgcggaaacagttaaatggcgatgggaataggatgggaactcaatggtgttgctacctttggatggactcggaggcagcccagcttcctgggacaggactgcacggactgcctggggaggggtctttggccccccggttcctgcaggggggctcggggaggccctgtgagcagttggtcacaggtgggtcccattcgatgcgatcctgttcctccccaacagccctggagaagggggacgttgcctgctgtggctgcggctgttttcctggcctgtgagaggcggggccagagtggccgttgggaatctgggtgttgcaaggtgaccacaaacagctctctgggggaggaggaggaaaatgcaattgattttcaggagccttctgaggtcaggagtgggagagtgtgcagggggaccctcctggcagcttgggggtccaacagaagatctgggggagtctcagggtcttctccccctaggatcaccagtggtggagatggggcaggcctggccatggagggcacgttgcttggctgaggggcctgggcttgagtgtggggcctgggcttgagtgatgggagagttccgagcaggccggaggggttgagcgtaccagacgctgctcaaaacttttatttaaaaatgattattattattattactattattttgagatggactcttgctctgtcgcccaggctggagtgcaatcgtgcgatttcagctcactgcaacctcccacctcctgggttcaagtgattctccctcctcagcctcccgagtagttgggattataggcgcctgccaccacgacgggctaatttttgtatttttagtagaaagaggatctccccatgttggtcaggctggtgttgatctcctgacctcagctgatctgctgcctcagcctcccaaagtactgggatgacaggggagccacggagcccagcctttttttttttttttgggagacggagttgcactctgtcgtctaggctggagtgcagtggcgcgatctcggctcactgcaagctccacctcccgggttcacgccattctcctgcctcagcctcccgagtagctgggaccgcaggcgcccaggactatgcccgggtaattcttttgtatttttagtagagacggtgtttcaccgtgttagccaggatggtcttgatctcctgacctcgtgatccgcccgtcttggcctcccaaagtgctgggattacaggcgtgagccaccgcgcccagctttttttttttttttttaatagagagagggtctcaccatgttgccaaggctggtctcaaactcctgggctcaagtgatcctcccacctcggcctcccaaggcactgggattacaggcgtgagccaccacgcccggcctcaaaaacttttcagaatatgaaccccactccatgctcagcactgttctgtctagaaggcagagtctatccctgtctcagggcacactgacgtgcagacagcgagctcgccctgaggtcatgcgactgggagggacagagcttccggctcccggcagaggggaaatggggcctggcccacgggagagctgaggcccacgtttggccaggacagggtggatggaggctggggcctccgcagggaagatggacaggtaggatccggggtgggcagagagggagagctggcttggacggaggcagggatctgggggctgtgccatggaccctgtgaggtggctgggctgtgaaactcagtggagaccggaattattattattattattatttttttgagatggagtctcactgtctcccgggctggagtgcagtggcacgatctcggctcactgcaagctccgcctcctgggttcacgccattctcctgcctcagcctcctgagtagctgggactacaggcgcccaccaccacgcccggctaattttttgtatctttagtagagatggggtttcaccgtgttagccaggaaggtcttgatctcctgacctcatgatccgcccgcctcggcctcccaaagtgctgagattacaggtgtgagccaccgctcccggcctggagaccagatttgagccctgggaccctacattcccgatgggcagcggacctcaaggcacaccggccccgcctccctggactctccccgtatccgccccttggaggggcaaactgccctcagagggctcccacaggcccagacacaaactggtgtccccaagggtgtgggggacacggtaagctccagacctcagtttcaccttggaaatgagcccctttgtaaaaaatggaggtgagtttggacgcagtagctcacacctgtgctcccagcactttgggaggccgaggcaggtggattgcttgagcttaggagtttcaaaccagcccgagcaacatagtgagactccacctctacaaaaaaatacaaaaattagccgggcatggtggcatgtgcctatggtcccagctacctgggaggctgaggcaggaggattgctggaacccgggaatcggaggctgcagcgagctgagatcgtgccactgcactccaccctgggcaacatagtgagatcccatctctacaaaatatacaaaaattagccgggcacggtggcgggtgcctgtggtcccagctactcgggaggctgaggcaggaggatcagttgaacccaggagattgaggctgcagtgagctgagatggtgccgctgccctccagcctgggcaacagcgagacctcaactctgaaaaaaacaaaagaaggagatgaaatttacataacttaaaattagccattttgaacggtacagtgaagtggttttcggtgcattcaccgacttgtgcaaccatcactgctgtccagtcccagaacattccatcaccccaaagaaggaagccccatctccatccatcagccatcaccccctgccctcccccggcccctggcaaccacagatccacttcctgcctctgcagatttgcttgttctggacatttcgtctatttatttttatatagtttttaatttgtttttatttattttttttgagacggagtctctctgtgtcacccaggctggagtgcagtggcgcaatctcggctcactgcaacctccacctcccaggttcaagcgattatcctgtctcagcttcccaagtagctgggactataggcgcccgccaccacgcccagctaatttcttttttttttttgaaatggagttttgctcttgtcgcccaggctggagtgcaatggtgcgatctcggctcgctgcaacctccgcctcccaggttcaagtgattctcctgcctcagcctcctgagtagctgggattacaggcatgtgccaccacgcccagttaattttgtatttttagtagagatggggtttctccatgttggtcaggctggtcttgaacgcccaacctcaggtgatctgcctgcctcggcctcccagagtgctaggattacaggtgtgagccaccgcacccagcttgtcaattatatctcaataaagctgttgaaaaagtttaaaaaaatcacccaatcgggcacagtgtttcacacctgtaatcccagcattttgggaggccgaggtgggtggatcacctgaggtcgggagtttgagaccagcctggccaatatagtgaaaccccatctctactaaaaatacaaaaaattagccaggcgtggtggtggacaactgtaatcctagctactcaggaggctgagacaggagaatcacttgagcctgggaggcggaggttgcagtgagtcgagatcacaccattgcactccagcctgggcaacaagagcgaaactccgtctcaaaataataataataataataataataataatcacccatacagacgcgcaggactcaacgcaggactgccagctccactgccctgagccccccggtgccaggcccagcgggcagtgctggagccccagtggcttgggatggggagactgggactctgagctggcaatgttcctgggtgctggctgcatgcccgccatgtgctgggctccgggatccactggttcctgacaccctcacctgcccctgggggtgtggccatcttctagagagggaaactgaggatcagtgcagaatgtagggggagcccaggctggcccagggagcagttggcggtggaggccttgggcaatttcccgtgttcccactgagtggggctgtccctgggcctgggcggggacgccaccaactgccaaggcctgtgtataagggcagccgccgccttagccacagacctgccccgccatgacccggctgacagtcctggccctgctggctggtctgctggcgtcctcgagggccggtgagtgcctctctgtgccggtggtcccccatctgtgctagggcccggctgccagggcagaactcagacttaaagcacagagaaggcaagcggcttggcctgggtcacacagccagcccggcctggacgatcccgcgaaaggcgtgagggcggacggtgtgcgggactcaggggccccctgtcctcttagggagtgggacgatgggggagggtgggtccccccgcagccccactgggtggatagagctgaggctgcagcttcacacgccctcccggccactgtgtggattcttggggatctcagagctgtctccccccgacccaggctccagcccccttttggacatcgttggcggccggaaggcgaggccccgccagttcccgttcctggcctccattcagaatcaaggcaggcacttctgcgggggtgccctgatccatgcccgcttcgtgatgaccgcggccagctgcttccaaagccagtgaggggtcctggggagggggcctagggggcattggggctcagagaaggggcttggggggcttaggcattcagtgggggtgcttggtaggtgaggaggggaggggattgcaaaaggaggggctcagggaaaggagggggcttggagagggaaatggggactgagttgaggagggacccaaggatattggggggctcagatggaggaggcccagagaagggaagggggtcagatggaggaggcccagagaaaggaagaggctcagatggaggaggtgcagtgaaggaaagggggtcagatgggggaggcccagagaagggaaggggctcagatggaggagggggcccagagaaaggaaggggctcagatggaggaggtgcagagaagggaagggggtcagatgggggaggcccagagaagggaaggggctcagatggaggaggtgcagagaagg

SEQ ID NO: 3684 - DNA, 6000 bp, Homo sapiens
aggcacagtttgatcaaggggccccagtattcagtctccttcccggacttagctctgttctcctcccctggcttctgccacaaggcagatctcataccagtccttagcagatcccagctggtatttccccaggctggtgctgcctcctctgtagttctggactaagccccggggctggctctcatcagcccacactgagtcatgtcctgtagcagctgctcagaaccacagacatatctccctgttttggggcgttctctctgcccagagctaaggttcctgggagtagtcctttgtcaacgctggttgaacatgaggggataaataccctagcttttctgatctctgggtgcggcgattctcagctgttttctttctttttccttttctttttcttttttttttttttcagacagagtcttgctttgtcacccagactggagtcctgtggcacaatctcggctcactgcaacctcccaggttcaacctcccaggttcagatgattctcctgccttagcctcctaagtagctgaaaccacaggccctcaccaccacgcctggctaatttttgtattttctgtagaggtggggtttcaccatgttggccaggctggtctcgaactgacctcaagtgatttgcccgccttggcctcccaaagtcctgggattacaggcgtgagccaccgcgcccggctgccggtgtcttattgaggccatcagacaatgcaagagtgctgagtcccagcaccctgtccttgcagttttacaaatctctgaatctgctacgatcactgcatccatcttccagatgcagtcactgaggttccaaaaagtgaagtttcctttcctgcccgggatgactaaggacgctctatccccaggggcagcagaagatcgggctgccctctccccaaacacacccacccacccacccacaggggcacacacgggcacacacgcaccgtctacctccccagacacccggctgacacaggctggcgtctgcacggctgacacttgtaaatccaccctccttcgggggcaggctggctccttctctggcagcaggaagatagagggagttggtttagtggttggggggaaaggagtgcgcccctgaccccatgcccagcccccgaccccagggagggtgacagcccctccctctcttccagtgaccttgggaaagttccaggaggcccccgggcctggactttgagaggtgagcgctccagcaagattcgctcccctccttctgtccctgctctgggcccgcccacccactccctttctcaagcggccttggaaagggtcttgcagagacagacagatggcctggggacagatggcggacgtgtaggagttaccactgggagaggggtaagggggaggggagtgcgttctggcccccaagacgagtcccacaggctcctgcagaacagaataagccgcctccttcaagcccctcaactgggatatcatcgtccccccgcaaccaggatcccatcaccccataaacggaatcccatcccccatcccaaccagggtctcatcatccccgcaaacggagtcccatcgaccccacattcaaggttccatagctcccccaaacgggatcccatggcactgggccggggcagaggcccggagaagagggtcgctagctgcaggttgcacagcccggcagggtgcgaggcctggcctgggggtgcgggtgactctggtgggtctaggctccgcggggagacttgggcctggagaccccgccccgcacgcagatcccgcccgccccggccgcgggttccggggaagcgaaggcgccgccagcccgggctgtgggcagagcgcgccctctgccgggcatgatcggaaacggcgcggcggcgactcccggaccctcgggactccggacccgactcccacccggctgagctttaccgggttatagagcccccaactctggatcgatccccgacctcctaaggaaccgcgacactgggctgagctcccgccttgggctaaacctcaatcccagtagagctgggacctgggctgagaccccaactttggatagagcctctgatctgtctttgagccctggtcctgagccaagcctcaaactccaatagagtctccatcgacctgagctcccaactcagggctgagcccccctctaggctgaggtctgatacggaatagagcctgcgaccccttctaaatcccgactctgggctgagcctggaccctcgatagagtctccaactctaggctgaaccctaaccctgggctgcacccttactgtagacagagcccaatcccagcagaggccctattctcactaagccccatcacccagtaagcctgcattcccggccaagatcatccctcccccacccctaacacccactgaaccctagccctcccgagtcccaaccttcttatctgatacagaaaagagaccaggtgtggtggttcttgcctgtaatcccagcgctttgggaggcagaagcaggaggatcgcttgaggctaggagttcgagaccagcctgggcaacatagtgagacaccccctatctctatttaaaaaaataaaaattagccgagcttggtggtgcacacctgtgatttcagctacttgggaggctgaggcagaaggattgcttgaacccaggaagttgagactgcagtaagctgtgactgcaccactgcattccagcctgggtgacaaatcgagaccctgtctaaaaaaaaagaaagaaagaaaaaaggtgaaatcatgctaggctcagatgcctccagtcctcctgccctgatggggagacccccttgatgctggggttgcgagaggagctgtacacaccacaccaaagtcagacctaatcaggtcctaatcccatctctgcctcatctggctgtgtggcctggaacctatcccttcctccctctggggttccatttcgtcatctgtgaaatgggacagtcactcctgactctaccaccttgtgcctgtgtgacctcaggcaagttacttcctctctctgggcctcagtctcctcctccaaaatgaaataagaaggtgttttgttttgtttcttgaaacagagtctcgctctgtcgtccaggctggagtgcagtggcgcgatctcggctcactgcaacctctgcctcctgggttcaagtgattctcgtgccttagtctcccaagtagctgggactacaggcgtgcaccaccactcctggctaattttttcatatttttgctttattttttattttttgagatggactcttgctttgtagcccaggctggagtgcagtgccgcgatctcggctcactgcaatctctgcctctggggttcaagcaattctagcacctcagcctcccgagtagctgggactacaggcgtgcaccaccacgaccagctaattttttttttttgtatgttttattttttgagatggaattttgctctgtcgccccggctggagtgcagtggcccgatcttggctcactgcaacctctgcctccagagttcaagcgattcccctgcctcagcctcctgagtagctgggattacaggcatgtgccaccacacccggctaatttttgtatttttagtagagacggggttccacgatgttgtccaggctggtctcaaactcctgacctcaggtgatccgcccacctcggcctcccaaagtgctgggattacaggggtgagccaccgggcccagccaatgagatatttaacttacttttgcctcctgaggcctgtgcctcggtcttcctgaatcccgtgtgcaggtcaggacacacaacaggccctcaacaatttgttgtctggcttcctggaggaagaagcagcgaggttgctatgggctccctaggccctagctgcaaccgggacccagagttgggctgcagggcggaaatggtgctgcaggggacctgggagcagctccagggcctggttcccaggactcacagctgcatcctccccgggggaccccagctggcgctgcgcagccgggaggctcctgtgtgtcctgcaggctcattcctacggaaatcgaggctggacctggggatcctctgatgaggtctccaggagccctccacctcaccccaaagattcatctatagccccacaaccctgggttagattcatcccttcttgtggcacagaactctgtatttttaaaattttaacttattttgatcttcttctttttctttctttctttttttttttttttttgtagagacagggtctccctaggttgcccaggctggtttcaaactcctgggctcaagggatcctcctgccttggcctcccaaagtgctgggattccaggcgtgaggcaccacacctagttggaatctgcattttaaaatggactctcagatctttctgacgcgaagggttccccgaggccgtactttgagaaacacgcttctgccgaaattcctattacccaggcgggtaaactagccccagaaggaggaaggggcccgtgcagaaccacgtggttggtctgttttgccttttggctctctggtctcttcctgttggtgtctctgtgcctccctccccaggttctctgtctgtctcgtactcttatctcttcccttttctgtggccggcacccccacgacggcctcgcccccgcatccgggccccttcgcgattccggaggaatcccccagagccgcctgaccccgcccccaggctccgccccttccccccacttcccccccgtcgcagtgccctgctcccattggccttttcgtacattgcccgccctgtcattggctaatccggagcgctcggcccgccccccaggcctggcaactctccggtcccttccgcgcgggcggggcgagtggagggcgtggcctgccgaggggcgaggcgagtggagggcggggccgcgctgcccgccccgccccggccccggccccggctccggcgctgctcccaccgccgcggcaacggccccggcccacggaggcggctggacggacccccgacggttggacgtacggactctgcttcgagagtaggtgagcgagcagtgccggggcgccccccatttcagcgcatctcgggggccacctggccgccctctgtctctcccgccccttaatgcttctgcaccccaccgcctgtccgtctacattcctgcctcagtttccgtctgtctctctgtcactctcgctgtataggttagggggagacagattgagtctcaattgccccccttggcgtggggctctgctctgggaccagcacccccatcccccatgtggactctagtggactctgccccctttaactgtagggccgcaggtgctcaggccagattccagaaccctgagggcattccaggcggtgggcagctgggccagccgtgcggaggtgggcatgactgtagcttctagctaaaccaggcatcggtccaggcatcggtggcggggagccaggcctaggccagcccgggcccacccagactggcccctaatgagctcccaagtggcctgtggggacttggcctcagttttgccagctgtgaactgggaccgtcgctgctaaggtaattggcaggtgatctgaaggacacctgccgcctcctggccttttctgtgaagtcgaactaggcccatttcctgggatgggaaactaaggcctagaaagaggccaatgcttccaatgtttgtccagggaagtggggacagaggcaggacagaatctgttttctctgcatcctcacatttcccagcaccttctctatggaggggggaagggctggtggaggagcagccccaggtgtaaacaggccgccagagtttatttcctgagccagtcccagctcagctggaggcgatgaacgccttgggaggccccaggggggccagcccagtggtggcggagcttggaccaatctaggtttgagctctgccacccgcatgatatcttgaaccagtttttcaattctg

SEQ ID NO: 3685 - DNA, 6000 bp, Homo sapiens
actcacctccgcctcccaaagtgctgggatgacaggtgtgagccaccgcgcccagcccgttttcctttctgctttttttttttttttttttttttggaaacggagtcttgctctgtcgccaggctggagtgcagtggggtgatctcggcttactgcaatctccgcctcctgggttccagcgattctcctgcttcagcctcccgagtggctgggactacagtgcgcaccaccacgcccatgtaattttttgtatttttagtagagacgggtttcaccatgttggccaggatggtctcgatctcttgaccttgtgatccacctgccttggcctcccaaagtgctgggattacaggtttgagccaccgccccggccattcctttctcttaagggaaaaaaaaaaaaaaaaaaaaaaggctgcacgccgtggctcacacctgtaatcccagtactttcggaggccagggcaggaggacccattcagcccaggagttagagaccagccagggcaacatggagagactccgtctcaattaacatataaaataaaatatcctgtgtgcattcacttaggaaaaaatgcaataaaataaaataaaaaataagaatgaaaaaggacctggcgactcagcagcccaccgaggtagctcacgcctataatcccagcactttgtgaggtcgagatgagcggatcacttgagccaaggaggtggactgggcaatatggtgaaaccccatctcttcaaataatactaaattagctgagcattgtggtgcgcacctatagtcctagctactggggaagctgaggtgagaggattgcttgagcctggcggttgaggttgctgtaagctgtcattacccactgcactccagcctcggtgacagtgtgaaatcctgcctcaaaaaaataaaaattacttagaaagggccaggtgaggtggctcatacctgtagtcccagcactttggggagtctgaggtgggagagtcacttaagcccaggagtttgaggttgcaatgaaccacgatgacaccactgcactccagcctgggcaacagagtgagatgctgtctattttttttttttttgagacggagtcttgctctgtcacccaggctggagtgcagtggtacaatcttggctcactgtgacctccacctcccagattcaagtgatcctcccgcctcagcctcccaagtagctggaactacaagctagtgccaccatgcccagctaatttttgtagtttttttttttttagtagagacagggcttcaccatgttgcccaggctggttttgaactcctgaacttaagtgatccacccgcctcagcctcccaaagtgctgggattacagacgtgagccaccatgctgggctgagaacctatcttaaaacaaaaaattgcttctctgattctctcttatggaaagtggagaggagttggtgtcccttctgcaatttttttttttttttgagatagagtctcactttgtcacccaggctggagtgcagtggcacgatctcggctcactgcaacctccgcctcccgggttcaaggattctcttgcctcaacctcccgagtaactgggattataggcatctgccatcacgcctggctaattttagtatttttagtagagatggggttcaccatgttagtcaggctggtcttgaactcctgacctcaggtgatccacctgcctcagcctcccagagtgctgggattacaggcgtgagccactgcgcccggccttcttctgcaaatttatctatggcaaacttctgtattttagccgccatccaccacattattcatagttgaggggattcaccaacgagtaggtcttaggggtggtggaaatctaaggaaactcacctttccgttctgctggcttgtaattttttttttttggtttacgaacaattgctcaagtgtgactacagtgaagtttcaggagacagtgaaaacagaggctggttcagtttgtcatcttgacccggaagggatggtgtaaagggagacatgagtggtgagaaagtgtctggcagttgcggttctggggaaagaatgttccaggccgaggaatagcagatgcgaaggaaaaacgtgggcacaagtggcattctcaaacttgcggggccgtcggaatcttctggaggacaccccctctgagagtttccggaggtttaggcggggtgctagaatttgcatagctaattgatagtggccctgttgctgggtcgggcctcacacgtggagtacccaaaccgtatataggaagtgtttagcatttggtaatgctccttcaacactagccagtaacattactgttttctctgcaatcccccagggaggcccaatacaggatcagacacagtgctgacctggaagatacttgttctgttgaatgagaagtctaccttatgactgggcacggtaacgcatgactggcatcacagtgctgagaggccaagacaggagcattgcttgagtccaggagtttgagaccagctgagcaacatagcaagaccctgtctctataaaaagtaaaaaattaaaaaaaaaaattggtaggcatggtggtatgtgcctgtagttccagctattcaggagtctaagacaggaggatggcttgaacccaggattggaggctgcagtgggctatgatcgtgccactgcactccagcttgggcgacagagcaagaccttgtatctgaaagcaaaacaaaagtccctttattttatgggctgttgacttctgctagcagagggatgaaaggcgtggtctaccctcccatctcccatggggctgggagatgggaagggagttggccattgtggacccacactggtctgggcagaccaggacttcaacaccagccaagggctttccccgggtcacgtccctctccatctgggagtgcttcctcttttggggccaagttttcaccgcttcttggcccatcctcccagccccggattggccgcctccagcaggccagagcagatgggaaatgtgtttcctccaactcgctcaacactgtccctttcttgcaaggggaatttctccacctggactctccgagcttctgcttgtagggtcccgaggggctcctgccgggaaccatccagtgggtgggtgggggcaggccagggaaggcccaggggtcccggggaaggtggccaggagggctgagcatgacactcagggttccactggggggttggggatcagggggcagatgctccaggagtgagggtggttgaggcttggctgaagcctgacccttcttaggaagtgctggatgtgggggaacccgggggagtcctagtgatggggggctagggggtgctgagaggaggggaaggagacaaagagagactaaagaaggaaaaggagagagacagggagagacagagagtcagagagagacagagggaatcagagacagagagaaacagggagagagacagaaagagtgagagccagagacatacagagacagggagagacacagagatgcataaagagagggagtcagagatggagagagacagagataacggagccagagatagggagagtcagagacagagagaaagaaacacacagactgacacagataaaagagccagagacagggagaggcagagacaaagagagatacagagacagagataacagagccagagacagagagacagagacagagataacagagccagagacagggagagagtgtcagagacagagacagacacagagataacagagccagagatagggagagtcagagacagagagaaagagacacaagacagacatagataaaagagccagagacagggagaggcagagacaaagagagatacagagacagagatagcagagccagagacagggagagagtgtcagagacagagagacagacacagagataacagagccagagatagggagagtcagagacagagagaaagagacagacagacatagataaaagagccagagacagggagagagacacagagacagagacatagagacagagataacagagccagagacagagtcagagacagagacagagagagccagacacagagacagagagagagagtcacagccagagacagcgacagagataacagaagcagagagagggagaaagataacagagccagagacagtcagagacagagatagagagacagagataacagagccagagacagatacagagacagagataacggagccagagatagggagagagagtcagagacagagagagatatatagacagagataacagagccagacatggggagagagagtcagaggcagagagagagaagacagatagagagacagagccagtgataacagagccagagacagggagagagagtcagagagagatacaatgagagacagagataacagccagagacagagttagacagagagatacagagacagagataacagagccagagacagggagagagaattagagacagagatagagagagacagagacagagataatacaggcacagaggcacgcatagacataaattggcagagagagagaaagatctctttccacccactgcagaggcaatcaacagagacagagaaagacgttaacggggagacacagagagcaaaggagactgagtcagcaagagacccacagagataccgggaaagagcggcagagagggagaaccagggcgatggagagacagcagggagaaaggaacctggagccgagcttggaaggccggaaacggaaaggagagcgaaaagcggagagagatccgagtggagaaaattccgcagagtcacggggacgaggggaaaggctctgggctgggaaggggcgtggccgcgggcggaggggcgtggccgcgggcggaggggcgtggcctccttttgtagccaagcagctataaaaagcggcgcgctgtgtcttcccgcagtctctcgtcatggaatacgcctctgacgcttcactggaccccgaagccccgtggcctcccgcgccccgcgctcgcgcctgccgcgtactgccttgggccctggtcgcggggctgctgctgctgctgctgctcgctgccgcctgcgccgtcttcctcgcctgcccctgggccgtgtccggggctcgcgcctcgcccggctccgcggccagcccgagactccgcgagggtcccgagctttcgcccgacgatcccgccggcctcttggacctgcggcaggtgagacgtgccccgaccctcggtagctggtctcgcgggagacccctaccgcccctctgggactcccttctccctcccgcacccccagggacacctgttctacactcccggccggggagaggagacccaccggggctcccattctccatctagcaccgaggccgggggggcacacctttcatcccgcacccctacgacacctcatctgtaccccaggccgggggcggggaggagaccgcccaacagttctttttggaccccccaagggtctccttcttctagtccggggggcacccctttcatcctgcgcccgctacgagaccctatctgtatcccgggagggggagaggagacccccacaagttctttttggacctccaagggctctccttctccgtcttgcacgggagggcacccctttcattccgcatcccgagaccccatcagcaccccaggccaggaggaggagacccccacagtcctcaacccctcagggatacgtcttctgcaccccgggtcggagaaaggctggcttccctccatgtggcagtgggtgggggcacccctcttcattccgcattcccaaggcaccccatctgcaccctggacgggggaccctccgcggttctccaaccctcgacggcttcctttctctatgtaggacttaggacattgagggcacctctttttaccccgcacccccacaagctctgcatctctggggggaacc

SEQ ID NO: 3686 - DNA, 6000 bp, Homo sapiens
tcaggtacacgatatggatccacattcaaatctaggcacttcctctcccaagctccttgctaggtggattaagctggtggccttcctctctgagcctgctcacagggaaaatagaaataacagcatgattcacttcatagggttcttgggaaggtcagaaaaggtgaaacctgacaagtgcttagcacaggactaaaccctcaattgcgcatgggtcttctggttggttgtgttccggtatcattcaaaccacaccacgttgagtttgtgtgcgtacgtccgcgtctgtgacgcgtgcaagtgtgcttacgaaagaatatccttgaagtaaaatttctggaccaaagggaaggtgcattttggtgcattgatagatttcaacaagctgtccttccagaaagttggatccatttcagctcctagcctccaggtttgaggctccttctcacccacgcacttgctgagcagtgaatcatcaaacactctgatcttttaccaaatcacaggtgacaagataaagtgtggctgggcacagtggctcacacctgtaatcccagcactttgggaggcccaggtgggcagatcactggaggtcaggagttcaagaccagcctggccaacatggtgaaaccccatctctactaaaaatacaaaaattagccaggcgtggtggtgggcacctgtaatcccagctactcaggaggatgaggcaggagaattgcttgaacctgggaggcggagattgcagtgagccgagatggcgccactgcactccaagctgggcgacagagggagacacgatcttaaaaaaaaaaagagagagagagagagaaagaaaaattgtgtttcacggagctttcaatttccaattttcttgtggtgaacgagattcagtttcataagcagttgtattttttttatttatttatttttttaagacagactctctctctgtctctcaggctggagtgcagtggccagatctcagctcacgacaacctccgcctcccgggttcaggcgattctcctgactcagcctcccgagatagctgggactacaggtgtccgccaccacgcccagctaatttttgtatttttagtagagacggggtttcaccatattggccaggctgggcttgaactcctgaccttgtgatccgcccgcctcggcctcccaaagtgctgagattacaggtgtgagccactgcgcccggccaagcagttgtatttatttttatgagttggctgctcctgtctcattttgggattttcctaagacacctcggcctcccaaagtgctgagattacatgtatgagccaccccaccccatctctctttcccccatcttttagaaggtattagttatttcttaatgatatgaatctaaactatttatatcttaagctgataaaaagatcagctaagtaaatattaaataaattaaggtaggagattgtcttgaaggtgctgtctacccgcttcccccagacctggagtcctagggcttccgtgaaggaaatccctttagtacttggggatctcagggaggatattttgatttctggatacctcaaaattctggacctctttgaccaccctcttcacccacccagcaaatgctataggctcaggctctgaaatctcccatttttatctcctttcaattttttgctttttgttggtaattttgctgtttcaaacagcccccaaatagtgctgaagccctgtctaatgtcccccaagagcaaggaggccgtgatgagcctcacagaggaggaaatccacgtgttagagaagctatccccaggcacgagttctagcgctgttggctgtgagtttgctgctgatgacactgacttcttgatgattcatagccagaggcccttgggaccctaactgtatgtatatacagacatatttttctttccatttgagagcaggtaatgtttattgaacagcttagaaaaataattatagtacacaccatagttcattcttctaacaagcctgttgatctggtcctccctgttgccagcatctccaccttccacgaaatgggtggtctgtttcttcattctgcctcatggagaagatactttgaaggaccacaggaagttatgtgcttctttgaagcgttttccaacagtatggacctcatgaatcacatcctccatacagatgatgccatattttccaagagatcgtgcaaagcgttatctgtcaaagcaattcgtttcttattgattttgccataaccacgcttgtagattagtttatttactgacttcagatttaggtacccgcatgcaatgtatggctctacaatcctcagcatgttaattggccttcacaaaggttccattgaagatttgacaaaggcaaagaagctgcaacacatttcggacctttgggctcacaccatcgatacctctgatcctgatgacaaacgccagtctggattctgcaggttcatagaagttgccagcttttcttgacatcttttccattcgaatttcagttctgtacctctgcctatattccttgtgatagtgcttcaatttttcatagataagcttcctccttgcctttcgaagcatcttttgggcaaacttctttctcaggcgcttggtcttcagctctgtgaaattccttcgctttttcttaggggtttctggcacagcgggaacttccttcttcttctcttctacaccctccatggttccagccggaaaaagaggctggatcctctttttaaaaaatatatatatttttaagacagagtctcgctctgtcacccaggctggagtgcaatggtgtgatctcggctcactgcaacctctgcctcccgggtttgagcgattctcctgcctcagcttcctgagtagctgggattaaaggtgcccaccaccacacccagctattttttgaatttttagtagagatggggttccaccatgttggccaggctggtctccaactcttttttttttttttttgagacggagtctcactctgtcacccaggctggagttcagtggcgtgatctcggctcactgcaagctccacctcccgggttcacgccattctcctgcctcagcctcctgagtagctgggactacaggcgcccgccaccatgcccggctaattttttgtatttttagtagagacgggggtttcaccgtgttagccaggagggtctcaaactcctgatatcaagtgatccgcctgcctcagcctcccaaagtgctgggattacaggcgtgagccactgcgcctggctccttcttggtgtttcttgactttcatctgcctcattcagtttctgtttctgttttcacacggctccttctctatgagcctcttttctctccacctgagggcccactctaatccagtatgacctcatttaagcctaattatatctgcaaaaaaaaccccgtaatttcaaaatgaggtcatattctgcagttccaggaggccatgaattctgggaggacaccgttaacccactacagccatcgagaacagcagcaggaggctggatgcggtggctcacacctgtcatcccggcactttgggggacctacgcagcaggatcgcttgagcccagatgtttgagaccagcctggtaacatagtaacaccctatcctctaccccccccaaaaaaaaaattagccgggcatggtagcgtgtgctggtagacccaactatgcaaaaggctgagatgggagggtcactgaagcccaggagtttgaggctgctgtgagctgtgtggcgccactgcatccagcctgggcaacagagcaacactctgtctctaaaaatattaatttaggccgggcgcggcggctcacgcctgtaatcccagcactttgggaggccaaggcgggcagatcacgaggtcaggagatggagaccatcctcgctaacatggtgaaaacccatctctactaaaaatacaaaaagttagccgggcgtggtggcgggcgcctgtagtcccagctacttgagaggctgaggcaggagaatggcgtgaacccgggaggcggagcttgcagtgagccgagatggcgccactgcactccagcctgggcgacagagcgagactctgtctcaaaaaaaaaaaaaataaataataaaataaaataaaaataaaaaataaaaatattaacttaatttaactttaaacaaaaaagcaggtggtctccaagaatgcaggagataactgaccgggtgcagtgtctcatgcctttaatcccagcactttggaaggccaaggcgggtggatcacccaaggtcaggagttcaagtccagcctggccaacatggtgaaaccccatctctactaaaaatacaaaaaattagccaggcatggtggcgcgcgcatgttactcccagctactcgcgaggctcagacaggagaatcgcttgaacccaggagatcgaggttgcggcgagctgagatggcgccactgcactccagcctgggtgacagagggagacctccgtctcaaaaacaaaacaaatcaaaaaaatgcaggagaggggtacacgaatatttggggagcacccccaattcttggatgtctgctgtatccccagtgcacagcacaatctaatccctaataaatgtgcagtggaggtttgttgaataaatgaatgggccccagaagaatgaggtggagaggggaataggaagattgaatgtctcctgcctgaaggtcgggcggggaggggttgggggcaggcaactctgaggctcacccggggccactgcctgcatcctggcaactgcctccacccactttaggatcttcagactggcagcggttggagggaatttcccctcgccaattgctcaagtccctcccctcgaccggccggacatccccagagaggggcaggctggtcccctgacaggttgaagcaagtagacgcccaggagccccgggagggggctgcagtttccttccttccttctcggcagcgctccgcgcccccatcgcccctcctgcgctagcggaggtgatcgccgcggcgatgccggaggagggttcgggctgctcggtgcggcgcaggccctatgggtgcgtcctgcgggctgctttggtcccattggtcgcgggcttggtgatctgcctcgtggtgtgcatccagcgcttcgcacaggctcagcagcagctgccgctcgagtcacttggggtgagttgagatggaaaagttgggaagaaaacatagagaggcgcgtgaccgaaaagacagaatgagatgggtacaaagaggccagagaggaagatctggtagggcagagacagagaccagaacagggaggcgaggcggggaccaggctgcccggtgtaggggctacgagacaggcagccctgccaggaggtacagggagatcccgggatgggaaaggtaggcacacatggaaatggaagatgactcggctctggtgttcccccggcaggctgactcagaggctgctgggggcttcacaaggctgggcgtgggggcttcctggggcctcctaggacgggatggccccagccactcgctccgggtgggggaggggtccctttggggaccgcgccgggcgcctttgcagcgtagagagtccgctgcgcgcggtgctctcgcgcccagtgacatccaggaaaacgattcgggaaacgaagaagttcttttgaaggtctcgacttcacgttccccgctggttcagacctgcttcctctttaagaagtcttaagagtaaaaaaaaataaaatgaaataaaatcaccagtgcgcgccgtgggatgagaggtggaaaggaggatggacagagaaaagagagctcctggcacaggggacacatagaacctctctgcttacgtccgtgccctgttttctggtcttttcttccagtgggacgtagctgagctgcagctgaatcacacaggtaacacgggggacgtggagggacggggagaagaagaggcacagagagagaaggaagg

SEQ ID NO: 3687 - DNA, 6000 bp, Homo sapiens
gaggggaagacatgagtcagcagttagggagggagtgcgggggctttgtggtcacggcacacaaagtgctttctggtgacagcgctgcttggggagcagcagccttgggtttggagagcaggggcgctgttgctaaaggggactggggccctgagcacctcctctcactgcacctctggtcctttggggactgggaaggtgtctgtatggagggtgggatgcagcctcccagctctgcaccacatcatcacgaaacacccactgaggctgaaagtcacgcctccacagcctcttttcctaagacaccccacaactccaggggtatgggcgaaatagattcacagtctaccctactccatccagctcctaaatgacaaagcctcctgtcaaatgccttgcaactcactggctatcccggctgatatctgccaagaccaccactctacttcacatccttcttctcatttcttttttcttttcttattcattcctcctttcttttctttctcttttttttttttctgtcccccaggctacagtgcagtggcacaatctcggctcactgcaacctccgcctcccagcttcaagcaattctcctgcctcagcctcccaagtagctgagattacaggtgcccaccaccacgcccagttaatttttgtatttttagtagaggtggggtttcaccatgttggccaggttggtctcgaactcctgacctcaggtgatccacctacctcggcctcccaaagtgctgggattacgggcatgagccactgcacctggccttcactccccctttctcctgtttgggattcatttgattcatttcttcaacatatgggggtgtttggtgcttttgtttgtgtttgcttttattttgagctaaaacctatcacttgaggctgtgaacggtgcagataggatcttatgaaacttacattctaaaagggggagcaggataggactcatgaaaacagcatggggccaggcgtggtggctcacgcctgtaagcccagcactttgggaggccgaggtgggcagatcatttgaggtcaggagtttgagaccagcctggccaacatggagaaacctcatctctactaaaaatacaaaaaagtagccaggcgtggtggcgggcacctctaatcccagctattcgggaggctgaggcaggagaatcgcatgaacctgggaggcggagggttgcagtgagctgagatcgggccactgcactacagcctggacaacaaagcgagactccatcccccacaccggctcccccaaaaagaagacagtgtggaatggattttggatggtgaggatgtccaaaaagaaaagttcacccatgcagtgggtccagcggttaagaagatcacttagattgagtggcatgagggctaacttatgtgataacaaagctaggctatatgaagtcatttggtaaaacactagtctaaatgttgctagaaaggtattttagccgggcacagtggctcacgcctgtaatcccagcactttgggaggctgaggtgggtggattacttgaggtcaggagttcgagaccagcctgaccaacatggagaaaccccatctctactaaaaatacaaaattagccaggcctggtggcgcatgcctgtaatcccagctactcgggagggtgaggcaggagaatcgcttgaacctgggaggctgaggttgcaatgagccaagatcgcaccattgcattctagcttggccaacaacagcaaaactctgtctcaaaaaagaaagaaagaaagaaagaaaagtattttatatttctttacttttttgtcttttttctttttttcctctttgttgagaacggggtctcactatattgcccaggcaggtctcaaactcatgggctcaagcaatcctcccgcctctgcccccctaagtgctgggattacaggtgtgagccactgcacctggctagaaaggtaattttcagatcatgtcaacaaccacagttgactttcaggacaggagatgagcctaggtaatgtgagtgggccgcacctgatcagttgaaggtctgaggagtaaacaccgaagtttcctgaagaaggaattctgcctcaaggttgcaacttagtaattctgcctgagtttccaggctttaggctttaagacggtagtgtcacctcttacctgagcctccagcctaactggcttgtcctgtggacttcagacttgccaactcccatgattgtgtgagctaatttcttaaaataaatgtgttacacactctctctgactctatacatctctctctctctctctctccgtctgtctttgtatctctgtgtccctgtctctctagttttccatgtctgtctcttctctgactctgtatctttgtctgtctctacagatctctttttttttttttttttttgagacagtctcatgccattgcccagcctggagtgcagtggcacaatctcagttcattgcaacttgtgcctcccgggttcaagtgattcttgagcctcagcctcccaagtagctgggattacagaagtgtgccaccacacctagctaattttttattttttatttttgtatttttgatagagacagggtttccccatattggccaggctggcctcgaactcgcgacctcaggtgatccacatgcctcagcctcccaaagtgctgggattacaggcgtgagccaccgcacccagcctatagatcccatctctatctctctgtgtatcttctattggttctgtctctcgggagacacctgaccaattcagggagggctcctgtgagaagtttcttgagtcaagacgcagatgagcagggggagcctgctttggagatctagggaagatggttcccagcagcaggaagaggaagtgcaaagacccaggatatctgtctggggcagagtgagcaaaagcacgagggtccaaccacagaggccccagtgaagggcacttcgtgtcttagcctaagctcaggggcaagctggcagcaaactgtatctataaagggccacataagtgtttttggctttcagggccaagaggtaaaatcaaggatattacaaagatacttatgaaacaagacagaagccaagtgcagtggctcacgcctgtaattctagcattttgggaggctgaggtgggcagatcacctgaggtcaggagttcgagaccagcctggccaacatatagacaacatatatgttacaacatatataatggccaacatataatacaaaaattagctatgcatggtggtgggcgcctgtaatcccagctactcaggaggctgaggcaggaaaattgcttgaatccgggaggcagaggttgcagtgagccaaaatggcaccactgcactccagcctgggtgacaaagtgagactctgcctcaaaaaaaaaaagaaagaaaaaggctgggtgcggtggcttatgcctgtaatcccagcactttgggaggccaaggcaggcggatcacgaggtcaggagattgagaccatcctggctaacacggtgaaaccccgtctctactaaaaatacaaaaaattagctgggtgcggtggtgggcgcctgtagtcccagctactcaggaggctgaggcaggagaatggcgtgaacctgggaggcggagcttgcagtgagccgagatcgcaccactgcactccagcctgggcgacagagcgagactccgtctcgaaaaaaaaaaaaatccacgcttgaatgcatgcacactcatacatggacctccccacacacatgaacacacccgtgcaagtgcgcacacacacatacacgcaccaatgcacaggcacacacacatgcacacacctgcacacagcacatatatgcacacccacttgcacatgtgatgcatgttcacacatacacacacgtgcacatgcatgcatgtacatggaccacatgcacatgcacacagatgaccatacacatatgcatgcacctgcccacatatgcacgcacatttacatgccagcacatgtatgatacacaggcatgcgcctgcacatgtgtacatgatacacacttgcatgcacacaactgaatacacacattcacatgcacacactgcacacatatatgcatgcagacaagcacacacacagagcacacatccactcctttattccactcttgtgtttttcactgcacttgtcacatcaaaacacaacagaaggccgggcatggtgcggctcacgtttgtaatcccagcactttgggaggctgaggtgggtggatcgcttgaggtcaggagttcgagaccagcctgaccgacatggtgaaaacccatctctactaaaaatacaaaaagcagccaggcgtggtggcacgcgcctgtaatccccgctacttgggaggctgaggcaggagaattgcttgaacccaggaggtggaggttgtagtaagctgagatcgcgccactgcactccagcctgggcaacagagcgagactccatctcaaaaacaaaacaaataaacgaacaaaaaaacccacaacgtattattttcttgtttacgaggtttcttgtctctctggctccaccagaagaggagcagggacccttcttgctgttgttcattgctgcatcccccacaccgagagcagagcctggcatgggcagaaagtcctcagtcgatatttggtggccccaagcgaatgaagcatccaagaagggaaagctgggggctccccactgcacttgccacctgagtcacattttcagaagcctctggaaagtgtgagagtctgtatgagtgagagtgagacagggccaagaccgggggcggcgggtaccggaagaagaggagggtgagtgggggaaggggtggggctgaaccccagctctaaaggcggcccacgggtgcctgtccgcagcgtgcacagcccaggagtgttgagcaatttcggtttcctctgaggttgaaggacccaggcgtgtcagccctgctccagacaccttgggcatggaggagagtgtcgtacggccctcagtgtttgtggtggatggacagaccgacatcccattcacgaggctgggacgaagccaccggagacagtcgtgcagtgtggcccgggtgggtctgggtctcttgctgttgctgatgggggccgggctggccgtccaaggctggttcctcctgcagctgcactggcgtctaggagagatggtcacccgcctgcctgtgagtgggaccggggggctgagagcaggtggaggtgaggggggctcccctgtgtcattgtgggtcactgtgtgtctgtgtgtgtgtgtgtgtgtgtgtgtgtgtgtgtgtgtaggacagggcacaggctgagagcagctggcttgactggttgctgctcccagccttgggcaagtgaattcacctctctgaacctcagtgtcttcatctacaaaataagggcagtctcttcataggggacgaagtatgctatggcatgtgtagtaccagacgatgccagctccacccgtcggaactgacaccccaacactgccatgcacacccctgtgcacacacgcatgcattttctctgtacttttttatttttgagacggagtttcactctcgttgcccaggctggagtgcaatggcatgatctctgctcaccgcaacctctgcctcccgggttcaagtgattctcctgcctcagcctcccgagtagctgggattacaggcatgcgccaccacgcctggccaattttgtatttttagtagagatggggcttctctatgtttgtcaggctggtctcaaactcccgacctcaggagatccacccgcctcagcctcccaaagtgctgggattacaggtgtgagccactgcgcctggccttctctggtactcttattactgttactgcgattgtcattaattctctgaccatttccatctgtggaaatttctcggtctgcttccagctggctgtggatgtgtccgcctgtctgtgtgcctcacctgggggt

SEQ ID NO: 3688 - DNA, 6000 bp, Homo sapiens
tagctaatttgtcagtcctgcaaaggcagactggtccccaggcaaaaagggggtcttttcgggaaagggctgttaccaattttgtttcagagccaaaccatgaactgaattccttcccaaagttagttcggcctatgcccaggaaagaacaaggacagcttgaagcttagaagcaagacggagacgcttaggtctgatttctttcagcgtcataatttcctcagttatgattttgcaaaagcggtttcattacctgcacctcccccggcatctgtccttgtagattcgccatcaccatcaacctgcagacctgctctgccctctcacctgcatccttacctgtcctcatttgcatcccttctgccctcctgcagcctcacctcactctcccagaccccgtttctagatgggcctgagccaagaatccatgctttggggtgagctgtgtctggtgactgaacccgagaggaggcagtaggggctggcaggcagggcagtgtttccggctggagccccagggaggggaagacatgagtcagcagttagggagggagtgcgggggctttgtggtcacggcacacaaagtgctttctggtgacagcgctgcttggggagcagcagccttgggtttggagagcaggggcgctgttgctaaaggggactggggccctgagcacctcctctcactgcacctctggtcctttggggactgggaaggtgtctgtatggagggtgggatgcagcctcccagctctgcaccacatcatcacgaaacacccactgaggctgaaagtcacgcctccacagcctcttttcctaagacaccccacaactccaggggtatgggcgaaatagattcacagtctaccctactccatccagctcctaaatgacaaagcctcctgtcaaatgccttgcaactcactggctatcccggctgatatctgccaagaccaccactctacttcacatccttcttctcatttcttttttcttttcttattcattcctcctttcttttctttctcttttttttttttctgtcccccaggctacagtgcagtggcacaatctcggctcactgcaacctccgcctcccagcttcaagcaattctcctgcctcagcctcccaagtagctgagattacaggtgcccaccaccacgcccagttaatttttgtatttttagtagaggtggggtttcaccatgttggccaggttggtctcgaactcctgacctcaggtgatccacctacctcggcctcccaaagtgctgggattacgggcatgagccactgcacctggccttcactccccctttctcctgtttgggattcatttgattcatttcttcaacatatgggggtgtttggtgcttttgtttgtgtttgcttttattttgagctaaaacctatcacttgaggctgtgaacggtgcagataggatcttatgaaacttacattctaaaagggggagcaggataggactcatgaaaacagcatggggccaggcgtggtggctcacgcctgtaagcccagcactttgggaggccgaggtgggcagatcatttgaggtcaggagtttgagaccagcctggccaacatggagaaacctcatctctactaaaaatacaaaaaagtagccaggcgtggtggcgggcacctctaatcccagctattcgggaggctgaggcaggagaatcgcatgaacctgggaggcggagggttgcagtgagctgagatcgggccactgcactacagcctggacaacaaagcgagactccatcccccacaccggctcccccaaaaagaagacagtgtggaatggattttggatggtgaggatgtccaaaaagaaaagttcacccatgcagtgggtccagcggttaagaagatcacttagattgagtggcatgagggctaacttatgtgataacaaagctaggctatatgaagtcatttggtaaaacactagtctaaatgttgctagaaaggtattttagccgggcacagtggctcacgcctgtaatcccagcactttgggaggctgaggtgggtggattacttgaggtcaggagttcgagaccagcctgaccaacatggagaaaccccatctctactaaaaatacaaaattagccaggcctggtggcgcatgcctgtaatcccagctactcgggagggtgaggcaggagaatcgcttgaacctgggaggctgaggttgcaatgagccaagatcgcaccattgcattctagcttggccaacaacagcaaaactctgtctcaaaaaagaaagaaagaaagaaagaaaagtattttatatttctttacttttttgtcttttttctttttttcctctttgttgagaacggggtctcactatattgcccaggcaggtctcaaactcatgggctcaagcaatcctcccgcctctgcccccctaagtgctgggattacaggtgtgagccactgcacctggctagaaaggtaattttcagatcatgtcaacaaccacagttgactttcaggacaggagatgagcctaggtaatgtgagtgggccgcacctgatcagttgaaggtctgaggagtaaacaccgaagtttcctgaagaaggaattctgcctcaaggttgcaacttagtaattctgcctgagtttccaggctttaggctttaagacggtagtgtcacctcttacctgagcctccagcctaactggcttgtcctgtggacttcagacttgccaactcccatgattgtgtgagctaatttcttaaaataaatgtgttacacactctctctgactctatacatctctctctctctctctctccgtctgtctttgtatctctgtgtccctgtctctctagttttccatgtctgtctcttctctgactctgtatctttgtctgtctctacagatctctttttttttttttttttttgagacagtctcatgccattgcccagcctggagtgcagtggcacaatctcagttcattgcaacttgtgcctcccgggttcaagtgattcttgagcctcagcctcccaagtagctgggattacagaagtgtgccaccacacctagctaattttttattttttatttttgtatttttgatagagacagggtttccccatattggccaggctggcctcgaactcgcgacctcaggtgatccacatgcctcagcctcccaaagtgctgggattacaggcgtgagccaccgcacccagcctatagatcccatctctatctctctgtgtatcttctattggttctgtctctcgggagacacctgaccaattcagggagggctcctgtgagaagtttcttgagtcaagacgcagatgagcagggggagcctgctttggagatctagggaagatggttcccagcagcaggaagaggaagtgcaaagacccaggatatctgtctggggcagagtgagcaaaagcacgagggtccaaccacagaggccccagtgaagggcacttcgtgtcttagcctaagctcaggggcaagctggcagcaaactgtatctataaagggccacataagtgtttttggctttcagggccaagaggtaaaatcaaggatattacaaagatacttatgaaacaagacagaagccaagtgcagtggctcacgcctgtaattctagcattttgggaggctgaggtgggcagatcacctgaggtcaggagttcgagaccagcctggccaacatatagacaacatatatgttacaacatatataatggccaacatataatacaaaaattagctatgcatggtggtgggcgcctgtaatcccagctactcaggaggctgaggcaggaaaattgcttgaatccgggaggcagaggttgcagtgagccaaaatggcaccactgcactccagcctgggtgacaaagtgagactctgcctcaaaaaaaaaaagaaagaaaaaggctgggtgcggtggcttatgcctgtaatcccagcactttgggaggccaaggcaggcggatcacgaggtcaggagattgagaccatcctggctaacacggtgaaaccccgtctctactaaaaatacaaaaaattagctgggtgcggtggtgggcgcctgtagtcccagctactcaggaggctgaggcaggagaatggcgtgaacctgggaggcggagcttgcagtgagccgagatcgcaccactgcactccagcctgggcgacagagcgagactccgtctcgaaaaaaaaaaaaatccacgcttgaatgcatgcacactcatacatggacctccccacacacatgaacacacccgtgcaagtgcgcacacacacatacacgcaccaatgcacaggcacacacacatgcacacacctgcacacagcacatatatgcacacccacttgcacatgtgatgcatgttcacacatacacacacgtgcacatgcatgcatgtacatggaccacatgcacatgcacacagatgaccatacacatatgcatgcacctgcccacatatgcacgcacatttacatgccagcacatgtatgatacacaggcatgcgcctgcacatgtgtacatgatacacacttgcatgcacacaactgaatacacacattcacatgcacacactgcacacatatatgcatgcagacaagcacacacacagagcacacatccactcctttattccactcttgtgtttttcactgcacttgtcacatcaaaacacaacagaaggccgggcatggtgcggctcacgtttgtaatcccagcactttgggaggctgaggtgggtggatcgcttgaggtcaggagttcgagaccagcctgaccgacatggtgaaaacccatctctactaaaaatacaaaaagcagccaggcgtggtggcacgcgcctgtaatccccgctacttgggaggctgaggcaggagaattgcttgaacccaggaggtggaggttgtagtaagctgagatcgcgccactgcactccagcctgggcaacagagcgagactccatctcaaaaacaaaacaaataaacgaacaaaaaaacccacaacgtattattttcttgtttacgaggtttcttgtctctctggctccaccagaagaggagcagggacccttcttgctgttgttcattgctgcatcccccacaccgagagcagagcctggcatgggcagaaagtcctcagtcgatatttggtggccccaagcgaatgaagcatccaagaagggaaagctgggggctccccactgcacttgccacctgagtcacattttcagaagcctctggaaagtgtgagagtctgtatgagtgagagtgagacagggccaagaccgggggcggcgggtaccggaagaagaggagggtgagtgggggaaggggtggggctgaaccccagctctaaaggcggcccacgggtgcctgtccgcagcgtgcacagcccaggagtgttgagcaatttcggtttcctctgaggttgaaggacccaggcgtgtcagccctgctccagacaccttgggcatggaggagagtgtcgtacggccctcagtgtttgtggtggatggacagaccgacatcccattcacgaggctgggacgaagccaccggagacagtcgtgcagtgtggcccgggtgggtctgggtctcttgctgttgctgatgggggccgggctggccgtccaaggctggttcctcctgcagctgcactggcgtctaggagagatggtcacccgcctgcctgtgagtgggaccggggggctgagagcaggtggaggtgaggggggctcccctgtgtcattgtgggtcactgtgtgtctgtgtgtgtgtgtgtgtgtgtgtgtgtgtgtgtgtgtaggacagggcacaggctgagagcagctggcttgactggttgctgctcccagccttgggcaagtgaattcacctctctgaacctcagtgtcttcatctacaaaataagggcagtctcttcataggggacgaagtatgctatggcatgtgt

SEQ ID NO: 3689 - DNA, 6000 bp, Homo sapiens
gtcaaccctggagtgcagtggcatgaccttggttcactgcagcctctgcctagaggggtcaagcagtcttcccacctccacttgtcgagtagctgggactacagacacgcaccaccatgcccagctaatttttgtattttttgtagagacagagttttactctgttgctcaggctggtctcgaactcctggcctcaagtaattctcctacctcagcctccagagtagctgggactagagacatgtaacaccacgcctggctagttttatagttgtagagatggggtcttgctatgttgcccaggctggtctcaaactcctgggctcaagcaatgctccaacctcagcctcccaaagtgttgaaactacaggtgtgagcctctgcgtctggacacacacgatgatgacaaagttgaaatacctagagtttgcaaagcatgtatcaggcagacctttaaaaaaaaaatcagccataaactattttgtaattgcaaagaaagaaaagaaaaatccaagccagagatgatcttactcccatttcttagcataaagcattttattatcttttttatttgtttgttttgagacggagtctcacactgttacctgggctggagtgcagtggcacaatctcagctcaatgcaacctccgcctcctgggttcaagtgattctcctgcctcagcttcccaagtagctgggattacaggcacccactaccatgcccagctaattttttgtatttttagtacagacatggtttcaccatgttggccaggctggtcttgaactcctgacctcatgatttgcccgcctcagcctcccaaagtgctgggattacaggtgtgagccaccgcacccagcctattagcattttttgagacagaatgtcgctctgtcgcccagattggagtgcagctcactgcaacctccgcctccccgggtttaagcaattctcctgcttgaattggaggatcaatcaggagactgtatttgtattcctgagtagctgggattgcaggcgcctgccaccacgtctggctaatttttgtatttttagtagagatggggtttcaccaggttggccaggctggtctcctgacaacaggtgatccacctgcctcagcctcccaaagtgctaggattacaggcatgagccaccgtgcccggccagtataaaacactttgtccatgttgtcattgtgtcctagcctatgtcatccaacctatatgtactgccagtttgttcttctaggaaactcagacttggtagttgattggtttaacaaatgttggttaaactgggattatttgggaaaaaaaaattgtgtatatcaggaaaggccagattacccccagattgcagtggcttgaaacagccaaggtggattttgtcactcgtgctgtattgagtgtcagcttggagcccgtgcggacagatcatgaaggttgccaatggacatagtaaaggcagaggggtctggtcttccattagcaattatgtgctcttgctgaattcacatgtgtcacttctgctcatatctcattggccagatgtaatcacatggcctcacaccttactggccaaaattaatcacatggccgcactcaagctaaatggggtcaaatgctggccaagtgtggagctagaaatatatggcaaatagcactaacggccatcttaacactttaaacatcttattttaaccaagaacatttaaacagacatctcttgtacgtaggaccaagaccctttctttcagtattggtctcctagttagcacacgacattacattcttgtttttgagacagggtctcactttgtcacttggactgaagtgcagtggtgtgaacacggctcactacagcctcaatctcctggactcaagagatcctcccacctcagcctcctgagtagctgggaccacaggtgcatgccaccatgcctagaaaattattgttgtttttgtagaggtgggagtctcactgtgttgcccaggctggtctcgagctcctgggctcaagcaatcttcccacctcagcctcccaatgtgttgggattacgggcatgagccactgcgcccagtagaacatcacattcttgtataagctccacccacaaaccacaatgagtcatttttttaagtggcttgagaacctaaagacatttatgaaacaaactgggggctgagtcttcctaggtttttataagctttttcattaaataatttacagttgctttacttgtacctaacttggcagcatttttttttttttaagagatggagtcttgctttgttgctcaggctggagttgcagtggtgagatctcagctcactgcaacctccaccccctgggttcaatcgattctcctgccttagcctccagagtagctgggactacaggcatacaccaccatgcccggttaacttttgtatttttagtggagacggtgtttcaccatgttggccagactggtcttgaactcctgacctgaagtgatctgcccacctcggcttcccaaagtgcagaattacaggtgtgagccaccacgcctggcatgtttttcttttaacaactcccttttagtctttccaaagcaagcaatctggtttgtgtataaacaactgtcttgcattaatttcattagtttgatagtaaattaaacaagaacttctggcataaacaggtttggatcaaacagctacctttcaggaagtaaacagcttgagagatggaagtggaattgcttagtcataatagtagcctgctagccccagcagtgggcttcacagatgaaaaggaaagtgtctttcaagttggtggaccgagttaagtgagatggtttcagagagttttgttgcagtattactgatagaatttcagcctacattttcatttcactttctgacatgagttcccattttgctcactctggagtacaccctggtataccgctctccatgcttatacaattcagggcattcaaactcacgtgtgtcctgatgggttctgagggatgggaaggcattaacaggtagagaacaggaaggatgggagagagattttttggggggcggcagcaggggccacagtaccaagtttggatttaattctaaaggcactgggaagccattggatggttttgattattgtagtgacagagaaggcagcaagagttaggagacgtcacccaggcaagagatcttgatggtttggaccaacaagaatggggagaagtgaggattccgggagattaaagcagctcctgttttttctccttcctgctgccaggttgtcctcacatgggtgattgacagggcattggaggtacctgttgataactaacttgcagtttgtgttcagggagcactgactccgtttggccacaatgcaggttggatttggggtttaaggctgggctccagtcagccctcgggagcccctgggcaggaaaacatggacaggcctacgggttcttctgccatttcactggccactcctccgtgtcctttgctggttgcttctcattgtcgtgactgctaaagggatgagtgtcccagtctctttgtgagctcatccagtctccattcaaacactgatgactcccgaatttctctctccaggctatgacatcaatatctatctacattgtttagtcaacatccgaaacagaagtagggactccgtctctaacctcctacagctgtgtctatttctcctctctaccttcactcgactccgcccacactggctcccttttattccttctactttcaggatttgtctttgctgttctgtcctctttgcacacttttccagccatctggaatggcaggttgctcacaggtcgttttcttgacttcccttgcttgctaactttacctcgctatggtcatatcccatcgccctgtggatgtgcgctagttaacacttagcacagcctgtgattatgtctctccccagtggaccgtggggcctgtgagggacgtggtctgattcggtcgtcgccgagcacagaactggacagggtactcataacagatttttgttgttgtttttaaagaaaagctaacatttgagtagtgactgcgccaagcagtcaagcacagcccctcgggctcgatccccataaccactctagggttaggtattacccacgtttaaggaacaaaaatcgagggaaaaatcttatacaactactagtaagtagtcattccattttagcagagcgaatgagcgaatccacggaaggccggggagcgacgtgagtggcgagaagcttggagtcgccagggacggcgggcggagcctgggcgccggggctaatgggcggagcctccagggacagctggccccgcccaggccgcgcggggcccgctgggagttggagtcccttgcccacctcgccacgtcaccgactgcaaaccttcagctgtctcaggctcgggtgcaatccgtaccctcagtgggttccctttcagtgggttcctttgtccccaggcccattattccgtcctcccctcttccctgatgtattttggcgcggtctcctggctctgcgggcccagggctccggatgaggtctcccgccgtcccgacccccgcaaggggccagcttggtgtcgccttcgttcttctgccaccccattcggtaggggctcccgttcccgccacgccccctgaagttgtggctcgcgcgtcttcccaggactcccccgcgccggagaggcccgcaggaccgccgagcccacactccgctcccgcccgggccccgctcccccgcgccgccttggtacgctccggccacgccccctcggacgcgcttggtacgcgccgggctcccccgctcgcctcagtggttcggccgcggcgaccccactccggcggcgcgtcccccgagcttggtacggctcagcccgtctcccccgaagccgcgcgcccgcgcccgcgcccctcagtcggtggagcccgcagccccccttgtggcccgcggcagctccccgcccgctcggcccgcgcccgccatggtccgtccgcgccgtgccccgtaccgctccggcgccgggggccccctcgggggtcgcggccgccctccgcggcccctcgtggtgcgcgccgtccgctcgcgctcctggcctgccagcccccgaggcccgcagcctccgcggatccgggcccgctcggcccctcccatggtgagccccccgccctttttccagagccttccacggccccgcccccccagcccctatcccgggctcacgcctttgtccgcagcccccgccgctccggggtgtcccctgtggcccgaagggtggtcccgcccggggccgggttcccccgtggagcacccggtggttcgcgccgcgctctcccctttgttgcgcgttcgggccggggtggggggttgggggacgggggcggggcgggctcatattactgctgactccgcggcccgatttaaacgcgggctgggggcggcagacaggcagccggcacgctcgcttgtttttcctattggagagttgctcgctctccgggcaggaaacctggaaatgggggcggttttgggggacagcggcgagggaggggcccgcgctttgtaccagcgcccccagatgtcgcacccgtgggcgttctcccctggcggccgctccgtgcccgtggagtgcgcacctagaatacgcgcccgcgcccacatgtgggatgctttgatggactgccgtgagcccagaccttaaacgtaaacattcagcttcgcaggtactttgggctgcacacgcttctccggacccaaaagatgcacatgcttttcagaaaccgtaaggtttacctggggctgtaaaaccgcacatcgcgactttgcaccgtgcacacgcttgccccgatgtgagatttcccctgggttcgcgctcgggtccgcttcttaaatacactgcctcagcggtgtggatggcacagagctgtggcagccctactgaaaccttaaacaggcttc

SEQ ID NO: 3690 - DNA, 6000 bp, Homo sapiens
caccccacccctgcctcctctccagcacctgccatctttcacagcccaagccccctttctgacctgccctgcgccagaatctcagtcacctgaacagcctcaccagctgggttcacccagcactcactaggtactaaagtcaccatctcaagcgctttacacaaattccctccctccagcctcccggtggccctaggaagcacggctcccctgtcctccctacctcagaaaatgtcatctctacccctcaaccagcccaaccctggagtgctgcggaagccgctctcagatcccttggcagccccccgggtccaggtcatggccgcgcctgccccactcagtccctgcacagccactggctggatacctgggtccccttggagccaggcctgaggacctactcaccgcgcctgcttcagcaccctcagctctgctccctcacggccagctcaggccactcggggaggttagcccattttacagaccagaataccaagccccaacgtgccactccctcctggctggctcttgtgcctagcacacccatttaccaggtccctgccatacgctatgtgtccccgacaggctcctgggccccaacagggctggccccagtccctccctgcactcacgcccccagggccacctcgaagctgggcacagatgcagaaactggaggcctctcaggctgagttccttcaccctgtgctctacggagggtgcctggagtcagtcatttccagatggggtccgagaggccacgagggctaccctcggccccaggggagaccccccgacccccgcctggactgtgtgagcagagcgctgcctccagctgtacttgtcaccacagtgctacaagggagcccgccccactcacgaagccgttgcccatgatgcggcagagccccttgagcgagtcgcagtctctgttggtgaagtggaactgtgccaactgggagttccggaacagggggcccagggtggtctgggggcgacaggacagacagctgggtcagccaggcatgggggtgctcagagtggatggggtgggaggggcgggtctcaccagcagctgctgagggatcagctgcatgatcagcttctgcggccactggtcggtctccctatgggaaggagctggtcagaaagggctgccctgatccccacggccacagccactgcccctgccaccgccctggctgccacgccccggcactcacaggttctcgccttggttcacgtaggcttggcagggcagggtccgcttcagctttgcagtggagtcagagtagggtctgcgcttctgtgggggcaggaggggcgtcactgtgcacagcctagatgccctggcctgtccccgcagggacaagacaagaccctggaggccagccgcagccccacagagactcacctcctgccactcgaggacgccgctccaagccagcagcttgttgctgagccggtgctcgctcacggccagacccccgagggtgagcccaggtgaggagggaccgatgggacccagtgccccgaagacccgagcaccttcctgcaatggagtgggggataggtgggaaaactgaggccggggcctgcaaggacaggcagtccccacacaccccagaggggacgtcccaatattcagccccaaatcccctgctggaagcccacggggccatgtccaaaccctctgctcacccctcaggacccccacacgctggtcctcatgtcctttcccgctgcccaccctcaggacccttccttcccagagcctgctgtcaccttgacactggcccagcagagtcctgaagccttcagccagccccacctccagcctttgccccagctgtgcgcctgatcgattcttgagacccaagttagaagccagctgtagggggctttccccgtgccccaggctgggcccagggcttccttgcagcctccacaggcacaagccggcttgcgctgtgtctgtcccacacaccagcttgccctgtctttcccaggctgaaactctcctaaagctccctgtcatcccaaagttcaattccttcctctggctcaggccagtgcccacctctctggccttataagtctgaccccggggggaggcaggaaggagatgacaagaaacacagaggggactaaaccatccaggagaaagacagcgaggaaaagggggaaacatttggaagacagctgggacaccacccccagaggggtctcacagaccaaaacatgtagaacaccaagagaaagttctagcaataaagccaagcaacgccacaaatgctactcacaggcactctccccactatttttattactattttttttttgagacagagtttcactcatttcccagactggagtgcagtggtgcgatctcagctcactgcaacctcgctcactgcaagccgcgccatcatgcccggctaattttttttttttttttttttttagtagagatggggtttcaccatgttggccagactggtctcgaactcctgacctcaagtgatccgcccgcctcggcctcccaaagtgctgggattacagacgagggccaccaagcctgacctcacttattgttttttaaaaccaaaaacatctcaaagcaaacaagggaaagctccgcaaacagcctggcagcaggaaacccacgagagtttccccgtaataggcgcctccaggcgggggaaaacaaattataagggtgatttatttttatcttattacaaacaggtattttccaaattttctatgaagcacaaggagatctttccttccagaatactagcaaacacaaaaaattttattttgtgagtgcttaaaaagagaaaaacctgaacaaacttgctctccacccacgcaggtgattctccacccacgcaggtgattcttcacccacgcaggtgattctgacttttgggcagtcgtcagaagatcagatagaaaacctgagtatcttggcgttagaatgagttggacagagagtggatgttgccccgggggcttcaggcaccataccggacatccagcatctgagatgagttaaaacgcacagctggaggtgactttcgagatgagggtacacttacaacatacaagttgtttatggcgctgggacctgaggtatctagtccgcatatacagtgacacgtatgcatttactgccacaaagatgggtaaaagtcaggagaacgcacttaagagcccaagcgacatacttaatgtctgcttgtctaggagagcaggttgactcaggacttcaaatatgctgggatctggagccatagtaaagaacacatatgcttgcctaaaacccagggataccttccacagcaggagcagcacatcaagatgggacgatcatatttaaaaacgacggttaaggtgcaacctaaagtaaatctcacatcttggcaatcgtgtgcaaaactgcgcgcctgacatccctattgcacagggaagcccatctagtacttgcactgaggtttaaaaccttggggtgcatgtctgaggacccggaaagcacttttgaacaactagatgcgaatgctgcaggaaggggcgaaggcagtggagtgaaggggtacgtttaagttgtgggaggtgatctaagtctcggtatccatgtttatgaccccaggaagcctgtttaaggtttcagtagggctgccacagctctgtgccatccacaccgctgaggcagtgtatttaagaagcggacccgagcgcgaacccaggggaaatctcacatcggggcaagcgtgtgcacggtgcaaagtcgcgatgtgcggttttacagccccaggtaaaccttacggtttctgaaaagcatgtgcatcttttgggtccggagaagcgtgtgcagcccaaagtacctgcgaagctgaatgtttacgtttaaggtctgggctcacggcagtccatcaaagcatcccacatgtgggcgcgggcgcgtattctaggtgcgcactccacgggcacggagcggccgccaggggagaacgcccacgggtgcgacatctgggggcgctggtacaaagcgcgggcccctccctcgccgctgtcccccaaaaccgcccccatttccaggtttcctgcccggagagcgagcaactctccaataggaaaaacaagcgagcgtgccggctgcctgtctgccgcccccagcccgcgtttaaatcgggccgcggagtcagcagtaatatgagcccgccccgcccccgtcccccaaccccccaccccggcccgaacgcgcaacaaaggggagagcgcggcgcgaaccaccgggtgctccacgggggaacccggccccgggcgggaccacccttcgggccacaggggacaccccggagcggcgggggctgcggacaaaggcgtgagcccgggataggggctgggggggcggggccgtggaaggctctggaaaaagggcggggggctcaccatgggaggggccgagcgggcccggatccgcggaggctgcgggcctcgggggctggcaggccaggagcgcgagcggacggcgcgcaccacgaggggccgcggagggcggccgcgacccccgagggggcccccggcgccggagcggtacggggcacggcgcggacggaccatggcgggcgcgggccgagcgggcggggagctgccgcgggccacaaggggggctgcgggctccaccgactgaggggcgcgggcgcgggcgcgcggcttcgggggagacgggctgagccgtaccaagctcgggggacgcgccgccggagtggggtcgccgcggccgaaccactgaggcgagcgggggagcccggcgcgtaccaagcgcgtccgagggggcgtggccggagcgtaccaaggcggcgcgggggagcggggcccgggcgggagcggagtgtgggctcggcggtcctgcgggcctctccggcgcgggggagtcctgggaagacgcgcgagccacaacttcagggggcgtggcgggaacgggagcccctaccgaatggggtggcagaagaacgaaggcgacaccaagctggccccttgcgggggtcgggacggcgggagacctcatccggagccctgggcccgcagagccaggagaccgcgccaaaatacatcagggaagaggggaggacggaataatgggcctggggacaaaggaacccactgaaagggaacccactgagggtacggattgcacccgagcctgagacagctgaaggtttgcagtcggtgacgtggcgaggtgggcaagggactccaactcccagcgggccccgcgcggcctgggcggggccagctgtccctggaggctccgcccattagccccggcgcccaggctccgcccgccgtccctggcgactccaagcttctcgccactcacgtcgctccccggccttccgtggattcgctcattcgctctgctaaaatggaatgactacttactagtagttgtataagatttttccctcgatttttgttccttaaacgtgggtaatacctaaccctagagtggttatggggatcgagcccgaggggctgtgcttgactgcttggcgcagtcactactcaaatgttagcttttctttaaaaacaacaacaaaaatctgttatgagtaccctgtccagttctgtgctcggcgacgaccgaatcagaccacgtccctcacaggccccacggtccactggggagagacataatcacaggctgtgctaagtgttaactagcgcacatccacagggcgatgggatatgaccatagcgaggtaaagttagcaagcaagggaagtcaagaaaacgacctgtgagcaacctgccattccagatggctggaaaagtgtgcaaagaggacagaacagcaaagacaaatcctgaaagtagaaggaataaaagggagccagtgtgggcggagtcgagtgaaggtagagaggagaaatagacacagctgtaggaggttagagacggagtccctacttctgtttcggatgttgacta

SEQ ID NO: 3691 - DNA, 6000 bp, Homo sapiens
cgccgggctcccccgctcgcctcagtggttcggccgcggcgaccccactccggcggcgcgtcccccgagcttggtacggctcagcccgtctcccccgaagccgcgcgcccgcgcccgcgcccctcagtcggtggagcccgcagccccccttgtggcccgcggcagctccccgcccgctcggcccgcgcccgccatggtccgtccgcgccgtgccccgtaccgctccggcgccgggggccccctcgggggtcgcggccgccctccgcggcccctcgtggtgcgcgccgtccgctcgcgctcctggcctgccagcccccgaggcccgcagcctccgcggatccgggcccgctcggcccctcccatggtgagccccccgccctttttccagagccttccacggccccgcccccccagcccctatcccgggctcacgcctttgtccgcagcccccgccgctccggggtgtcccctgtggcccgaagggtggtcccgcccggggccgggttcccccgtggagcacccggtggttcgcgccgcgctctcccctttgttgcgcgttcgggccggggtggggggttgggggacgggggcggggcgggctcatattactgctgactccgcggcccgatttaaacgcgggctgggggcggcagacaggcagccggcacgctcgcttgtttttcctattggagagttgctcgctctccgggcaggaaacctggaaatgggggcggttttgggggacagcggcgagggaggggcccgcgctttgtaccagcgcccccagatgtcgcacccgtgggcgttctcccctggcggccgctccgtgcccgtggagtgcgcacctagaatacgcgcccgcgcccacatgtgggatgctttgatggactgccgtgagcccagaccttaaacgtaaacattcagcttcgcaggtactttgggctgcacacgcttctccggacccaaaagatgcacatgcttttcagaaaccgtaaggtttacctggggctgtaaaaccgcacatcgcgactttgcaccgtgcacacgcttgccccgatgtgagatttcccctgggttcgcgctcgggtccgcttcttaaatacactgcctcagcggtgtggatggcacagagctgtggcagccctactgaaaccttaaacaggcttcctggggtcataaacatggataccgagacttagatcacctcccacaacttaaacgtaccccttcactccactgccttcgccccttcctgcagcattcgcatctagttgttcaaaagtgctttccgggtcctcagacatgcaccccaaggttttaaacctcagtgcaagtactagatgggcttccctgtgcaatagggatgtcaggcgcgcagttttgcacacgattgccaagatgtgagatttactttaggttgcaccttaaccgtcgtttttaaatatgatcgtcccatcttgatgtgctgctcctgctgtggaaggtatccctgggttttaggcaagcatatgtgttctttactatggctccagatcccagcatatttgaagtcctgagtcaacctgctctcctagacaagcagacattaagtatgtcgcttgggctcttaagtgcgttctcctgacttttacccatctttgtggcagtaaatgcatacgtgtcactgtatatgcggactagatacctcaggtcccagcgccataaacaacttgtatgttgtaagtgtaccctcatctcgaaagtcacctccagctgtgcgttttaactcatctcagatgctggatgtccggtatggtgcctgaagcccccggggcaacatccactctctgtccaactcattctaacgccaagatactcaggttttctatctgatcttctgacgactgcccaaaagtcagaatcacctgcgtgggtgaagaatcacctgcgtgggtggagaatcacctgcgtgggtggagagcaagtttgttcaggtttttctctttttaagcactcacaaaataaaattttttgtgtttgctagtattctggaaggaaagatctccttgtgcttcatagaaaatttggaaaatacctgtttgtaataagataaaaataaatcacccttataatttgttttcccccgcctggaggcgcctattacggggaaactctcgtgggtttcctgctgccaggctgtttgcggagctttcccttgtttgctttgagatgtttttggttttaaaaaacaataagtgaggtcaggcttggtggccctcgtctgtaatcccagcactttgggaggccgaggcgggcggatcacttgaggtcaggagttcgagaccagtctggccaacatggtgaaaccccatctctactaaaaaaaaaaaaaaaaaaaaaattagccgggcatgatggcgcggcttgcagtgagcgaggttgcagtgagctgagatcgcaccactgcactccagtctgggaaatgagtgaaactctgtctcaaaaaaaaaatagtaataaaaatagtggggagagtgcctgtgagtagcatttgtggcgttgcttggctttattgctagaactttctcttggtgttctacatgttttggtctgtgagacccctctgggggtggtgtcccagctgtcttccaaatgtttcccccttttcctcgctgtctttctcctggatggtttagtcccctctgtgtttcttgtcatctccttcctgcctccccccggggtcagacttataaggccagagaggtgggcactggcctgagccagaggaaggaattgaactttgggatgacagggagctttaggagagtttcagcctgggaaagacagggcaagctggtgtgtgggacagacacagcgcaagccggcttgtgcctgtggaggctgcaaggaagccctgggcccagcctggggcacggggaaagccccctacagctggcttctaacttgggtctcaagaatcgatcaggcgcacagctggggcaaaggctggaggtggggctggctgaaggcttcaggactctgctgggccagtgtcaaggtgacagcaggctctgggaaggaagggtcctgagggtgggcagcgggaaaggacatgaggaccagcgtgtgggggtcctgaggggtgagcagagggtttggacatggccccgtgggcttccagcaggggatttggggctgaatattgggacgtcccctctggggtgtgtggggactgcctgtccttgcaggccccggcctcagttttcccacctatcccccactccattgcaggaaggtgctcgggtcttcggggcactgggtcccatcggtccctcctcacctgggctcaccctcgggggtctggccgtgagcgagcaccggctcagcaacaagctgctggcttggagcggcgtcctcgagtggcaggaggtgagtctctgtggggctgcggctggcctccagggtcttgtcttgtccctgcggggacaggccagggcatctaggctgtgcacagtgacgcccctcctgcccccacagaagcgcagaccctactctgactccactgcaaagctgaagcggaccctgccctgccaagcctacgtgaaccaaggcgagaacctgtgagtgccggggcgtggcagccagggcggtggcaggggcagtggctgtggccgtggggatcagggcagccctttctgaccagctccttcccatagggagaccgaccagtggccgcagaagctgatcatgcagctgatccctcagcagctgctggtgagacccgcccctcccaccccatccactctgagcacccccatgcctggctgacccagctgtctgtcctgtcgcccccagaccaccctgggccccctgttccggaactcccagttggcacagttccacttcaccaacagagactgcgactcgctcaaggggctctgccgcatcatgggcaacggcttcgtgagtggggcgggctcccttgtagcactgtggtgacaagtacagctggaggcagcgctctgctcacacagtccaggcgggggtcggggggtctcccctggggccgagggtagccctcgtggcctctcggaccccatctggaaatgactgactccaggcaccctccgtagagcacagggtgaaggaactcagcctgagaggcctccagtttctgcatctgtgcccagcttcgaggtggccctgggggcgtgagtgcagggagggactggggccagccctgttggggcccaggagcctgtcggggacacatagcgtatggcagggacctggtaaatgggtgtgctaggcacaagagccagccaggagggagtggcacgttggggcttggtattctggtctgtaaaatgggctaacctccccgagtggcctgagctggccgtgagggagcagagctgagggtgctgaagcaggcgcggtgagtaggtcctcaggcctggctccaaggggacccaggtatccagccagtggctgtgcagggactgagtggggcaggcgcggccatgacctggacccggggggctgccaagggatctgagagcggcttccgcagcactccagggttgggctggttgaggggtagagatgacattttctgaggtagggaggacaggggagccgtgcttcctagggccaccgggaggctggagggagggaatttgtgtaaagcgcttgagatggtgactttagtacctagtgagtgctgggtgaacccagctggtgaggctgttcaggtgactgagattctggcgcagggcaggtcagaaagggggcttgggctgtgaaagatggcaggtgctggagaggaggcaggggtggggtgggagcgagttgtctgcccagaggacctggctctgggacattcccagtccctgttccctgttgggacagtctgcctctacccgtcccagctgccgttgagcgccctgggttccgctagggcctcccttctccctcaggagaccaggggcagaccagggcttgtgcctggcatgaggtctcttaagtgacccgttcccccttcacccagcaccgtttgttgagggcctgccatatctgggccccgagtacccagtctgtagggaaagtggacatccatactcaccccccaggcatggccctgggaggctgactgtgcatggctccagggaggccagggacagggccctgagcgggtgatccctgggctggacaccaaggttgagaagttaggccggcagcgtggaggggacagcactgtgggggtggcccggtgtggggaggggacatggggttttgggacggtcacaccacttcatctagacaccacagccaggcacatctgtcaggcttagttctcccatgcgccatcctcaagaggcaccagcactttatctgttgagcctttatgtggcaccaactgtgtgcactattacccggttttacagatgatggaggcccagaagcaggaggtggctggtgttaggtcacacagctaggaggcagcagaacggtggggcgctgcctgtgctcttaacccccaggccaagtcaccccatcaggcagtcaggagggctggcggcagggggtgatgtgggtgggaggtagtgccttcttggcattctcaccgcagcctgggtgccgggtgccactctgacctcagccatggcagggtcgggggatgccgatgggcgctgcacgggctctcagaggcccctcacctatggccatggccttgactgtgggggcctctgtccaccgatgatctcccttcatcccctacaggtggggcggtccagggtggtgggggcacagtggccccgggcagtgaccacagggtcctgacccgcggcccccgcaggcgggctgcatgctgttcccccacatctccccctgtgaggtgcgcgtgctcatgctcctgtactcgtccaagaagaagatcttcatgggcctcatcccctacgaccagagcggcttcgtcagtgccatccggcaggtcatcaccacccgcaagcaggtgtg

SEQ ID NO: 3692 - DNA, 6000 bp, Homo sapiens
gagggtggcacagggaaggttttgtgctgaaatgggccctttcactgggcggccctcgagtggaaggtggcccgccccagcttcctgtcaccgcttcactgtcttgactttcctttgccaaatccaaagggccacagtggacaggatgctggtcctctctgaagaccccacctccttttcacctcatctcctccgcagtgggagaattcccattctcacaacctggagatgcacctcccactgtacctgtgagcatcaggcgtgctctgcacaggctcgctgcacagggccccacgctggggacacctcttggggctgctcagtgatgcaggatgatatttggggtggtcctgaccgccggcccttgcagggagcccagagcttggccttctcgtcaactttcctttttgggcccagttgtagctctgtctccctgggaaccagagaggggcagtgctctagcaggtcactaggcagggttgcttatgataaaagacagaactgatcaggcagttgtgtctggacttaggactctgaccctaaacccctggaggccgttctttggccttgctgagggtggcggtcctgccagattgtgggaacctggaagcgctgcttttcaggttgttacagctcctgtgaggcgtgaggccctaaaaccaaggcgccactgaccccagcctggtgagggtcaggccctccccccgaggtgctggaggcgcggcagcggccacttcggaagtctgagcgcgcaggccgcctgcactccccccggcgtgaccggggcccacgaggctggatcctggggatcttccagcgggcctcctgcctactgcatcatcccactgaccagagttgaggacgtcctgagagactgattattagagtgacgagtggtcacgaaatgcttcacaaacaagtggtgccctgggcagggtcggctttcagaaggtgccgccttgagcgggtgggtggccaggggctgccctaagcctgagttagcatcatgggagaatccccccaggacagacagctgcccgaagctgcagggcccgtatgtggccacggcctgggagtccagcctggagggcagcatcctgcatcctgaggagcagcagtgggcacacggagcgacactgtctaagcactgggccactgcccgggaggagctgggaaagccaggtgggtgccgggaatggtgcagcctcgtgtgctgctcatcatgggctctgtgggtgtccctgcaggggccgttaatcatgtccccaggggcagtgagctgtctcgggtgggtcctgcgctccaggggctggggacctgctctggctttcacagtgccacatgtcgctcgtgcagtgcctggggaggaggtgctcctgtctctgagcctcagtcttctcatctgtaagatgggaggaattccgtctgccttgactactttagactttgttgggattcagagaaggccgtgtgcataacatgcttttgttatgtgatttcttaaatcgttgttctgtcccgtcattgttttcacactggcgctgtgaattcagttttcctacatgtctgggccttgactctgaaccttccaagagtgttcagcctcacccttgctgcctactccaacacggcagcagcggagcacccctgcctccgccagcagggcccagtgctgcctgtgccacgcactgtgctgcctccttatgcagatgggttcatttagccccgtgatactaagcagcagacactgttggaaatcccagcttttcagatgagaaaacagggttcatagaggttgcctggaggctggattcaaacctgggcccatccagactctgctctgggtgtcttcacgtcttgccaccatagctcccagactctccctcacatggtaattctctgtaagggactttaaaggcactcctcaggaggaggctgctcacgtggcttggttcatggaggctgacaacacggcgaacgttggctgagggcccatgtccatcgtggacctgtgccccgaggccacaaggagaaaatgcagaatgaagaccttgtcgcgtgcagggctcggaggaaacttaaggaactctttaccctcatcagtgaaggagactaaaaatatgaacagatgaagggcatggatgtcctcatggtgtcagatttgtcgtaggaagccggggatactgggggcagttccccaaacctttcaggcagataccacccccacatcacctttggtgtccctgccagaagcctcgttcctggctggggggaccactggtttaaccggggattccacgtcttgagcctaaaacctttaatttctggtcttctgacacgcctatatggaatcattgcaaatatggaatgaaattttataatttttatcatcctgagagattatcctcttcagtgactaggttttttttttttaaagaaaaaatcagagagaggaactgtaatataagattagcttatctgccaatttctgaatctccggaaagagccagaggttatgaagactttaatgtttttgcattttcgtaacgtttgtcgcttttcgcttatatattggctgtggcgacagggacacctcgcacgtacgccaaggcatcccagccagatcacccactcgcttcggcagctgcgggagggacggtgctgatgggacagggccctgccttaagctccctagtgagcactggcctggggacttcccactttgctgatgaaggaactggagcattgtgagtgactttctcaaggccacctgcgcagtgcaagggcggatttgggattccggctttgagctctgcctccaggctgtgctgtcttcaccggaccctgtggcctctctgttcagccaaaggcagatgtgtgtgcgagggactctgtcaatggaattcatcccaaggctgctcaccaagttagggcgtccacagtcagtgctggatgaggaagaccacaggattgcaacttaggagacttaagttttgccgtgattttgccaaaaatcagtcctgtaatctctgacacctgaactttgtaggttccatttttgtcatctgcaagaaaggaaacttaaccgtggttacggctaagacccttttctatttcctgctctagacattcattgtcatttgcctttttgaaaacattttttgagcttttgttgtgatcgagacaaaacagtaagtactcaggacagagagatgagaagactcagtcccaaactccaggcacccaccatctaatggggcagacatgagcgacacagccagtgtgtcctggtcagctagtgcagtttcaacgctgctttagggtcctcaccgtgaccatcacctcaccgtgaccgtcagccctaaagccaaggcaccacggaggccctgccaggggaggaccgtgctgacctcgctgggaagagcggatttcagaatcccactctggctcctgatccgacagtggaatatgccctgggcccaggtctttggacatcttcccgtgaagtgagggtggaattcaccaccgatccctcggataagatgctgtcgagaattggcttttggaatccttcattgtgaagagcagcctgtatcatttgagctcatgcgtggctgtgggcagcgtggcctttgtggagatttccactgctgaggagtccgtggatgaggcagcgtctgtgccttctgttcactgggagtgatgtctgatgtgcccgcctggtccaggacgtgctttttaagctgtagaaagaaggtgctgaactagagggttcctgagatttcttttagcttcgaggtctggaggctctctgctcatagtgaaaactgtatcctcctctacagattaacaagaaagtcaagatacaatggttcttgtttaaagatgcattttccccttgatctctgcaccaaatgagaagaaagttgcatttttgagtggttactttgcattgtgaaaataagctgagagaagaagtgggttttcgctggaaaatagtattcttagtctcctctttgtgaaaccagaattctgagagaaaatgaccgagagccctttgaaagaatggagtacgtgagaggtggggagaaaagttggaatccatcagcctcatcgtcaagtgcctgcttaaagacggggcggcgggggcagaggacgctctgctgcactcaagatgctgatacatttctcaagcatgccggcttgtgtgtctccggttaaagtttccttcccattttctgtgcagatgttaaaagattgactcctttccttttttcagggtataggtgctcagctgggaaaggtgagagttaaattttctcatgatgctggtgccaagaaatagcaccttgaaaagagaaagaaatcaagacatgatctccagggagctgtcgtttggagcacattcccgagagctctccctgggccgggaggctgcgtggtgtcgttcccctcagcagcatgcttcaggtggagcctcctgccctgttcagatatgttagataaaaacaccttgacagtgccagcccgtctttaattttcacaccatctcaagtaaaatatgttttgaaatgaaaacattttgcattttattttaagcttatttttggggctctaattttttttaagactaacaaaaacagagtcaggtgacctatcttctctggaatagccgtgcactaaccaaattgtcagctgaagagggttttgctttggaggcataagcccagacaggtctgaagttgagtgtatctgctgaattaacaacagaaagggtttcttttggtcctttttcttttgggattcctatggaaatagttcactggggtcactttggtgagagagaggaaaacagcatgaaatatcaattcacctgagttctgtttgttgtgatttcagggaacaagttattatttcagttcaatgatacttcctttagggtgtgggttgctaagtcttatttaccataaactgtgagtttcattgctgcctggtctaataaatagttcatttgttagtgataaatgttaacatagcctagcaaagagagcgtctgtgccctcccaccttagtgcaagaagaggaagcagagttgctgggggctgcctctgggactttgtatgcaggacctggagcacacaggtgcagtgttgtccgcaggtgtggtgttttcctgcccgcaggtgcggtgttgcccacaggtgtcgtgctgtctgcaggtgcggtgttgtcctgcccgcaggtgtggtgtcatccgcaggtatagtgttgtctgcaggtgtggtgttgccctgcctgcaggtgtggtgttggctgcaggtgtgttatccccaggtatggtgttgccctgcctgcaggtgcgggtcacccataggtgcggtgttgcctgcaggggtggtgttgcccgcaggggtggtgttgcccccaggggcggtgttgccctgcctgcaggtgcggtgttgcccgcaggtgtgatattgctctgcctgcaggggtggtgttgcccgcaggtgcagtattgctctgcctcaggggtggtgttgcccgcaggtgtggtattgctctgcctcaggggtggtgttgcccgcaggggtggtgttgcccgcaggtgcagtattgccctgcccacaggtgcggtgttgtccacaggtgcggtgttgtccacaggggtggtgttgcccgcaggggtggtgttgcccacaggtgcagtattgccctgcctgcaggtgcggtgttgcccgcaggggtggtgttgcccgcaggtgcagtattgccctgcctgcaggtgcggtgttgcccgcaggtgtggtattgctctgcctgcaggggtggtgttgcctgcaggggtggtgttgcccgcaggtgcagtgttgtttgctggagggaggaagagcacaccgggcgtggtggacagaacagcctcgactgtagccggtacttgggcatggagagtgataaggaaacctcagaagactggagcttgggccccaactccactac

SEQ ID NO: 3693 - DNA, 6000 bp, Homo sapiens
cagctatttttgtattttttgtagagatggggactcaatatgttggccaggctggtctcaaacttctgagctcaagtgatcctcctgccttggcctcccaaagtgctgagattacaggcgtgagccacgtgcttcgcctcagtaaaatcattaagtgtctcctttcactcttaaaggagtcttggttgagacaataaatatgtggtcgtagtacctaggacctagcaattccactgctagatacctatcatggaggaattcctgtacatgagcagtgtaagctatgatgctgaatttcataaataacacatcaaaatacctttcttctaaagtcctaaaagaaaaagtaggctgggcgtggtggctcacatctgtaatcctagcactttgggaggccgaggcaggcggaccacgaggtcaggagatcaagaccataccggctaacatagtgaaatgctgtctctattaaaatacaaaaaattagccaggcatggtggcgggcgcctgtagtctcagctacttgggaggctgaggcagcagaatcacttgaacccaggaggcggaggttgcagtgagccaagatcgtgccactgcactccagcctggcggcagaataagactccatctcaaaaaaaaaaaaaaaaaaaaaaagtggaaataaacactgcctgtagacacaataataagtaaataagtagactgtggtatactaggacataaaatattaaaatagtggtgaaaatcagtgaactcttccatatctaacatataaattatgtttggatctcacaaatacaattttgcacaaagaatgagtagaaaaataaacagcatgactctgtatattcaaaaacatgtaaattaaacaaaagtgttgaatccaaacactttttctgtgttaggaacacaaacatatttggtcaaactacaaagaaaagccaggatatagtaacagccactttagtgagggaggggtggaaggtgatggcaggagagcttgactggggagggacacacggaagtttcaacgcactgggaaatggtccccatcttatgctggtaatggaagactgggttgacttgatctttaaatctcacatgtgtgttacgggtagtctttatagttcataattaaaaatggaaaaacacaagtatctgttcttgatttgtacgtgatagaaatctttactccctcctatcattggctttatttttattaaactataaataggattttaagcttacataagcttacagaagctttacatcacagtgcagcaaagaaatctgactttctccttgtccagttgagggctttgcacaagaatgtgattaattaattgtttaaaatttttttaaatattaaatttaagtaattctgtatttgagaaataaaaagttcctaacaacatttaaaacttggtttctcaggttcatttcctggacacagacactctgtaaacatatcttttaccaaattgcagtcatgtaaaatttccttccataagggcacgagggtgtgtagtggaaatctaggtggcacgtattaacagaagtctccatgtaatgaacactcactacagatcaagcattttaccttattatttaatactcatcctaaacttttgaagcattattattacctccatcatacagcagagaaggccaagtgatttgcctaacatcacactgacagtacctgatggtgacaggctacccacacagcgctttctgccaatactcttttctttgtgctggtcacctctcagctcctcttgcaaggttgccaggcaggggtgggcagaaagagctctgaaggcagtgtctcaataactgtgttgagtcttagcttcccgaccaagtgaagtaacctctgaaaatcttgatcttttagatggtacatcagaataaagaggattaaatagtggcacccctgcataggcatcttttaaagtgtgaagagctgcacagacacaagcatagtaattatcattttaatgataaagcagagtggcaacacccagtttagtaactgtgaagaagatcccatcagatatcacaaaatgtaagaactgaatgagtaacactgtgtaatatttcatttgcttttcccctgtccctctcccaccccaatcccaagacgggactggctcattatccgccactatcttctgaatttgcgaacagtgactgaatccaaagacaccatatcttcaagtagccattaaaaagtacaaaccgtaggtccaagaaaatttttccttggggctacactgtttcgtagtgaagagtgaaaaaatgacacgttaaaacacatctttgaccctaacgctttctgttgaataaacgctttttcggtcttcacagtaaatatactctacaattagtatgtgtagcaacagcggacgtttacacagtgactcaaatgcttttacactgcattgcagcctcacaatgctgagtttggcagggcaggtcattagtaacctctttccgcgggagggtgaattaagtctaagggaagttaaggggcttgctgggggcctggctggcaccaagcctggaactgggggtctcggggacgcctgggcgcgcgccagcgggtagtttcccacacgcttcgcagcagcttccccttcccgcaaactccgcgggctgcagagacgcttccagccctctgcagacgtggagagcaagggccgcggcgacgtggagcctggcacaaggcccgcggagcacacacgcccttgggtggcaggcgaccccgcgcccggaccccacgcccactctagcatcggtcccagagaaggtccctccgggctgaggccaaagccagtgtgctccctccccgaggtggcgctacacggtcccatcccctctggactgccgaggccctgatcctcacctgccacccgcccactggagctgggctaaggggtcacctgcggccgtgaccaaggtccgtgaggaaggtgacagaagccgggaatcggagaggaactggcacccccggggagctctgtacgcctgcgcgtgccgggccgcggcgcgcctagttctgctcaggcccgatgcaggaacccgaggccctgcccccaggccggaaatggggttcgtttccggttcgtctgctgtgggcggggcctggagccctaggtgtgaacgcgcacaggcaaccaggagccggtagttgaggggagcggaccctgtacttggaaatgggaacggagactccactccacctagcctgattctgtcactcagaggcaataggcaagcctgtggcagatggggcgggtgaaagggagtcgcttaggctatttttattgaccagcatatcctagaaatcagtgtttctatggatttgtctttgtgtttatctgtattttgtaagtttcttaccatgcacctgcagtacttgtataataaaattaatgataaagatatcagtgatagatgggtgggtttaatcccgaagtatgaaggccctcttagctccgcaagttaatatcggcaaacagagtggttgaataggatgattctcatgtctgggccattgcttacttgatttctttctttcttgtttttgcttacttgatttctttcttttcttttctttttttttgaccgactctggctctgtcgcccaggctggagtgcagtggcgcgatctcggttcactgcaacctccgcctcccgggttcaagcgattctcctgcctcagcctcccgagtagctgggattacaggcgcgtgccaccacgctgggctaagtttcgtatttttagtagagacggggtttcactgtgttggccaggcaggtctcgaactgaccttgtgatccaccctcctcagcctcccaaaatgctggggttacaagcgtgagccaccgcgcccggcctgctcatttgatttctcatgtaatctctaaaatttcatacactcaacagatactcatccagccttaactcaataccacgcgccttgcccaactgagcaaaacgagacccaaccatttccgtcacggagatcaataaagggtagaggggaaagctaatcacagaaatggaggaaaggtgcgtggtcctggaagccccggtggaaccaggctagcggcgtggttcagctatgatgtattttggagtccttgcgatgccatttctgctggcccaaggccagggcaggcactttgagcaggatgcgaaagaggggcagtctctccaccacaagtctttagtctttggagacctctaggaaccccagggccttcccttccgactcccattcggaggcatatgcagtccaggaccaccagtggtgcggtgccggctttcataaccccatccttggtagtgctttctttgccacacagtgctgggcacctgcagaaatgcattaggcatggccctgacttagggcaccttgggccgaacctaagggagtcagctcaggtgcccatcctggctacccaatggaccaatgagcgctgcgactgtgttactcaactttgcagcgtctcatcggtaaaatggaagtgtaacagcttattcatagggttggatgaagctccttatggcagtgcgtgtgaagcgctggcccagcgctcaggaacgccaagtacatacaaatgacaatacatggcggcgcccaactacggcgtgagcgattcttagatgcgatggctagctaaggctaatcgccgcttgctcccgacggcctgcgctcggagccggcctccacccacagccggcctccgcggcccgctccgcccaccaacttatttcctctgggccgggttctcacctccaggagtccccgcgctgagagcccggatgtgagcccaagtggccatgcgcacaagccagcgccgctgccattggtcgctggtgaggaacagattgatgacacatccgaaaaataggaagtggccactacggaagctgttctgggccagaaagacttccagtttggagtcgtttgctgcggggagggaatgaatgggcgctgggaacacgcccgcgaggtggggacgcgccggccgtagcgaggtccttagcgtgtgagtggccggggtcgggtcgcttccccgcagcatggaggacgatgcaccagtgatctacgggctggagttccaggtgggtcactgggagggcggcaggtgctgctcggcctggctgttgatagcatgcgcggtcccatggtgacttcggtttgcagatctcccaccagccctgcaaggacccgtgtctgttccctagttcccattttgcagagaagtaaactgaggctttaggaggttaaacggttgtactggataacagggttggccacagccggcctgcctccttccccttcacatcctgtcccgaacatgacttctgacctggaagttatcactcactttggtggactcatttatttacacgcccaccttttcctctagaatttgagttcctgaaggtaggaactgtatgttgtttaaaataaaaatgtttgattttgaaacaatttaaagtatttagaagagttgtaaaaatacatagaaagttcttctttaccctccacccagcttcccttaatgttaacactttacataaccatcgtacatttatcacagcttagaaattaacattggtacactaatattcagtaaaccacagactgtcttcggattcaactgttttcacactagttttttaccttgtattttccagtgccttttcatgactgtcacatagtaggtgttcaacaaatgactatgaaccgaatgagcccccagagcataagcaatgcacatggtagttcaggacagcaagaaagctgccgtggatagagtaaatgcgtcagggggaatgaggtaggggatgagatgagcgggggaggaagatgaggattgtgtagggcctgttagagccctgtcctggttttcatctattcaagtagcttttgagaatgtgttatgcctaaagcactgagggacagatagagagatagaaacaca

SEQ ID NO: 3694 - DNA, 6000 bp, Homo sapiens
acaatatgtaggatgtatgatacttctgcacacaatggtggttcatatcagtgggatgtggtggctcacacctgtaatcctagcaccttaggaggccgaggtgggtggatcgcttgagcccaggaattcgagaccaacctgggcaacatggtgaaaccctgtctctaaaaaaaaaaaagaaagaaaggagactttataacaattaaaaaaaattccccccaaaatcatctgttcatcagtgaggatctgcagatgtctctgctttgtcccatgcatatttgtcatttttctaaaaggttgattttgcccgggcacggtggcttatgcctgtaatcccagcactttgggaggccgaggtgggcggatcatgaggtcaagagattgaaaccatcctggacaatatggtgaaaccccgtctctactaaaaatacaaaaattagctgggcgtggtggcgcatgcctgtagtcccagctactcgggaggctgaggcaggagaatcacttgaacccgggaggcggaggttgcagtgagctgagatcgcgccactgcactccagcctggcgacagagcaagactccgtctcaaaaaaaaaaaaaaaaaaaaggttgattttttctaaaatgggttaaaatttcttaaccaaaaccttagaaattagagttcttggcacatgactttgtataaagtcctatttttcattaagtggcatctgttgtcttatttgtgggttgactcatacttaaagcgactgctttccacagatttgttcatcagcaaaaaagcatacaaatgcaggaataattaccattttagaaacagtgaggatggctctatccatctataaaaactggtggggttggtgtaagacaaaattggctaataagagaaatagagctagagaaatagatagaaggaaacaaaacacccagccagaaccagttagttctctggtcatttagacaaggttttactggtacttgtgtgggtttggtagttaactgcagaaccatatgtggctcatgtgtttaataactgcaaatgtttactcttaaattcacttgcggtatctaaattatgaataattaattccacagcatgggattggggaacctcaggaaatatttttaattatctttattaaatcctaaattaaaagcatcacttcaggtgttaagaacccaggatcccatcaacttgtttacgtatttttttgaacagatgatagtggctgtgtaacaaattacccctaatttaggagctttagaaccacgaacacttatctcccagcttctgaggctgaggaatctgggagtagcttagttatagtcagatggtaggtcaggggctgcagtgatcttaaagcttgcctggggctgaattccttccaagctcactcacatagtctttggcagctccttggtgtttgttggctgctgacctgttctattggacctctccatagttttcctgagtgttctcatgacatgaaagctggcttcccccagagtgtgtgattcaagaggaaacaagcaagcaagagagcacctgagatggaggacagagtttcttgtgtcctaacctcagaagtgacatcacttcggctgcatgctagtggtcacagaccaactatggcccagtgtagaagaggaagcaggcatcattgggggccatcttggaggctgggctaccactgtggctgtcaaatctttgaggtatttatactctattggaaaactttaaaataatgacctaacagctttaattttaaatgtcagtatttatgctgaaagtttcataatttgctactactacgctaatgatgaaaaactttaaagatacacctagggggtatatagttgtttttttttttgagatggagtctccctctgtcgcccaggctggagtgcagtggcgctatctcggctcattgcaacccccacctccagggttcaagtgattctcctgcctcagcctcccaagtagcttggactacaggcacgtgccactgcgctggctaattttttgtatttttagtagagacggggtttcaccgtgttagccaggatggtcttgatctcctgacctcgtgatccgcctgcctcggcctcccaaagtgctgggattacaggtgtgagccaccacgtctggccagggggtatatagttttaaaaaattattttggtgctgagtgcagtggctcatacctgtaatcccagcactctgggaggccaggagtttgagatcagcctgaggaacatagcgagactccacttctataaaaaaaatgtaaagattagccaggtgtggtggtgcatgcctgtggtcccagctactgaggagggtgaggctggaggattgcttgagcccaggaggtcgagactgcagtgagctgtgattgtgtcacggtactccatccttggctgcagagccagaccgtctcaaaagataaaagagccgggcgcggtggctcatgcctgtaatcccagcactttggaggccaaggcgggcagatcacgaggtcaggagatccagaccagtctggccaacatggtgaaaccctgtctctactgaaaatacaaaaattagctgggcatggtggcgcacaactgtagtcccacctacttgggaggctgaggcaggagaatcccttgaacctgggaggcagaagctgcagtgagccaagatcatgccactgcactccagcctggcaacagagcaagactccgtctcaaaaaaaaaaaaaaaaaaaaaaaaagataaactaattaatctatccagtgcccctcttaccatattcctttggctctttatctcccccacgtggtgctcttttatcttaaaagtatgcacaattgataaatgaaagatgaactgcaaattggaataatttgggtcctgatttgtgaattgaaaagattacttgaaatttggaatgtccctggaaatctaggacttctggttattcaggccaggcgcggtggctcacgcttataatcctggcactttgggaggccgaggcgggtggatcacctaaggtcaggagtttgagaccagcctggccaacgtggtgaaatgccatctctactaaaaatacaaaaattagctgggcgtggtggcgggcgcctgtaatcccagttacttgggaggctgagacaggagaatcgcttaaacctaggaggtgttcagtcggttgtagtgggccaagatcacgccattgcactccagcctgggcaataagagcgaaactctttcccccaccacccccccccaaaaaaaagaaaagaaaatggatcgggattttttttttaaacggcatttactaaacagctaagtaccttctatgagcaaggcactgtacaagagctgttggggataccaaaataatacaatctacgatctactaaagttacaagccggacattatggtgactggatgttcagaaaagaaaccagatgacattattatggtacaccaaaaaagccccccaaaaaccgtactcaactgtcacattcttatggaatacaatttttacagattgtatacaatttgcatgtgaaattctgcttactttttgactaggtatgccactaatgggtatgtttaataaagatattttatacttcagatgtacagaccaggtccggttaattttagccaacaatgtattgttgaaaaagacgctgatattttactgcggcaaaccaccattaacataaattttaaccacagtttgagtattttattaggaataagccttgaaacttgaataggactagtattcctaacaatttaccgtttcataataaaggctgtctcactcttaagtggaaaacgtattatgtcctacttttataaactttggttgaactaaataaaacagcaacatgtacccaacgtttttagactgttttattcagtaccataaacattcactaaactatacagagctaaaatcatgcaaaagattgcaaaacaaactgccttgggaaatttccagtctaagctaaatggaccaagtataggattgaattttaagaagttggtgggaagattccagctcttgtactcacaggtaaggtcctaggattctatttgttgaagtgtctgcagaccctctccctacagcaggggcgtggagcaaatgtgcattcaggaagtgcttattagtccccccaaaacctttttcgtgacgacagacggatggaggcctcagacgactccggcagtaggaccctgaaccaaatgcctgagctgcgctcgaaaggctcgtctcgcaggagctggcgagtggcacgggcttcggtggccgggctcggggctcggggctcggggcccggggccggggggggcggggggtccgtgcccagggcactctgtggctcgattcatgtccccgccctcccacctgagcacactgggcagagagcctgcggcatcgggccagtcgcgcctcctcgtccgccctgggcaggtcgctgggccccaggccgctttctacagctcctttaataaaatggacagcaggggtcctaaccagacgtgggcatcaagacaaaggaggcggccagacgcgcttgagggcctgctcgctagctcccgcccccccattccgcggtcacccggggacagaggccaggccggactgggtggagttgggactcatacgtctgcgtccaggaaggcgccgggcgagccccagctagacgtgacgggcggggccgaacacggcagcggaccagaggcccgcggcgcaccggcgtggggcggggcaagcggagcctcccgggatgccgcgcggcagccggcttccggctgtgggtggtgcgggggacagcggcggccggaagctggctgagccggcctttggtaacgccacctgcacttctgggggcgtcgagcctggcggtagaatcttcccagtaggcggcgcgggagggaaaagaggattgaggggctaggccgggcggatcccgtcctcccccgatgtgagcagttttccgaaaccccgtcaggcgaaggctgcccagagaggtggagtcggtagcggggccgggaacatgaggcagtctctcctattcctgaccagcgtggttcctttcgtgctggcgccgcgacctccggatgacccgggcttcggcccccaccagagactcggtaaagacccaggggagttggcttaggccggcgcctggagcgctcgtttgagggaagagcaggggagctgggtctatcaggtgtttgggggcggggtattggcgatggtggcgcgtccctaagttttcagtgtagaagggggtgtggctctcggagtttggggaaagaataaaggagatgggcctgtctctgagtgggaaagggctactggacgggctccatgtagtgactgagcgcctgagaggggtttgctccctagctttgtgttcggggagggtgttgggaaagcggtaaggagtagggtggctggatcttgtttggagagggagatgtggtcagggttcttgccttagtagggaacaaatctagtgttgtgtgttcctaccagagccagaaaggaagggcccaaagctccagaattcttcctggtcctcgaaggagggaactagaatttctgctgtaggaggtacttatgcagtaatctcgttgggaggcggagactggagttggagtcttaagagttgtgtttttgcgaacatcctaagcacgttcttggttatttcaattgtagcttattggaggtgcttgggagatggggggaggcggaaacctggtaagccaactcgtgatgctgccactatgaatgctttccttgcacttttaaacaaagaaattatcaagagtgacgagtttgatgaatttagaggctagaaagtagagggttcctatttcattagattttccagagagattggattttaaggatggagatgcattaagggatctgaactttggtggaagtaagtttgcgtgaacttttagtgtattttaaaatccttttatc

SEQ ID NO: 3695 - DNA, 6000 bp, Homo sapiens
acttcagactgggcaacggagcaagactccatctaaaaaaaaaaaaagccacacacactaagatttcaatggaaatcttgtcttgtcagtaagttctgttcttactccaatgacattttattaatttgcattcattcctacatagctctaacattgccttttcatttttatatatagattcatcttatgtatccaatagtaaatttcttgactaaacaggctttatttgtgcttaatcatctgcctttccaatcaatgttgattagattaggcactggacatctttttatttttatttgtttatttattttgagacagggtctcactctgttgcccaggctggggtgcaatggtgctatctctgctcactgcaacctctgcctcccaggttcaagcgattctcctacctcagcctcccgagtagctgggactacatacacacgccatcacatgtggctaatttttgtatattttggtagagacagggtttcaccatgttggccaggctggtcttgaattgctgatctcaagtgacccacccacctcggcctcccaaagtgctgggattacagacatgagctaccatgcccgtccaagaaaaagatatatttttaatttcatgtagcctaagtgtacagcatttataaagtctatagtagtgtatgatcatatcctaggacttcacattcactcacccactcactcactcacttccagtcctgcaagttccattcatggtaacttccctatatggatgtaccatttttaatctgttataccatatttttactgtaccttttctgttgaagtatgtttagatacacaaatacttaccattgtgctacaactgtctacagtacttagtacagtaacatgttatgcaggttatagcctaggaacaataagctacaccatatagcctagttgtatagcaggctacatcatccaagtttgggtaagcacactgtatgatgcttgcacaaccacaaaatcacctaacaacacatttctcagaatgtatccccattgtgaagtgacccatgactgtacatttaagggaatataatgaaataggtgaggctggccaggcgcagtgcctcacgcctgtaatcccagcactttggtaggtcgagatggttggatcacgaggtcaagagattgagaccatcctggccaacatggtgaaaccctgtatctactaaaaatagaaacattagccaagcatggtggcatgtgcctgtagtcccagctactccggaggctgaggcaggagaattgcttgaacccgggaggcagaggttgcagtgagctgagattgtgccactgcactccagcctgggcaacagagcgagattccacctcaaaaaaaaaaaaaaaaagaaaagaaaaaaaaagaaaataaataggtgagactttggcctaaaaacccagggttctaagaggatttattcttctaaataattaaataatccttgagtgagcctgtaaaccacattaaacaactttgaaaggacatgcagtcatcctcttttcttgtttccaagttttggatacatttttttttttttttttttgagacagagtttcacactcttcttgcccaacctggagtgcaatggcacgatctcggctcaccacaacctccacctcccaggttcaagcaattctcctgcctcagcctcctgagcatctgggactacaggcgaccaccagcacacctggctaattttgtatttttttagtagagacggggtttctccatgctggtcaagctggtcttgagctcctgaccttaggtgatccacccaccttggcctcccaaagtgctgggattacaggcatgagccactgtgcccggactctctctctttttttttttttttttaacacagtttttctcttgtctcccaggctgcagtgcagtggtacgatcttggctcactgcaacctccgcctcctgggttcaagcgattctcctgcctcagcctctcaagtagctgggattacaggcatctgccaccaagcccggctaatttttcgtacttttagtagagacagggtttcatcatgttggccaggctggtcttgaatgcctgacctcaggtgatccgcctgcctcggcctcccaacgtgttgggattacaggcatgagccgctgtgcccagccaataatttttcttaacagcaccgaagctcctggcaggcaagtgggtaaggtgatattcagtgaggtatagattggagaggaggtacaaggaagctggaggaggctgatggactgagacaaaaaggagaagccaagggcaggaattctagatgaggtccaagggcaggtaagtgagagaaagggagtaagaaaatgggaggaacccgaaatttgagcagggagatggagaggtggagcagttccaagggttcttagtgtccagtgcgtggctgcagcagaggactgcggaagtggatagcaggtaaccacgaatggcttccaaatctaagcagccaggaggccaagctggtttggctggatgtgttgtccacatggatgctgatgtctctcctgaatcagtcaggatttgatcagagaagcagagccattaggaaggatagagaataagggacttatatagggatgatatagaatcacacaattgtgggaactggtggaaaacaacaagactgctgcctctgtatctagtttgtttagcctaaagtctctgtggtctcactggcgtcggaaaagaaagctggacctgaatgagagtgaggacacatggaaactcacaaggacaactggaacccaggtctacttctccccactttgaacctacatgctaggagtgctgatgaagttctgatggggctaggggagccgcggtccagatacagcctcatgccggtgaactaagcgtcactggaacaatgcatgggagctgcctcagtgcctgctgcctgcgctttaccttcagagcagtaaaaaagaaaaaaggctgctgtttcctacaccttccaaacactgcaaatttctctggtagccaacgctaacccagaatatacagggacaggaattctgggaaatgttccagctcagctaagttgacacagaagaaagccactgcacttcttcaacaccaagcacagtgcctacgaacagatcctatacatagggcacttaataaattgtgggggttttccatcaaaggtacctttgttttgaaggtcagaaggaactacggatatctgcaacaacacggagaaacctcagagcattatgctaagtaataaaagccatatataaaagagtacacactgtattagtccattgatacagaattctaaaacaagcaaagctaatctatggtgacagaaatcagaacaaagttgcctgggacagggagggagttgggagtcccctcccttgggaaaaggcatgaggaaatccttaggaggtgatggaaatgttctatattttgatagaggtgtgggctacacacgtgtatgcatttgtcaacactctctgtacctctaagagctgtgcgttttattatatgtaaattattatttttatttttatttgagacttgggtttcactatgtttcccaggctggacccaaattcctggcttcaaactattctccagcctggcctcccaaagtgataggattacaggtgtgactcactgtgttcagcctattgtaggtaagtatctccattacaaaaacaaacaaagaaacaaacaaaaacaaaattaaagaaaagtggtgccctcagagctaattacagattaattaaacaaccatgaaaaaccttatatctgcctagctggccatttttaaaactggcctcataatgagtattttcgctctataattgggaaagcatcgccaggagtctcagaagaacatgcaataccaaaattcctctccatcagccacaagagaaatcagagaggaacagaagcaggtaggagacaaaggcaaaactcctaataacaagacaaggaaaataaactcaacactgaactacagaactagaatttttattcctttttccttgttttcaaaaatttaaattaacagtctgttcaacagagatttggtttctaaactgcatctagctctcactgtacccatgtgtgtgacagaaagagagagaaagagtaacaaacgttccaaataatggaaatcatcataaatggaagctaggggaagcagtttcactgtacccagaggaaatggattccacagccatgcaaggacctgaatctctgtccggctttcaccttgtcttcttgactggcctcgttgtcatgacatttgcaatttttttaaacaacatcaaagaacaaaaactatctcccttctcaccattggtcgttacctgatacccatttatcagggagcatacttttctgtaatgaatttatttcagcatagggacagcaacttaaggcataaatgctaagatggaggcagaaaggaaagaggttcgcccagagatccaaaggagaagtgggaggggagactctgaaaggcagggaagaaccccgaaaggaggggctgggggctcgagctggttgtgaaagcctttcccctttacgctttgctctcagtgtggcgggcagactggatgaccaggtgccttagaggttctcacaggcacctttgcttacttagtccttttacagctcggattaatgtttaacttcctttgggaaagatcaaaaaacaaaggcagaaactcacagccgggtagccgtggcatcctcaccccagggctagactctacagctcttgctctttgtccccaagtctcctcccctctcctttgtctccaggccccaggggaaggctagagaatgatcacgtggccgggatggggctgtgttcctggcagtcccctgggcttcctgcagggacctggattcttagtatttcaggctgctgtccctttttttttttcatttcctttttgtttttgttgttgatgtgaccgcgtgtccacaaccctgggattccctcgccctcagattccagaatccaatttcttggatttcagtgtttttaaggtcagtggaaacttttttaaaaagcaacattaagctaatatattcttactgcagaaaaggagctttgttctatttatctctaaaactgatgctcactagtagttctcagatttggaaaggtatttgtactatttatttataggagcatttatttataggaaatactggctgggcgtggtggctcatacctataatcccagcactttgggaggccaatgtgggcggatcagtttgagaccagcctggccaacatggcaaaaccccgtctctactaaaaatacaaaaattagctgggcgtggtggtgagtgcctgtaatcccagctactccggaggctgaggctggagaatcgcctgaacctgggaggcggaggttgcagtgggccgagatcgcgccattgcactccagcctgggcgacaaaaacgaaactccatctcaaaaaaaaaaaaaggaaatccactagatcgaggtgcttggaaaaacaacccatcactaaggatccttcccttcctcttctccattaataccacctttgtaaagattccctccggtaccaccccaaagaactgaagtgcagataattatttcccagaatgttgtttttacgctggtgaaattcaacggcaaacattttactaacactctcctccttttcctacctgaggtattaaaacttggagtcagcctgggtaatattttataggaaaatgctcttcatcactgtacacctgtgcctaccatggtacctggggcatctagtaggtgccagataaatatatatgtacattttatatatatatatatatatatgtatgtatgtatatatagttttttttttttttttttcccgagacagagtcttgctctgtcacccaggctggcatgcagtggcgtgatcttggctcactgcaacctccgcctcctggttcaagcaa

SEQ ID NO: 3696 - DNA, 6000 bp, Homo sapiens
gctgccttacgggagctcataggattcgcctctacagaaggtgtgatggaacaggtcagtcactagccaaggtgtgagtaacaggctgtgcaagttcaaaatcaagagagtgattcatttcccctgggggagcatcagccagactgcttcactgaggagaaggcagtggcgacatctctctaaatatctgactgtggaatccatagcccagagaaggtcttgtgtgtcgattagagacaagcaaaggaaaacaaatctaccaggaatgctggtgttttcctggagagtgtttcactgatcacggggtagtgctctttgctcagtggagaggtacaaagctgtctagcccctgcttgctctgagggggaattctctgggctctcggaacctcttattttcccttctggttctccacttggggtgagtgcttatcaccaccttctgtagagattgaggaaagtggagaaggtacacagaggctttggagttgctagcgatctcaatgacatcttgtaagagagctggtggctcaagaaggagagagcaggcccttgtgttgcatttgcaggatctggggcaatagtacagcccacatatctaagctccatttacgttgccaaaaatagcataggccacacatctaagctccatctacattgacactccatgaccccacgtgggccaccccagtgtcatggcccagtctggagaagtgaccctgcgaaaaagctgtgtatgccctgtaggtagacttgacccttctgtgcaagaaattttgatgtcctgcgagcacccagaatggtctaggagagagggaacaggctccagtggacatattctcttcgccctgttgactccctcctccatgggaagagacttggcttaaacaagcctagagcaggtctgtttaaggtctggggccctgagtaggaatctacttacccacgtcgaaggtagaattgggaagaagcactgttataaactcaacagaaagtgatactgagtttcatttttttttttttttttttttttggagacagtcttgctcagtcgcccaagctggagtgcagtggtgtgatctcggctcactgcaagctccgcctcctgggttcacgccattctcctgcctcagcctcctgagtagctgggactacaggcgcccaccaccacgcctggctaatttttgtgtttttagtagagacggggtttcaccatgttggccaggatggtctctatctcctgacctcgtgatccgcccgcctcggcctcccaaaatgctgagattacaggtgtgagccactgcacctggccaatactgagtttcttggttttgctctggaactagactaatgaattccaatcctcatggaagccctgtgtgaagcatttcatggagaaaaatttgtatgatgcagtggtttgcaaatgggggaaatttggcatacagtgacatttggtgatgtctataggcattttgcattgtcataattggaggatactgcaagacgtctggtgggtagaggccagggatattgcaaaatatcctactatgttgccctgcaggatagcaccccataagaaacaatgattttggccgggcatggtggcgcacgcctgtaattccaacagtttgggaggccgaggagggcagatcacttgaggttaggagtttgaaaccagcctggacaacatggtgaaaccccatctctactaaaaatacaaataaattagccgggtgtggtggcaggcacctgtaatcccagctactctggaggctgcggcaggagaattgcttgaacggggaggtggaggttgcagtaagccgagatcgtgccactgtactctaccctgggcaacagagcaagactccgtctctaaataaataaataaataaaaataaaataaaataaaagaaacaatgatttggccccaaatatcaatagtgctgaggtttgagaaatgaatttttagtacccttagcacatggtttggacttgtttgctgcaggatgctgggcctggaagatataagattgcaagtagccacggctcctaaagaatgactgagtggctgcttccagaaaagtaggtcagaatcagcagaaaaacaacttaatgaggccgggcgcggtggctcacgcctgtaatcccagcactttgggaggtcgaggcgggtggatcacgaggtcaggagttcgagaccagcctggccaacatggtgaaaccccgtctctactaaaaacacaaaaattagccaggcgtggtggtgggcgcctgtagtcccagctactcgggaggctgaggcagaagaattgcttgaaccccggaggcggagatagatggcagtgagccaagactgtgccactgcactccagcctgggcaacagagcacgactccatgtcaaaacaaaacaaaaaaaaaattaatggtgtacttgggactatactatcagcctcaacaaatagacttggggcccagcagctgtgccaagctcccgaagacccaccagcctgaactgtccatcccttttcctcatgcaactttgccacccacatcacccaccatccctcacctttggtcttcactggggcagctctccattcaactaactcccccgcgcttaagttaattatctgagttttctttgcagcttaatacttaccaggcctcatggtgtctactcttcttttttcttttttttcccagacagagttttgctcttattgcccaggctggggtgcaatggtgccatctcggctcactgcaacctccgcctcccaggttcaagcgattctcctgcctcagcctcccgagtagctggaattataggcatgtgccaccacgcccgggtaattatgtatttttagtagagaaggggtttctttcatgttggtcaggctggtctcaaactcccaacctcaggtgatcaacctgcctcagcctcccacagtactgggattacagaaatgagccattgcacctggcccagtgtctacttttctttatcaggctaaacagctcaggacacagatagaatttggacttaggtccgtgtgaatccaaagggccatgctcaactgagcagccggcactgcctcgctgaacagccaggattctgggagtgctactttgtacaacattttatgaaatgtttctggcctccttctagaccagagcagaaaggggtggttaggatgttctaaataccaaccccctctactccatccccaggttcatgacaactttttaagctgagcatactgcaatcacttaattcttctagacctaagataagccagtagccacgtccactctgagcctgtgagcaggcaggatcaagtctaagagcatctcttctttggaatcttaaggcctaggatcccagcagttttggggtctaaagacttttcaggctcccgaaactccctctatttttaataattttaaatgtttccccaatacttagctaagcaaagaaggaaaaagtgtacttttattacacagtcagttctggataattctaggggaaattcttccattttagaaatctctgctttcttcttttctcccagattcttctcattaattccctcagtaaatatttgtctgtggcagggtgcagtgctcgtgcctgtaatcccagcacttttggaggctgaggtggacgaatcacctgaggtcaggagtttgaaaccagcctggccatcatggtgaaacctcgtctctactaacagcacaaaaattagctgggcatggtggtgcgtgcctgtaatcccagctacttgggaggctgaggcaggagaattgcttgaaccaggaggcggaggttgcagtgagccaagatcacgccactgcatgccagcctgggtgacagagcaagactctgtctcgggaaaaaaaaaaaaaaaaaactatatatacatacatacatatatatatatatatatataaaatgtacatatatatttatctggcacctactagatgccccaggtaccatggtaggcacaggtgtacagtgatgaagagcattttcctataaaatattacccaggctgactccaagttttaatacctcaggtaggaaaaggaggagagtgttagtaaaatgtttgccgttgaatttcaccagcgtaaaaacaacattctgggaaataattatctgcacttcagttctttggggtggtaccggagggaatctttacaaaggtggtattaatggagaagaggaagggaaggatccttagtgatgggttgtttttccaagcacctcgatctagtggatttcctttttttttttttgagatggagtttcgtttttgtcgcccaggctggagtgcaatggcgcgatctcggcccactgcaacctccgcctcccaggttcaggcgattctccagcctcagcctccggagtagctgggattacaggcactcaccaccacgcccagctaatttttgtatttttagtagagacggggttttgccatgttggccaggctggtctcaaactgatccgcccacattggcctcccaaagtgctgggattataggtatgagccaccacgcccagccagtatttcctataaataaatgctcctataaataaatagtacaaatacctttccaaatctgagaactactagtgagcatcagttttagagataaatagaacaaagctccttttctgcagtaagaatatattagcttaatgttgctttttaaaaaagtttccactgaccttaaaaacactgaaatccaagaaattggattctggaatctgagggcgagggaatcccagggttgtggacacgcggtcacatcaacaacaaaaacaaaaaggaaatgaaaaaaaaaaagggacagcagcctgaaatactaagaatccaggtccctgcaggaagcccaggggactgccaggaacacagccccatcccggccacgtgatcattctctagccttcccctggggcctggagacaaaggagaggggaggagacttggggacaaagagcaagagctgtagagtctagccctggggtgaggatgccacggctacccggctgtgagtttctgcctttgttttttgatctttcccaaaggaagttaaacattaatccgagctgtaaaaggactaagtaagcaaaggtgcctgtgagaacctctaaggcacctggtcatccagtctgcccgccacactgagagcaaagcgtaaaggggaaaggctttcacaaccagctcgagcccccagcccctcctttcggggttcttccctgcctttcagagtctcccctcccacttctcctttggatctctgggcgaacctctttcctttctgcctccatcttagcatttatgccttaagttgctgtccctatgctgaaataaattcattacagaaaagtatgctccctgataaatgggtatcaggtaacgaccaatggtgagaagggagatagtttttgttctttgatgttgtttaaaaaaattgcaaatgtcatgacaacgaggccagtcaagaagacaaggtgaaagccggacagagattcaggtccttgcatggctgtggaatccatttcctctgggtacagtgaaactgcttcccctagcttccatttatgatgatttccattatttggaacgtttgttactctttctctctctttctgtcacacacatgggtacagtgagagctagatgcagtttagaaaccaaatctctgttgaacagactgttaatttaaatttttgaaaacaaggaaaaaggaataaaaattctagttctgtagttcagtgttgagtttattttccttgtcttgttattaggagttttgcctttgtctcctacctgcttctgttcctctctgatttctcttgtggctgatggagaggaattttggtattgcatgttcttctgagactcctggcgatgctttcccaattatagagcgaaaatactcattatgaggccagttttaaaaatggccagctaggcagatataagg

SEQ ID NO: 3697 - DNA, 6000 bp, Homo sapiens
tatagtgctttatattttacaaaagaatttaaagtggaaaaagatatgaaaaagggcttttttcatggtaaagggttagaagtttggcttttggaaacaaagctaatttttaggctggacgtggtggctcacacctgtaatcccagcactttgggaggctgaggccagtagattacttgaggtcaggagtttgagaccaggctggtcaacatggcaaaaacccatctctaccaaaaatacaaaaattagctgggcgtggtggtgcatgcctgtaatcctagctactcaggaggctgaggcatgagaattgcttgaacctgggaggcggaggttgcagcgagccaagatcctgccactgcactccagcctgggtgacagagtgagactccatgtcaaaagaaaaaaaaaagttggccggacgtggtatctcacacctgtaatcctagcactttgggaggctgaggtgggcagatcacttgaggtcaggggttccagaccagcctggccaacctggcaaaacccccgtctctactaaaaatacaaaaattagctgggcctggtggcatgtgcctgtaatcccagctacttaggaagctgaggcaggagaatcgcttgaacccaggaggcagaggttgcagtgagccaagattgtgccacagcactccagcctgggcaacagagtgacactccatctaaaaaaaaaaagaaaagttaatttttaatgacagatacaatgacatggtagaaattctacatatacatttacatattatatatatattaaggtgaactctgaatgtacagatgcaaactattgttataaacttaaaccaaccaaatattatcccccactctgtggagtatatcctatgaacccaggttctttgggatatgtgagaaaaactaatgaacaagtagcataaatataaaactattaacaaagaagatctagaatagagagggatttgctgcatagtggttaaggacttttactcttcattctatataaaggacttttgttttctactcatctattactcatgggataacaaaaatttttagaactggtagtctaattttatatatatatatatatatatatatatatatatatatatatatatatatatatatatttttttttttttttttttagacagagttttgctcttgttgcccaggctggagtgcaatggcatgatcttcgctcaccacaacctccgcctcctgggttcaagtgattctcctgcctcagcctcccaagtatctggaattacaggcatgtgccaccatgcccagctaatttttatatttttagtagagacaggttttcaccaggttgcccaggctgctctcaaactcctgacctcaagtgatccacccgctttggcctcccaaagtgctgggattacaggcgtgagccaccatgcctagcctgaaaatattaataaatgtgcttaaatatggcactagaactacaaaagattcacaattaaaacataaaacgagtaattttgagcaaagaatgacaaattgagaaggtgttaatgaggtactaaaataaacaataccggccggtgcagtggctcatgcctgtaatcccagcactttgggaagctgaggcgggtggatcacctgaggtcaggagttcaagaccagcctggccaacgtagtgaaacccggtctctactaaaaatacaaaaattagccgggcgaggtggcaggcgcctgtaatcacagctactcgggaggctgagacaggagaattgcttgaacccaggaggtggaggttgcagtgagctgagaacacgccattgtactccagcctgggtaacaagattgaaactctatcttaaaaaaaaaaaaaaggcggacacggtggcttgcacctgtaatcccagcactttgggaggccgaggcaagaggatcacaaagtcaggagatcaagaccatcctggccaacatggtgaaactctgtctcaactgaaaatacaaaaattagccgggtgtggtggtgggcgcctgtaatcccagctattcaggaggctgaggcaggagaattgcttgaacccaagaggtggaggttgcagtccgccaagatcatgccactgcactgcagcttgggtgacagagcaagaccccatctcaaaaaaaaaaaaaaagaaaaaataccctggatcagccgggtgtggtggctcaagcctgtaatcccagcactttgggaggctgaggtgggcagatcacctgaggtcaggagttcaagaccagcctgaccaacatggagaaaccccatctctactaaaaatacaaaaaattagccggacgtggtggcacatgcttgtaatcccagctactcaggaggctgaggcaggagaattgcctgaatccgggaggcggaggttgtggtgaggtgagatgatgccattgcactccagcctgggcaacaagagcaaaactctgcctcaaaaaaagaaagaaaaaaaaaaaagaaagaaaagaaaaaataccctggatgtatactcagatacaatgagtcagagattagtctggtattttgtcatttatttaataattatgcttactcaattcactttattgtaattaacaataaatagctgtccagttataagaagatgaagttctcccgattaggtaaacagatttagacctcagaatggaacattttgccaataaagccacaataaccagttagtttattcttgggaaaagtatatgtaatttggagaaaggcaaacttcctgaaaacatccaaaattcagcagacaacaaaaatctggttaacttgttcctgatttgttagtactattcttttttttttgtttgtttgttttttttttttgagacggagtttcgctcttgttgcccaggctggagtgcaatggcgaaatgttggttcactgcaacctctgcctcccaggttcaagtgattctcctgcctcagtctcctgagtagctgggattacaggcgcccgccaccacgcctggctaacttcttgtatttttagtagagacggggtttcaccatgttggccaggctggtctcgaactcctgaccttaggtgatccgcccgcctcggcctcccaaagtgctgagattacaggcatgagccaccgtacctggcctaaataccttatttcatataccacgtgaaatttaaattatacaaaacaaattatagaggtacttagaacagcatgactatttacattaatcaacttgccggcacttcaacagaatacaacatagaaatgattgttttaatataaacataagctttgatttgacatatacttgtagaaattaatcaaacttagctgaatcttaaaattgcttttttacctttcctcttttttttttatttttttattttttgagatggagtcttgctctgttgccagactggagtgcagcggtttggtctcggctcaccgcaacctccgactctctggttcaagcgattctcctgcctcagcctcctgagtagctgggattacaggtgcctgccaccacacctggctactttttgtatttttagttgagatgggtttcaccatgttggccaggatggtctcgaactcctgacctcggatctgcccacctgtgcccccagcaaggtgctgggattacaagcatgagccaccgtgcccagcctcctttcctctttttaactcttacttttatgatttctttagtggataaaaagcttttaaaaaataggttacaatgatattacagctaacaaaaaataacatttaaaaacactaaatagtatatatatgaagtatttataattattttaatattgtaataatatagtgtgttgtgatttgaattcatctgcacggaaatcgattactgtcctttctttctatttccctatattttctttccgaaggcgtcatcaacattttggttctttaatagtaaccaaaacccgaaatcatctcggttctcagtatttggctctatgggaacaccttttcttttctctctttttttttttttttgagacggagtcttgctcctgtcgcccaggctggagtgtaatggcacgatctctgctcactgcaacctcagcctccccagtagctgggattacaggcatgcgccaccacgcccggctaattttgtatcttttagtagagacggcgttcctccatgttggtcaggctggtctcgaacttcaaacctcaggtgatccgcccgcctcggcctcccaaagtgctaggattacaggcgtgagccaccgcgctcagcctgggaacaccttttcttacatcttcaagtgctagaaatgcttatgaaaacgaaaaaagaattattaagagtaattataaagaaacactcattttcttcccaagagagccaagatttcttctttcctcttctttcttttttttttctttctaatttcaaaggagtataattaaattgccaggtaaaagctcaaaggtcttttttatagtgttctggaaggttctctgcctgtgtttgtatttcctttagcctccacgttcctctatccagttcccgcacccttccccccaggccccattcttcaaggcttcagagcagcgctcctccggttaaaaggaagtctcagcacagaatcttcaaacctcctcggaggccaccaaagatccctaacgccgccatggagacgaagcacctggggcggggcggagcggggcgcgcgggcccacacctgtggagagggccgcgccccaactgcagcgccggggctgggggaggggagcctactcactcccccaactcccgggcggtgactcatcaacgagcaccagcggccagaggtgagcagtcccgggaaggggccgagaggcggggccgccaggtcgggcaggtgtgcgctccgccccgccgcgcgcacagagcgctagtccttcggcgagcgagcaccttcgacgcggtccggggaccccctcgtcgctgtcctcccgacgcggacccgcgtgccccaggcctcgcgctgcccggccggctcctcgtgtcccactcccggcgcacgccctcccgcgagtcccgggcccctcccgcgcccctcttctcggcgcgcgcgcagcatggcgcccccgcaggtcctcgcgttcgggcttctgcttgccgcggcgacggcgacttttgccgcagctcaggaaggtgaggcgcggattggagcagagttgtggagctgggctgggctggggggcagcggcccccggccctcggcccccgaaacgggcataatagggaggggaccaagaggccgcgctttccagcgtggagaccggacggtgcggccgtgctccggctcaggccctccgcgcggtaggaaacggcgagggccgtcccggggagcagcctcacttcgcagctttgctcgccttggtagggaaatggccttgggcggaggcgggggacaggcagggaacggagtggccacgtccaggtttcctgcggccaccgaaccggtgcctcgcgccctggcgcacccacgtcctcggttcggggtggacttggggttccaaaacagccccagccggtggcggagtctttacgacagggaccagcgggctcgcccttgtccttgcagcgggccccggatgtgggcctcaggcggggacaggcgcccgcagggaggcctccagggccgctatgcacctgcgcgcggcaggcggcccggaccacacagggcgtgtgggtgttttcccttttctaaggatcatatgagtaatgccaggcttattgtagggaacgcagaaataataaccgtaaagagtaaaaacatataatcccagcattttgagaatcccataattagtaattaggtgtatctttctttctttttatttatttatttaattttttgagactgagtcttgctctgtcgcccaagctggagtgcaatggcgcgatctcggctcactgcaactttcgcctcccgggttcaagtgattctcctgcctcagcctcctgag

SEQ ID NO: 3698 - DNA, 6000 bp, Homo sapiens
tttatcaaacaagagtcagaaaaaatccaaataatcaaatcagtatttaaagcttatattgtcttctgaaacttataattgccctcagtcatgctttttgccataatatttatgtcttaaaacatttacagatagtaacagtaaagagaagctgaaaatataaaaagagaagaccaatgtaattgtcttggaaatatttttgctttccagatgtaattagataattgcatcactcttaattttcttttcaattgtgcatacctcctaataattgcttaatagtaaaaattaaagttacaccaaaatcttatttatctcaaccaaatctttgtatcctaattgagacagtatgctgaaaaacagaacccacttttgaagaaaagcggttaaaaatgtgccttgatctgttgcagtttgagaaataacttgcatctaaagttttttatttttcttagaggctttgtccagagtaactctgtttcaagttaaagaactgatgatgtttccttaataatcctttctctctctctctctacctcctccgccccctgtctctctcagtctcttccctttctttttcatcttgtgtctgctgctgcctggcaacttttctgtctggaaaaaggcagggtaagaaacttagcaggccttgcaatgatagctgcagaaatccttagcaacctaactttcaggccaactctccttcacacacatctcttccatgagacagactgtcagctccagcttgtttagacacacgtcctctccctaacttaacgatgttcagatgtgtagcacaaattgttactatctacagtaagaaatccaatctcacaaaaataattaagttagcagaaatgaaatgtgatgtttgatcacatgtatggaaactgtggctctaattgggaagtgtaagattaccactgactgataattagcattcatgtgttgttttaaaacaaaaaggaagaatgattggttctactttgtttaatttatcttaatgagagatttcataatattctatagtttgatgaattaatttaacttgtcagtgttaataactctgattagaatgaataaattataatggagcctagtaacaaacaaaattcgaacgctcactcaagcttttccctcttcactaatagtgcactttattaatttattttttcattaaagcatatattatggggaaacaaaagtatttcatagaaaattatacttaagcttttcatttatttatgatccattaacattcaatggtcatttaaaacctaggagcaaattatttaattttaaagctcaaatttggtctacacttttatcaacctcactgatgctcatagaaaccaatcttcttttataaactggtcattttcaaagaatatctggaagaagaaccactttatataagagatttgatgtgggacagacaattttatcccatttcattttgacaccggctttatttcagttttggagcaaatatatattttctgcttaatatttaatctgtttatttcatattttggcttcttggtatgaatcagtgtccttagtataaattttagtcttaaaaactcttaacaagcatttaagttcatgtgttgttgtccacttaagtactggtgcatacctaagcacctatactttcaccaaatttttgagagaggttttataccatttagatctttattaatcatggtcttaaaataaagcttcaatttttttttttttttttttttttgagatggagtctcactttgtcccctaagctggagtgcagtggcgcgatctcggctcactgcaacctccgcctcccaggttcaagcgattctcctgcctcagcctcctgagtagctgggactaccagtgcatgccactacacccggctaatatttgtatttttagtagagacggggcttcgccatgttggccaggattggtctcaatctcctgacctcgtgatcctcccacctcatcttcccaaagtgctaggattacaggtgtgagccactgtgtccagcctaaagctgcaaattttattttatagataatacttcattaagattaattcacagtggaaattaggcttatcatgttaccttttattggtgctccagcctatactttagtaactaatcttccatatttactatcactattttatagtaactgttttgagtcctatgtcattcatgattactgacttaattggtgattacttaagaattctattttgctttattattctggtcacaatgtgcagacaatgcatttttgatttttttccactcaatgaaataaaaaagtcaaccagatgatctaaaaagatcatatggtttttactctggctaattcatttaacaggctattaggaggctctacgtatttggaatgttgtatatttagaatacaaaatctcctgagtatttgctactcttatgatctttcctagcttttcccttttccaagctgaccatggaatctagggctgctgcacgtactacagaagtgaatgagttagtgatttttaatcatagcattggggcactttagtatgtggtaaaagtctttggtgggtcatactgttcctggctgctttcctttactttgcagtgaagtggagggcgattggtggtaatctttcagaagaggaagaatctggatgtccttagtatggtttgtaagcactcctcattttcttgccaagagttaagtggatacagatctcctaatagctgaccttctagttgactgaatgggatcatgtaagaaagacacctgctacgttgtcccagtgaataagtttgtcatacaatacagaggtctgtggaccctcgagaaagaaacatttattacttggcacatcattcaaatctctctctgtctctctctctctctctctcacacacacacacacacgcgcgcacacacacatattctttaaactctgccactcatttcaaagtttgtgaattttcagtatgaagtaaaatatgtaaaaaaatctttttattctatattgtacactatattatgaaataataaaaacatctaggaaaaattagacatgtaacaactttagaagaaaagaagcatacacttctctactaaaagtacaaaaaaattagccgggcatggtcgtgggcgcctgtagtcctagctactccggaggctgaggcaggagaatggcgtgaacccgggaggtggagcttgcagtgggccgagatcgcgccactgcaatccagcctgggcaacagagagagactccgtctcaaaaaaaaaaaaaaaaattaagcatacacttttgaatgtaggagtcatatttcaaacacaaaatggttgtattttcaagggaaagtaaactttataatttaaaacatggaaaaagtgacataaaatacatttataatcacagagtaagaataaaaaggtgaaatccacagattattgacaatgttctgcaaagtcatctctgtgttctttcatctagtccagtttttaatggcttcaaaggagcatctaaagatatttctggataattttactctcataaataggtagatagtaatgctggcattcacttataagtctcaaacagcaaagtaaataaagcttttaaagcatcttccttcacttttcaatcgttctcttccttagttctgttcccttctcatagttttcctctccactcatgtccagtttcaaaatattaaatataaaaccttttcaactcttgttcttagaagagaattcctgatgttacaaggaagaaagtaagtctacaactattaagatttctgagttttaattccgtagccactttgtaatggcaaactaaaattttagggactgggatgatcatgttgtaaacttaagtggtcataaaaacaactttactaatattattattccagtgattcccgttgatgcctccgatggctcgggaaagttcttacaccgcccctgtagtatatggaaaaggaaaacaaaacaaaacacaaaacaaaaacaacaaaaccctcaaagcctgtttaaaatggctcgaagtacccttttaaagacagaaccccagagaaaaacgctgccaattcgttgctttattgttccctgcctggggacctcaatagccttttccattaaccttcccttcttacgcaacggttaatgactttgggggttgttttgctttctgtttctgctgagtcactaaattttgcctctttgtccccaggtgctgctcagcataaaagttaaaagtgcaattcaggaagtactgggattctgtgtagagccgaggaaaccatttccctaagagaagctctgttccttggcttgtccttccttcccgggaaggaagcttccgaggaacgaagggagaagctttgttttgcctgcagaagcagccctgtgctcggctgagggttctcagctggctgtgaactgcggagcattgtaggcgcctggctggctcaggccaatgcagaagtctctcccttctccaaagacccaaatccccacagaaccagcttcgagttactttcccttcaaggggattaaaataattgtgatttgtggcgctctccgttcgcggtggtattttcctgttgtgttaaatgcctcttattaagtaatagatgtgatttatgtgaacgacgaaggggtgtgtggtggattcggtgattaatcagtgaattcccatccgctggcatctctcactgcccctcttgcgtgatgtaagatcagacgtaccctgcattgaaaagtcaagacacacgggcgtctcgctcgcgctcacacacgctctgcctcctctctcccgcacgcgcgcatccctccaccttccacatcctgctccaggcaggagaaggctgactggctggactcattgagctgaagaatttccagtgacatttgtaaatgacgccgctcgattccaggctccaagcggcccctgccgccgccgccgccgccgggccgaaggtgccgccgagcagtctccagcgcaggcttccttaccgggcgaccacaatgtccgagtttctcctcgccttactcactctctcgggattattgccgattgccagggtgctgaccgtgggagccgaccgaggtaaggagaacacctccccgctcccctcccctgacttccttggctttcctgctgggcgatgcttgcagataagtgagtgtgaaacttaagtccttgcagctccgctccccgggaccgggtgaccaccgtgcgctggccctgtgcgggggtgagaggtgcggtgcgggatttctgaaccaagtgcctgagtcctcggcacccccacagcttttccctttggccgtttcccggtccccattttgtcccctccgggagtgtgtgcacttggctgtgcgcttctgtccgcgaattctaagcgctgcagatgttggaatgagaattcgcatttccgaaagacttccctccgcgatggccctcaactgcgagcttttgcgagctccaggttctccgcgttaagcgtgtccgccctcaacttagctcccaggttaacttccttacctgctgcattcgaggtccgtggagcggcgaaagcgccgattcaggcccctttcgtttctatagccccttcctgggggcagactggggtcagagtcctgtcatcagcagagaggcttttaggacgattccgggcgcacgcacctgcttgaaattgacttttcgattatgagggtctgtgacacagcccaggtgctctgaggggctaacccacccctggagtgcctctctccagtctggcgctttgcttttcctttttctccaagcagctggtgaatggtagaagtttagaagggaatggatatggggagcagaggagaaaggaggtaggaattagaaaaagccgggattctataaacttttcatctggaaaatcaagaatccctgtgcgagtttaataatctttgacaacagatgcactggtgaaaaagggaggaaaatactag

SEQ ID NO: 3699 - DNA, 6000 bp, Homo sapiens
ccaacaaagctgactacataatacgggaagcattcaagaagctttattcaaggtgtatttctgatattaataaaatgtgtgacttcagactagtcacgttttctttctctaaaaatttttcatttgcaaaatacggtaaattggagtagattatttgaatgctcctcccagctccaacaatcttaaagtctctaattataattaaggagcagcaagatgatgaccagaaagaaggtcagagatcaatattcataggtagaaacatgtcacaagggcatattcagacaaagtgcatcctgaccatgtccactgacaatcaaccctccacctgatacactaattctattctgggtctggagaaggcaatgtggagctcgtattgaacacacatatgtcagggtctaaaagtaccaaagcaacataccttataatcagcaactgacttaaaacccgagggctaattccatgtgagtggagtgacaaggatttgatgaattgttgacatttttgtattacctacacacggatggcaatattaccaattgtaccttctcttgacatatccaaagagcaaaataggatttatatcttcagactatattattattatggatgtcaatcccttaaaaaatgaaaaaaatgatataacctttagtctttcaagtcttctgctggctttgtctaaatctgtagactccttttatttttactgtcaaaagtttatcaaacaagagtcagaaaaaatccaaataatcaaatcagtatttaaagcttatattgtcttctgaaacttataattgccctcagtcatgctttttgccataatatttatgtcttaaaacatttacagatagtaacagtaaagagaagctgaaaatataaaaagagaagaccaatgtaattgtcttggaaatatttttgctttccagatgtaattagataattgcatcactcttaattttcttttcaattgtgcatacctcctaataattgcttaatagtaaaaattaaagttacaccaaaatcttatttatctcaaccaaatctttgtatcctaattgagacagtatgctgaaaaacagaacccacttttgaagaaaagcggttaaaaatgtgccttgatctgttgcagtttgagaaataacttgcatctaaagttttttatttttcttagaggctttgtccagagtaactctgtttcaagttaaagaactgatgatgtttccttaataatcctttctctctctctctctacctcctccgccccctgtctctctcagtctcttccctttctttttcatcttgtgtctgctgctgcctggcaacttttctgtctggaaaaaggcagggtaagaaacttagcaggccttgcaatgatagctgcagaaatccttagcaacctaactttcaggccaactctccttcacacacatctcttccatgagacagactgtcagctccagcttgtttagacacacgtcctctccctaacttaacgatgttcagatgtgtagcacaaattgttactatctacagtaagaaatccaatctcacaaaaataattaagttagcagaaatgaaatgtgatgtttgatcacatgtatggaaactgtggctctaattgggaagtgtaagattaccactgactgataattagcattcatgtgttgttttaaaacaaaaaggaagaatgattggttctactttgtttaatttatcttaatgagagatttcataatattctatagtttgatgaattaatttaacttgtcagtgttaataactctgattagaatgaataaattataatggagcctagtaacaaacaaaattcgaacgctcactcaagcttttccctcttcactaatagtgcactttattaatttattttttcattaaagcatatattatggggaaacaaaagtatttcatagaaaattatacttaagcttttcatttatttatgatccattaacattcaatggtcatttaaaacctaggagcaaattatttaattttaaagctcaaatttggtctacacttttatcaacctcactgatgctcatagaaaccaatcttcttttataaactggtcattttcaaagaatatctggaagaagaaccactttatataagagatttgatgtgggacagacaattttatcccatttcattttgacaccggctttatttcagttttggagcaaatatatattttctgcttaatatttaatctgtttatttcatattttggcttcttggtatgaatcagtgtccttagtataaattttagtcttaaaaactcttaacaagcatttaagttcatgtgttgttgtccacttaagtactggtgcatacctaagcacctatactttcaccaaatttttgagagaggttttataccatttagatctttattaatcatggtcttaaaataaagcttcaatttttttttttttttttttttttgagatggagtctcactttgtcccctaagctggagtgcagtggcgcgatctcggctcactgcaacctccgcctcccaggttcaagcgattctcctgcctcagcctcctgagtagctgggactaccagtgcatgccactacacccggctaatatttgtatttttagtagagacggggcttcgccatgttggccaggattggtctcaatctcctgacctcgtgatcctcccacctcatcttcccaaagtgctaggattacaggtgtgagccactgtgtccagcctaaagctgcaaattttattttatagataatacttcattaagattaattcacagtggaaattaggcttatcatgttaccttttattggtgctccagcctatactttagtaactaatcttccatatttactatcactattttatagtaactgttttgagtcctatgtcattcatgattactgacttaattggtgattacttaagaattctattttgctttattattctggtcacaatgtgcagacaatgcatttttgatttttttccactcaatgaaataaaaaagtcaaccagatgatctaaaaagatcatatggtttttactctggctaattcatttaacaggctattaggaggctctacgtatttggaatgttgtatatttagaatacaaaatctcctgagtatttgctactcttatgatctttcctagcttttcccttttccaagctgaccatggaatctagggctgctgcacgtactacagaagtgaatgagttagtgatttttaatcatagcattggggcactttagtatgtggtaaaagtctttggtgggtcatactgttcctggctgctttcctttactttgcagtgaagtggagggcgattggtggtaatctttcagaagaggaagaatctggatgtccttagtatggtttgtaagcactcctcattttcttgccaagagttaagtggatacagatctcctaatagctgaccttctagttgactgaatgggatcatgtaagaaagacacctgctacgttgtcccagtgaataagtttgtcatacaatacagaggtctgtggaccctcgagaaagaaacatttattacttggcacatcattcaaatctctctctgtctctctctctctctctctcacacacacacacacacgcgcgcacacacacatattctttaaactctgccactcatttcaaagtttgtgaattttcagtatgaagtaaaatatgtaaaaaaatctttttattctatattgtacactatattatgaaataataaaaacatctaggaaaaattagacatgtaacaactttagaagaaaagaagcatacacttctctactaaaagtacaaaaaaattagccgggcatggtcgtgggcgcctgtagtcctagctactccggaggctgaggcaggagaatggcgtgaacccgggaggtggagcttgcagtgggccgagatcgcgccactgcaatccagcctgggcaacagagagagactccgtctcaaaaaaaaaaaaaaaaattaagcatacacttttgaatgtaggagtcatatttcaaacacaaaatggttgtattttcaagggaaagtaaactttataatttaaaacatggaaaaagtgacataaaatacatttataatcacagagtaagaataaaaaggtgaaatccacagattattgacaatgttctgcaaagtcatctctgtgttctttcatctagtccagtttttaatggcttcaaaggagcatctaaagatatttctggataattttactctcataaataggtagatagtaatgctggcattcacttataagtctcaaacagcaaagtaaataaagcttttaaagcatcttccttcacttttcaatcgttctcttccttagttctgttcccttctcatagttttcctctccactcatgtccagtttcaaaatattaaatataaaaccttttcaactcttgttcttagaagagaattcctgatgttacaaggaagaaagtaagtctacaactattaagatttctgagttttaattccgtagccactttgtaatggcaaactaaaattttagggactgggatgatcatgttgtaaacttaagtggtcataaaaacaactttactaatattattattccagtgattcccgttgatgcctccgatggctcgggaaagttcttacaccgcccctgtagtatatggaaaaggaaaacaaaacaaaacacaaaacaaaaacaacaaaaccctcaaagcctgtttaaaatggctcgaagtacccttttaaagacagaaccccagagaaaaacgctgccaattcgttgctttattgttccctgcctggggacctcaatagccttttccattaaccttcccttcttacgcaacggttaatgactttgggggttgttttgctttctgtttctgctgagtcactaaattttgcctctttgtccccaggtgctgctcagcataaaagttaaaagtgcaattcaggaagtactgggattctgtgtagagccgaggaaaccatttccctaagagaagctctgttccttggcttgtccttccttcccgggaaggaagcttccgaggaacgaagggagaagctttgttttgcctgcagaagcagccctgtgctcggctgagggttctcagctggctgtgaactgcggagcattgtaggcgcctggctggctcaggccaatgcagaagtctctcccttctccaaagacccaaatccccacagaaccagcttcgagttactttcccttcaaggggattaaaataattgtgatttgtggcgctctccgttcgcggtggtattttcctgttgtgttaaatgcctcttattaagtaatagatgtgatttatgtgaacgacgaaggggtgtgtggtggattcggtgattaatcagtgaattcccatccgctggcatctctcactgcccctcttgcgtgatgtaagatcagacgtaccctgcattgaaaagtcaagacacacgggcgtctcgctcgcgctcacacacgctctgcctcctctctcccgcacgcgcgcatccctccaccttccacatcctgctccaggcaggagaaggctgactggctggactcattgagctgaagaatttccagtgacatttgtaaatgacgccgctcgattccaggctccaagcggcccctgccgccgccgccgccgccgggccgaaggtgccgccgagcagtctccagcgcaggcttccttaccgggcgaccacaatgtccgagtttctcctcgccttactcactctctcgggattattgccgattgccagggtgctgaccgtgggagccgaccgaggtaaggagaacacctccccgctcccctcccctgacttccttggctttcctgctgggcgatgcttgcagataagtgagtgtgaaacttaagtccttgcagctccgctccccgggaccgggtgaccaccgtgcgctggccctgtgcgggggtgagaggtgcggt

SEQ ID NO: 3700 - DNA, 6000 bp, Homo sapiens
gcatcacattgcaaactctcattgccaggcttgtccattttctttttgggtcctgagatcattttatcacagtttctaagatgtcaccttctcctctctttcagggaagggctccccatgcctctgaaagttactgaaaggcaggtcctactgaagccccaagagctgaaaatctgagaaggtagtgaaagtgaccagagctctccctgccagcagtcatagggctttccaagtaggcaaccaggaaagtaaacatgccaaggggcagaacaggaggtcctctctgggtaaacaaagcatgcttcccacatgacctctgtctgacctcccaagggaaaaagccaaagtagtcagcacctccagccagtggaagcaacatcggtgacaattggcgcaggaactcccgggctttctgaaggagcaaagaaatgacacagcagtatttctagacagggtgaaatgatgatcatactgcagaggctcctttattctcagtctcttctccattacctgtcacatttccctaactggtaaatatcagttagacttatggagatttgttatgaacccagttattctgttgctcttaaatgggatgagtatttacaatctgtaacatgtgatatatgaagatgcaaggcctgttaattttaattgggttcccgagtaggtcaaagaatgctgagctgctcttgcggttttgtgggcttgtttcagcagaggaactagcagcaatcaccatgaacacccttcttataaaaatgataaataaatacggaatgagactttggggccaaattggcattggtatcatttaatttctttgtgtgtttccagccaattaaatgaatgggtgcctgtggtaattgaactcactttgataattaggccttaaggattcttaaattactgaatgttaatgaatatttcccaagtatggtccctgtatcctaagtgctgccaaatggaatttgcctctttatcattaaaatgtagttcttttaaaaattccacataggaaatagaaactagaaacagaggccgaggcgggcggatcacaaggtcaggagatcgagaccattctggctaatgtggtgaaaccccgtctctactaaaaatataaaaaattaactaggcatggtggcgagcgcctgtagtcccaggtactcaggaggctgaggcaggagagtggtgtgaagctgggagacggagcttgcagtgagccgagaccgcaccactgcactctagcctgggtgaaagagcaagactccgtctcaaaaaaaaaaaaaaaaaaggaaaaaaaaagaaactgaggacttagttctgttgcttctctttacaggtttgagcaggttgatgaaatttaaatctaagaaaaattttactatgaaagagacatagttgaatttaccccttggaacttggaaggccatatataacagtatgcaaattaaagccatatgcaaggaggaaactgctgcttcaccaaagctacctacaaatgctgttcagctgacaaatgcccactatatttaccaataatttgagggtacggatggggaaaggtctgggctatcgtggaggtgtactctccaggcagaaatgtacaatgggcctgctctggtgattccaccaggagatgagtcataccaagcattcttatctgaaagctgtggtttccatttttcttggtattattttacaaacctttattatttgtccctcaggcttacagtgcaaatcagtaaactgaaacacacttagatcaaatacttactgcaaacactgagtaatgagggaaacatttctagggcatgctttatttgtgcttatttatttcatatatttcaaacattcaaacatttcaaatattcaaatattttcttaaaaatctataacaaagctcttacataatcttccttagaaggggaaggtgtaggggggcagaaaattagcttctcttaaacatctttgctacggtctgaatgcccttcaaattcatatgctgaaaatctaaacaccaatgagatagtctaagatggggcctgtagatggtgattatatcataagccctcatgaatgggattagtggtcttataacagaggccccagagagctaccttgccccttttctgctatgtgagattacagtcagaagtgggccctccccaaatatcaaatctgctggcaccttgatcttgaacttcccagtttccagaacagtgagaaatacatttctgttgcttacaagccctaaagtttatggtattttgttatagtagccaaaaggaactaagaaaattatttaggtctcagaccctgtactgaatccacacatatgatttcatcactaaaaagtcatgagattttgaggggtggaaactgcatttctgctaaacaaaaccatgtgggacattagggataattcaatatattctacactaaaccaatctattatttaaatcaacaaattcacactcattcactgaggtcaaacgagccctgccatttcaacaccattttaagtgaacctccaaagccttgatcatatctctgcataaaacatggataataatcctgccaagaagagatgttgtaagaaccaagcttcataacatgaaaaaagccacagcagagctcctggtatttgataaatgctacttgctctctttcctttttcccttcttgacagagtaaggaatgtccacctttgttgcatgctcaaatttggtcctaaataaattttaattgcaccatctgatgtaaataacattaaatgtatgagtcattagtattcaaatcacaaagatttgaataaggttttgagtgtttttataaggttctcctgcccttccccatatggagatatttttgttccagccattttatctatattcctccccttcaaagcttgcataacatttgtgattacttcccattggtcagaaattagttatttggcctcacttagatacaagaaagcctagtgtgttaatcagggttctccagagggacagaacaaatatctattggttatatatatatatgagaaagggagtttattagggagaattgaattggctcacacaatcacaaaagtgaagtcccatgagaggctgtctgcaagctggagaatgagagaagccagtagcatggctagcttggcagccagggaagcctttggtagcattactcactccaagtctaaaagtttccaaaccaggaaagcaaacagtacaaccctcactctgaggccaaaggcctgagagttcccagaaggccactggtgcaagtcccagagtacaaaggctaaagaacctggaatttgatgtcctagggcaggagaagaaaaggggtactgctctggaaaagagagagaaagagagaaaaaaaaggaagcaagaaaaagaaaaaaagaaaagcaagcaagctgaatgtcttccttcttccacctcctttgttgtaagtattcctgcagcccattagatggtacccacccacattgagggcaggtcttcctctctcagtccaccgactatcctgtcaatctcctctggcaacaccttcacagatacactcagaattaatgcttcgctgccactgagccatccctcaatccagtcaagttgacacctaatactaaccatcatacctggaaagtacagtttttatataggaggccatgtgtcagctaaaagtcagattctattactgataaagaagaatctattgagtgtcaagcgctactcattgccacaagaggtattacaaatttcaaaagacataaaggtagcttgagttttagatatattttgaaggtagaggcaaataaatttattgattaattgaatatagagtatgagaagaatcaaggatgtctcaaagggtttggggtataagcaatgaaatgagagttgcctttgaaagagctggagaagacagatggggagtagatttttaggagggctaaaccagggttccttttgtggtttagtgtttgagatatcagttacacataaaaggagagatgcacaaagacagatgatctataagtctagagagttcagagagaaggtctggattggaaaattgatgtgggaatcattaaggaacagaagaaaagagtttcaagttcagagtgtgggaagccctaatatttacagatctaaacaaaggaaaaaaccagcaggaaacactaagaagctgcaaccagtattgtgtccagaattggtgggttcttggtctcactgacttcaagaacaaagccacggaccctcgcagtgagcattacagttcttaaaggcagtctgtctggacagccttccttctgatgttcagatgtgttcagagttttttccttctggtgggttcgtggtctcactggcttcagaagtgaagctacaaacttcacagtgagtgttacagctcataaaggcagtgtggacccaacgagtgagcaacagtaatatttattacaaaaagcaaaacaacaaaagttccacaacgtggaaggaaaacccagtaggttgccactgctggctcaggcagccagcttttattctcttatctggccccacccacatcctgctgattggtccattttacagagagccgattggtctgtttcacagagagctgattggtccattttgacagggtgctgattggtgcatttacaatccctgagctagacacaaaagttctccacctccccgctagattagctagatacagagtgtccattggtgtatttacaacccctgagctagagacagagtgctgattggtgtatttacaatcccttagctatacataaagattctccaagtccccaccagacttaggagcctatctggcttctcccagtggatcccgaactggggccgcaggtggagctgcctgccagtcccgcgcagtgcgcccgcactcttcagcctttggcggtcgatgggactgggcgctgtggagctgggagcagtgctctcgtcggggaggctcggccaggcaggagcccatggcggaggtggggcgggggaggctcaggcacggcgggctgcaggtcccaagccctgccccgtggggaggcagcccaggtgctaagcccctcactgcccggggcttccgggccggccggccgctcagagtgcggggcctgccgagcccacgcccacccggaactcgcgctggcccgcaagcgccgcgtgcagccacggttcccgacagcgcctctccctccacacctccccgcaagctgagggagccggctccagccttgaccagcccagaaaagggctcccacagtgcagcggcgggctgaagggctcctcaggcgccgccagaatgggcgccgaggctgaggcaccgagagcgagcgtgggctgcgagggctgccagtatgctgtcacctctcagtatgatagaaaaaagtgagtatggcgaactggtggttaaagagaggaagagcactcgtggaggtcgtagctccagatatcaggacaaagcccagcttgagactaaggcttaatcagagcgttagggaaccctttcttcccccactgccaccctaacacactcagtaaaaatagccatgaaattcaaccggaagagctgcaagagatagatcattattggggggcagtacaaagacagattaaaagccaatgaaataacagacattgaggaaataatctctgttaaatacacagtatcacaagaggaattttaagcctgaggggcacttggggtaatataacatcaacaaacccccaaacttagcccaactcctgaatagatgaatatgagcccacagttaaggtccagctgaagaaaaggcatgctcatctccaacgttaagaagagatttatctctgtatctgtagccctacacaagatgtctaattgtcaactaaaaattgcaaggcatgtaaaaagacaaatacacacacatacccccccacacactgaagacgcaaggtaatccttgggagcaggctgcatatg

SEQ ID NO: 3701 - DNA, 6000 bp, Homo sapiens
ggcagcatagcagtgatttacaacaggtagaatttgagccagctgatctcttggtttctaacactgagttcggtgattccctgactagttagagaagacaagaggcaaggaaagaagacatgttttcaagacttagaggaacaggaagcagtctgattggaataaatgcatatggggggggtactggtcaataaatttggagaggcaaatcatagatcgaggagctgtgtgttattaggagtttgggaggtgggcagaggaagaatattaaatccattaatcactgtcttcttttcctcattcttatttcctcctcttcgtatttctccttcttgtcttagtttttgcatctgaatgtccttagactgctaaccttttaaacttaccctttgttttaatatctatattagctcacttcttcctacaaatcaggatagattgttatgctagcagtaataaatgaccccaaaatctcaataacgtaaaataacaaaagtttatagttcattcatgttatataaaatccagggatcaattggaatcagggtgaaagagcagctgtcatcacaaatgtttcccgccatgccagaaggaaagagttctggagcattagcaatcaaattctcactctaagatgacatacataatttttgctcacatctcattagccaaaaataatcacatggttccaccaaaccacagagggacacacatacaatgctatcatgtttgctggaagttgacaagctggaaatatttggtgaagattactaacaactgtcacactgcattaacaactggaagtccgacatcaattttggatctctttctgacatctgtttacccataaacttgaaagtgcattattccattcggtgttgtacataggctcatattcactgtctcaaagctttttgatatacaataattaaataggctgggcatggtgtctgatgcctataatcccagcactttgggaggccgaggtgggcagatcactggaagtcaggagttcgagaccagcctggccaacatggagaaaccccatctttactaaaaatacaaaattagccgggcatggtggcgcatgcctgtaatcccagctactcgggaggctgaggcagaactgcttgaacctgggaggtggaggttgcagtgagccgagattgtgattgcactccagcctgggcaacaagagcgaaactctgtctcaaaaaaataaataaataaatatttcacttttccaaagatttcccattgttctagttaggctctatcctgctcactgaccctgtaaaagtttgcactgattattgaatgaacgagtacaatgccacatgtttcatttctttaagtatgttctatgtcacacataagaatttctctccaatcattttaagtcacactcaaggggaatgggtttttcttcatttattgcttttattcctatcctagtccatgtggagattctgggatgggtggggcattcctgtattgcaattttatgtccttattggcagtgttaaaaatgtcctgtattgacatattttgtgattcacggagctccaccctttgctaatctcatcttggtttttttcctgctctttccaagattgcaacatatgcttaataaaggatataatttatattttaattttcatacagtgtatcaaagaattgcatttttgcacatcttgccattcaaatccagtcttaagtataatcagacatgttgtcttagaacctgttttccttctctctttctttttctcctgtctatattcacctgacacttctccatccctttttcctgtcagctgagactcagcatgtcaaaaggatataaaatatttcctcttaactgctaatagatgtttaaaattctactttagcgtctctcttgctgttttttttctttcgagacagcatatcgctctgttgcccaggctatagtgtagtgatatgatcatagttcactgaagcctccaactcctaggctcaagtgatcctcctgcctcagcctcctgaatagctgggactgcaagcacacaccaccacactggctagtgtctcattttttcagttaactttgtgcaatagtgacatcattaactatcgtggcagcttaagagatcttaagcttgttcagtgcagccctatcccaattcagatatggagttctctccaccatgcctttaggtatctaatagctgcttaggcttacgggcattggaacattgtagaaaagcaaccaaaacaggaactcctctacaaaaagcagtcttgctgggttttcagctagtggtgatatgtgcgaaaggagccactgcacatcttgacccagagatagtggaaggggagggcattcctctgagaaggcaaaatacttgactggttaagtcttccagaaccttgaaaggaactttttttttctttttttaagatggagtctggctctggcacccaggctggagtgccgtggcgcgatcttggctcactgtaacttccgcctcccgggttcaagcgattctcctgcctcagcctcctgagtagctgggattacagaagcaagccaccacacccagttaatttttgtatttttagtagagacggggtttcaccatattggtctggctggtctcaaactcctgacctcgtgatcctcctgcctcgacctcccaaagtgttggaattacaggcatgagccactgcatccggcctgaaaggaacttttatcagtgtatcttctctcagctcctcatgaggcttatcctgggtggtgtgtgctggaggctgggcagagggtgcttcttagacaacttccaaggtaagttcataggcaacatttcctttgctactctctcttttcttctctctcgtcctcaggattaccctctgcatcttttccatatgaaaaccccatttcctctttcctttattgaatgcccctcaaaatcagaacttacatcattaggcattattctctatttccttgatgatatggaggatgagattttcagacactatgcagaggtaaggggaaatatttatattctgcatgagagttgggagaggggagaaagaaatcctccaccccagatcgggttaattcatcaaagcaactcattaaattttcgtgttaaaagaagttgaacattcacacttcgctctacttggagcttcattaaaatgcaaatgaacacagaagggtatctgttcttagttatctggcctaactaaagattaattgcaaaccctttcctgagagtaatttttgataaatgagaactagggggaaattaggtgcttgagagagatgcagaaagggcacagctggaggatgtgacaagaaaagaattggaaagactatgggaaggttttgctgtagcactgcacaactaaagttatatttacttcctaaaccacaaacttaaaatacgcatataattatactttccaaagaaatatcatggtttattccttccaactacctatgaatcttgctctcagtaaccatgcctgtcttctccatagtcacacccacctggtctaaactatacctttctcttttgcaacaaacttaaattcactaaccctatctgtgaacttggatacaattccctcatctttcatgtgccaccagtccaaaataaagattttcaatgctagtaactttatgtatacctcagtgagcatccaataaattctgtactctcagcctacatccccataactgctcttttgagaagagatgagaccagaacacacctgagatgttcaaagcaaagatgtctaagggattcaaagctaacttcaaaccagagcatgtctagcaagttggctttttcaaagaactccaacatcattggagggactaagaaagcatgggagaaatgaatgctataataggagtgaatgggaagcaatttgagaccaaaagtagagaatctaagtagcaaaaaatgaccaattttgtaaaaaaatcaaaagttgccaataaatggctatcaatgaacaataggaaatgccattagcatcagcggtagtgggagtattatcagatatgttacccaaggattctacacaaaggaagaggaaagtttgggatatttgaagacatgatgactttactgtaataattattatctattaccttgatcgtcttcttcaaagttagagtggtctagggaagctagggacaagtttttattaactttgttagtctacccacctttctcccaacacttcaagaatttgtggcctgggaaaactgtgttataataggacatcccaaagctgctggaacatcctgacgctctgaaattgaaatacttttctgggagctgatacatttatttagctgctgaccataacacaccaaagactgcaacagaccccaccctggaagaaaagcaggcagagaataaggaagtcatatatcactggagaaaaattaggattctccaagctgtgcatactttttgttttaaattttttacacaggcttgacaatgtttagaaaagccagtccaacattaccaataaaagattagtgtttaaccccatatcccataattgacactgcaaataagacatttaggatttatcttgaaattcctactgaagttcgattttcttttaatcactgctaaatctgcatcaagttacacaaactttctaacagaaaagtgtttgtgactaacaataaatgaactccgttcttagtaagttaattttaaaacatagatgatcattctatctccttagttttggttgccaatgcaaatgagtcagaggatttgcttcagacactgagataattgtgtaactctacagcggaaaatgccattggagagtacttgctgacctcacagttgaaaaaaactatttaaaagatgtggaaaccagatgtttcagtcacatttcagccactgctctgagaatttgtgagcagcccctaacaggctgttacttcactacaactgacgatatgatcatcttaatttacttatttctcttgctatgggaagacactcaaggatggggattcaaggatggaatttttcataactccatatggcttggtaagaaccttcactcatgagcctcttgttgagaatgtcaattctttaaatcatggagaaggaaatttaaagcagtaactttttctattctgtacaaggctgatgttctcaaagaaaatgcttaggaaagatagcctttggaatacatacgcttttttttttttaagcgttcttgtcctctaaaatttaaaaatagcattttataaagtgaattgttcagtagaaaatagcagttaatatttatattcagtatgaaaatatatttttaaacttttcaaagcagatgtagtagtacagtgaggagtatttctttaaccaactagaaactccaatatagtcttctgtttttatgtcaatgcatttgcaatcagatttcagaatcctaacaggtaaattggagtctacgaaaattttataataattgcttcatggactctgagctatagtctatatcttagttttttcaaacattttgactattttgaccaagccagcttgcagtacagaaaaaagtgaaaaatgtttctccttctgaatgcattcttaccactttgattctttctgtttctactatccatataaatacttttctgacccttttgttagacaaggaaagtttcttttgttattttgttttgttaaatgtaaggaatgagacaggccaaacagtgaagataaacaatagatcaaaaaaggaaaatgcagaaaatccaaaacaccccttagattacagtatgctaaacaatgctttaattctcatgatacaaattgatattgctctatgttcattattgtgtttaatagtaaaaaaaaattgaatttcttggggaaaaatgcatagattcttgcatagaataaagaaataaagagaaggcgaaattaacctagattttgattttatgctttctaaacagca

SEQ ID NO: 3702 - DNA, 6000 bp, Homo sapiens
taaggacaggagtgggtccaccccaacctggcacgcagtggtcccctgcggagagtctggccctgcactcactaaggggaggcactcatagcccagccaggcctctgcaattatgccttcaatgccagaactaactcacccaaactgaacaatcgatcacaaaatgtgccttcaggtctcaaggttcttgctaaatcttactcaaccgacattttccagcatgggaacatttttctgaatgtcttagggagaggaagtccgcaagagaacaaaaggtcctcaggccaccctagcttcttttcctccattccacaggctgtcttttgtctgggtatgcactggaccagggggctctacttcttcctacctgggcatgggtctccacacaactccaaggtaaagggccacaggcaagataaaggggagaaaagaaagctacgatttcctgggccaccaatcgcaaatggcagccagtctctgaagtaacccttgaccagagatccaaggaaccaagaaatgtaggtgatctgaacagaggggatggtggttaaacaccatgaaggaaagacccattctcaaagaaaaggaagcaaaaagaaaccgtggggagctgggtaccacccgcagcaaagaccccgcacgcgttactgacgccagcctggcctgggagagcagtgagtgtggcggacggtgagtggcggggagggctgtggtaggtttagggtaagaaggggcagcgcccagagcccagagaacaccagtgagggctccacaggaacactactcaaagtattcacggaacacatctaaacacaagcactaaggactaagtgcgagggacaagaaaatattccccgtttcctgtttcaggagggtatcgaaaatgagtgatggaaggaaaatgtattgtttaaatgaggaaaaaaaatttttacaaattaagaacatcctggaacatgatgagccgtttactgtcactcaatttaaatggtggccatctaggacagagcgcctaaggggaaagggggctcacaggtgaacccctccagctgctggtgggcaatttcccattagggcatcagggtctctgaagactgtcttcagatgctttttagccaggaaagttacaatgatgaattcgtttacactggcggaattacttcgtatttctcaaatataatgttttcactagcataactttgttgttgtagacttaggcttcaaaataaagaactttaaacaaacatgaataaaaagccactttaggccgggcgcggtggctcacacttgtaatcccagcactttgggaggccgcggcgggtggatcataaggtcagaagttcaaagaccagcctgatcaatacggtgaaaccccgtctctactaaaaatacaaaaattagccgggcgcggtggcaggtgcctgtaatctcagctacttgggaggctgaggcaggagaatcgcttgaacctgggcagcagaggttgcagtgagccaagatcatgccactgcactcaagcctgggtgacagagtgagactctctcttaaaaaaaaaaagccactttaaaattttactcaggccaggtgtggtggctcacgcccataatcctagcactttgggaggccgaggcgagcagatcacctgaggtcaggagttagaccagcctggccaacatggtaaaaccttgtctctactgaaaacacaaaaattagctgggcgtggtggtgtgcccatgtaatcccagctactcaggaggctgaagtgagagaactgcttgaacccgggaggcagaggctgcagtgtgccaagactgcaccactacacttcagcctgggcgacagagcaagaccctgtctcagaaaaaaaaaaaattcaaaaatttggccaggcgtggtggctcacgcctgtaatcccatcactttggaaggccgaggcgggtggatcacctgaggtcaggaattcaagaccagcctggccaccatgatgaaaccctgtctctactaaaaatacaaaaaaaaaaaaacaaattggccgggcatggtggcgggtgcctgtaatcccacctacttgggaggctgaggcaggagaatctctcgaactccggaggcagaggttgcagcgagccaagattgtgccactgcactccagcctagacaacagagcgagactctgtctcaaaaaaaaaaaaattaaaattaaaaaataaaaatttcatttaaaatactactgatctcccgtgctgacttctcggggtttaactctcactgaggagacgctgctttcataagggtaagctcagcaggggcaactaaagtcatttaagcagagagctgcaaagaggcaacagcctcactgcaggcaggggtcctcgtcacagcttcagggctttgcagaggattacgcaatgtacacgcacaaaactgaattccagcctctccattggcaactgcatacatacatatattctttttttgagacggagtctcgctctgtagcccaggttggactgcagtggcccgatctcggctcaatgcaagctctgcctcccgggttcaagcgattctcttgcctcagcctcctgagtagctgggattacaggcgcccaccaccacgcccggctaatttttgtatttttagtagagacggggtttcaccatgttggccaggacagtctcgatctcctgacctcgtgatccgcccgcctctgcctcccaaagtgctgggattacaggcgtgagccactgagcctggcctccaatggcaactatattaaaggttcaaagcaatatgcacaaaagttacctcacagaaaatagtgcaagtccttgatacaatgctctttagacacagaagaagcactatagaatagagcacctcgccctattgccttcccaagggcgagcaccccctcctctctccacagctccttctttgtttttttgagatggagtctcgctctgtcacccaggctggagtgcaatggcaaaatcttggctcactgcaacctccgcctcccgggttgaagtgattctcctgcctcagcctcccgagtagctgggactacaggcacccaacacgcctagctaatttttgcatttttggtagagacggggtttcatcatgttggccaggctggtctcgaactcctgacctccagtgatcctcccaccttgacctcccatagtgctgggattataggtgtgagccactacacctggcctctccacagccccttctgtgttgaagccaagacccacccagctttgatcccaaggcttgggttccccactagtgtgaagtgagtttccaaattattaggtaaatcagatatgagaaaatattttattttacttttttttttttgagacgcaatcttgctccgtcacccaggctggagtgcaatggcaccatctccactcactgcaacctctgccttctgggttcaagcaattctcctgcctcagcctcccaactagctgggattacaagtgcacaccaccacgcccggctaacttttgtatttttagtagagacagggtttcaccgtgttagccaggctgctctcaaactcctgacctcatgatccgcccacgtcgggctcccaaagtggtgggattacaggtgtgagccatcacacctggcccaagaaaatatttttaaactagtattcttgaccggcacggtcaacactgatgtaattgaaactgttgtatttgaagtgttagcaaagaaagagaattctggttcaacagaaaagtcagtcacgacttttcagtcacgcatgaattacacagtaaccaaatagataacatgccatgactgacgacgggcccacaacaaatcagctccgaccaacagggtccacaccaccatgggtctacacagatccaggtcccgcctgtgagcctacagtgacgcgggcccctgtggggtggtccctgcaggtcaggtccctgagagtgggtcccagtggggtgatccctgcgggtcgcgtccctgcgagttgggtgcctgccgggtggcccctgcgggtcgggtgcctgcggggtggtccctatgggtcgcgtccctgcgggtcgggtgcctgcggggtggcccctgggaatcgcgtccctgcgggtcgggtgcctgcggggtggcccctggggatcgcgtccctgcgggtcgggtgcctgcggggtggcccctggggatcgcgtccctgcgggtcgggtgcctgcggggtggtccttgtgggtcgcgtccctgtggggtggtccctgtgggtcgcgtccctgtggggtggcccctgcgggtcgcgtggtggcccctgcgggtcgggtgcctgcggggtggtccctgtgggtcgcgtccctgcgggtcgggtgcctgcggggtggtccctgcgggtcgcacccctgcggcgtggtccccccgggatgggtccaccgaggaggccgctggaggccgagcccgcgcccgcccgcggcgccaagatggaggcaggaagcgccgccgcccgcgcccgccaccgcccgcgccgcccgcctgacgccgccgttgcgcctgacgccgccgcccgcgcggccgcccctcccccggccctcccctccccccgccgtaacgtcctgacgctccgcagggacccctgactggacggcggcgcgtgagcggagcgagaggcctcgccgcgggggggccgcgggctcgccggcgccgcttacctggggccgcgccgggcctgcttaggcacccggcgggggcggcggcgtcgggagctgcggcggcggcgggcggcggcggcggccgcgggcttcgctccttgttggggattcggcggcggcggcggcgcgggcgcgcgcttcctagtgacgcaggcggcggggccgcgcacgcacggggctgggagggccggacacttatttggcgctcgcggaggaggaaggcggggccgtgaaataaggcccgacgggccccggggcgcgtgcgcggaccgacactgtcagctcctaacgccgcaggttcctcctggtccccgaggcccccggtcgggcgttgcctgccccgcgcgggcggccgggccgagggacgatggtcagtggacggacggcgccagggagcagtgcccacgcgcggcagggcggtaccttcaggcctccaggtacgggcgctcctcgcccggacgctgctgtgtgtgaatgggcgcgaggggactcccctgcggggcggacgcctgaacacgaggctgtggaggaggacgctgtagggtgcgcggactcacgcggaacatgccagaggctcagccagccacggcgctcccagcgtggagggcgaggggcatccgggagcggccgggagggctcggtcacccctcaagctgtcaccccagtcccacaaccagcaccccgatcctatcgcagtcccacagccgacaccccgatcccacccctgcccaacagccggcacccaccccaatcccatagctaacaccccggtcccaccgctgtcccacggccggcaccccgatcccaccccagtcccgcagctggcaccccgatcccaccccagcccaacagctggcacccaccccgatcccaccgctgtcccacagccggcaccccgatcccaccccagtcccgcagccggcaccccgatcccacagccggcactcaccccgatcgcatagcatagctgataccccgatcccaccccagtcccatagccagcaccccgatcccaccccagtcccatagccagcacctcgatcccatagatgacaccccgatcccgccccagtcctatagcccgcaccccgatcccacccgagtcccgcagccggcaccccatcccacccatgtcccacagtcggcaccccgatcccactcggatccggcagccagcttggatcctgtggccctcctccagcccccagggctcatttatatgttttattggcagaggctggggctggctctgttggcctctgtgctgggtttcttcctctgcaccgcaggactggc

SEQ ID NO: 3703 - DNA, 6000 bp, Homo sapiens
ggagtgcagaggcgcgatatcagctcactgaaagctccgcctcctgggttcacgccattctcctgcctcagcctcccgagtagctgggactacaggcacccaccaccacgcccggctaattttttgtatttttagtagagacggggtttcaccatgttagccaggatggtcttgatctcttgaccttgtgatccacccgcctcggcctcccaaagtgctcagattacaggcgtgagccactgcccccggccgggagactattgtttaagctgtttctatcttcttcctcatcagattgttcctttgcctgtcaagggtggcgaggtgcctggaatttcccttagaggaactcaggactcaagattcttttgttttgttttgagacagtcttgctctgtcgcccaggctgaagtgcagtggcatgatcttggctcgctgcaacctcagcctcctgggtttacatgattctcctgcctcagtctcccaagtagctgagattacaggcgcccgtcaccatgcctggctaatttttttgtatttttagtagagacggggtttcaccatttagccaggctcgttttgaactcctgacctcaacgaatctgcccgcctcggcctcccaaagtgctgagattacaggtgtgagccactgtgcctggacctttttttacctttggagacagactctcgctctgttgcccaggctgagtgcagtggcacaataacagctcacttcagccttgacctcctggtctcaagtgatcctcccacgtcagcctcctgagtagctgggactacaggcatgtgccgccacacctggctaactttttagcttttgcggagatggggtcttgctatattgtccaggctggtctcaaactcctggactcaagcgatcctcttgccttggacttccaaagtgctgagcttacaggcataagccaccatgcccagccaacccagtttctctactttaaaattaccatctttcagccggttgcagtggctcatgcctataatcccagcactttgggaggccgaggtgggcagatcacaaggtcaggagttcgagaccagcctcaccaacatggtgaaactccgtttctactaaaaatacaaaaattagctgggcttggtagcgtgcgcctgtaatcccagctagttgggaggctgaggcaggagaatcgcttgaacctgggaggcagaggtttcagtgagccaagatcacgctattgtactccagcctgggtgacagagtgagactccatctcaaaaaaaaaaattatcatctttccctttgtagttaataaatatggccagacacggtggctcacgtctgtaatcccagcactttgggaggctgaggcgggtggattacctgagatcaggagtttgagaccagtctgaccaacatggtaaaaccctgtctctactaaaaatacaaaaagtaactgggcatgatggcgcgtacctataatcccgccactacactccagcctgggtgacaaagtgagactccatctcttttttttttttttttttttttttgagacggagtctcgctctgtcgcccaggctggagtgcagtggcgcgatctcggctcactgcaagctccgcctcccgggttcacgccattctcctgcctcagcctcccgagtagctgggactacaggcgcccgctaccacgcccggctaattttttgtatttttagtagagacggggtttcaccgtgttagccaggatggtctcgatctcctgacctcgtgatccgcccgcctcggcctcccaaagtgctgggattacaggcgtgagccaccgcgcccggccgagactccatctcaaaaacaaaacaaaacaaacaaaaacaaaaacaggcctggtgcagtggctcacgtctgcccggaggcagaggttgcagtgagctgagattgcaccattgcactccaacctgggcgacagagcgagactctgtctcaaaaaaaaccaaaccaaaaaaatccccaaaacaaaaatgataaatattttagaaggaagaatagcccccccacagccctgcccaagatattcacatcctaacccctgggatctgtgaacgttggttccaagcaaaggggaattacagcgacagatggaatgaaggtcactggtcggcggactctgacaggaggtgccctgggccagctggtggccccatgtcatcacaaggggccttgacagcagatgagggaggcaggagatcagtgtcggggccaacagggtgaggactcaactggctttggctggctttcaggtgtgggataggccacgagacaaggggctcaagtgcttccagaaactggaaaggccagaacagcttctcccctggagctccaaaagcaatcggccctgcagacaccctgattttggcggagtgaggctgggctggacttccgacctacagaacagttagagaatacatttgcagttttatttatttattttttgagacggagtcttgctctgttgcctaggctggagtgcagtggcgccatctcggctcactgcaagctccgcttcctgggttcacgccattctcctgcctcagcctcccgagtagctgggactacaggcgcctgccaccacgccaggctaattttttgtatttttagtagagagggggtttcacagtgttagccaggatggtctctatctcctgacctcgtgatctgcccgccttggcctcacaaagtgctgggattataggcgtgagccaccgtgccggacacatttgcattttttaaaaagagacagttctggccatgttggtctcgaactcctggcctcaagcaatcctgccttggcctcccaaagtgctaggattatgggcgtgagcctccgcactcagcctaaatttgcatttttaagcgactaagtttgagataatttgttatgccagcagaagaaagctaagttatcttggaggtgatttttctttttttttagatggagtttctctcttgttgcccagtttgtctcttggagccccagagtgaaggaggcagaacaggccccagggctcaccccaggccgacctcggtgggcttgcgcaacacacaggcatgatgtagccaccctcccatccccaggcccccctcagcactcctcttcgactttattgacatttatttccaaaacgtgacgataggcaaactcagataaatgacacacatagaccgcgtgaaccctctcatatttaccagataataaaatagtagcactgacaaaggctcaatttttttttttattcttccccagagacaggctctgttgcccaggctggtcttgaactcctggccacaggtgatcctcccacctttgtctcccaaagtgttgaggtaaaaggcatgagccaccgcactcggccaatctaatttttaaaaacaccttttcctcactggctggagcacgttctactttactgggaactgaatgaatgtgcaactctaattacagcccctccgaagtgcagtggcttgggaacctcccgttccgggaggcggcctgcagagccctcctcctacaagtgtgagcacagggtcagggttccatccaagcgagcacctgcttcctattttccgactaatttcggtcccctgatacggaatccgggatcctgcagacaggcagcgggtgacagcaagcacaagggtgttcgatgacacctggagaggtcaggagagccagtcctgcggtgcagaggaagaaacccagcacagaggccaacagagccagccccagcctctgccaataaaacatataaatgagccctgggggctggaggagggccacaggatccaagctggctgccggatccgagtgggatcggggtgccgactgtgggacatgggtgggatggggtgccggctgcgggactcgggtgggatcggggtgcgggctataggactggggcgggatcggggtgtcatctatgggatcgaggtgctggctatgggactggggtgggatcggggtgctggctatgggactggggtgggatcggggtatcagctatgctatgcgatcggggtgagtgccggctgtgggatcggggtgccggctgcgggactggggtgggatcggggtgccggctgtgggacagcggtgggatcggggtgggtgccagctgttgggctggggtgggatcggggtgccagctgcgggactggggtgggatcggggtgccggccgtgggacagcggtgggaccggggtgttagctatgggattggggtgggtgccggctgttgggcaggggtgggatcggggtgtcggctgtgggactgcgataggatcggggtgctggttgtgggactggggtgacagcttgaggggtgaccgagccctcccggccgctcccggatgcccctcgccctccacgctgggagcgccgtggctggctgagcctctggcatgttccgcgtgagtccgcgcaccctacagcgtcctcctccacagcctcgtgttcaggcgtccgccccgcaggggagtcccctcgcgcccattcacacacagcagcgtccgggcgaggagcgcccgtacctggaggcctgaaggtaccgccctgccgcgcgtgggcactgctccctggcgccgtccgtccactgaccatcgtccctcggcccggccgcccgcgcggggcaggcaacgcccgaccgggggcctcggggaccaggaggaacctgcggcgttaggagctgacagtgtcggtccgcgcacgcgccccggggcccgtcgggccttatttcacggccccgccttcctcctccgcgagcgccaaataagtgtccggccctcccagccccgtgcgtgcgcggccccgccgcctgcgtcactaggaagcgcgcgcccgcgccgccgccgccgccgaatccccaacaaggagcgaagcccgcggccgccgccgccgcccgccgccgccgcagctcccgacgccgccgcccccgccgggtgcctaagcaggcccggcgcggccccaggtaagcggcgccggcgagcccgcggcccccccgcggcgaggcctctcgctccgctcacgcgccgccgtccagtcaggggtccctgcggagcgtcaggacgttacggcggggggaggggagggccgggggaggggcggccgcgcgggcggcggcgtcaggcgcaacggcggcgtcaggcgggcggcgcgggcggtggcgggcgcgggcggcggcgcttcctgcctccatcttggcgccgcgggcgggcgcgggctcggcctccagcggcctcctcggtggacccatcccggggggaccacgccgcaggggtgcgacccgcagggaccaccccgcaggcacccgacccgcagggacgcgacccacagggaccaccccgcaggcacccgacccgcaggggccaccacgcgacccgcaggggccaccccacagggacgcgacccacagggaccaccccacagggacgcgacccacaaggaccaccccgcaggcacccgacccgcagggacgcgatccccaggggccaccccgcaggcacccgacccgcagggacgcgatccccaggggccaccccgcaggcacccgacccgcagggacgcgattcccaggggccaccccgcaggcacccgacccgcagggacgcgacccatagggaccaccccgcaggcacccgacccgcaggggccacccggcaggcacccaactcgcagggacgcgacccgcagggatcaccccactgggacccactctcagggacctgacctgcagggaccaccccacaggggcccgcgtcactgtaggctcacaggcgggacctggatctgtgtagacccatggtggtgtggaccctgttggtcggagctgatttgttgtgggcccgtcgtcagtcatggcatgttatctatttggttactgtgtaattcatgcgtgactgaaaagtcgtgactgacttttctgttgaaccagaattctctttctttgctaaca

SEQ ID NO: 3704 - DNA, 6000 bp, Homo sapiens
tggcccgcccccctccttcagcgccccctccagcccctgtgctgcactggcgcggggagcgccgggttcccggctggggctttggcagagggtcccaccctctccccgcctccccacgaaggctctggcggacccagatctcgggtcgccggacgccccagggaccccgcccgcacatcgcgagcgcgcccacccggtcgcgagcccacgcccgggtctgggagccaccctgcggcagtcgcgccctgcgtggcacgctgctcccccaggggcgaggcgcccccgcccgacgtcccggtcccgagcgctccccggcgcggcgcctcgcagcccagcgccccaccagccccgccggcgccgcagaccccagcctcgggcgggtcgggcccaggcttgcaacgcgcagggtaggagaagggaaattggcgtccgctgccggccgctgccccaggcgaggccagacgaggcctctgctcagatcccgccgccccacaaagcccgtggccccggagcctaccggaaatggtgctggccatggtgctggcggcggttgggcctgcggaggctggagaggcgcaagtggcggccggagctgcagacggctggtgctgcagtgccggggaggggaggggagaggagtggagggagcgagggcgggcgggaggcgggcgcggcgggagagagagagggagggagacagagggagagagagagagggttgggggaaggagcggggggaggagggagggagggttgggggaaggagagagagagagagagagactgcgggggcgggggaaggagggagggaggaagggagggaggaagagagagaggagcaagcgcctggctgcggaaggggccgcggctctcagggggagagggcggaggaggggggctacccgaactgcaacaagaccccccaccctccaaccgctcacagcgggacagctgcttctccaacttggctttgtgaggcctgagagtggggtgggggtggagatgagcccccattccccagggcaggcggggcaggggcaatgccggaggagcaggtcccacccatggggtggggccgcagagctcttcgccgccaaggccgctgtaggctgggctggcgccaacagggtccaggtctgtgcctgccatcggagaggatgccacagccacaggggtgggcgctggcctggaggcctccaaggggcatctcctgtgagcccaggggatgggcaggatctgagcggagaagagtgaaagtggaggagtgaggccagaacaaaggctttgccgtgaaagaggtggtttcccgcctgggctcagaccttcactcactgtgtggcccaggccaagggcaagcgtctgacctcgctgggcctttgtttctcaggggtaagatgaaacaatgatgcccccagacgatggagaggaggggtgccagggttgtgcgcacttagtgagtggggggcaacctatcctgcctccccctctcctcataactcccaaagggaaagcctggtaggcaaacggagcgtctttgccattgcagggatgaagccaccgaggcagggagaaaagtgctttgccctacaagcaactaagtcatagggccaggagcaaaaccctgaaaacctcaggagacttgcagagccatgaggctggctcagcaacacaaaagccaggggcaagcctcagctctagcagtgcggtgggagcacccaaggccagtcacatcctagggtggcctggagagtcctgacccctgacgtgcaagccggcatcatccccgggactgtgagtctggtgggggtgatgcccaggaatgtgacattgtgtggcccagaggtacccttaagactggaggatcaccaggcgggccctgacctcatcacaggagccctttaaaagcagtttcctttgcctggttgaagaaatcggagggatcaaaccaaagaaggttttctgttgttgagatgagggggccacgtggcaaggatctgagaactgctcccagccaacagccagcaagacaacaagaccttaactgcaaggaagtgagttctgccaacaagaagagaatgggcttggaggcaggtttgaccccagggcctccacacaagaactgagcccaactgcccacttggtttcagccttgggttactaagaattaggaggtaatgaatgagagttgttttaagctgttggttttgtggtgatttgctatgaagccatatcaaactaatatacacacagaggtgttggcccctgggccattcctaggaagccagctctgcgaaggaggaagaagggcagagaggcacacagagctgcccaccacagcagctgtgtcctccctgttggccaccacagtagcagttggggatggtcagcatccttcaggcagactccagccccgggtgctggagctcaggtgctagggatcaagagaagtagccctctctgggacctccagagtcttctcatgtgggtggggtaggacccacccagtcaggctcagagcaccgcaatgcctcacactcattgtgactctggccaggccctctctgagcctctgtgtcctcatctggagcacagggaccaggtgtgtggaagcccgtggcatagtgccaggaacacagtagatgtgcacagtgtgcactagcaggaacacacaacaggggtactgactgtcagcacctaggcaggcacacgcaatggggtactgactgtcagccatactgactgtcagcgtgctagcaggcatacacaacagctgtactgacagcacactagcaggcacatgccataggtgtactgactctcagtgcactggcaggcacacgcaataggagtaatgacagcatgctggcaggcacacaatagctgtactgactgtttgccccaatatagtgccaggtcttggagcagattttgacttctcaccaagatcaaatgcagaaagtgcacgagcatttcaaagatgtttttcacatgcacattagtgctagttaaaaaaatgttttgactgggtgcagtggctcacaactgtaatcccaacactttggggggccgaggtgggcagatcacctgaggtcaggagtttgagaccagcctggccaacatggtgaaaccccatctaccctaaaaatacaaaaattagccaggtgtggtggcaggtgcctgtaatctcagctactttggaggctgaagcaggagaatcacttgaatccaggaggcagaggttgcagtgagccgagatcccaccactgcactccagcctgggcaacaatatcaagactccacctcaaaaaaaaaaatgtttttcataaagtgtgacttttatcagacctctgcattcttgaaattaactctggcttggctgggcgtggtggcccacacctgtaatcttaacactttgggaggctgaggtgggcagatcacgaggtcaggagttcaagaccagcctgaccaacatgatgaaaccccatctctactaaaaatacaaaaattagccgggcgtggtggcatgcacctgtaatcccagctactcaggaggctgaggcaggagaatcgcttgaacccaggaggtggaggttgcagggagccgagatcgcaccactctattccagcctgggcgacagagcaagactctgtctcaaaaaaaaaaaagaaagaaagaaattaactctggctcctagaaggagccctatatctcagcaggacactcagtcattcaacagacatctgtcaagcacctgctgtatgctggagctgtgggtacgtcagcaattagaggaagagggcaggggtacaggagttcctgaccaccccaggccagcacgctcctatagcagctggcaaggagcagatgactcagacttcagctcagtccacaggacagccttttctggccactgctctcaggagatgagatgtgtggctgcaaaaggtaaactcctggctcctgagcaggctctgggcaatctgctcaacgctctgtgcctcactttctcacccagaaagtgtggacaatgagaggacttatctggctgggcgcggtggctcacgcctgtaatcccagcactttgggaggccgaggcgggtggatcacctgaggtcaggagttcaagacctgcctggccaacacggtcaaactccatctctactaaaaatataaaaaattagccgggcttagtggtgcacacctgtaatcccagctacttgagaggctgaggcaggagaatcacttgaacccaggaggtggaggttgcagtgagccaagattgtgccactgcactccagcctgggcaaaaagccaaaactctgtctcaaagaaaaaagaatcatggcagaaggtgaagtctatgttagtcccagttcccaggtcgtacatggcggcaggagaaagagagagagaaggggaaactgccacttttaaaccatcgggtctcctgagcactcactgtcagaacagcctggaggaaactgaccgcatgatccaaccacctccctccaggtccctccctccacacgtggggattacaattcgaggtgagacttgggtggagacacagagccgaaccatatcagcatgtatggggggcactgaaacttgtgcttggtgcccattcattcaacgagtgtgtgtggctggtctcctcatcttcaactccctgccgagtctcagataggcagcctgcagttccttcaccacaacaggcacatggggctgggtgccagtgagtgctggggcttctccgagcactatctcacacccaggagcgtgggcacgcatggcattcgcatgtgccgtcagtggacattaaacacagccatgaagaagccacgaagaagtgctgcctgccggccgtgcgcggtcacgcagcgccaactccctcctggggccttctggggccttctggggcatgggagctggggccgcctgagacaaacatccgtgacgctgggctgaccccacagaacggtgcgggcctcgctcttggagtcagccctgctgccagccagtgccgggtgctggggactcagggaggcccgccgggaccactgcgggacagtgagccgagcagaagctggaacgcaggagaggaaggagagggggcggtcagggctctcaggagccgggtcctgggcaaggcgcagccgttttcaaattttcaggaaagcggtcggctcacactcgagcagtaaaaagatgcctctggggaggaggcccgtgcagctctccgggcaatggtggtggctcggcctagagaggcggtagtggaacgcagaccctggtgggggaatgacatcaagggaggagacgggcgggaccccagatttctgcctgtgggcgatggaagtgaggttcactggccagcggagccggacacagaacgcgcaaaacgccgtgtaggcctggaggagccgaagagcaggcggaccccctccgcgggggaacagtttccgccgggagcacaaagcaacggaccggaagtggggggcggaagtgcagtgggctcagcgccgactgcgcgcctctgcccgcgaaaactctgagctggctgacagctggggacgggtggcggccctcgactggagtcggttgagttcctgagggaccccggttctggaaggttcgccgcggagacaagtgagcagtgagtcgcagtgaccctacaagtggttcttttacccgagcggctcgtaggcgcgttgcggtttttcgaaactacagctcccggcaggccccaagccgccctcggggccgcgggtcggcggattggccgcgctgcattttgggacctgtagtttcctgcgctcgtggcgctggcgccgcggcgttggctgagcccttgaccggggctggagggaagggccgacattcagtgtgtccgcgtctgttctgttagtcccagttcccgggcgggattgaggcttagagaagttgagtgatttgctgagggctgcacgggttggcatcccggcatgctctttcgctac

SEQ ID NO: 3705 - DNA, 6000 bp, Homo sapiens
ggaaatggtgctggccatggtgctggcggcggttgggcctgcggaggctggagaggcgcaagtggcggccggagctgcagacggctggtgctgcagtgccggggaggggaggggagaggagtggagggagcgagggcgggcgggaggcgggcgcggcgggagagagagagggagggagacagagggagagagagagagggttgggggaaggagcggggggaggagggagggagggttgggggaaggagagagagagagagagagactgcgggggcgggggaaggagggagggaggaagggagggaggaagagagagaggagcaagcgcctggctgcggaaggggccgcggctctcagggggagagggcggaggaggggggctacccgaactgcaacaagaccccccaccctccaaccgctcacagcgggacagctgcttctccaacttggctttgtgaggcctgagagtggggtgggggtggagatgagcccccattccccagggcaggcggggcaggggcaatgccggaggagcaggtcccacccatggggtggggccgcagagctcttcgccgccaaggccgctgtaggctgggctggcgccaacagggtccaggtctgtgcctgccatcggagaggatgccacagccacaggggtgggcgctggcctggaggcctccaaggggcatctcctgtgagcccaggggatgggcaggatctgagcggagaagagtgaaagtggaggagtgaggccagaacaaaggctttgccgtgaaagaggtggtttcccgcctgggctcagaccttcactcactgtgtggcccaggccaagggcaagcgtctgacctcgctgggcctttgtttctcaggggtaagatgaaacaatgatgcccccagacgatggagaggaggggtgccagggttgtgcgcacttagtgagtggggggcaacctatcctgcctccccctctcctcataactcccaaagggaaagcctggtaggcaaacggagcgtctttgccattgcagggatgaagccaccgaggcagggagaaaagtgctttgccctacaagcaactaagtcatagggccaggagcaaaaccctgaaaacctcaggagacttgcagagccatgaggctggctcagcaacacaaaagccaggggcaagcctcagctctagcagtgcggtgggagcacccaaggccagtcacatcctagggtggcctggagagtcctgacccctgacgtgcaagccggcatcatccccgggactgtgagtctggtgggggtgatgcccaggaatgtgacattgtgtggcccagaggtacccttaagactggaggatcaccaggcgggccctgacctcatcacaggagccctttaaaagcagtttcctttgcctggttgaagaaatcggagggatcaaaccaaagaaggttttctgttgttgagatgagggggccacgtggcaaggatctgagaactgctcccagccaacagccagcaagacaacaagaccttaactgcaaggaagtgagttctgccaacaagaagagaatgggcttggaggcaggtttgaccccagggcctccacacaagaactgagcccaactgcccacttggtttcagccttgggttactaagaattaggaggtaatgaatgagagttgttttaagctgttggttttgtggtgatttgctatgaagccatatcaaactaatatacacacagaggtgttggcccctgggccattcctaggaagccagctctgcgaaggaggaagaagggcagagaggcacacagagctgcccaccacagcagctgtgtcctccctgttggccaccacagtagcagttggggatggtcagcatccttcaggcagactccagccccgggtgctggagctcaggtgctagggatcaagagaagtagccctctctgggacctccagagtcttctcatgtgggtggggtaggacccacccagtcaggctcagagcaccgcaatgcctcacactcattgtgactctggccaggccctctctgagcctctgtgtcctcatctggagcacagggaccaggtgtgtggaagcccgtggcatagtgccaggaacacagtagatgtgcacagtgtgcactagcaggaacacacaacaggggtactgactgtcagcacctaggcaggcacacgcaatggggtactgactgtcagccatactgactgtcagcgtgctagcaggcatacacaacagctgtactgacagcacactagcaggcacatgccataggtgtactgactctcagtgcactggcaggcacacgcaataggagtaatgacagcatgctggcaggcacacaatagctgtactgactgtttgccccaatatagtgccaggtcttggagcagattttgacttctcaccaagatcaaatgcagaaagtgcacgagcatttcaaagatgtttttcacatgcacattagtgctagttaaaaaaatgttttgactgggtgcagtggctcacaactgtaatcccaacactttggggggccgaggtgggcagatcacctgaggtcaggagtttgagaccagcctggccaacatggtgaaaccccatctaccctaaaaatacaaaaattagccaggtgtggtggcaggtgcctgtaatctcagctactttggaggctgaagcaggagaatcacttgaatccaggaggcagaggttgcagtgagccgagatcccaccactgcactccagcctgggcaacaatatcaagactccacctcaaaaaaaaaaatgtttttcataaagtgtgacttttatcagacctctgcattcttgaaattaactctggcttggctgggcgtggtggcccacacctgtaatcttaacactttgggaggctgaggtgggcagatcacgaggtcaggagttcaagaccagcctgaccaacatgatgaaaccccatctctactaaaaatacaaaaattagccgggcgtggtggcatgcacctgtaatcccagctactcaggaggctgaggcaggagaatcgcttgaacccaggaggtggaggttgcagggagccgagatcgcaccactctattccagcctgggcgacagagcaagactctgtctcaaaaaaaaaaaagaaagaaagaaattaactctggctcctagaaggagccctatatctcagcaggacactcagtcattcaacagacatctgtcaagcacctgctgtatgctggagctgtgggtacgtcagcaattagaggaagagggcaggggtacaggagttcctgaccaccccaggccagcacgctcctatagcagctggcaaggagcagatgactcagacttcagctcagtccacaggacagccttttctggccactgctctcaggagatgagatgtgtggctgcaaaaggtaaactcctggctcctgagcaggctctgggcaatctgctcaacgctctgtgcctcactttctcacccagaaagtgtggacaatgagaggacttatctggctgggcgcggtggctcacgcctgtaatcccagcactttgggaggccgaggcgggtggatcacctgaggtcaggagttcaagacctgcctggccaacacggtcaaactccatctctactaaaaatataaaaaattagccgggcttagtggtgcacacctgtaatcccagctacttgagaggctgaggcaggagaatcacttgaacccaggaggtggaggttgcagtgagccaagattgtgccactgcactccagcctgggcaaaaagccaaaactctgtctcaaagaaaaaagaatcatggcagaaggtgaagtctatgttagtcccagttcccaggtcgtacatggcggcaggagaaagagagagagaaggggaaactgccacttttaaaccatcgggtctcctgagcactcactgtcagaacagcctggaggaaactgaccgcatgatccaaccacctccctccaggtccctccctccacacgtggggattacaattcgaggtgagacttgggtggagacacagagccgaaccatatcagcatgtatggggggcactgaaacttgtgcttggtgcccattcattcaacgagtgtgtgtggctggtctcctcatcttcaactccctgccgagtctcagataggcagcctgcagttccttcaccacaacaggcacatggggctgggtgccagtgagtgctggggcttctccgagcactatctcacacccaggagcgtgggcacgcatggcattcgcatgtgccgtcagtggacattaaacacagccatgaagaagccacgaagaagtgctgcctgccggccgtgcgcggtcacgcagcgccaactccctcctggggccttctggggccttctggggcatgggagctggggccgcctgagacaaacatccgtgacgctgggctgaccccacagaacggtgcgggcctcgctcttggagtcagccctgctgccagccagtgccgggtgctggggactcagggaggcccgccgggaccactgcgggacagtgagccgagcagaagctggaacgcaggagaggaaggagagggggcggtcagggctctcaggagccgggtcctgggcaaggcgcagccgttttcaaattttcaggaaagcggtcggctcacactcgagcagtaaaaagatgcctctggggaggaggcccgtgcagctctccgggcaatggtggtggctcggcctagagaggcggtagtggaacgcagaccctggtgggggaatgacatcaagggaggagacgggcgggaccccagatttctgcctgtgggcgatggaagtgaggttcactggccagcggagccggacacagaacgcgcaaaacgccgtgtaggcctggaggagccgaagagcaggcggaccccctccgcgggggaacagtttccgccgggagcacaaagcaacggaccggaagtggggggcggaagtgcagtgggctcagcgccgactgcgcgcctctgcccgcgaaaactctgagctggctgacagctggggacgggtggcggccctcgactggagtcggttgagttcctgagggaccccggttctggaaggttcgccgcggagacaagtgagcagtgagtcgcagtgaccctacaagtggttcttttacccgagcggctcgtaggcgcgttgcggtttttcgaaactacagctcccggcaggccccaagccgccctcggggccgcgggtcggcggattggccgcgctgcattttgggacctgtagtttcctgcgctcgtggcgctggcgccgcggcgttggctgagcccttgaccggggctggagggaagggccgacattcagtgtgtccgcgtctgttctgttagtcccagttcccgggcgggattgaggcttagagaagttgagtgatttgctgagggctgcacgggttggcatcccggcatgctctttcgctactttggctgcatctggttgcccacccgggcggatggggaatggactccagccagccaggagggcagagggctggagaggcagggccggaggttcagaccctccgctctgacgttgcgcctggtgaggccgggaggggtgccgcttgcctcttcagccctcacgctcttgtggaagtcgcggaattactgcaggcggaacttgcagcactgtgggcgtcttttccagagaaggacggagttgtggggcgggaggataaggcaaggcccagccacttcgcatcttcgccccgccagctcctcgagatgggatataccagggttgctctccaaccctctccgcaggagggactgatggaaacgcctgggaaagtagcccggtacccacaaaggctgtctacaaacagagtcttactgtctttcccaggtctgtgccatagggattctcgaagagaacagcgttgtgtcccagtgcacatgctcgcatcgcttaccaggagtgcccgagaccctaagatgttc

SEQ ID NO: 3706 - DNA, 6000 bp, Homo sapiens
ccgaactgcaacaagaccccccaccctccaaccgctcacagcgggacagctgcttctccaacttggctttgtgaggcctgagagtggggtgggggtggagatgagcccccattccccagggcaggcggggcaggggcaatgccggaggagcaggtcccacccatggggtggggccgcagagctcttcgccgccaaggccgctgtaggctgggctggcgccaacagggtccaggtctgtgcctgccatcggagaggatgccacagccacaggggtgggcgctggcctggaggcctccaaggggcatctcctgtgagcccaggggatgggcaggatctgagcggagaagagtgaaagtggaggagtgaggccagaacaaaggctttgccgtgaaagaggtggtttcccgcctgggctcagaccttcactcactgtgtggcccaggccaagggcaagcgtctgacctcgctgggcctttgtttctcaggggtaagatgaaacaatgatgcccccagacgatggagaggaggggtgccagggttgtgcgcacttagtgagtggggggcaacctatcctgcctccccctctcctcataactcccaaagggaaagcctggtaggcaaacggagcgtctttgccattgcagggatgaagccaccgaggcagggagaaaagtgctttgccctacaagcaactaagtcatagggccaggagcaaaaccctgaaaacctcaggagacttgcagagccatgaggctggctcagcaacacaaaagccaggggcaagcctcagctctagcagtgcggtgggagcacccaaggccagtcacatcctagggtggcctggagagtcctgacccctgacgtgcaagccggcatcatccccgggactgtgagtctggtgggggtgatgcccaggaatgtgacattgtgtggcccagaggtacccttaagactggaggatcaccaggcgggccctgacctcatcacaggagccctttaaaagcagtttcctttgcctggttgaagaaatcggagggatcaaaccaaagaaggttttctgttgttgagatgagggggccacgtggcaaggatctgagaactgctcccagccaacagccagcaagacaacaagaccttaactgcaaggaagtgagttctgccaacaagaagagaatgggcttggaggcaggtttgaccccagggcctccacacaagaactgagcccaactgcccacttggtttcagccttgggttactaagaattaggaggtaatgaatgagagttgttttaagctgttggttttgtggtgatttgctatgaagccatatcaaactaatatacacacagaggtgttggcccctgggccattcctaggaagccagctctgcgaaggaggaagaagggcagagaggcacacagagctgcccaccacagcagctgtgtcctccctgttggccaccacagtagcagttggggatggtcagcatccttcaggcagactccagccccgggtgctggagctcaggtgctagggatcaagagaagtagccctctctgggacctccagagtcttctcatgtgggtggggtaggacccacccagtcaggctcagagcaccgcaatgcctcacactcattgtgactctggccaggccctctctgagcctctgtgtcctcatctggagcacagggaccaggtgtgtggaagcccgtggcatagtgccaggaacacagtagatgtgcacagtgtgcactagcaggaacacacaacaggggtactgactgtcagcacctaggcaggcacacgcaatggggtactgactgtcagccatactgactgtcagcgtgctagcaggcatacacaacagctgtactgacagcacactagcaggcacatgccataggtgtactgactctcagtgcactggcaggcacacgcaataggagtaatgacagcatgctggcaggcacacaatagctgtactgactgtttgccccaatatagtgccaggtcttggagcagattttgacttctcaccaagatcaaatgcagaaagtgcacgagcatttcaaagatgtttttcacatgcacattagtgctagttaaaaaaatgttttgactgggtgcagtggctcacaactgtaatcccaacactttggggggccgaggtgggcagatcacctgaggtcaggagtttgagaccagcctggccaacatggtgaaaccccatctaccctaaaaatacaaaaattagccaggtgtggtggcaggtgcctgtaatctcagctactttggaggctgaagcaggagaatcacttgaatccaggaggcagaggttgcagtgagccgagatcccaccactgcactccagcctgggcaacaatatcaagactccacctcaaaaaaaaaaatgtttttcataaagtgtgacttttatcagacctctgcattcttgaaattaactctggcttggctgggcgtggtggcccacacctgtaatcttaacactttgggaggctgaggtgggcagatcacgaggtcaggagttcaagaccagcctgaccaacatgatgaaaccccatctctactaaaaatacaaaaattagccgggcgtggtggcatgcacctgtaatcccagctactcaggaggctgaggcaggagaatcgcttgaacccaggaggtggaggttgcagggagccgagatcgcaccactctattccagcctgggcgacagagcaagactctgtctcaaaaaaaaaaaagaaagaaagaaattaactctggctcctagaaggagccctatatctcagcaggacactcagtcattcaacagacatctgtcaagcacctgctgtatgctggagctgtgggtacgtcagcaattagaggaagagggcaggggtacaggagttcctgaccaccccaggccagcacgctcctatagcagctggcaaggagcagatgactcagacttcagctcagtccacaggacagccttttctggccactgctctcaggagatgagatgtgtggctgcaaaaggtaaactcctggctcctgagcaggctctgggcaatctgctcaacgctctgtgcctcactttctcacccagaaagtgtggacaatgagaggacttatctggctgggcgcggtggctcacgcctgtaatcccagcactttgggaggccgaggcgggtggatcacctgaggtcaggagttcaagacctgcctggccaacacggtcaaactccatctctactaaaaatataaaaaattagccgggcttagtggtgcacacctgtaatcccagctacttgagaggctgaggcaggagaatcacttgaacccaggaggtggaggttgcagtgagccaagattgtgccactgcactccagcctgggcaaaaagccaaaactctgtctcaaagaaaaaagaatcatggcagaaggtgaagtctatgttagtcccagttcccaggtcgtacatggcggcaggagaaagagagagagaaggggaaactgccacttttaaaccatcgggtctcctgagcactcactgtcagaacagcctggaggaaactgaccgcatgatccaaccacctccctccaggtccctccctccacacgtggggattacaattcgaggtgagacttgggtggagacacagagccgaaccatatcagcatgtatggggggcactgaaacttgtgcttggtgcccattcattcaacgagtgtgtgtggctggtctcctcatcttcaactccctgccgagtctcagataggcagcctgcagttccttcaccacaacaggcacatggggctgggtgccagtgagtgctggggcttctccgagcactatctcacacccaggagcgtgggcacgcatggcattcgcatgtgccgtcagtggacattaaacacagccatgaagaagccacgaagaagtgctgcctgccggccgtgcgcggtcacgcagcgccaactccctcctggggccttctggggccttctggggcatgggagctggggccgcctgagacaaacatccgtgacgctgggctgaccccacagaacggtgcgggcctcgctcttggagtcagccctgctgccagccagtgccgggtgctggggactcagggaggcccgccgggaccactgcgggacagtgagccgagcagaagctggaacgcaggagaggaaggagagggggcggtcagggctctcaggagccgggtcctgggcaaggcgcagccgttttcaaattttcaggaaagcggtcggctcacactcgagcagtaaaaagatgcctctggggaggaggcccgtgcagctctccgggcaatggtggtggctcggcctagagaggcggtagtggaacgcagaccctggtgggggaatgacatcaagggaggagacgggcgggaccccagatttctgcctgtgggcgatggaagtgaggttcactggccagcggagccggacacagaacgcgcaaaacgccgtgtaggcctggaggagccgaagagcaggcggaccccctccgcgggggaacagtttccgccgggagcacaaagcaacggaccggaagtggggggcggaagtgcagtgggctcagcgccgactgcgcgcctctgcccgcgaaaactctgagctggctgacagctggggacgggtggcggccctcgactggagtcggttgagttcctgagggaccccggttctggaaggttcgccgcggagacaagtgagcagtgagtcgcagtgaccctacaagtggttcttttacccgagcggctcgtaggcgcgttgcggtttttcgaaactacagctcccggcaggccccaagccgccctcggggccgcgggtcggcggattggccgcgctgcattttgggacctgtagtttcctgcgctcgtggcgctggcgccgcggcgttggctgagcccttgaccggggctggagggaagggccgacattcagtgtgtccgcgtctgttctgttagtcccagttcccgggcgggattgaggcttagagaagttgagtgatttgctgagggctgcacgggttggcatcccggcatgctctttcgctactttggctgcatctggttgcccacccgggcggatggggaatggactccagccagccaggagggcagagggctggagaggcagggccggaggttcagaccctccgctctgacgttgcgcctggtgaggccgggaggggtgccgcttgcctcttcagccctcacgctcttgtggaagtcgcggaattactgcaggcggaacttgcagcactgtgggcgtcttttccagagaaggacggagttgtggggcgggaggataaggcaaggcccagccacttcgcatcttcgccccgccagctcctcgagatgggatataccagggttgctctccaaccctctccgcaggagggactgatggaaacgcctgggaaagtagcccggtacccacaaaggctgtctacaaacagagtcttactgtctttcccaggtctgtgccatagggattctcgaagagaacagcgttgtgtcccagtgcacatgctcgcatcgcttaccaggagtgcccgagaccctaagatgttcggagtggttttttcgcacagacccgaatagcctgcccctcagccacgctctgtgcccttctgagaacaggctgatatgcccaagatagtcctgaatggtgtgaccgtagacttccctttccagccctacaaatgccaacaggagtacatgaccaaggtcctggaatgtctgcagcaggtagagcacaggccccgaggaaaggactgcgggtgggtggagcttcagccaggacggggtgtgcttccctctcccggcccattccagccaggcccctccgggccagaggcagcgtctgtcataaaaagggctggtgttccaggtggggtcagagagaggattgacaagtaaaaacgatcgtcctttgaagggggccggcccctccac

SEQ ID NO: 3707 - DNA, 6000 bp, Homo sapiens
ggggcccctgcagcagatgagggtcttcacttcggtgaactgaacccttgaagcggctgtgggcagggcagcagggctatggccaccccccaggttcgcctttgccgacgcaagagcccaactgccctcctgggtgcgtccccacgtcagggtgtatgacaactttggccatgtcatccgagacgtggcccagttcttccgtgttgccgagcgaactgtgagttcctgcccagggaggggatgagggtgttgtccccagaggagccagaaatgggtccacccacccccatggttctgcagatgccagcgccggccccccgggctacagcacccagtgtgcgtggagaagatgctgtcagcgaggccaagtcgcctggccccttcttctccaccaggaaagctaagagtctggacctgcatgtccccagcctgaagcagaggtcctcaggtgcggacgggcagcgctgggtgggcggtgtgggggtggcggagcgggcggcgtggggcgggcagcaccaggcgcccagggcggaggcgactcacctggctttgtgcgcttcccctcccacctccaaaggctgcctctccctcctagggcagggcccccacgggctgcaaccctcccctacaggcagagaacgccccaggcaaggatgccccccgaggctgagactccccccaatagcagggaggacacccacaggcaggaccccaagtgctgggactctcccccaagaggggctttgccacaggcagggaccccagctggggccccccgtgggcttcactgcgcactcgggtgcccctgcagggtcaccagctgccggggaccccgagagtagcctgtgtgtggagtatgagcaggagccagttcctgcccggcagaggcccagggggctgctggccgccctggagcacagcgaacagcgggcggggagccctggcgaggagcaggtacagttccagggccttgggatggacacagaccctctgtctcctgaggccaacccgaccccgcccatctggcctcaggcacctccccacacacccctgtaaatcccctgcctggcaggcaggcgggcaagcgggcgggggatcccagctgcctggctgtctgtgggtcctccaccccacctcacccacaggctgctggctcccaggtggtgcatgccctggccctccgcgggtgccccccacatcactttggttctctggcgggtcagcttggctcagtgcactcaaggtcgggtgcccctgccactggctgcgcttgaggctggcctttctccaggaatgtgctgcgggtggaacccaggttccttcttccttggggccttttgccccagaagcccataattcctcaggccaacccgaaattttctccctgcttcctgctgggagccattcccctcttcctgcccatccctgcccttcaggcccctggagtgagctccaggtgcaggcaccaggcacctgtgtccccttcctgccagcccctcgctgtggtcggactgtcttccctggacctgctcttacaagtcaccacctgcgagcctcatgagccgctggtgtgacttggacaggaccaagttgtggcactgtcaccggggtgtgctgtgcccccctcccccgacctccatcttggctcagggctccttgggaccatcttccctgtgcgtccaggtgctttgggaccccagagtgtgtggttggggtctgtgtgtggttgtgagctgtgtcctcctcaggcccacagctgctccaccctgtccctcctgtctgagaagaggccggcagaagaaccgcgaggagggaggaagaagatccggctggtcagccacccggtgcgtgagctgtccctgcacctgtgccgaccaccatagacacgcatgggaacgcagccgtgggtgcccccagccacggctggtcccgatgggaccagggaatccacccccaggagctgatgtccagggcagctgtgatgctgacggccaggggctcaagtgtgtggtttcttctgcagggggctcatgagtcccagctggaatcaggccccacccttgggcaggtttggcatggggcctgcagcactgggcttggccctggcatttccctcaagtgtggatgcacacctgcctcatgtgagggacacagcccattcctagccttggatcaaagaacggagttatagccggagccaggaagccccctgcctgctggaaaaccccaagtgtggcggcctttgtccatgtcccttggcttctgggaagaactgggtggtgcccaggcagggctggtgccatcaggaagtgggtggctgctgaggggcctgggctggcgagggcctgggtggggagtgcctgggccgcccctgccttggtttccacgtttccgtgttggtctggggtgtgtagagagatgggcactgctcatccggaagcccctccttgtgcgctgccatcctgggagcctcagccgcatccgctgtggggcagggggcttgagggaggaggagagagacgggccatgcaggacccctggcttgaggcagagccaatctaccctttgcccattcactgctctcagttccctgccagcctctcactgtgtgacctcagacgggcccagccccacagctttcttcccgcagcccctccctatgtccatccagccagccagtttctcaggcagcagccccacctcggcagtcactgtcccagggaacgctcaatgttccaaggaaggctctgcagccccagggaccagatgatgaggctggccctgatggagcctcgggcctgtgtcctgcaggaggagcccgtggctggtgcacagacggacagggccaagctcttcatggtggccgtgaagcaggagttgagccaagccaactttgccaccttcacccaggccctgcaggactacaagggttccgatgacttcgccgccctggccgcctgtctcggccccctctttgctgaggaccccaagaagcacaacctgctccaaggtgccctggcttgcagaggccacccaccctgagggcagtgctgccgccgcgtgtggggtgggggccatctgggtccaaggtggtctctgttctctagagaaaaaggggcagatggggacagacgccccttcctctacaggcttctaccagtttgtgcggccccaccataagcagcagtttgaggaggtctgtatccagctgacaggacgaggctgtggctatcggcctgagcacagcattccccgaaggcagcgggcacagccggtcctggaccccactggtaaatggggccccaggtgggaccctcagactcctgcgtggaaggcagtgtgggccagagtcctgggctgcttggggtgggcatcctcgggccctgcttggccccgcctctctgttcccctatgggagtgatgggggcctccacctccaccaccagcaccagcagcaccacctccacctccacctccacctccacctccaccaccacctccacctccaccaccacctcctccaccaccaccacctccaccaccaccaccaccaccaccacctccacctccaccacctccacctccaccaccaccacctccacctccaccaccaccacctccacctccaccaccacctccaccaccaccacctccacctccaccaccacctccaccaccaccaccaccaccaccaccaccaccaccaccacctccaccaccaccacctgcaccaccacctccacctccaccaccaccaccacctccacctccaccagcagcagcatcacttgttggggagaccctgtgcaactccatgcacagccctgtccctgccatagccccgacccctaagcacagccctgtccaactgccacacgtcccctgcctcccatgcatggtcctggggggtcaactgcacacgccagggtcctagggtcctagacccctgtcctccctgtttctgcctctgtttggggtggagtccaagtctccagaggcggaagcatctgtgttcgtgtgttaatgaacagcccctacagagttcccctagttcacccaggggggaacctagcctgttgggacgaccccagatcccttctgggcttggtactcactgggatatcctcatgcctgcacccagcctacggctctgagctcctgagtggggctttggcctgcccgccactgttccagcccccatccagcaggctggtgtctcctctgatgcccccagcacccaggcgtgtacctgcctgggttttcccgccctggtctgaggtgggtgaggcctggcctccctagccagccctgcccccccaccccagggaactttccagatgctctcgaccagctttgtggctctacatctcttcatcaggaagaacggcgccggatcccaagctgaccgtgtccacggctgcagcccagcagctggacccccaagagcacctgaaccagggcaggccccacctgtcgcccaggccacccccaacaggtagctgactcctgaaccgtgtgcagcctacgacttggtgggtccctcagtggcttcacgaggctaactcttgagtgtggccggggctgcccctgtggggagccatctcatggtggggactgctcccggttctgcaccccgcagttgtcctgagcagctctccaggagttcctggaggaagggcgggcagggcggtgggactctcagtcctccaccccagcgccactctgagccatgctactcccacaccaggagaccctggcagccaaccacagtgggggtctggagtgcccagagcagggaagcagggccagcacgccgtgagcgcctacctggctgatgcccgcagggccctggggtccgcgggctgtagccaactcttggcagcgctgacagcctataagcaagacgacgacctcgacaaggtgctggctgtgttggccgccctgaccactgcaaagccagaggacttccccctgctgcacagcaagtggccctggcgtggggaacagccggtggggtggggggcaggggacaaaatgggggctgtgccgggtctgattgaagctccccgcagggttcagcatgtttgtgcgtccacaccacaagcagcgcttctcacagacgtgcacagacctgaccggccggccctacccgggcatggagccaccgggaccccaggaggagaggcttgccgtgcctcctgtgcttacccacagggctccccaaccaggtagggcacctgcctggctgctcctggcagcgccccaaccgcacgcagccctgggagtgagcagcaaagccccaggcccccctcagactcaagtctctgtctccaggcccctcacggtccgagaagaccgggaagacccagagcaagatctcgtccttccttagacagaggccagcagggactgtgggggcgggcggtgaggatgcaggtcccagccagtcctcaggacctccccacgggcctgcagcatctgagtggggtgagcctcatgggagagacatcgctgggcagcaggccacgggagctccgggcgggcccctctcagcaggctgtgtgtgccagggctgtggggcagaggacgtggtgcccttccagtgccctgcctgtgacttccagcgctgccaagcctgctggcaacggcaccttcaggttggtgcctggccactacagttcctgctgggtgtagccccaggtgatgggctgagggggaaagggcaggcccttgtcctggtggcaacgcctggcagacgtgtgcagtgggccggttgtctcacaggcctctaggatgtgcccagcctgccacaccgcctccaggaagcagagcgtcatgcaggtcttctggccagagccccagtgagtgcccacggaggcccccagcacacccaacgtggcttgatcacctgcctgtccagctctggtgggccaagaacccacccaacagaataggccagcccatgccagccggcttggcccgctgcaggcctcaggcagg

SEQ ID NO: 3708 - DNA, 6000 bp, Homo sapiens
tcctcaggcccacagctgctccaccctgtccctcctgtctgagaagaggccggcagaagaaccgcgaggagggaggaagaagatccggctggtcagccacccggtgcgtgagctgtccctgcacctgtgccgaccaccatagacacgcatgggaacgcagccgtgggtgcccccagccacggctggtcccgatgggaccagggaatccacccccaggagctgatgtccagggcagctgtgatgctgacggccaggggctcaagtgtgtggtttcttctgcagggggctcatgagtcccagctggaatcaggccccacccttgggcaggtttggcatggggcctgcagcactgggcttggccctggcatttccctcaagtgtggatgcacacctgcctcatgtgagggacacagcccattcctagccttggatcaaagaacggagttatagccggagccaggaagccccctgcctgctggaaaaccccaagtgtggcggcctttgtccatgtcccttggcttctgggaagaactgggtggtgcccaggcagggctggtgccatcaggaagtgggtggctgctgaggggcctgggctggcgagggcctgggtggggagtgcctgggccgcccctgccttggtttccacgtttccgtgttggtctggggtgtgtagagagatgggcactgctcatccggaagcccctccttgtgcgctgccatcctgggagcctcagccgcatccgctgtggggcagggggcttgagggaggaggagagagacgggccatgcaggacccctggcttgaggcagagccaatctaccctttgcccattcactgctctcagttccctgccagcctctcactgtgtgacctcagacgggcccagccccacagctttcttcccgcagcccctccctatgtccatccagccagccagtttctcaggcagcagccccacctcggcagtcactgtcccagggaacgctcaatgttccaaggaaggctctgcagccccagggaccagatgatgaggctggccctgatggagcctcgggcctgtgtcctgcaggaggagcccgtggctggtgcacagacggacagggccaagctcttcatggtggccgtgaagcaggagttgagccaagccaactttgccaccttcacccaggccctgcaggactacaagggttccgatgacttcgccgccctggccgcctgtctcggccccctctttgctgaggaccccaagaagcacaacctgctccaaggtgccctggcttgcagaggccacccaccctgagggcagtgctgccgccgcgtgtggggtgggggccatctgggtccaaggtggtctctgttctctagagaaaaaggggcagatggggacagacgccccttcctctacaggcttctaccagtttgtgcggccccaccataagcagcagtttgaggaggtctgtatccagctgacaggacgaggctgtggctatcggcctgagcacagcattccccgaaggcagcgggcacagccggtcctggaccccactggtaaatggggccccaggtgggaccctcagactcctgcgtggaaggcagtgtgggccagagtcctgggctgcttggggtgggcatcctcgggccctgcttggccccgcctctctgttcccctatgggagtgatgggggcctccacctccaccaccagcaccagcagcaccacctccacctccacctccacctccacctccaccaccacctccacctccaccaccacctcctccaccaccaccacctccaccaccaccaccaccaccaccacctccacctccaccacctccacctccaccaccaccacctccacctccaccaccaccacctccacctccaccaccacctccaccaccaccacctccacctccaccaccacctccaccaccaccaccaccaccaccaccaccaccaccaccacctccaccaccaccacctgcaccaccacctccacctccaccaccaccaccacctccacctccaccagcagcagcatcacttgttggggagaccctgtgcaactccatgcacagccctgtccctgccatagccccgacccctaagcacagccctgtccaactgccacacgtcccctgcctcccatgcatggtcctggggggtcaactgcacacgccagggtcctagggtcctagacccctgtcctccctgtttctgcctctgtttggggtggagtccaagtctccagaggcggaagcatctgtgttcgtgtgttaatgaacagcccctacagagttcccctagttcacccaggggggaacctagcctgttgggacgaccccagatcccttctgggcttggtactcactgggatatcctcatgcctgcacccagcctacggctctgagctcctgagtggggctttggcctgcccgccactgttccagcccccatccagcaggctggtgtctcctctgatgcccccagcacccaggcgtgtacctgcctgggttttcccgccctggtctgaggtgggtgaggcctggcctccctagccagccctgcccccccaccccagggaactttccagatgctctcgaccagctttgtggctctacatctcttcatcaggaagaacggcgccggatcccaagctgaccgtgtccacggctgcagcccagcagctggacccccaagagcacctgaaccagggcaggccccacctgtcgcccaggccacccccaacaggtagctgactcctgaaccgtgtgcagcctacgacttggtgggtccctcagtggcttcacgaggctaactcttgagtgtggccggggctgcccctgtggggagccatctcatggtggggactgctcccggttctgcaccccgcagttgtcctgagcagctctccaggagttcctggaggaagggcgggcagggcggtgggactctcagtcctccaccccagcgccactctgagccatgctactcccacaccaggagaccctggcagccaaccacagtgggggtctggagtgcccagagcagggaagcagggccagcacgccgtgagcgcctacctggctgatgcccgcagggccctggggtccgcgggctgtagccaactcttggcagcgctgacagcctataagcaagacgacgacctcgacaaggtgctggctgtgttggccgccctgaccactgcaaagccagaggacttccccctgctgcacagcaagtggccctggcgtggggaacagccggtggggtggggggcaggggacaaaatgggggctgtgccgggtctgattgaagctccccgcagggttcagcatgtttgtgcgtccacaccacaagcagcgcttctcacagacgtgcacagacctgaccggccggccctacccgggcatggagccaccgggaccccaggaggagaggcttgccgtgcctcctgtgcttacccacagggctccccaaccaggtagggcacctgcctggctgctcctggcagcgccccaaccgcacgcagccctgggagtgagcagcaaagccccaggcccccctcagactcaagtctctgtctccaggcccctcacggtccgagaagaccgggaagacccagagcaagatctcgtccttccttagacagaggccagcagggactgtgggggcgggcggtgaggatgcaggtcccagccagtcctcaggacctccccacgggcctgcagcatctgagtggggtgagcctcatgggagagacatcgctgggcagcaggccacgggagctccgggcgggcccctctcagcaggctgtgtgtgccagggctgtggggcagaggacgtggtgcccttccagtgccctgcctgtgacttccagcgctgccaagcctgctggcaacggcaccttcaggttggtgcctggccactacagttcctgctgggtgtagccccaggtgatgggctgagggggaaagggcaggcccttgtcctggtggcaacgcctggcagacgtgtgcagtgggccggttgtctcacaggcctctaggatgtgcccagcctgccacaccgcctccaggaagcagagcgtcatgcaggtcttctggccagagccccagtgagtgcccacggaggcccccagcacacccaacgtggcttgatcacctgcctgtccagctctggtgggccaagaacccacccaacagaataggccagcccatgccagccggcttggcccgctgcaggcctcaggcaggcggggcccatggttggtccctgcggtgggaccggatctgggcctgcctctgagaagccctgagctaccttggggtctggggtgggtttctgggaaagtgcttccccagaacttccctggctcctggcctgtgagtggtgccacaggggcaccccagctgagcccctcaccgggaaggaggagacccccgtgggcacgtgtccacttttaatcaggggacagggctctctaataaagctgctggcagtgcccaggacggtgtcttcgtggcctgggcttggtggtgggagttgagggacagggagttggcagaggcccctcccagcctgccatgtgacactgtacttcctccacggtgggctcagccctgccctcatcctcacagccgcagccaagctgcagttggtaggggatccaccgacacaccaggctgcctgggctggtctctgggttgggagctgccccaggtgctgaggagggcagctccctggctggtgaggcccctcccagaaccacccttggactgagctctggggagggatggtaccaggtgggtgaggggggctgcctggggagggaggggttcctatggggcgtggcgaggctggcccagccctctccccgcccatatatgtagggcagcagcaggatgggcttctggacttgggcggcccctccgcaggcggaccgggggcaaaggaggtggcatgtcggtcaggcacagcagggtcctgtgtccgcgctgagccgcgctctccctgctccagcaaggaccatgagggcgctggaggggccaggcctgtcgctgctgtgcctggtgttggcgctgcctgccctgctgccggtgccggctgtacgcggagtggcagaaacacccacctacccctggcgggacgcagagacaggggagcggctggtgtgcgcccagtgccccccaggcacctttgtgcagcggccgtgccgccgagacagccccacgacgtgtggcccgtgtccaccgcgccactacacgcagttctggaactacctagagcgctgccgctactgcaacgtcctctgcggggagcgtgaggaggaggcacgggcttgccacgccacccacaaccgtgcctgccgctgccgcaccggcttcttcgcgcacgctggtttctgcttggagcacgcatcgtgtccacctggtgccggcgtgattgccccgggtgagagctgggcgaggggaggggcccccaggagtggtggccggaggtgtggcaggggtcaggttgctggtcccagccttgcaccctgagctaggacaccagttcccctgaccctgttcttccctcctggctgcaggcacccccagccagaacacgcagtgccagccgtgccccccaggcaccttctcagccagcagctccagctcagagcagtgccagccccaccgcaactgcacggccctgggcctggccctcaatgtgccaggctcttcctcccatgacaccctgtgcaccagctgcactggcttccccctcagcaccagggtaccaggtgagccagaggcctgagggggcagcacactgcaggccaggcccacttgtgccctcactcctgcccctgcacgtgcatctagcctgaggcatgccagctggctctgggaaggggccacagtggatttgaggggtcaggggtccctccactagatccccaccaagtctgccctctcaggggtggctgagaatttggatctgagccagggcaca

SEQ ID NO: 3709 - DNA, 6000 bp, Homo sapiens
acctggctaatttttgggggtagagacaaggtctcactgtgttgcccaggctgctctcaaactcctgggctcaagtgatcttcccaccttaccaccctgtcctcctaaggcgctggaattacaggcatgagccactgcatccagccaaaataaatatgtttaaaagaaaacttaagatccaggacaagaaagattcatggggtcttaaaaatgattatcaagtgttaattccaacagagacactcccagcagatggctgctcagaggcggttcatgtgtgaacactcctcagggagcacttaggaagggccaggcacagaggtatgggaagggagtcatgccctgtctccactgccaggtggctctgagtccagtgcatggagctgggcacatacaaagagaaccccgttatcagtcggaacacagagcagggtaggtgaccacccagggcaattcctcccgagcgtggccagtaccctggcctctcactaatccaagagggccttaactccaattcaccccaggacagacagccaagccacagcaccttggtaagctcagccctgagctcctcctcctcagcctctgtcagaccctcaacagcaggagtccgggcagccacacctgtgtcgacaggaacatccgtcatggagtcagacagcagacctttgttaggagaattcaggttgatatctgccagagacaaaatgaggccacaaagtgtcaaataagttagttccaagtaaatacggtagaggtctctagcaggacaaaagcacaggtgggagtgggtgagaccctggagactaacacctcttctctgaaaggtctgtgaggacagcatgggcagtagacgagggcagccacacctcagaccacctgagctgaaaagccaatgccacttgtgctgcttcagggcacgacaaatgccggcccaaggcaggcaaacccgaattctggcttcccagtgagaatactatcgtcagaggcaggaaacccttgctacagagaaagcagctcaatctaacagaccttccaccttttttttttgatggagtctcactctgcctcccaagctggagtgcaatggtgcgatctcagctcactgcaacctccgtctcccgggttcaagtgattctcctgtctcagccttcgagtagctgggattacaggcgcacgccaccacgctggctatttttgtattttcagtagagacggggtttcgtcatgtcggccaggctggtctccaattcccgacctcgggtgatccgcccgccttggcctcccaaagtgttgggattacaggtgtgagccaccataccctgacaaatttccactttttttaaaaaaaggaacctaatatggttaatatacacaataagcatcactttcctctcaacacatctgacagagcacatgctaaaattacgtactaggagcacatgctgctcattcagctccttcagggaggcagcaaaacaaaattccctttacttacctcccgattctcatcccactgccagaaggccgccagcaggcagagaggtgcagagcggtgtgctgccaccacacacctcaactacacccagatcacattcaaattcctgcagccactgttttttcttcatgtcaaatgcatcttcctgactaccctaaaagtctacaagatttcacataaagaaaaacagtctatttcgattctctccaaatccaagcacatgactattgtaacactttccctgttgaccaaaacattctgaaaagaaacaggcttactgccaggcgcagtggctcatgcctataatcccagcacttttggaggccgaggcaggtggatcacatgaggtcaggagttcgagaccagcttgaccaaaatggtgaaaccccgtctctactaaaaatacaaaattagttagcgtggtggcacgcgcctgtagttcccagctacttgggaggctgaggcaggagaatcacttgaacccgggagattacaggcgttgagccaccacgcgcggccaaaaaaaaattctttaaaaaaaaaaagaaaaactggtcgggcggggtggctcatgccggtaatcccagcactttgggaggctgaggcgggcggatcacctgaggtcaggagttcaagaccagcctggccaatatggtgaaaccccgtctcttttttttgagactgtctcaaaaaaaaaaaacaaaagaaaagaaaaagaaaaaaaaactatgccttttaaaagacaacacaaagacaccagattaaatgcacttaacaaagatactcttcttaaaagctggctgcatctcactcccttcaaatgtcccataggactggagccgtgtgcacttccttggcgctccacaaacgcttactaaacgaagcgtatccacttttttatccactgattctcttttttttttttttagacgagtcttactctgtcacccaggctggagtgcagtggcacgatctccgctcactgcaacctccacctcctgggttcaatcgattctcctgcctcagcctcccaagtagctgggactacaggagcacaccaccatgcccggttaatttttttatttttagtagagacggggttttggcacgttggttaggctggtctcaaactcctgacctcaagtgatccactggcctcggcctcccaatgtgttagaattacaggcgtaagccaccgagcccagcctttctgttctatttaaaaaaagacaaatgaggctgggcacaatggctcacacctgtaatcccagcacttttggaggccaaggcgggcagatcacctgaggtcagaagttcgagaccagcttgaccaacatggagaaacctccatctctactaaaaatacaaaattagccgggcatggtggcgcacgcctgtaatgccagctacacgggaggctgaggcaggagaatcgcttgaacccagaaggcagaggttgcgggaagccatgatcgcgccattgtactgcagcgtgggcaacaagagcgaaaatccgtctcaaaaaaaaaaaaaaaagtagaaagaccaattaacctggcatggtgcgcctgtagtcttatagtcccagctacctgggaggctgacgcaggaagatcgcttgagcccaggagttgaagattgcagtaagctatgattgcaccactgcactccagcctgggagacagagggagacgctgtccccaaaaaaaaaattaaaaaaaaaaaaaaaaaaggccaggcgcggtggctcacgcctgtaatcccagcactttgggaggccgaggtaagcagatcacgaggtcagggtatcaagaccgtcatggctaacagtgaaaccccgtctctactaaagatacaaaaaattagccgggcatgatggcgggcgcctgtagtcccagctagttgggaggctgaagcaggagaatggcagtgaacccgggaggcggagcttgcagtgagccgagatctagccactgcgctccagcctgggcgacagagtgagactccatctcaaaaaaacaaaaacaaacaaacaaaaaacaccctccagaataatgcagcacctaggaattataaagcttaatatgtagccgggcacagtggctcacgcctgtaatcccagcactttgggaggctgaggcgggcggatcacaaggtcaagagatcgagaccatcctgggcaacatggtgaaaccctgcctctactaaaaatacaaaaattagctgggcctggtggcgcgtgcctgtagtcccagctactcaggaggctgaggcagcagaatcgcttgaacccgggaggtcgaggttgcaatgagctgagatcgcgccactgcactccagcctggcgtcagagcaagactccgtctcaaaaaaataaagaaagaaagaaagaaagaaagaaatttagcatccctctctagagccccaaaatgcaaggcagacttttatcatcttctcaagattttaatctcctgggctcgctccacgcccctcagtggccatctcatactgctctggggagactgttctggaaacaggcctggtatgctgggtgtgcccctgactcactccaccccctctccatgaggcaacccctaagcaggctgagctccgagcagagttgctgcccaaggggagctctgctgaacgcgaagaccccttctctgctcgggagccgccctcaacacctcggactgggtccagggccagacagcgtgaacccgagggccccgcgcagggaccggggggtggcagagcaagcaagagcagggcacggggtgggcggcataagcgagacctgctgggagcgacagaacccaaactacgggagcaacggcgggcgccagggaaccacacctcggaacggtcccaggggagaccaggagggcggctggagagagcccaggaagcggtctgggccgcgggcaaaaaacacaccacgaccatcataagcttcgaggtcagtggccccgggagctgaagaggggccgcggggtgggtgaaccgagaccgagaggacagagagtcgcagacgcgaccccgggagacggagaacaacgggcagcctgggcccatctgcggcgaaggggccgggcccggcaggtaccttggccggcggagtccatgttcgggcggcgtccggaccgctgtcgcgggcgctatgggagccgagcgggcggcgccgggagaagctcgccgcgtacacactagccagcggaactgcctcagctccgcggcgtttcgtaatccgcgatgcgacggctacttccgcccgggcacgtgctccgccttcttcccgcccccaccagtgatatccaatgagagtgccgcttggcccgtcctggtttacccgactcaacctgataggccgaaactgcgggcgaaccaggaaagggaggcgtggttcggcgggaatccattccaggttgactccaccagcgagaatcacaggtagaacggtcagagtagcgggaggactgggaaggtgggaagtgggaggaccgtccaacatggcgctgtggaaagccagcgcagggccccaggggatcttccggggcggatgcagctgcctaggagtgctggggctcgcgcgcctcggcggctcaaactctgaccccttgagatcctttccagcccgaccccttactttaggggtcagcctgcccccgtaagtcctgttatttattgtatttatattctttttttagttggtccttttttgtttgtttttgagacggagtttcactcttgttgcccaggctggagtgccatggcgcgatctcagctcactccaatctctgccctccgggttcaagcgattctccagcctcagcctcccgagtagctggaattacaggcgcgcgccaacacgtccggctaattttcgtatttgtagtagagacgggggtttcgccaccttggccaggctggtctagaactcctgaccttaggtgatccacccgcctcggcctcctaaagtgctgggattacaggcgtgagccaccgcccctcacgcctggctagtttgtccttttcatggggactttttattgtacgcgggttactctgaaaaagatcgcgattcgtcccctcgccctgcaggcgccgctgccgcctcgcctcgggcgtggaccctgcggctcgggcctgcgcgtgtgcaccccgaggttgtctcacttcctgttcagggcgaccagcgctgcgccctccccactccacagatgaggaagctgaggttaaagtcacttgccccaggtcactccgcaagttgaagcgcaaccaggatactctggaacaggatgcctgacttcagaggagaggcgcgtaaccaccaggcaactggccccacgaaaacaagtcccgcaacttcccttctttggctcctacttgctcccggaagaaaagccttaaacggtattcaagccctttaggatctgatgtcctaggactccactctgggcttccagcctggggtggtactggtccctaggcatggaagctcc

SEQ ID NO: 3710 - DNA, 6000 bp, Homo sapiens
agcagctgactcccccaactaggggcggggcctgttagggtcaggcagtgcctctaacccagacgctgagcaggagagcagagagggggtgcttcagcctgaaactaccccttccccagaaggctggggtcccaggcgggcctggcacctgggctcagaggctctggctggatttgccaaactccctgattgtagcatgtttgtttctggtctggggagctgttgagtacctggagctgccctcttccctggggctcctcctggcaggcggcttccgaccctgccctcaggtgggctggccctttccagggcaggagaaaagatacctctccagaaaagagggaggcgcagcctgggagtgggggctcgacccaggagcgagaaagaggaaccccagccaggcaggacccgccccagaaggtcactgctgttgctggcagccagtgaaaagaggatccagaaaaggagagggcttgtttctggtcagcaccgaagaaggaaggtgtggagaggaggggccgggccgagagcaaataccgcctttttggtgcagcagcagccctgtctctgaccccggccgtcctggggagatgaggtttaaaccagcagaccctgaagggaaacttgcaggacccacagcaagcctggtacaggcggaggaggccttgctgtccctttttggcccgtggggctgtccatcttaaatttaaggaagagggaggcggggtgcagggactcacacctgtaatcccaacactgtgggaggtggaggcggggtgcagggactcacacctgtaatcccaacactgtgggaggtggaggcgggaggatcgcttgagcccaggggttcaagaccagcctaggcagcatagtgagaccccatctcaatttaataaataaataaggaagaaagagggagacagtagctgctcaaatcatgggtgggaaagctgggcctgggagcgtttagctggtggggtcttggcgaaggcgggggacgggcagaaccttgggttcatcatctctgggaaccctttgtgcacccatcacctagcaacaggatgcagccttccctccgccctggaaggccaggtcacaaaggccatcagggcttgtccgggagccggtatcccctaagactgccctgtgcctctcgcggcgatcccggcccagcggctgggcgttagggccaccgctcatgtgcgtcatctgcttcgtgaaggcgctggtgcgcgtgttcaagatctacctgaccgccagctacacctacccattccgcggctggcccgtggccttccgctgggatgacgtgcgcgccgtgggccggagcagcagccaccgggcgctgacctgcgcggcagccgcggcgggcgtgtggttgctgcgggacgagacgctgggcggggatgcgctggggcggcctccacgtggggcgcgcagccaggcgcagtgcctcttgcagcagctccgcgagctgcccggccagctcgctagctacgcgctggcccactcgctgggccgctggctcgtgtaccccggctccgtgtccctgatgacgcgcgcgctgctgccgctgctgcagcagggccaagagcgcctcgtggagcgctaccacggccggcgcgccaagctggtggcctgtgacggcaacgagatcgacactatgttcatggaccgccgccagcacccgggcagccacgtgcacgggccgcgcctcgtcatctgctgcgaaggcaacgcgggcttctacgagatgggctgtctgtctgcaccgctcgaggccggctactccgtgctgggctggaaccaccccggcttcggcagcagcactggcgtgcccttccctcagcacgacgccaacgccatggacgtggtggtcgagtacgcactgcaccgcctgcacttcccgcccgcgcacctggtggtctacggctggtctgttggcggcttcacggccacctgggccaccatgacctacccggagctgggtgcactggtgctggacgccaccttcgacgaccttgtgccgctggcgctgaaggtcatgccccacagttggaaggggctggtggtgcgcaccgtgcgcgagcacttcaacctcaacgtggccgagcagctgtgctgctacccggggccggtgctgctgctccgacgcacgcaggatgacgtggtcagcacttcgggccgcctgcgccccctgtcacctggtgacgtggagggcaaccggggcaatgagctgctgctgcgcctgctggagcaccgctaccccgtcgtgatggcgcgagagggccgcgccgtcgtcacccgctggctgcgcgctggcagcttggcgcaggaggccgccttctatgcacgctaccgcgtggacgaggactggtgcctggcgctgctgcgctcctaccgtgcacgctgcgaagaggagctggagggcgaggaggccctggggccacacggacccgccttcccatggctggtgggccagggcctgagctcgcggcggcgccggcgcctcgcactgttcctggctcggaagcacctcaagaacgtggaggcgactcacttcagccctctggagcctgaggagtttcagttgccctggcggctgtaacctatatgccccagtgggggatcacgcacttgaactcctggccttcttggttcacctccccataccgccaaccattgcagggggccggcgccgacgcggggcggggcgggggggggcgcgcggggtgctcctgatctgctgtctgggggagggtaggcagaacacggggacttggtgctctccttccttcacaggggcgttctgaccgtcctcccattcttcctagctctgtcccctcctttctctcttcctcctacaaatacttttggctgcccccacccagctcctaagggaatgaaaggttaacctgacccggtttatggcaatactgtgtgatgggtgccttgatcaccacaaaaggatgatgggaacggggctgtggggtcccagggaggagcccttcacctggcctgggttacaggatggctcctgggaagacaatgccagctgtgcgctgaaagtctgtgcaagctgctcccgtgaaaaggaggacattggcatggcagggctgtgggcaggtcttagtggctggacattcccaggagttagcactggctatcattctgtagggctccctcccacctccaaactcctggcttctacaccagggcattcacagacagattgcagactcacatggtggcatgtgaggctacagatacacttgcacaggccagaggatactactgcgtgtcccctggagccaggcctgggctggactttgttcctggcttagggatgcaacacagaatgggacaaggcctctgctcacaatggtctgtaatgtcacatctctgtggtctgccctgaactgcctgaagcagggactattgtccctacatgtccctagtccccgggctggcctggttgggttgagcaagaatctctggaaagaatgaaaggcagcaaatggagaaaacattactgagagcacgagagcaggctaaggccgtggtggtaagggactcgggcctgtgcaagagtaccaggaagacacctgtgggaggaggtggccgggtgaaggaaggggcagtgggaggagcttccatgcctagggaccagtaccaccccaggctggaagcccagagtggagtcctaggacatcagatcctaaagggcttgaataccgtttaaggcttttcttccgggagcaagtaggagccaaagaagggaagttgcgggacttgttttcgtggggccagttgcctggtggttacgcgcctctcctctgaagtcaggcatcctgttccagagtatcctggttgcgcttcaacttgcggagtgacctggggcaagtgactttaacctcagcttcctcatctgtggagtggggagggcgcagcgctggtcgccctgaacaggaagtgagacaacctcggggtgcacacgcgcaggcccgagccgcagggtccacgcccgaggcgaggcggcagcggcgcctgcagggcgaggggacgaatcgcgatctttttcagagtaacccgcgtacaataaaaagtccccatgaaaaggacaaactagccaggcgtgaggggcggtggctcacgcctgtaatcccagcactttaggaggccgaggcgggtggatcacctaaggtcaggagttctagaccagcctggccaaggtggcgaaacccccgtctctactacaaatacgaaaattagccggacgtgttggcgcgcgcctgtaattccagctactcgggaggctgaggctggagaatcgcttgaacccggagggcagagattggagtgagctgagatcgcgccatggcactccagcctgggcaacaagagtgaaactccgtctcaaaaacaaacaaaaaaggaccaactaaaaaaagaatataaatacaataaataacaggacttacgggggcaggctgacccctaaagtaaggggtcgggctggaaaggatctcaaggggtcagagtttgagccgccgaggcgcgcgagccccagcactcctaggcagctgcatccgccccggaagatcccctggggccctgcgctggctttccacagcgccatgttggacggtcctcccacttcccaccttcccagtcctcccgctactctgaccgttctacctgtgattctcgctggtggagtcaacctggaatggattcccgccgaaccacgcctccctttcctggttcgcccgcagtttcggcctatcaggttgagtcgggtaaaccaggacgggccaagcggcactctcattggatatcactggtgggggcgggaagaaggcggagcacgtgcccgggcggaagtagccgtcgcatcgcggattacgaaacgccgcggagctgaggcagttccgctggctagtgtgtacgcggcgagcttctcccggcgccgcccgctcggctcccatagcgcccgcgacagcggtccggacgccgcccgaacatggactccgccggccaaggtacctgccgggcccggccccttcgccgcagatgggcccaggctgcccgttgttctccgtctcccggggtcgcgtctgcgactctctgtcctctcggtctcggttcacccaccccgcggcccctcttcagctcccggggccactgacctcgaagcttatgatggtcgtggtgtgttttttgcccgcggcccagaccgcttcctgggctctctccagccgccctcctggtctcccctgggaccgttccgaggtgtggttccctggcgcccgccgttgctcccgtagtttgggttctgtcgctcccagcaggtctcgcttatgccgcccaccccgtgccctgctcttgcttgctctgccaccccccggtccctgcgcggggccctcgggttcacgctgtctggccctggacccagtccgaggtgttgagggcggctcccgagcagagaaggggtcttcgcgttcagcagagctccccttgggcagcaactctgctcggagctcagcctgcttaggggttgcctcatggagagggggtggagtgagtcaggggcacacccagcataccaggcctgtttccagaacagtctccccagagcagtatgagatggccactgaggggcgtggagcgagcccaggagattaaaatcttgagaagatgataaaagtctgccttgcattttggggctctagagagggatgctaaatttctttctttctttctttctttctttatttttttgagacggagtcttgctctgacgccaggctggagtgcagtggcgcgatctcagctcattgcaacctcgacctcccgggttcaagcgattctgctgcctcagcctcctgagtagctgggactacaggcacgcgccaccaggcccagctaatttttgtatttttagtagaggcagggtttcaccatgttgcccaggatggtctcgatctcttgaccttgtga

SEQ ID NO: 3711 - DNA, 6000 bp, Homo sapiens
ggcagggaggcacgcgcctgtaatcccagatattcgggaggctgaggcaggagaatcgcttgaacctgggaggcggagattgcagcgagccgagatcacaccattgcactccagcctgggcgacagggcgagactctgtctccaaaaaaaaaaaacaaaccccatctcgactaaaaacacaaaaaaattagccgggcgtggtggtgggcgcctgtagtcccagctactcaggaggctgaggcaggagaatggcgtgaacccgggtgttggaggttgcagtgagccgagattgcgccactgcactccagcctgggcggcagagactccgactcaaaaaaaaaaaaaaaaaaaaaaaaacttcaccttattgtaattcaactctgaaaaaaaccttgtggatttagtttctaaactcacatattctgaagttaaatggaaagcaaagtgtccttggacttcctgctactctcctttaatcttctaggctagaaatagctgtgtgatgtcctcaggatctgaaacctggtcctcagactcagcggcacaaccaaccttactcagacctaggcctggacccagattctggaattaaaccacatcacagggtgaaaagaaaactcttggcagttggtttgactaaaaattatggttggaggcttttgttcttaattcctacattactcttaagggactctcacttaaagaagatcacataaatactttttagaaaagaagtttttgttttgtttttgagacagggtctcgccctgtcacccaggctgctgtgcaggatgcaatcacagctcactgaagccttgacctcctggcctcaagcaatcctctcacctcagcctcctgagtagctgggactacaggcacatgccaccacacctggctaatttttgggggtagagacaaggtctcactgtgttgcccaggctgctctcaaactcctgggctcaagtgatcttcccaccttaccaccctgtcctcctaaggcgctggaattacaggcatgagccactgcatccagccaaaataaatatgtttaaaagaaaacttaagatccaggacaagaaagattcatggggtcttaaaaatgattatcaagtgttaattccaacagagacactcccagcagatggctgctcagaggcggttcatgtgtgaacactcctcagggagcacttaggaagggccaggcacagaggtatgggaagggagtcatgccctgtctccactgccaggtggctctgagtccagtgcatggagctgggcacatacaaagagaaccccgttatcagtcggaacacagagcagggtaggtgaccacccagggcaattcctcccgagcgtggccagtaccctggcctctcactaatccaagagggccttaactccaattcaccccaggacagacagccaagccacagcaccttggtaagctcagccctgagctcctcctcctcagcctctgtcagaccctcaacagcaggagtccgggcagccacacctgtgtcgacaggaacatccgtcatggagtcagacagcagacctttgttaggagaattcaggttgatatctgccagagacaaaatgaggccacaaagtgtcaaataagttagttccaagtaaatacggtagaggtctctagcaggacaaaagcacaggtgggagtgggtgagaccctggagactaacacctcttctctgaaaggtctgtgaggacagcatgggcagtagacgagggcagccacacctcagaccacctgagctgaaaagccaatgccacttgtgctgcttcagggcacgacaaatgccggcccaaggcaggcaaacccgaattctggcttcccagtgagaatactatcgtcagaggcaggaaacccttgctacagagaaagcagctcaatctaacagaccttccaccttttttttttgatggagtctcactctgcctcccaagctggagtgcaatggtgcgatctcagctcactgcaacctccgtctcccgggttcaagtgattctcctgtctcagccttcgagtagctgggattacaggcgcacgccaccacgctggctatttttgtattttcagtagagacggggtttcgtcatgtcggccaggctggtctccaattcccgacctcgggtgatccgcccgccttggcctcccaaagtgttgggattacaggtgtgagccaccataccctgacaaatttccactttttttaaaaaaaggaacctaatatggttaatatacacaataagcatcactttcctctcaacacatctgacagagcacatgctaaaattacgtactaggagcacatgctgctcattcagctccttcagggaggcagcaaaacaaaattccctttacttacctcccgattctcatcccactgccagaaggccgccagcaggcagagaggtgcagagcggtgtgctgccaccacacacctcaactacacccagatcacattcaaattcctgcagccactgttttttcttcatgtcaaatgcatcttcctgactaccctaaaagtctacaagatttcacataaagaaaaacagtctatttcgattctctccaaatccaagcacatgactattgtaacactttccctgttgaccaaaacattctgaaaagaaacaggcttactgccaggcgcagtggctcatgcctataatcccagcacttttggaggccgaggcaggtggatcacatgaggtcaggagttcgagaccagcttgaccaaaatggtgaaaccccgtctctactaaaaatacaaaattagttagcgtggtggcacgcgcctgtagttcccagctacttgggaggctgaggcaggagaatcacttgaacccgggagattacaggcgttgagccaccacgcgcggccaaaaaaaaattctttaaaaaaaaaaagaaaaactggtcgggcggggtggctcatgccggtaatcccagcactttgggaggctgaggcgggcggatcacctgaggtcaggagttcaagaccagcctggccaatatggtgaaaccccgtctcttttttttgagactgtctcaaaaaaaaaaaacaaaagaaaagaaaaagaaaaaaaaactatgccttttaaaagacaacacaaagacaccagattaaatgcacttaacaaagatactcttcttaaaagctggctgcatctcactcccttcaaatgtcccataggactggagccgtgtgcacttccttggcgctccacaaacgcttactaaacgaagcgtatccacttttttatccactgattctcttttttttttttttagacgagtcttactctgtcacccaggctggagtgcagtggcacgatctccgctcactgcaacctccacctcctgggttcaatcgattctcctgcctcagcctcccaagtagctgggactacaggagcacaccaccatgcccggttaatttttttatttttagtagagacggggttttggcacgttggttaggctggtctcaaactcctgacctcaagtgatccactggcctcggcctcccaatgtgttagaattacaggcgtaagccaccgagcccagcctttctgttctatttaaaaaaagacaaatgaggctgggcacaatggctcacacctgtaatcccagcacttttggaggccaaggcgggcagatcacctgaggtcagaagttcgagaccagcttgaccaacatggagaaacctccatctctactaaaaatacaaaattagccgggcatggtggcgcacgcctgtaatgccagctacacgggaggctgaggcaggagaatcgcttgaacccagaaggcagaggttgcgggaagccatgatcgcgccattgtactgcagcgtgggcaacaagagcgaaaatccgtctcaaaaaaaaaaaaaaaagtagaaagaccaattaacctggcatggtgcgcctgtagtcttatagtcccagctacctgggaggctgacgcaggaagatcgcttgagcccaggagttgaagattgcagtaagctatgattgcaccactgcactccagcctgggagacagagggagacgctgtccccaaaaaaaaaattaaaaaaaaaaaaaaaaaaggccaggcgcggtggctcacgcctgtaatcccagcactttgggaggccgaggtaagcagatcacgaggtcagggtatcaagaccgtcatggctaacagtgaaaccccgtctctactaaagatacaaaaaattagccgggcatgatggcgggcgcctgtagtcccagctagttgggaggctgaagcaggagaatggcagtgaacccgggaggcggagcttgcagtgagccgagatctagccactgcgctccagcctgggcgacagagtgagactccatctcaaaaaaacaaaaacaaacaaacaaaaaacaccctccagaataatgcagcacctaggaattataaagcttaatatgtagccgggcacagtggctcacgcctgtaatcccagcactttgggaggctgaggcgggcggatcacaaggtcaagagatcgagaccatcctgggcaacatggtgaaaccctgcctctactaaaaatacaaaaattagctgggcctggtggcgcgtgcctgtagtcccagctactcaggaggctgaggcagcagaatcgcttgaacccgggaggtcgaggttgcaatgagctgagatcgcgccactgcactccagcctggcgtcagagcaagactccgtctcaaaaaaataaagaaagaaagaaagaaagaaagaaatttagcatccctctctagagccccaaaatgcaaggcagacttttatcatcttctcaagattttaatctcctgggctcgctccacgcccctcagtggccatctcatactgctctggggagactgttctggaaacaggcctggtatgctgggtgtgcccctgactcactccaccccctctccatgaggcaacccctaagcaggctgagctccgagcagagttgctgcccaaggggagctctgctgaacgcgaagaccccttctctgctcgggagccgccctcaacacctcggactgggtccagggccagacagcgtgaacccgagggccccgcgcagggaccggggggtggcagagcaagcaagagcagggcacggggtgggcggcataagcgagacctgctgggagcgacagaacccaaactacgggagcaacggcgggcgccagggaaccacacctcggaacggtcccaggggagaccaggagggcggctggagagagcccaggaagcggtctgggccgcgggcaaaaaacacaccacgaccatcataagcttcgaggtcagtggccccgggagctgaagaggggccgcggggtgggtgaaccgagaccgagaggacagagagtcgcagacgcgaccccgggagacggagaacaacgggcagcctgggcccatctgcggcgaaggggccgggcccggcaggtaccttggccggcggagtccatgttcgggcggcgtccggaccgctgtcgcgggcgctatgggagccgagcgggcggcgccgggagaagctcgccgcgtacacactagccagcggaactgcctcagctccgcggcgtttcgtaatccgcgatgcgacggctacttccgcccgggcacgtgctccgccttcttcccgcccccaccagtgatatccaatgagagtgccgcttggcccgtcctggtttacccgactcaacctgataggccgaaactgcgggcgaaccaggaaagggaggcgtggttcggcgggaatccattccaggttgactccaccagcgagaatcacaggtagaacggtcagagtagcgggaggactgggaaggtgggaagtgggaggaccgtccaacatggcgctgtggaaagccagcgcagggccccaggggatcttccggggcggatgcagctgcctaggagtgctggggctcgcgcgcctcggcggctcaaactctga

SEQ ID NO: 3712 - DNA, 6000 bp, Homo sapiens
cactccccagcaccggccctgctccttctcgcccagcctcggcgttctgttcttgtttggttgtgtctggagagattttggagaggagctttgaaggagccagaatgaatgtatttgccaagtgtaaaccttttatttagttggagtgaattggaaatacacattacgttatctatactcccccaaaccacgtgatgttcactgcttaacactgaacaccaccacccagccgtgcttcgttgattctgtatgattttaaagtccgcaaagagtctagtgtctcccgcgctgggtttgtggttgtgtggtgtcatgggcgtctcccgcgctgggtttgtggttgtgtggcgtcatggacatggtgggaactgactcctcgcctgtgcgaggtgcgtggtcctgggttcatggcagccgtgggcctcaggaatctgtcgtcctgcgcccacggtgctttccttgaagcagtatattaaaggctaaacctaattggaaaatttcagagccttttctgactaatgcacgtgttttgagtcttctgtttgttttagggaatatcatatatttgtggtattttagggtcccacccactgggggcatgaggacgtcgctgcggttctcggtcatcgggtggggggtggacggcaaagcccagcagccactgtgagcggcgcctccgtcaggtgcaggtgattggcgttgggttccctctcatgggggctgcagaggccccatgctgctggtgccctggactgtaaacgctgggtggctctgcccactggccgggacgtcccctccctgtcagttctggcctccttggaaagtcacctccatgtgactgtgctgtgacctgaggccacgtgagtcctgccggtctcgaagtgtcggcttgggggcgtgaggctgccttggctgctggcctcgagatgcccagtggctgatagaggctttttcctatgtgttcccgcccatcagtctcctgagtgccgtgtgcttgggcgctgactctctgggttctcttcactgctgccttgtccttgccccaccctctctgtcgcctgttgtttcccggtgtgtgtctggagtgggtggtgaccgggtacctgcgtgtgactgtcataaggagcagcaccagggttgccctcctcagcgagtgcatgcctgtgtacgtggagcgtgggcccagcagcatctctgcaggccttggctggaggcattgtgctttccttgaaatggaagagtcaagagctttttggcacctaatttttttttttttttttttttgagacggagtctcaccttgtcgcccaggctggagtgcagtggcgcgatgtcagctcactgcaagctctgcctcccaggttcacaccattcttctgcctcagcctcctgagtagctgggactacaggtgcccaccactacgcccagctaattttttgtattttttagtagagatggggtttcactgtgttagccaggatggtctcaatctcctgacctcgtgatccgcccgcctcggcctcccagagtgctgggattataggcatgagccaccacacccagccagactaatgttaatgtaaataaaagacaaggtggatacacacacacgcacacgcgcacacacgcacacactgcccagcacctgttatcaccaagcacaagctgtgtttaagttgctcgacctttactgtgccctgactcccagcgggtgtgaggctgtgggtggccggccaggctcttggagtggtgtcttctgtgtcagggccctgattgacttgcacttgccattttggtggttaatttggccctttaattgcattgatgaaatgagctttttgtgccagtttgtaataaagccattgaatggcctgtgctttggaaagcctcggctagttagaagaattcctaggaattcctgatgggagagtgcgagaaagcatgtgagtccacctggtgcagttatataaaataccagcacgcacgcaaaaacccttcttttggttttggttttccctctaaactggaagtagactcaggagcgagtttttcaataagaacttaaccagcctccttgctagtatctgatgactctttcccaaaaccgactttgagcctcactcccaaagcctgatgcctgtggccctccttgacaggcaagaaagaaacatggctaggcccttccttaccatccctctgcttccccgccgcctcttccacccagcccccagaatacatgcagtgagtagctttgttgtaatcgctgcagataattttagtgtacaatacagattgttaaagggagagagaggccaggcacggtggctcacgcctgtaatcccaacactttgggagaccaaggtggtggatcacctgaggttgggagttcgagaccagcctgaccaacatggtgaaaccccgtctctactaaaaatacaaaaattagccaagtatggtggtgggtgcctgcagtcctagctacccggaggctgaggcaggagaattccttgaacccaggaggcggagattgcagtgagccgagactgcgccattgcactctatcctgggcaacaagagcaaaactctgtctcaaaaaaaaataaaaaataaagggagagagagtgtgtgtatgtgtgtgtgtttctgcagtgtgaagggaaaactcctggtctttgggtaagtagcacaggtttactcttatgattaaatacacattttatcccagttttgtcagagtactcgagagttagattgatggtcatcttagttctttctgtagccttaattccaaaggtttaagagcagctataagcacaaagtaaggttattttgtttaatagtagccatccactgtggaactagccaaccactgtggaaagaaatacttgccttaaatttcttttcttcgccgagcatcaggaagtaagtgcttatctcttaggatctgttagagttcttgtttctagtaaattttatttcagttttaaagtttaaagtggtttgacttcaaaaaaggttaagcactgtatgagagcctgcttacaatgcccgttgttgctatagcctcagtaaatcttcttataaagcttggtttgtatggctttctaagattttgtttctggttgaatgaatgaagttatgattcaagtttattttgtttcaggcctgtttaaagaagaaaacccgtatgctagatttgaaaacaactaaagcgctccagcacatcagtcccgacgcttcctgtgaggtgcacgctccgcagcccagcccagccgggagaccacgtggccattgcggtctcctgaccttggccagtgaacctgccagccttccaggacaggcggccggagagctgcccctgaaggacagtcctctcgtcttgcagactggtgaccttctattccctgttcatctctgtttctagatttagtcacttgaaataagaaatctttggggtttgggcttttttatactcttctcagtttgtgaaacgctaactgcacacgaagccgcctgacggcacccagcgctgtggctgtcattctcccagggcagaaccctgcgtttctctctgtccactaacaagcttcacacgcaacacagggaagtcggtttgacttttgtcatgaggagaactgaccagccctcatcattccccataaaaccacggacagcgtctgtgtgcgcatcttgagtcttcacacctgttgactcacacggcttttgctgatgacacggggctccagtacacagtctgataaggacttaacgtcctaacctcaattgtattaaatagcattggggaatagctaaacctttttaaaaaaatttattggattttcctccctgcttaaaagatttcaccagaaaaccttcatataaaaattcaggccctttttggacaatttttaaaatttgtatctttactagaacatgagaatctttttcccttggaagcttgaattataaatgtggtgtttggcctgcctcagcagcaccagttgactgctcgtgtgccagcggtgtggggaggacggggcaggacgctgcagctctctccagccctgttggcatcctcagtgcctgcaggcctctcgctgcctgttgggctgtctggggggtggccatttagggatcgtggggacggggtccaccccaagaagaaagaaaggcccgtccacaggcccggctctgggccacgtgccccggaagcaggtgtgtccagagtcagctgagggctctccccacaccacccagcaggcgctggtgctccttctgcctcatgggaccagtccagcttccagccgctctggctcgagggtggtctgaccacttccttctgagtgggcttctctgggagctctccagtggcactgctggacctgcccacgtttctgtaaaatcaggatacgtggctttagtaagcagaccaagcgcttcgtggcagggaaagcagcgtgcggggaagtcactgaaaagtgctgcctaaggaagtttggaaatagtccctgttccagattgccttgaattttaaaacattttgctttgggaaagtaggtcagcagcacctaagatcaaggatgcgttccattttcacacttcacagtcatgaaaactgagaagactgtcttcagcgtgaactaaagttcacaggcagatcactgatccagaacacttcaagaactcgtcaaacagctcgataagcctttttgactgtgtacatctgtaccgggaataacattcctaggctgaaatttccacaaagaatagaacctgtacccagttcttcaggctgatttccctgacctcttgggcatttgtatttgtagtaaagtattgcagagattcctaagtattttatagcagccatcaaaattggactttgtattgtttattcataaaagacacttggtaatagacttcagtgaactctgtatgaatgcagtagtgtgtgtgcaaaatccgcttcctgagcgtagggtgctgagctggcgctagggctcggttgtgaaatacagcgtagtcagcccttgcgctcagtgtagaaacccacgtctgtaaggtcggtcttcgtccatctgcttttttctgaaatacactaagagcagccacaaaactgtaacctcaaggaaaccataaagcttggagtgccttaatttttaaccagtttccaataaaacggtttactacctgcgtgtgtttagtatgctgcgtgttcctgtgttccatctcagtggtgtcgacatgaccgcttggaatgctgggaggcaggtaggcttttttgggtaaagtgggcctctgacccatcgtgggatgcctgggcagtctccagactaaatgcctgtggctgtcagaacggaccaggctgtgtcctaaaactgtgcccacgggcctgcctcgcaggggaggtcttggctgtctctgccctccacagctgccctgcgcaccgcatgccctccactcgcgctgggtgccgagggccgggggagaaggcagggctgcctcgggaagggcgaccttggcccccccgtgtgaaacgcacacctgcatgaggctcccgcgctccctgctcccctcgcgtccttccctgggtgtctccgtgccaggtttttagggagtgcccccccaccccggcccccttctgtgttgctcctgccacttcagtcctctgggacacagggttgagtccgagcagcagagtattggtatgtctgtctgtcccgtggacctgccccgcagggcccagcgtttgtggctacgagcaccagcccgtctgcggcggaaaccccctgtgctcgacccgcttccggctcattcaggaatgtgtggcaactgcagacttgcatctggaacggggagacgtgaggttgcgactcctgcccccagacacactgccatggtgctgcccccagacgcactgctatggtgtggtcttagtgcccagtatctcgtttgagaggctcatccttgtcagaaacattaggcttagaatcgtttaa

SEQ ID NO: 3713 - DNA, 6000 bp, Homo sapiens
tctgactgtggctgggtcagctctcctgtcgccctttccctggtgacacagcactctcctgagtgcttgctggggctctggggcaaccccaggaggaggtggtgtaatccacacctggcaaaggagaggacctgaggggccaactgtcaggttggcggcgggcgagggtggaagcgggacagattttccatgtagtcaccttgaagtcacatgctactaagtaaaagctgacaatcgcattttcctcaccatcttcagaacctggtgtatgatttttactgtgttttctttgtatgaaaaaagctttttaaaaatcacggtattgggcatttgaattgcttttattgaaaagagtagagtaatacattggaacggcctttgaagactgggttcgttgtcaccttgcctgtcctggtgggtatgtggcctgatgaccaagcttgtcctcaccctggtttcactctgggaactggagggaagccaccagaagaaacctggcgcccccactgagggacacggaagggcgtgtctagcagttacaccaccgtgcgctgtcgtttggtgctcataatgttcctctgtgttttaggagagcagagatgaagacaagacatgatgaaatcagaaaaaaatatggtaaggactggtcacgcctcctttttgtctggttgggaggcgatggcacgctgtctcggtcctcgttagtgccagtgtggcctgagatggggctgtgggttcacccatcggaacagaaggacgtctctccagagaggagcagctggcggttgtccccagcggttctgtggtgaactcactcctaagaatatctttatctcagccagtcgtcttcatgaagtctgttttctcagatagctgtttgcttatcgagtcccaagacttctgggctggaagtctgcagctgttctgccgtcgtgtttggcttcctgtgggcacgcctgcgtagccgaggtgctgtgagtttcagggcggccctctcatcctcgggagcgttgctcgttgccatcttctgagtgtggcaggcgctccttccaagcactccccagcaccggccctgctccttctcgcccagcctcggcgttctgttcttgtttggttgtgtctggagagattttggagaggagctttgaaggagccagaatgaatgtatttgccaagtgtaaaccttttatttagttggagtgaattggaaatacacattacgttatctatactcccccaaaccacgtgatgttcactgcttaacactgaacaccaccacccagccgtgcttcgttgattctgtatgattttaaagtccgcaaagagtctagtgtctcccgcgctgggtttgtggttgtgtggtgtcatgggcgtctcccgcgctgggtttgtggttgtgtggcgtcatggacatggtgggaactgactcctcgcctgtgcgaggtgcgtggtcctgggttcatggcagccgtgggcctcaggaatctgtcgtcctgcgcccacggtgctttccttgaagcagtatattaaaggctaaacctaattggaaaatttcagagccttttctgactaatgcacgtgttttgagtcttctgtttgttttagggaatatcatatatttgtggtattttagggtcccacccactgggggcatgaggacgtcgctgcggttctcggtcatcgggtggggggtggacggcaaagcccagcagccactgtgagcggcgcctccgtcaggtgcaggtgattggcgttgggttccctctcatgggggctgcagaggccccatgctgctggtgccctggactgtaaacgctgggtggctctgcccactggccgggacgtcccctccctgtcagttctggcctccttggaaagtcacctccatgtgactgtgctgtgacctgaggccacgtgagtcctgccggtctcgaagtgtcggcttgggggcgtgaggctgccttggctgctggcctcgagatgcccagtggctgatagaggctttttcctatgtgttcccgcccatcagtctcctgagtgccgtgtgcttgggcgctgactctctgggttctcttcactgctgccttgtccttgccccaccctctctgtcgcctgttgtttcccggtgtgtgtctggagtgggtggtgaccgggtacctgcgtgtgactgtcataaggagcagcaccagggttgccctcctcagcgagtgcatgcctgtgtacgtggagcgtgggcccagcagcatctctgcaggccttggctggaggcattgtgctttccttgaaatggaagagtcaagagctttttggcacctaatttttttttttttttttttttgagacggagtctcaccttgtcgcccaggctggagtgcagtggcgcgatgtcagctcactgcaagctctgcctcccaggttcacaccattcttctgcctcagcctcctgagtagctgggactacaggtgcccaccactacgcccagctaattttttgtattttttagtagagatggggtttcactgtgttagccaggatggtctcaatctcctgacctcgtgatccgcccgcctcggcctcccagagtgctgggattataggcatgagccaccacacccagccagactaatgttaatgtaaataaaagacaaggtggatacacacacacgcacacgcgcacacacgcacacactgcccagcacctgttatcaccaagcacaagctgtgtttaagttgctcgacctttactgtgccctgactcccagcgggtgtgaggctgtgggtggccggccaggctcttggagtggtgtcttctgtgtcagggccctgattgacttgcacttgccattttggtggttaatttggccctttaattgcattgatgaaatgagctttttgtgccagtttgtaataaagccattgaatggcctgtgctttggaaagcctcggctagttagaagaattcctaggaattcctgatgggagagtgcgagaaagcatgtgagtccacctggtgcagttatataaaataccagcacgcacgcaaaaacccttcttttggttttggttttccctctaaactggaagtagactcaggagcgagtttttcaataagaacttaaccagcctccttgctagtatctgatgactctttcccaaaaccgactttgagcctcactcccaaagcctgatgcctgtggccctccttgacaggcaagaaagaaacatggctaggcccttccttaccatccctctgcttccccgccgcctcttccacccagcccccagaatacatgcagtgagtagctttgttgtaatcgctgcagataattttagtgtacaatacagattgttaaagggagagagaggccaggcacggtggctcacgcctgtaatcccaacactttgggagaccaaggtggtggatcacctgaggttgggagttcgagaccagcctgaccaacatggtgaaaccccgtctctactaaaaatacaaaaattagccaagtatggtggtgggtgcctgcagtcctagctacccggaggctgaggcaggagaattccttgaacccaggaggcggagattgcagtgagccgagactgcgccattgcactctatcctgggcaacaagagcaaaactctgtctcaaaaaaaaataaaaaataaagggagagagagtgtgtgtatgtgtgtgtgtttctgcagtgtgaagggaaaactcctggtctttgggtaagtagcacaggtttactcttatgattaaatacacattttatcccagttttgtcagagtactcgagagttagattgatggtcatcttagttctttctgtagccttaattccaaaggtttaagagcagctataagcacaaagtaaggttattttgtttaatagtagccatccactgtggaactagccaaccactgtggaaagaaatacttgccttaaatttcttttcttcgccgagcatcaggaagtaagtgcttatctcttaggatctgttagagttcttgtttctagtaaattttatttcagttttaaagtttaaagtggtttgacttcaaaaaaggttaagcactgtatgagagcctgcttacaatgcccgttgttgctatagcctcagtaaatcttcttataaagcttggtttgtatggctttctaagattttgtttctggttgaatgaatgaagttatgattcaagtttattttgtttcaggcctgtttaaagaagaaaacccgtatgctagatttgaaaacaactaaagcgctccagcacatcagtcccgacgcttcctgtgaggtgcacgctccgcagcccagcccagccgggagaccacgtggccattgcggtctcctgaccttggccagtgaacctgccagccttccaggacaggcggccggagagctgcccctgaaggacagtcctctcgtcttgcagactggtgaccttctattccctgttcatctctgtttctagatttagtcacttgaaataagaaatctttggggtttgggcttttttatactcttctcagtttgtgaaacgctaactgcacacgaagccgcctgacggcacccagcgctgtggctgtcattctcccagggcagaaccctgcgtttctctctgtccactaacaagcttcacacgcaacacagggaagtcggtttgacttttgtcatgaggagaactgaccagccctcatcattccccataaaaccacggacagcgtctgtgtgcgcatcttgagtcttcacacctgttgactcacacggcttttgctgatgacacggggctccagtacacagtctgataaggacttaacgtcctaacctcaattgtattaaatagcattggggaatagctaaacctttttaaaaaaatttattggattttcctccctgcttaaaagatttcaccagaaaaccttcatataaaaattcaggccctttttggacaatttttaaaatttgtatctttactagaacatgagaatctttttcccttggaagcttgaattataaatgtggtgtttggcctgcctcagcagcaccagttgactgctcgtgtgccagcggtgtggggaggacggggcaggacgctgcagctctctccagccctgttggcatcctcagtgcctgcaggcctctcgctgcctgttgggctgtctggggggtggccatttagggatcgtggggacggggtccaccccaagaagaaagaaaggcccgtccacaggcccggctctgggccacgtgccccggaagcaggtgtgtccagagtcagctgagggctctccccacaccacccagcaggcgctggtgctccttctgcctcatgggaccagtccagcttccagccgctctggctcgagggtggtctgaccacttccttctgagtgggcttctctgggagctctccagtggcactgctggacctgcccacgtttctgtaaaatcaggatacgtggctttagtaagcagaccaagcgcttcgtggcagggaaagcagcgtgcggggaagtcactgaaaagtgctgcctaaggaagtttggaaatagtccctgttccagattgccttgaattttaaaacattttgctttgggaaagtaggtcagcagcacctaagatcaaggatgcgttccattttcacacttcacagtcatgaaaactgagaagactgtcttcagcgtgaactaaagttcacaggcagatcactgatccagaacacttcaagaactcgtcaaacagctcgataagcctttttgactgtgtacatctgtaccgggaataacattcctaggctgaaatttccacaaagaatagaacctgtacccagttcttcaggctgatttccctgacctcttgggcatttgtatttgtagtaaagtattgcagagattcctaagtattttatagcagccatcaaaattggactttgtattgtttattcataaaagacacttggtaatagacttcagtgaactctgtatgaatgcag

SEQ ID NO: 3714 - DNA, 6000 bp, Homo sapiens
gtaggcagtcagcttggttgcatgttggaagttactcatgcagtcgctcttgcttctgactggcttgagttccagagctgttggctgcgtggagtttgaccccttccttagtagcagcgctttgagtagtgggcagagtctcagggtgttctgtgtggttggagcaggctggtgtgccgggcctctcccttggtacaggttggtacagggagcatagcccagtctggagtgaggctaccaggggactaagaccttgctttgtcacatgagatctgtaggtgagtccaaagacacaagtgtgctgcgtggcagtgtcgctggcgttgctgtggcctcggatggaggctcttgggttcccaaaagagtgcctgctgatgagcagaaggtcccagcaggtttgtggttagtgattacacagccacagggcacacttcctctcacagagagatctgaaacacagccttctgtgttggcactcttctctcccagaagagcccttgtggataggagccgcatgtttatactctttgtgccctgcctgcagcggggttcctgaacactcgttccacatgtcttgaagaaggcttgttatcagcaggggctcaggaagaggaccttcatttggtaattccacatcagaggttcttggtgccacacccctcactggtgcccaccctgccctgctggactaatatttacactgcctgattctcagtgactgacttgtctcttgcctctttcctgcagcttgttctcagaacacaaacaaaacctgtgaagagtgcctgaagaacgtctccgtaagtagcacgtggactagagaccagagtgccgtccagaccgtccaaaggcacacgggctttctctaggtccagggattcgctgggatgtgtggagggctctgttgtttgggatttggggggatgttttttggaatcgttatcaaatgttattttagccatttcaggtatattaaaccttctcatgaaaactgcagttactgtctgagcatggtcagtatccatgatttcactcctatgcagatggggccagcactgcgtggccagtcttcctaacgaggcccatagcgagaaatttggctgtccgcaaagctacaccctcaggttgtgagcccgtgttttcccaggctgtcgggctgcagcagagactgctttctcagctgctcacacaggattggaaggggcacagcaaggagagagaggcaccagccctctgggccggtgggccaggctgtccatagcactctctggtcgtgacctggggctcaggtttggattttaactacctgtgtgaccttcaacaagagggtagcggtctggagcaaagttccctaagcctccacggcatgaggtggggcccgagactccccggggtgccttcccgatggagactgatgcagatgcccacctggaagaaggagcacccgtggtggggaagcagcatcacagtgcaggtcttgttaaagacgtgtgaacagggctgggtgcagtggctcacgcctgtaatcccagcactttgggaggccgaggcaggtggatcacgaggtcagcagttggagaccagcctgaccaacatggtgaaaccccgtctctactaaaaatacaaaacaattagctaggcgtggtggcgggtgcctgtaatcccagctacttgagaggctgaggcaggagaatttcttgaaaccggaagtcggaggttgcagtgagccaagattgtgccactgcactctagcctgggcaacaagagcaaaaaactgtctttaaaaaacaaaaacaaaaacaaaaacgtgtgaacagggtcctttggttttctctgcgtggtggcctgcgcctgggccagcctggctggcacctcttgggcttgccttgccacgcagctcttggttcggcagcacccaagtctcctcgcagcgctatgaaatcagcacgggaaacctgagggaaggcccacggcagcgggaagtggttaggcagaaaacagcatcctgtggggcctttttcttaggattcctgatctcgcccaccccttgccccttccagtcaggagtttaccaggttttgagaactgcagggccagaggcttcctttccccggcaatgaggtttcatgatatgaggaggccgggaaagatgtattcgatgatttctattctaaggcatgagccatgttcttaaaaactcttcttcctccacgagaccgtagcgtaggtttgaggaggccgggaaagatgtattcgatgatttctattctaaggcatgagccatgttcttaaaaactcttcttcctccacgagaccgtagcgtaggttcgagacacaccctgtcagtttgtgggacttaagtggatacttgcatttgctgattaaaaattgaaagacgctgtttctgtggtttcagatcttgacattggtgatgttgaacctgctctaatgcgcctggtcctggtgcattttctagatggtgcttctttttagtctctggatttttctattggaagtcatttcagctttaaacatagctcactattgtatgtggctttgtagcctagagtgcgtttttgccatagtaccctgtgtaaccctcaccaccctgggcagggtgtggtgatgacagccatctcgtggatgaggcggctgagggacttgcccaggtcattgtggatggggccagtccagaagggctgaaggcctgactccagttctgaacccagacagggcggtgaagagggccgcttgccctacagtagctccaggcgtgtgtgggtgtgctcttgggcacacaggaggtttctggaaggaggtgtcagtgcctgggaggtctcaagaggacctgcgtgttggagcagtggctatggtgggctgtgtccacgctcctgaggccgtggcgggctgtgtgtctctgtgttgccgaggccgtggcgggctgtgtctctgctgctgaggccgtggtgggctgtgtctctgctgctgaggccgtggtgggctgtgtctctgctgctgaggccgtggtgggctgtgtctctgctgctgaggccgtggtgggctgtgtctctgtgctgctgaggccgtggcgggctgtgtgtctctgtgttgccgaggccgtggcgggctgtgtgtctgtgctgctgcctgagctgcttgctatgtgcatattacttcatcgatcagaaaagcagcacaaccaccagagaacaccgtatcctcccagtgcagtcctgtggctcatggtaccactgtcatggaaaaatggaaaatcagacatttacaacttgagccacttgaaaagggaggattagccaaaaatcgttaattgcaagcaaaacccctgaaatggaagatactcccaaatgaccagaataaacagggtttaactgttaattgttacattatgctggaaaccacttaaacacgacactaaggtggtcactgtataagtagccctgggaaagaaggcccaggggacattgtaattaatatttttttgtaatagacttttgccctaacctgggccaaaaacgccatgactttctatcctattaaaaagtcagtaacactgttaatgtggagattgggagtaacaggcagtctggacttgggtctggacttgggctggcgcatgaggtgctgccgaacggcagttcttttttttttccttttgagacggagtttcactcttgttgcccaggctggagtgcaatggtgcgatctcggctcaccgcaacctgcgcctcctgggctcaagcgattctcctgcctcagcctctggagtagctgggattacaggcatgtgccaccacgcccggcttattttgtatttttaacaaagatggggtttctccatgttggtcaggctgatcccgaacttctgacctcaggtgatccgccctcctggcctcccaaagtgctgggattacaggcgtgagccaccgtgcctgacccgaacagcagttctttcaccccttcctgtgccatctgcctgcgtgctaggctgtcccctgtcacgctcagtgcctggctcacagaccgctttcgggcctcgttgtgtactgctgtggcatgggctgggcccagctctgggctcttacacacacacacacgggtgtgatggtgttgtctccacaccactgcggcctcacacctgacgttcaaggggctcagacaagagcgtctatgaggttctctccagctgtcagtttagggcgggctgagccgtagttgcatcatctttcaagctgtgcgacttagtgcagttgtgaaggtcagaggtaggaagcatggtccttgctacagatggtgaccatgctcacccaagtccattcaacacaaactcagtgagtgcctgtgatgggccaggctgtgtcctgtgttcttgggagacttcagccagtgaagtgcacaggtgcccggcgtgtggggaggagaggtctacggaagcaaacctcacaggaggtgaggaggagggggtggaggcggctggttgtgtccagtctgttgatcgaggcagggcccatccagtcagtggggagccacacagatgtggggagagtgctccaggcagaaccggcaggctgagctgaggctgagagcatgaggtggggttggcagcactcaggaggctgccaacacagaggccccgtggcctcagcagggtgagttgtggaagaggcctgagtgacgcgggccttggatgagtccgtggagagctgacagggctgctggccgctgtgctgggtgtggaccgaagggcgctgagggtgaaggcagagatgaggcgttgagggggaggttgagcctttacagccatccacagagcgatggcagcactggcgggctgtgggcagagcctggacagttctttggtttttctgttgtttctaatgcttgcttaatgttggtctctttcagtgtctttggtgcaacactaacaaggcttgtctggactacccagttacaagcgtcttgccaccggcttccctttgtaaattgagctctgcacgctggggagtttgttggggtaagtcattgttttcatttgctgcttgcaaaatcgatgcttctttgaaaatagtagtatgggccgggcgcggtggctcacgtctgtaatcccagcactttgggaggcggaggcgggtggatcaagaggtcaggagattgagaccatcctggctaacatggtgaagccccgtctctattaaaaatacaaaaattaggtgggcgtggtggcatgcacttgtaatcccagctacttgggaggctgagacaggagaattgcttgaacccgggaggcggagtttgcagtgagccgagatcgtgccactgcactccagcctggcgacagagcgagactgtctcaaaaaaaaaagaaaatagtattatgtgctcagttagcagaagttgctagaaaatgtgctgccagtagctctgtgactcccagggagaggttgggaagccaggggtgatctgctgaccgggaaagcagccctggggaacctggaggacctccttcaaggtggtcagccccagcactgagctctatctcaccacgttacagaaggtgtggggaaaagggtgagtttgaaggcaacgtgtttgacttctctgctcagtatgttttgttcatgtgtcacccctgaaactcacctgtgaattcccctagaatctccagttttcccagcttaagaatccctgcttgcgtagacagccctctttttttgtgtgcgtatctttgtatatttgattttggaggcgtttttaaattaaggaaatcagctcttgtgagattcaagttgttttctagtttgcctttatttatttatttatttatttttgagacgggctggagtgcaatggcactatcttggctcactgcaagctccgcctcccaggttcacgccattctcctgcctcagcctcctgagtagctgggactacaggtgcccgccaccacgtccggctaatttcttgtattttttagtagagacg

SEQ ID NO: 3715 - DNA, 6000 bp, Homo sapiens
cgggtaaagggaaatgtccttataatggttttcctggattatattttagggaactgtggcaatgattgtctgtttcgatctttgtgtttgtagaaagcaaaaagttcctcttcaaagtttcccttcttgttaaagagtaaatcataagtgttaaaaataatagtttcttttaaaaactaacttccttcaagcctcctggcttcgtgctaataactgctcgttaagctctagcctgtgtagctgttacacttgctcacgggcacgtagtacattctatgtccttgaaccttaaccaggatatttgtgctggacctgcccacaggcacattccagctcgcagcctatgccccttccctatttggtattaagcaacttcctcttttcctttgtctttccattacttttacctatttagaaaagttttaaactgttagccaatcgggttttagtttagattgtgaggtctggctccagccaatggagacaggacacagtagcagggccaaacagcggcagggatgaaaatggcttccctcctttgttcaggtgtgctctcgccattgttccatctgtgatgagcaccccttctgcagaaagtaaaaatggccttgctgagagaattaaatttatgttcgagtgctgtgtctttgcagcacttgggaacaagcattctgtttctaaataacaatttttacatataacagtgttttaggaacccctaaagcatctccaccactttcatgtattatacaaataatagaatggaaggttataatttgtatgccccaaaggcggagcattagcaaggtcacgtttgatcatttcaaatgttggtgtattttcttctgaccactctaaagtcctggcatgtcctgtttttagagagcgtataaggactgagctttaaagaaaagtttgggatccaatttctataatatcctgccagtcctccacatccttttgtttcttggttgttggtggtggaaagctaaaattcctttcagtctatctagattagtagaaagtctttctttagatattaagtggcccaagtactttgttttttataaaattgaggtttttctttaggaattttatgtccctttagggctgttgtaatgaatgtatcccatcttctataaaagctttgcttatcttctgagcaaaggagtaaactgcccatgtattgtaataaaaaattttttttaagaacaagtcaaaagactgggcccagtgcctcgcgcctgtaattccaacactctgggaggttgcagtgggcggatcacctggggttcagagtttgagaccagcctgaccaacatggagaaactccatctctactaaaaatacgaaattagccaggcatggtggcgcatgcctgtaatctcagctactcgggagactgaggtgggagaattgcttgaacccgggaggcagaggttgcagtgagccgaggtagcgccattgcactccagcctggacaacaagagcgaaactccgtcaaaaaaaaaaaaaaaagaacaagtcagtatgtaagacaactgtctttgcatcagttggactctcagtgtagccctgagcatggctgtctgtgtgtattgtctgccttcccaagtaaaggtaaagagaaatcaacactttcacacacagaactactgaaggatgtgctaataagtccactacactaaaggactttgatcggggtagccaagaggattcttccagtatcagtggaagactctgaccatatttgatcaagtactgcctttagtaggttttgtaattcttcattattcaataattcagtgtcttctagggcaattagggatcgcaattgggttagattttgaaactttttttatgtctagtaactcagctttctcatctaattctaaatacgtcttccccctttgggagaaagaaacgtggatattgtaattctaagaagtctccttttataagatggctggcagctgatagaaccagaaggaaaatgtgagtcccttgtaaaggacctagttgaaaagctataggctgagatttacgtgccgttacaggcgtattagtgacacctaccctttgaacttttttttgactccaaggaatggaaccttgtaacaagatgggatttattacagaaaacacggctgctctatcagcaaaagcttatgtcagcaatgggaactcgtgttaactattttaaataatttttatggccaggcgtggtggctcacgcctgtaatcccagcactttgggaggctgaggcaggtggatcacaaggtcaggagttcaagaccaacctggccaatatggtgaaaccccatttctactaaaaatacaaaaattagccgggcgtggtggtgcgtgcctgtggtctcagctgctcgggaggctgaggcagaggagtcgcttgaacctgggaggcggaggttgcagtgagccaagattgagccattgcactccagcctgcgcaacagagcgagactccgtctcaaaaaaaaaaaaattatttttcccaaagtagaggcagggtcacacactcgggtatttaaattctctgggaaaaccagtggggtcctggtgagcatcaggaaattccttgattatacttttaagttctacctttgaccataactcatgaactagggcacatagttgtcccctatgagagacactggctgtttgagcaatggccccaaaacaggaggaggaggaggaagaaaggtgggtctgggcgaggtaattcagacaacaaaggataaagagaaggagctgagggaggagggggagaaatttcagtagtcttttttaaattcagaaattattttagataatttttgtttttctctcataaatacctttattagaacttcttttggatgcttccaactaccataaaaaataactctcccaaagattccgttttatcctagagccagcgttttccaattgagcaaacaagtaaattaccttggtgttccaatggtacccggctttggtcactgaaatgttttttctcaagttacgtgagaccatttttctaaatataacgagaggtggcaccataagcactgcacaggaaaccagctggagtttccaaagatgggtcctccctgaaggagaaagacttgttttggatggacgattgcctatgagttctcttaagtgacaaaagactgtaagggaaaatctggttactcaagaagaaagtttagacatgtcaaattgaactcagctccagagcctggccagttttaaggattacaaattttgcttaagccacgattcgctgcttcttttcaaagagaaactgctttccccttctccaaatctgaaggacaaaaaaggttgcaaactttagcaagacgaacaaaaccttaacctcgaaggatagtgttaaccacacacctgcaaacagctgactctttggagaaataacaaacgaaactcttgccttaaaaccaagcctcaactccagccctatcaggtgtggacctgggtaggcggaacagagtctgaacctcagccctgggaggctgccagagaccccggccaggttcccaggcggtccggtgaaccaaggccgctccgcgggtgccagcgctccgagtgccagagaagtggctcggatcacaagaggctggcttcggagccatctgcaggcgcccaaatcccaacctaaaatcaccacagggtcagaatctaatgtaagggggggttattcaaaggcagttggaggctggcccacccggaaacaccggctccagaggaatggagtccgccctcggaagcggggaggggaagggtgccctcgggcaggcagaggcggaggcttttagcaggaccgcggcgtccttcctacgaggtgggcgcagtcctcgcgtttgatggacgacgggcagtgcctgcttcagggaagggtgcggcagtcacggtttcccgtcttctggtctaagcagtgcagaaaacagggaagttcatctacaagggtcatgaactaagaaggcaggaggtttctgtccccggcaccggcgaatcccggacccgagaaaggagctacgggcgcacagaagcgggcggccccggctctcgcggggcttaaagcgcgcagtgtgttcgggttcacacctctaaatgtatttttgccatttcttaagtagccttaaaaatgtccgtcactatttagtccttttatcaaccgaggggcccggaaggccgcagcgagggcgtcggcgagaagccatggaggagaaacggcgcttctctcgggagtttaggtggcagcttcagcagcacacgtttcagcccattctggggccgtttctagtgtggttaacgtacaaaaataaacaaatcccctaaaagtcccacgcggacatcggcgggagcccagggccggacgccgcggtgtggagcgagggcgccggcgcggactatgagggcccaccgcgcctcgtccagggctcacttaagagcagcgtgagcagcgcttgggaccgccgtccgggacgcccgcagccctttaggatggaggccaccgtgacctccgccaccgaagcaccgcgctcccctagtcccctcagccggtcgccgttccccgccgcgcaggcgcaggagccgcggcgagcccctcggtcacgcctcgcccctcggtcacgcctcgcccctcggtcacgcctcgcccctcggtcacgcctcgcccctcggtcacgcctcgcccctcggtcacgcctcgcccatccgcgccgcgcaggcgcactgagcctcagccgctctcctcgctaccaggctcctttcctctatcgcgcaggcgcactgaacctcagccgcgccgggaggcgagcccgttggcgaggggcggggcagatggcgagggagcggggcgagctgctttttgaggctgcgcactcgcatggccccacctcgcaggtccacttccggcgccgcggctgttccgggcggagaccgcttgtgctggagtcggagttgtaacgctccactgactgatagagcgaccggccgaccatggcgcccggagtggcccgcgggccgacgccgtactggaggttgcgcctcggtggcgccgcgctgctcctgctgctcatcccggtggccgccgcgcaggagcctcccggagctggtgagggcgccggggcgggcggggccgcgaagggggcggggcggctggtgggtccaggtcggggtcggggtcggggtttcggccagggcgctgggctcggcgggcggcctgggcccacggtcgcaggcagcgccccgacggaggctcctcgagggtcacgcccgtttggcggccgcgggagctgccgtcgcggctggggcgcgggcaggggaagagccgtctttgtctttgtctttgttttgtccagtcgctgcggccgctcctcgcgcgtggcctcgggttggccctcgcccggcaggcgggacgcttggcacctgcggcctcccttagcctcactgcgaccccaaacagcactcctcgggttcgatcccgagccgggaagccggctcacgacgtgttcgaggtcgcacagctggtcgggggcaggccgggatggcggccgcaggcccctgcagggtgatggggccgcggccggtgtgtctctacagccgccggcgttcacgccgccactccctcccggccgcagttccacgcacagcagcgaacgctcgcacttatgccttagaaaggaaggcgtccccaaagccaggctgtagcatctgattttgaagcaagctgattgcggttctacgctgtccagacgcgcaggtggcattcttcatcgtttatcccgtctgcaccaggccctgcggccacagtggtgaccgacagccagagctcctatccaagaggagctgagtccccgggaggctgaccaagaaagaagcagtgagggcgcgggggctgggggaggaaagtgcatgacaggagactcagagttccagaaaccggcagtgtttatagagggtggcttcctgtg

SEQ ID NO: 3716 - DNA, 6000 bp, Homo sapiens
agcgcacctgaatcgaatcaaaggaaacacccggtaagacccactgagggtccttccacaaattggctttctcaagacaaagaggaactattctagatcaatggagattaaagagacacaacaattaaattcaacttgtgatcctggatttcagggggtaggggaacaggacattgttggggtaactgtttaaatttgtatatggattgtaagttaaatcaggtattcaatgttacatgtccagattttgataattatataaatttcagttatgaagaagaacagcctccttcttaggagatagactctgaagaatgtagagataaagggtcacaatagtaacttactctcaaatggtttggtcaaaataacaacaggcaacacaattatgattgtcaatttacaatacatttttaaaatataagtagagatagagtcttgctatgtcacccaggctggtcttgaactcctggcctccggcaatcctcccacctcggcctccaaaagtgctgggattacaggtgtgagcaactgtgcccagctgaatcaatttttaaaaataaataaaacacaaacaattgtattataaatttaaaaaataaggagatctagagagtgctaaggcaaacagagccaatgttgagaatggaagggcatccaggacttcactgcactattccttcaactttctgcgcctctgaggtctttctaaatacaatctgggcaaggagacagggtatgcccaacacacccactcgagtccttcctgaaaagtcatccatgaggaagggtgcgtgtgcttcctctcctcagcccaacagtggctacaagtgacaggggattttcatttttaaagcttctttctgataactaggtcttgtgtgaactaaaagaactgagctccaaaacacacaccgtcaactccatctatccccagacctctggattaccggtcagtctgagtcagacccagacctctggattaccggtcagtctgagtcagcggagaggcatgagaggaagagggagagaaaaaccgcccaacattcctcctgctcccagcaggccaagaacagagcgggctttcaataagggggaaaacaccaatgtttacagtcctcatgaaaataacatcaaagatgaaaaaaggtcattctattctatcctttgaaaacatatcatcttgcatagtaagaaaagaaaggccgggtgcagtggctcacgcctgtaatcccaaaactttgggaggccgaggtgggcagatcacctgaggtcaggagttcgagaccggcctggccgacatggagaaaccccatttctactaaaaatacgaaaattagccgggtgtgatagcatgcgcctgtaatccctgaggcaggagaatcacttgaacctgggaggcggaggttgcagtgacctgacatcacgccactgcactccagcctgggcaacagggcaagactccatctcaaaaaaaaaaaaaaaaaaaaaaagaaaggcatgaatcatttgttactgcttcaaagacaagcagtgtttatttctctaagtgatcactatctcttatctcatcacaagatacagaaaaaacatgtgctagaaaaccagagataaaaactgcccttgtgttgcttaagtctaacactgaatgtgactgccctgacttctgggtcctatgactgcaaggcttcaacttagactccatttatcaatttttaaagacctttcagtctcatttgtttccgaaattaaaggaaaaaacaacaacaacaaataacgttttcttctgtcaggatacaccaaccctccatgacccatttgagtgctttcctgaagtttcaggtgagtcaataaacacactaaggacaaaggaacacaccagcaagtgtacgtatttccttgtcatgctcctgtcacaccgcaggccacaggctgcagtctccatgctcatcagcagaacgagcagccaaacgggcatggtgcccactctgcactgtgacagaggcatggagaacaactacattgtcaattccaggtgagaaaagagggcagatatggagacaaaaaaatgttcttggaaactccactatttcaaaagaaagagttgaagactaggagtatgtatcaacactgtgaaccctatgtacactgtagcactctgtacagttagaaagccacgtttctcagggtgacaggggcagaactccacatcaggagtccccactgtaaggagcagctgagtgggacccaccacctcggggacctgcactggccaccactgcgccagccctcacacagcagtctgagctcctttttggggtcgtctttcctccagatgaagctcttggattgagtctgaccccatacacaaataaagtggggtccaaaagccctatccaggtttaacttcaagaatcttgctctaaagatcttcaatacaccatgggttcttaatgtctctcctccatcaaaacacataaaaagatgcttaaaagtgttggatttggattggtataatgtattctctaaattcacacagtgtccttgtaaaggagacaaaacgttttaaacatcagtactgcggtcacattcctgtaaccatgacaagcagtaaaaatctcacaccaagcaagtactctgtgggaagaggggagttctccaggctataaatagcccctctctccaaggacaaggggcacgcagacaccaaaggcgcctgggcagtgaatgccaacatgacacggcaccattcttcctattccaaggggtccccagtgagagaaacaacagtccacccaccaggacttggtgattaccataagtggaagcaagcaagtgcagcctccaagtgcagacacaccgaatggcttttcagctgacacaccgaatggcagttccggattaattcccacactgtccactccactcgtccacacccatctctgcacccttcagcagtgcagagcaggaggaatcacagtcaaacaaaacctcatggttgttttcctgacactcccgctttcacaatgcaagcaaacacacccccgagccactgatacagttgccagtgaatcacacactctgcctgcagacgcccattctgtttgtggaaacgtattcactgcacatttgcgcttagaactcaatctgggccaaaagttcccagtacagtcccactggcctccttgactaacaaacttcaaggcagctgcattgctaacgtcacaaaccctaagcacacttggaggcaggtaagaagaaacacaaataatcctgcatcggaataaacattccataaggtcacaaaaagaaaaggtgctctactatgctaaacagacactgacagagcctgggctaacaagagctgagaaaagtattagcccctcaagctgggcccaggtcaaccctaattgtaagggtcaggaaactgaagttaaggtggcactattccccaccactagtggtcacctggaaactccacacacggaagccagcatgacattgtgaaacaggtccaaccatgacactctccagcttagaacctgctggattttcccgcagcccaccaggccctggaggcccagccccacaggaagccaccctctataaacactgccggtttctggaactctgagtctcctgtcatgcactttcctcccccagcccccgcgccctcactgcttctttcttggtcagcctcccggggactcagctcctcttggataggagctctggctgtcggtcaccactgtggccgcagggcctggtgcagacgggataaacgatgaagaatgccacctgcgcgtctggacagcgtagaaccgcaatcagcttgcttcaaaatcagatgctacagcctggctttggggacgccttcctttctaaggcataagtgcgagcgttcgctgctgtgcgtggaactgcggccgggagggagtggcggcgtgaacgccggcggctgtagagacacaccggccgcggccccatcaccctgcaggggcctgcggccgccatcccggcctgcccccgaccagctgtgcgacctcgaacacgtcgtgagccggcttcccggctcgggatcgaacccgaggagtgctgtttggggtcgcagtgaggctaagggaggccgcaggtgccaagcgtcccgcctgccgggcgagggccaacccgaggccacgcgcgaggagcggccgcagcgactggacaaaacaaagacaaagacaaagacggctcttcccctgcccgcgccccagccgcgacggcagctcccgcggccgccaaacgggcgtgaccctcgaggagcctccgtcggggcgctgcctgcgaccgtgggcccaggccgcccgccgagcccagcgccctggccgaaaccccgaccccgaccccgacctggacccaccagccgccccgcccccttcgcggccccgcccgccccggcgccctcaccagctccgggaggctcctgcgcggcggccaccgggatgagcagcaggagcagcgcggcgccaccgaggcgcaacctccagtacggcgtcggcccgcgggccactccgggcgccatggtcggccggtcgctctatcagtcagtggagcgttacaactccgactccagcacaagcggtctccgcccggaacagccgcggcgccggaagtggacctgcgaggtggggccatgcgagtgcgcagcctcaaaaagcagctcgccccgctccctcgccatctgccccgcccctcgccaacgggctcgcctcccggcgcggctgaggttcagtgcgcctgcgcgatagaggaaaggagcctggtagcgaggagagcggctgaggctcagtgcgcctgcgcggcgcggatgggcgaggcgtgaccgaggggcgaggcgtgaccgaggggcgaggcgtgaccgaggggcgaggcgtgaccgaggggcgaggcgtgaccgaggggcgaggcgtgaccgaggggctcgccgcggctcctgcgcctgcgcggcggggaacggcgaccggctgaggggactaggggagcgcggtgcttcggtggcggaggtcacggtggcctccatcctaaagggctgcgggcgtcccggacggcggtcccaagcgctgctcacgctgctcttaagtgagccctggacgaggcgcggtgggccctcatagtccgcgccggcgccctcgctccacaccgcggcgtccggccctgggctcccgccgatgtccgcgtgggacttttaggggatttgtttatttttgtacgttaaccacactagaaacggccccagaatgggctgaaacgtgtgctgctgaagctgccacctaaactcccgagagaagcgccgtttctcctccatggcttctcgccgacgccctcgctgcggccttccgggcccctcggttgataaaaggactaaatagtgacggacatttttaaggctacttaagaaatggcaaaaatacatttagaggtgtgaacccgaacacactgcgcgctttaagccccgcgagagccggggccgcccgcttctgtgcgcccgtagctcctttctcgggtccgggattcgccggtgccggggacagaaacctcctgccttcttagttcatgacccttgtagatgaacttccctgttttctgcactgcttagaccagaagacgggaaaccgtgactgccgcacccttccctgaagcaggcactgcccgtcgtccatcaaacgcgaggactgcgcccacctcgtaggaaggacgccgcggtcctgctaaaagcctccgcctctgcctgcccgagggcacccttcccctccccgcttccgagggcggactccattcctctggagccggtgtttccgggtgggccagcctccaactgcctttgaataacccccccttacattagattctgaccctgtggtgattttaggttgggatttgggcgcctgcagatggctccgaagccagcctcttgtgatccgagccacttctctggcactcggagcgctggcacccgcggag

SEQ ID NO: 3717 - DNA, 6000 bp, Homo sapiens
ttaccttcatgtaacagtggctctgagaggttgagtaatttgcccacagccacacagcttaatgacagaatcagaatgaaggattcacatcaaggactgtctggctgcaaaatcccagcccttataacctccaggccacactgctgcccagtgtcaccattaacttgcggtcccaccttgggcagtcagtgaccagtctcccagctcctcaaggtaaatctgacaatggacagacctccttgattcacctgctttacttctaggcatgagtgtagagtggggagagctgatgtggctgcagggccaggagagcactgcagacgtaatgactctctaccttagggaagctggcgatgacacggtcgcggctcacagggggccccaaaggtgtcagggaggacctcattcttccacagtcctgtggacccaaccaggagaaagacagttaaggagctgtgcaaatacctggggattcacccatgagtttccacctaacttttcatcagatccaggctgggtgcagtggctcatgcctgtaatcccagcactttgggaggccaaggtgggaggatcacttgggcccaggaggttgagaccagcctgggcaacaaagtgaaacctcagtctctacaaaaaaaaaccaaaaaaattagcagggcatggtggcctgtgcctgcagtcccagctacttgggaggaaggtgggaggaatgcttgagcctgggaggtcaagggtgcagtgaaccgtgaaggtgccactgcactccagcctgggtgatagagtaagaccttgtctcaagaattataaataaaaccagatccaggcttccctctctgtcaggaatatggggcagaggccatttctctcaatctgcatacagcaggcagcatggtatgggggaaccaggcctgccccaccctgcctgggagtcagaagacctgggtctccccttgacaggtgtctaccaaggaggagctcccctctgagcttaccttactgggctgtgaggcatggcacagctcaggcagtggaagtagagtggggaggggtctcctgctcccagtctgcaaaggacgaaggctctaggtgggcctgggggccttaactttcagccaactaggccttttccctgaaaaccctcacttcaccaggcctctgactcctcgagcctcctcaacagcccctctgtctcctttttctgtccggactcctctccaggctgggctggggtggtcctggcggagtccggttgtcttcccgcatctgacctggctctcctccacaaccagcgcgggcctggcccagagtttgcgctccggaaatgaggacgccccggggccgcaggccgctttcaagttataggggcgggaagtgggcgcggacgctgtgccctcgcggccctggcctcgggatgtgccagcacggggttgggtgaccgggagggtcggacagagtgggcgagctgactcaccagcgatggctgtgaaagctggggctccgcgcggcctggtccgcctgagccagcggcggcgatcaccatggcaacgagagccacgcgggacctgcgggctacacgaatcgtcgacgtcgtgggcggggtctgcgttggactggcagcggcgcgtccaagcatccagcttgcaccggcgatcaccatagcaacgagaacctgcctggagtctgggcggggctggcagcagagagactcctggacaccctggagagccggagatcaccatgacaacaagggcggtgctggatgggtgggcggtgggcggggctatggaggcccgggggcggagcctgagccctgggtggggctgaccgtggagagattcgcgcaggttctggtgatcagctcggctgggagaggttgggcggttatggcataagagctcctgatgtggtattgatgtttaattggagtcaagcaccctgcagctgcagaagatagacctgcctaccatctactgaccttagtctgcatagttctgaatccagtgctgtctgaatatcatatgcctggcttctagagctcacggtacaaaattaatttccttaataaaaagctgacctgagtcagtgatttcctctgaactagtttcggtttggaaagttagctgttttgggctagatggcctcttgtggcccttataaaaccgtggaaccagcttcgaagtccggggttcagtttgagaacctacttaattcagctccttaacttttctgcatcacaatatggaagccttggtacacagatctaactcagtcatcttcaattcaaagctaagtgtgctggaggctggtgtttgatgtcttttttttttttttttaaagagatggagtcttgctatgttgtccaggctggactcgaactcctaggctcaaggaatcctcccgcctcagcctccccagtccttgggactacaggcaagggccaccacacctggctctgtttaatgtcttttagtgagtttcactgctaaggttgaggcttagggggtgaacttaggtgagttgttccaccttccgcacctcagtttactcaactataaaataaacgcaactatctatttcaatggatcacctgagatggtgaaagtgcttttatactgtaaagcttgattcaagtccattaactattcatttgtcctacatgtactgaaagcttcctggtatatgcctagcactggggagacaaggaaagagaacggacatggtgtccaccctcagggaaattggagtccactgcgggaagcagagaagtaaatagagaattaggggaagggagtgtgccaatgggatttaggagaagggaagattaagctgtggggtcacttactaatttggatttggggatttggcaggagctagagatcaccctgaactcctcctttagctgttttttttttttttttttttttttttttgagatggagtctcactctgtcgcccaggctggagtgcagtagtgtgatctcggctcactgcaatctccgcctcccggctcaagcgattctcctgcctcagcctcccgagtagctgggaccacaggtgcgcaccaaccatgcttggctaatttttaaatttttttagtagagatggggttttgccatgtgtgccaggctggttttgaactcctggcctcatgtgatccgccggccttggcttcccaaagtgttgggattacaggcgtaagccagcacacctggccccaatcctcctttagctcttaagtgggctctttgcctagatctagaaaccaaactgacactgggcagattagcaagagaaaagcatacaagtgttattagttttacatgcgcatggggatctttaccagagtgaagtctagagaagtggccaaagcaagatgcttttatactttttagacaaaggatgacaaatttgagaagaaatggcaggacaaaggggatctggctagggcagtaaattctaggggattcactaggagataatatgaggggcataaacttagtggaagacagggttaagtatatttattcaggtccattgcagtccccaattcttagtctcaggtgacaagggctattttcttgccctggtacagtgagggtaccgctcctagaggaatctttatggcttgctgaatgcagaaagaagcatatctgtttgccttttcttgtatctttttttaaaattatatctatttatttatttatttatttatttatttatttatttattttagagttgaggtctcactctgtcacccaggctggggtgtagtagtgtgatcatatctcactgtaacctcaaactcttgggctcaagcaaccctcccccttcagcctcccaaagtgctaggattacaggtatgagccactgcacctggcccagttagccctttctgaggccactatttttccaatgttgtccactcaaaatggtcaatataccaatccagcatattttgggatggcccatacttcactccttcagggagaaggaaggtttcatggaagaagtgttcaccaagttgcatcctgaaggataaagaggtaataattagtgttacagagcgctcaggcttcatgagcgaggtggcatttgaggggttaagagagagtctggcatggctggaggaggccatcacccagggactggagcactaggctaggagtttggactcagccctgagactagtggggagccatggagggttttatgcaggtggtggctgggtctggcttgcttttgagaacagctacgctggccagcagtgtgttgggtccactgcagaggctaacctttgtcattaccaggcggtcagcctgaagagcaaggggcatgggcagggctaggcagtcttgagatcaggcctatgtaatttgggggaaactggctgagcgcagtggctcacgcctgtaatcctagcattttgggaggccgaggcgggtggatcatctgaggtcaggagttcgagaccagcctggccaacatggcgaaaccctgtctctactaaaaatacaaaaattagctgggtgtgatggcggccgcctataatcccagctacttgggaggcttaggcaggagaatcacttgcacccgggttgggtgcggtggcgcggagtggagcggaggttgcagtgagtcaagatcgcgccactgcactccagcctgcgtgaaagagcgaaactccgtcaaaaaaaaaaattgggagaaacgactgaacttctctgaggttcttgtctctaaactagatgttaccaccttatgaatttactctgaggatcagaggcatgcaaagtacccagtacagagaagggcgtaaataagtcacttcctttcccttctgtactttgaacaaagctgagctgcctttggtctccacagcaaccctgtaaatgattgttcccgctttgcagccggccgcagccttgggctgtttgcgcctgcgcagtgggtgctgattatgtcgaccgcggcgccgcggacgctgctggagtcgcctggcaacgatgtcgcctggcaactgaataggttggccagtggcgcgggctactggaagcagaaagggctgcggaggcaggtgaggcggcggtggtgggctaggggcccggggacaggggggcccagtgacccacccagtcccattcacacggggccgtgtccccacactcaaaatcacggtcttttgtctccggccggactctcccagcccacgccgcttagaagaaggcaggcccctgtctccagcacccaccgttcctgtgaggggagctcaactcaaacatggccacgtccctcccagtccggcccccacttctaccgttgtcatctggtgtcccgcgtgagcatctggcttaccttttactggagtagattcctacaggcctgtggcctgtccattctactaaccatgataataaccgtaataataaccacagccaacatagctgaagccctggtatgccaggcttacgtgtattcgttaatatgacaactctgggaggcagggaaggaggtactgttatcatctcccctttgaagctgcagaaagacacagatagaggaagtaacttgccaaggtcacccaggcctgaatctggagccagttcttaactactaacctacactgcccatagttgctgaaagtgtgtgtgtgtgtcggcaataaaagttaatcacttttttttttttttttttttttgagacggagtcttgctttgtcgccaggctggagtgcagtggcgcgatcttggcttactggaacctccgcctccctgattcaagcgattctcctgcctcagcctcccgagtagctgggactacaggcatgcgccatcacgcccagctaatttttgtatttttagtagagacggggtttcaccatgttggccaggatggtctcgatctcttgaccttgtgatccgcctgcctcgggcctcccaaagtgctgggattacaggcgtgagccactgcgcgtggccataaatcaccttttaacattaattc

SEQ ID NO: 3718 - DNA, 6000 bp, Homo sapiens
tttgacttttggggatatcagaaattactttgcattttaagagagcttttagccttgctatgtaataactaggtggggaatacacttttagggatggctaatggcagttttgtggggatacttggctcttcgcacctttggatcagaaaagcatgctcttggccacctagaaagtatggaagtgtccccaccctccattgaaagataagactgccatgggggatgggctgattccctctctttgggatccaggatccaatataaaaatgaaacccttaattttggggttctgttttgccttccagctgtgcctgcttattaggccttagaaactgcaggctttcctggccctgtttcttgaagggctccaccctgaagtcagtaatccaattaagaaacttaaaaattggcaaatgaaaaatcttacaactactggatcttctgtctgtgtatttatatatgttgtgtgtgtgatgttgatatatgaaagagctctgattaattggcttaaaaataataagtacttaaatcaaatattttgtcagaaaaatagaaacattaatgccttttggttcacatgactttaataatctttgggaaatagagacagttttaaagattatcagtaacattaaaatatcttcaaactttagacatttggtctaaattaggcaggtcagattttaggtttgctaaatgcctcaaggtcataaactgcatcattgacttttgaaaattgcccagcttacctgctttggggccattagattctagataaggcctggggacttgtcgagttagccatgcccccagctatgctggaaagagtcagaccttatctgcacttctgcagataaggctgtcctaggctccacacctggaatataagtaaaactgcttacttaccaggtttttcaccaaaaaataaaagttgctaagagttaacatcgtaatatgttatatgtaattgagactactagagaaacagttttatatgcaaggtgtgtaaggaaaattgaatatgcttttggtaagaagattataagaaagcatgggaatgtggactttccccctactttagagggttaaaggattgtttcaagttaggtaggataaagctgaaggtttgagcaagttatggaaggtttgtgaaagattaatcttgtaaaagaaattctgtgtgaacttattggcttaaattaaagggatattattcagtttttccataaattaaatatggaataaaagtataacaaggttttcttagagcactggtatactctttaacaagaaaattgtaaagagctataaaaggtttatgagactcttacctcatggtcaaacattaaaattggatagagttgtctataaggctttattatgaattgggtttgacattaatagtacacaaatgcaaaggtaaaatttggctttctctcttgaacaagtttttcatgtaatattgaaaaataattaaagatttttgtttgccttttgaataagctatagaaaaaagaaaggaacgaaaagagacagttttttttggaaagctaagtcttccctttatcggtgagtaaaggtttttgcccttaaaaacatctttgagttatcattttggccaaataaatgacttatggtgacctgggatgctattttgtagtatcaaatgttttaaatttttgatatttgacaaactttccaaaatcaaattctaagttatgcctttttctaacctgattagtcctttagatattaggtcccctaaagtccaaaaatgacatatttggcttatttggtacattaaaataatacaggaagcattgtcaaatatgaaattgtgtttggctttctttgggctgtgtttatataaatatgttattggtatgtgttccaaaattatgggaaactcctataattctgatatgaacattatcaatactaatggacattatcaataataattataattgttatgatgttaatttattatatgccacagaggtatccacatttcctagtcaatgatattaattctttaaccatgactgctctaagtctttctgtcatccatagacaattgttgtcttgcttttattctcttcaaaaggtggtttataatcagctataggactctgatgagtactcttaaatgcagagaaaaagaaaacatcatccaagactcttggaaaactaacacatatatatcaagcaaaacaggaattaattgcatagactgaactaataaaagactgaaataatcttttatgactttttgcttaaaatgttgttgatctttctgttttgtttttcagagtcaagaaacccccccttcttgagctatttacagcttttaacaattgagtaaagtacgctccggtaaggattataaaacaaagttttgtccaaaaacaaaatttggaatatgtttttttctctttacctgatttctgcagaatttggaaactatttgtgagtgttcttaacttacggcaatatagttatttgcataagtgcagtaagaatctgtttttccttctttcttctttttttttttttgtaacaggacacaattggagaaactggttatttaacaagggtttgactcgagtggcatgctttcaaatataaacagacttctttaaggaattaaagttgactaatagagccaataaaagcctcttggaaaaactggtcttgtaccttgtgtatgaagtccctgtatagggttcctgacctgtggtaagtaaagaatgtaactttctgacaggcctgggagccccgagttatctcgggacctcaagaggagaggaatttatctaactcatacaggttcttgcaggcataggtaaatccatggctgggctcaaagctttaaaacatctaatctaagataccttatgaaacaaagccaattttaaaaggagcctgtatggcaaataattatacttgctgcactttatgcaaataatgaagccaagtataataagactaaagcttattttgcaaataaattggtcctaccatgatttgtttttaataaaaaatgggagactggagagagaaaaacggtgtttcaaaaaatatggtacacctgtcatagattctagtctcatccattgtttttgagttttttgtctgcaatttagactgaccttgcttctttctgtgaaccaaacagtcatctcttgactgcttctcgtcagaaacaagagggatggataacataaaaatctggatcagtatctaattctgagcatgtattggaatcgtctagcaactccgtatcagctcatctagcaattcctgtgactaagaatgcctaacctcctgggaatgcagcccagtaggtctcagcctcattttacccgataagtcacaggcattcttgcccagttcatggaaagccttcttatttggattacttgggataattttacttattttactttgctgttgtagaatatattgctgctatactctttgtgtaagaatgcaagataagcttactcagtgcttccttaaattgaacacattaatcttccagatatcaccttttgttaggactcagagttacaaatgactctgaacacaccaacattttcttactcagttcctctctgcaccaaacccaagagactctaatagttaggcaggaatatcatcgcctctattcagcctgaagaagttacagaagatggatcttcatgcctctacaacccttaagattaaacgttccctcgtaaaagagagtagggaaatatgtcagaggtgttcaaaatagggcaactccatcttgaataggggctgggtaaaatgaggctaagacctgccaggctgcattcccaggaggtcaggcatttgtagtcacaggaagggataggaagttggcaggactggtatcacaagatacaggtcatcaagaccctgctgagaaacagtatgcggtaaacaaaccagccaaaacctgccaaatctaagattgcaatgaaagtgacatctggtcatccttattgctcattgtatgttaattaaaatgtgttagcttgctaaaacacacttctaccagcaccaagacagcctacaaataccatggcaatgtccggaaattaccctatattgtctaaaagggggaggaagcctcagtttcaggaaattcccacccctttcctggaaaactcatgaataatccacccctgtttagcataggatcaagaaataactataaaaatagccaactagcagtgcttgggggtgctctgcctatggagtagccattcttttgtttctttgcttctctaataaacttgctttcactttgctctgtggacttaccccaaattctttctggtgcaagatccaagaattctctcttggggtctgatcagtacccctctctggtaacacttgcatgatacctgaggaggtcagcctggtcattcacccaacaaacatgggttaagccctcccatgtgcctggcacaaagggggctgaggactgcagttctggaacacctaggctctgagaggcgacgcgactgtggtagcagggccaggattctagcctgtgcctggagggccaacacctgcaccttctctgctacccaccctgcctctgtgactcagagcagttaagcactttagctcagggtggactcagggctgcctcccccttcctgagcaacctaggggctcctgtgccccatgcctgtgtccatttcccaatcatcagggggcctcagactcctgcctgctctgactttctaggcctttgaatcaagcaagaccccactggatcaccaaagagttaagcaaaggaaatccctgcctccctttatctccgcagaacccagaggctgaaagggagggagcagggaggaggggaagtgggaagcggctctgccctctccctccgccctccctccgccctctctccctccatcccctcctctctccctcctctgctgggcctgggggtctgggccagcaacaagttagtattgcagacatgggccaaggagccagaggccatgcagtggctcagggtccgtgagtcgcctggggaggccacaggacacagggtgagtgaccagaggctcctcaagcttgggggctggggtcagagcctggaattcctctcctccctccttgcttcctggaagcatctcgggccctgctctctccctctgactgggacagcctctccaggctctcccctccacatttcctcctgcctctggctgagggctgcgctccactgctcccggtttgtgcccgcccctacccgggcacacacaaactcagctctgcacggcctgcctggaccgagaaaagttgccctgccgctccctccccaaagaggtcccagtggaagcagcaaggaccccaaaagtcctccctatgacttggttcccacacttggtccctgcctggcacccacccccagagctagttcgtgatcctggctgtggttatgattcctcgttaacggcttcctgattcctgctcccaggccacggttctgtgtctcacagcctttgactcccatccgctggggccaataggaaacagaaatgctcccaaaccatgccagtcctctgggagaagttctccttcccatcccatgcaggcacagggaagaagtcaaagcacacttttttttttttttttaagtcttttataaggcaggcacttttcctgcattgaaatccttccaaattacctgggagggaaagggtggtgtcatttccttgtaagtatcaaggagcaggaagcccagagaggttcagccactagccctaggtcacacagcttgcaaactattctgggtctcagatttgactctaagacctcagcttttctcatgaggtcatatctgtggctgggaaaaagaagggaattttgggatttccaaaaccactgggatttgtcatttataagtaaaagttgaggatgacagtctcagacagggaggatgttgatctctgaggatttgacctcctt

SEQ ID NO: 3719 - DNA, 6000 bp, Homo sapiens
acacgctgttcctgtaacctcctgtgaagctacagcatggtgcctctgaataaatgagtgataaggggcaggggtactgaaggagcttgtatggggttggggctagaatctgtgggttaggggagccattggggctgtagggtgaggggaggctctgcagttgtgagcaggagcagggagggaggagtgatgataacgcaccttgcccactcctctcctcctcctccagccattgaagttgctcagaccagaggctttaccttgaacttgtctctccgaggcggttgccaggcaacagcccttggccaccaggctctggaccaggacttcctgcatcagcatcagcattatcagaggggagctgggaacccgcagggcctggggcaggaaagaccacggcccccagatctttgggatcctctttacctagaagcgatggggcaggtgaggccactgacccatgggagttgacagctggactccacaggactccacacagaagaaaacacagcgagcggtcgggctcaagcctgtaatcccagcactttggggggccgaggtgggcagattgcttgagctcaggagttcgagatcagcctgggcaacatggtggaaccccgtctctaccaaaaatacaaaaattaaccaggcatggtggtgcatgtctgtgattccagctacttgggaggctgaggtgggaggatcgcttgagcccgggaggcagaggttgcagtgagccgagattgtgccactgcactccagcctggatgacagagggagaccctatctcaaaaacaaaaccccaaaccaaaaaaacccacccaaaacaaaaaaaacacggcgagaaggccaggctgtagtgtgaggggcaccccctggaggtgtgcaaggccaccatccctccaaggcctcagggtactccctgtctctggcaggccctgctgagcatctcagcaagtccactggagggctgagggagaaatgtctccctgaaagtcatggggccaaagtcagcaggcctgggccctatgtctcccgcagcaaacctactgtgtggccttgggccatttatttcacctctggatgtggttcacttagctaacaaaggcttttctgagcaccagctgtatgcaaggtcctgacatgcggctgggggccagtgcaggcaaatggacaggggtcccgcactctcagcactcacaggcaaccacacaaggaagtgtagccctattttgggggctcagtggggagggagaagtgcagtgtgctctgggagagcactaggagggttgggggctggtgggagctgcatctagagtggaagtttcagcctaagtgtgccaggcagaggtatctgcacgtgctaaggccctgagctggaggaaggcagtgagtgaaaggaagaaaggtagcaaagaggcccctttttagggacagagaatgtgtcacacagggcttcctagggcatccattcctgttaaggctgaattctgtccccctctaaatttctatgttgaagtcctaacctccagagcctcagaatgtgacctgatatttggaaatggggtcatcacagttgtaggtagtgaagaggtcatactggagcagggatggcccctaatccaatacgactggtgtccctaagaagcggggaggccaggcacggtggctcatgcctgtaatcgcagcactttgggaggctgaggcgggtggatcacctgaggtcaggagtttgaggccaccctggtcaacatggtgaaaccccatctttactaaaaatacaaaaattagtcaggcatagtggcatgcgcctctaatcccagctgctagctagggaggttgaggcaggagaatcacctgaatctgggaggcagaggttgcagtgagctgagatcacgccaccgcactccagtctgggcaacagagcaaaactccatctcaaaaaaaaaaaaaaaaaaaaaaaaagtggagattcagacacagacaggcacccaggagggagacgccatgtgaacatgaaggtaaagatcaaacaaggcatccgcaagccaaggaacgccaacgattaccagcgcagcagaagctaggagcaggcctgaaacagctcttccttcccttgcagccctcagaaggaactagccctgctgaggccaagcctggacttctacccccagaactgtgagacaatcagtttctgttgtttaagtcttcccagtatgtggtgctttgttaaagcaggcctagcaaactcaaaattcctacttgcaaaatggagataatggccccttctctcctgggtctcccagaggacctgttgggttaacccattcattccttcaaactctccaacaaggtccagagcttggtggccaagggctgttttgggtctgagccagatccaaaacacagttcctagtccagggcccatagtttaaaaacaaaactatgaaaatgggggctgagtggacgggagtgatgctgggcgtggggagagctctgaggccactggtgtccctggtggccatggcagacaacaccctctgggaagacccaacaggcagagggcagcccaggccccatggggaccttggttcctccccagaatcccagcaggcctccagcaaacctcacagcagcgtgcaccacactgaggggtgaatgacgggcacacatgagtgcacacctgtgtgtggagggtgagacaaaccttcattttctcataggctcaaaaaaagtgcctgggccggctgggcgcggtgactcacgcctgtaatcccagcactttgggaggccgaggcgggcggatcacgaggtcaggagatcgagaccatcctggctaacatggtgaaacctcgtctctactaaaaatacaaaaaaattagctgggcttgatggtggcacgtgcctgtagtcccagctactcgggaggctgaggcaggagaatcgcttgaacccaggaggcggaggttgcagtcatcggagaacataccactgcactctagtctgggtgacagagcgagactccatcttaaaaaaaaaaaaaaaaaaaggtgcctgggccacactcagggtcccctggggtcccagacacctcaggttctggctcacactctcctggaacccacatcctctgtcaccatcttacaggtggagaaactgaggcctacggtggggtggggtgtatcggatcctagcaggggaagagctgggatgtggcctctccaccctcctgtccgctttaaaggccagcaaatgtgtcaatatttgctcaggggaactgctggctcaacaggccccagagcctgcctggtgtctccctctgtaagatcaggggttgcctctgagctccagccaggaccctgcgcctgctcttcagaagggaggggctctccctgttgggccttatcaaacggcagctgccagagggagaacggaacaaacgcacgatgcccattacgtggtcggcagtgaaaggtgagctcctggccacgcaatcgggtttgaaccccagcgccactgcctcttagcgctgagtgcctttgagccagcctcagaacctctcgtagactcagtttcctcatccgaaaaaatgggctcccacgcccatctcaaaagcctgtcgcagggctgcggggacggctggagcgtggctctgtgctccccaggcccggcagggggcgccgcgggtcctcaggcctcgcccagtagccgcgtggtatccgacccgcagctccgctcggctggactcgtctctattcggcgacccttggctccactcggccaggctcggctctactcggctgtattcggcagcactcggccagactcggccttgttccgatctgctcggcttcgccctacgccggaagtgcaaaggcagtttcccggcgcggctgtggctccgccctccgggcgcgaggcccgggtgggccagagaggcaggtcctcgtccctcgggcccgtggcgctgtcgtggatgtaggggttccgcttgcctgggccctgggctatgcagagggagacacgaaccagggtttgagggggaagcgggtggagagggaggggctccccgagcctggcgtgggggcgtctttcgccttcgttttgcagggagaaagggagaggttggcgccagccgcacgccccagcaggcaggctctgccactgttctgtcgtgtcgggggaggaagttgctgcccctcagtgtccctgagtctcggtttcccctccaacaatcagcaggtttcccgccggggcagagggcctggcgcggagctggcgctctccagactcagtttccccttttgtaaaacatgacagcccgcccaactccgctgaacacctttgggatccgacgtcctgaaagcccaggacggggaacctggttccggagagcgaaactttccccggcccctgggcggttcaacgtgggggagtcggtagaaccaggcccggggctctcctcgtgggaggaagccggtttgtgtgtggggggtgggggttgctgcggggactgcgggggtttggaggaagaagcgagtgcatgggcgccctggcctgccccaaagttccctgaggggacgggctggtgggacgggcgggggccggggaccggggagcggggagcgtcccgggttcccgggcgcgggggctctgcccagcaggaggcgctcgcgtcttcctttgttgaaattgatctctgcgcttgaacagttagatctgtgacttgccactcagagcctacatagcggacgccaggaatcatgtttactgtcctgtctccctttttgacaggcacacattttattttttaaatacatgaagcgcgccgtgctttgtaagcgctgactgaatgtgcctattttcacaccctctcctgaccctgggctggaacgtgggcgagtgcaggatggtggccaggggcttggctcttggtcagtatgtgcctcatctatctcgtctgtaaaatggacagacgaggtaacacgtgtgcctacgtcagagcattgttggaaggattagaggagtcaagatatggaaggcccacagaatggttggggagaaaagccagcttctggaggcaggggaaagggtggggagtggctggggaagcagggcctgtaccctgggtttctgcattggggttactcctttgctgctgggagtgatagcagggtgatgagagccaccctgggcctgcgctcctcctggtcatgctgttgtcctgggtcccagggtgcctgggaaagggcacacagctttactgatgggtggccagtggggagtgcccccatcgggcattccaccagtcggccccgatggtcctggcctcctcatgtttatctggcccagggacaccaaggctcagagaggtaaacttgcccgaggtcacacagctaggagggggagctgagtcatcacccaggtttgtctgccccagggctggagctctgttttcaggccacctgaccagctgaggagatcgtcagaaaggctgggacaccaacggatgacgcacaaatggaggaattttcaggcacggtcaaagctaatgggagggaaaatactgaagtgtaatattccagagttctctcttgtctgctctgactcctgccagctgccctgcacctagagggacaggaggctcttctccggggcattgcatggccgggagccaaatgagctggcaccagaacctggtgagttgcctggcttttcagacctcagcctcctcacctgtgaagtgggttgaacagctcttctctgcagaggagctgttgagggcggtatggaacactgccaggcacacagttggcccttgacaaaaccattgctgtgtccccagcctgtttctccccaagtcccattgatggttctctctatccctgtttcctcagaaggtcaggttttctaagcccgaaggcttggagccaggcaggagctgtctccctctccagtgctgccgactcaacccttttcccttagaagcagggagggagg

SEQ ID NO: 3720 - DNA, 6000 bp, Homo sapiens
gttaagaaggctcgagaagagcatgagagagcccagagggtaaatttcctatagctaagccatgaaaggaaaatacggcaaattatgtagaggcattaggacactaaaattttaattcctggctcttttatttaatgctggctacagttctatagagtaatgatattacttatggggagtctcctttcactgtatctaatttgggggacatttttagtcttaaattattcagtgagcttttatttcaccattttatattcttgtttgtgtttttataaaatcagttgtttttccaggtcaagtaattgaaatgtgacagtattattgtttgatcttttgaggatgcttcgccagattaattaaatttatgattcctcctctcttccaacagtggatgtgttgctatttaaaaatgattctagcagggcaaggtggcaagtgcctatagtcccagctcttgggaggctgtggtgggaggttcacttgagcccaggagttcgagactagcctgggcaacatagtgtgatgctacaataattcacctacttatttctaacattattgaatgaaagaacatgaaagaacctaaggctgtattatataatatgttacattctaattttttgtccatttaatattaagcatcatacttgattttaaggttatagtttataatctttaaaagtaatttatctccttgatatttaaaagcaatatatctcctcaataattttaaaactacatatgagggatatttattttttgttcattttctcttttaaaaagcagcaaaaacaaatcaataaatctacatttgtattatgtagggagaataacggaaaagatgtacctaggaaacaaaagtcatggtagtcttggtaatctagccatgtccttccctatgggtgttttaaagccaggatgaatttagagttttcatattagtactataaattgttttccaggtttacttgtttccagagtagaagtaaaacactttacttgaaattactaccaagaataatgcccactgagaatccagtttggaaaaaatgtttgaagggggtatgaagtatatccttcagttcagtattgccatctactaggttattttacaattttttcatggtcttgcatggacaggttgcatggacagcacttatttcttcttctattatataatttatttccttttgtatcaaaggaggaagaagccagacgacagtcaggagctcagtatggctcttttccaggtatatttaaagaaaagttaaaactgttttgttctattatacagtgatattttaatataatacttaatatttattataaagtgatattctgattttgttctcttatacagtgatattcatgaagaacctaggtaaaagaaatgatggaattattaggcataaaaatgatgttttttgtacagtgtaaaaatagcgtatttttctttcaaatgtgatcagaaattgctagtgaggcaaatctttgaataccagaggacaggactaacacagagatagaagagacggaaaaggcacgcagaagatttattgagtacttcctgattacgacagtgtggaatttatataaagaccaggacaagacttaattttttgttttttaaacaactgtctccagttgtttaatggtaactagctttctcttaaggaaagtttttagaggctacgtatgcttatatgtcactggttagaacttagttgcatgatccgatgctagaaaatctagcctttattctgaaagagtatgtgcacagcaacagaaaacaaacctagaacaaatattgaggatgacctgctgtttgaagaaaaagcaagaaattaaatttagctcatagtttacttcctatgtaaaatataaataatcttattgtcagatatctttgttttagaaagtgactgctaatgttgggctagtactagagagaattttctgttatgtacattttatttagatttgacaagctttgggtcagtaatttcgttacgggtaggcactaatttttcaaagctttgggataagtaggggcagcaagagaaactagaagttgttttatggtccccttagatttcttcatctctgattgttagttattaatggccatattttaattaactgtggaagcaggtaaaaatgactttatcatgtgtttccttctttaaaacggctttacttacagtgaccctttgtagaatacattaatgttgtctttctctatattatttttttttttattattgagacagagcctcgctctgtcgcccaggctggagtgcagtggcgtgatcttggctcactgcaagctccgcctgccgggttcacgccattctcctgcctcagcctcccgagtagctgggactacaggcgcctgccaccacgcccggctaatttttttttttttttgtatttttagtagagacggggtttcaccgtgttagccaggatggtctcgatctcctgacctcgtgatctgcccgcctcggcctcccaaagtgctgggattataggcttgagccaccacgcccagccatctttctctatattattaattgtaattttagaatatctccagtagacatacaggtttatgatattgaagaacagagtagattatttgggtttataatcgaacaaattatactgagagaataaaatcctttttgctagagcattattctctgtaaagaagcaccaggaattcttgttaaaaatccaggtttccagtttcactttcagagaatttttattttatttgaaatggaaatgaaaaatcaacagataagccttttaaggtcgtccttaactgaaggaagatctatgctagaagagtatagttgaaacaaaaacctaaactaaactcgtatgaattaattttaaattgaaacagacaaatattcaagaatggagagttgaaagatgatcaaaatgactagctttataatctaagataattatacaatttataattatctaaggaactgttagatgactctttgcttttaaggcgagattagtcttttttaacagtgttattactagaaaaaagttgctgagcatggtggctcacaccggtaatcccagcactttgggaggttgagggaggcaggcaggtcacctggggtcaggagttcaagagcggcccggccaacttgatataaaaatataaaacatatttataaaaataaaaaatatatttataaaaatataaaaattaggcatagtggtgcgtgcctgtagtctcaactactcagaaggctgaggcaggagaattgcttaaacccgggaggcagaggtggcagtcagccaagatggcaccactgcattctagcctgggcgacagagcaagactccgtctcaaaacaaacaaaaataaaaaacagtgttattactagaaaaaagttaatccaggaggtagcaaagtctgatttacagccttgtttttaaagagataattagaagctataacttatgtcttgttgcagtctggttagaattttcagactcttcagactactttgtgcttagtggcacccatattctttgaacctgtactttttgtggatgaaatactgtgtcagaatatttgggagtatgattagtgtctattcattttttattacaggtggctttcctgggggaatgcctggtaattttcccggaggaatgcctggaatgggagggggcatgcctggaatggctggaatgcctggactcaatgaaattcttagtgatccagaggttcttgcagccatgcaggtaagacttggaagaaaaactttggactttgtatcattaaggcaattctttcataattctgtgtggagacaaaggttactctcatagctattttttatttatcacagttaccaaatagctaattatgcaagagtgacatttattttctttatgcagagtgagtaacttaaatttttaaaactaggaaatacttagcaatcggcaattatatccagttgtccttttctttgtatcaaaattgtgcttttttcatcatacagttcaaatgacttaattcagcttgattttgatacttcaagcactcatctaaaccccatttaacttaactatcaccaaattacaggtctaaataagagatggaatttaggataataaacttactgacccagtaggacactttttaaatactaatgaaccctttcttttcaggatccagaagttatggtggctttccaggatgtggctcagaacccagcaaatatgtcaaaataccagagcaacccaaaggttatgaatctcatcagtaaattgtcagccaaatttggaggtcaagcgtaatgtccttctgataaataaagcccttgctgaaggaaaagcaacctagatcaccttatggatgtcgcaataatacaaaccagtgtacctctgaccttctcatcaagagagctggggtgctttgaagataatccctacccctctcccccaaatgcagctgaagcattttacagtggtttgccattagggtattcattcagataatgttttcctactaggaattacaaactttaaacactttttaaatcttcaaaatatttaaaacaaatttaaagggcctgttaattcttatatttttctttactaatcattttggatttttttctttgaattattggcagggaatatacttatgtatggaagattactgctctgagtgaaataaaagttattagtgcgaggcaaacataactcatttgaggataaagtttgtgttggatatgtggttcctgatgcattttgacttgtctttttaaatgctttatctttttctttaaagatttatttcaataaaactaattgggaccacccgtatttcagtaggacctgggtagggattggaagtacttggcagggcagcagcaatcttgctgtgtttgatataacatgcatccttgggcaggttgcccttaaatcttacactgtggtgaagggatgttttttttgtaatgctgcagtagagttggagtacttagttctcttgttgtccagtatatctaataagtgtttttcatattatttccacgtaagggaaataaggtagtacttttctttttatatttctatgcttaaaattctctttcctagtcaaaaattgcccaaatctgtgtttgctttctgcttgctacatttgtctcccttacttttcttgagctaaagacaggctttttccaccggcatcatcactgctatcatcattaacagcgtaattatacaagcatatttaatgctgagtttaatttaatatgtaatacatatggtaattgtagggtaatacccacaacaactgtagtttcttacttggccaagagaatgcttatttaagtgttagacttccattctggcaaaatcttgccttatcagaagacattggaaagagggattccctttggtgtttggtcttctacttagaaaaacctattgcagttagtttatcttgtagtattcatctttgtattctgaagataaggtttgaattaaattgatacacacagaggggaaccgattttttttatccaatgtgaattataaatgagataatccacagttattcattgtggagttgttgagactatgaaagactcattgtctttgtattcagctcttaaatagtgtaactatatccccacctctgcttgctttctttccctcccctccaatgataaagaaaatgataaattttctgttgtgcattcaattcttattttaaataagactaagtataggcattgtacctgacattgctacgtttctaccagtgtttcaatttaaagtgctagtgtttaaaaacattttcaagggataaggccttctgtactttgcttatttgaagaatcagtggtaggagcagtgaagtaaattctatggagtacatttctaaaataccacatttctgaaatcataaataagtttattcaggttctaaccctttgctgtacacaa

SEQ ID NO: 3721 - DNA, 6000 bp, Homo sapiens
gcaggatactttttctccactgccagtgaatatccaatttttgagaaattttcttcatatgatacaggatatacatcacagggttcattggggcatgaaggccttacttctttctcttccctggcttttgataatagtgggatggacaactacatatctgttacaacttcagacaaaatcgttaatggcagaaatattaatacaaagaaaattattgaaagtgatcaagaaagagaagctgaagataatggagagttgacattttttcttgtaaatagtgtggccaatgaagagggctttgcaaaagaatgcagctggagaacacagtcattcaacaactattcaccaaattctcacagctccaaacatgtatctcaatatactttcgtggacaatgatgagggaggtatatcttgggttaccagcaacagagatccccctattttctcagcaggagtcaaagagggtggtaagaggaaaaaaaagaagcgtaaagaggtgcaaaagaagtctaccaaaaggaattgttaaattgactcttcaaatatataacatttgaacacaattgtgtgtgttttggttaatcacaaattttgtagataacacttaatactatactaagagcttttcaacacttttagcaggattgtggacatttggttagtagtttttttgaatgggtatgtcagaaaaggatgagtttgtggtgacagttggtgctaataagaatttgcctgggcagtatagtgagatcttttctctacaaaaaatttaaaaattagccaagtgtggtggtgtgcacctgtagtcccagctactcgggaagctggtagaaagactgcttgagcctggaagacataggttgcagtgtaatgggatcacgccactgcactccagcttgggtgacaaagtaagaccctgtcttaaaaaaaaaaaaaaggaatttggaaaactgcaatgagttttttacttttgaatttttctttagtagagtttatagcctatttttcttttttctaattaaaaccactatacaaacttacgaaacatgcatagcattagaagacaagaatgtatcaagacacacaggttcagactacacaattattcatgaaatggctgttttccaatggaggaacagcatttgatgcattataacttaaaggtactacaaattaaaaattaaagtataaagtattttaagttagaaatagacttagctgggtgcagtggctcacacctgtaatcctagcatcttgggaggcccaggcaggagggttgaagtcagaatttcacgacagtccgggtaacataatgagacctgtcctctatgaaaaaacttttttaaaaatttagctgggtgtggtggtacgtgcctgtaggcctagctacttaggaggctgaggtgggaggattgcttgagcccaggagtttgaggttgtagggagctatgatcttgccattgcactccagctgagagtgtgaccctgtctctaaagaaaaactatagaaaatttaaaaaattaaaaaacgggtaacatggtaaattttatgtagtatattttaccacattttttttaaaggccagtcttatcctgaattcctcagagcagtctgtatggtaggccatcagtgaatcactccagacaggaaattttctatttttgtttagagtttgtacacaaaatctacaaatacattactctaaaatagcacctatagccattttaatttagtcatgttgggagaaaaatagatgggttacaaatacatcagatatcgagcaaatggtttgagttacatctagcagcactaaaacttattcaactttggccaaatacaaatgcgaaattagaaaaaaattataatatctgctatttttaaaagacagctatagtcaagagcttgtgttttgtatcggtatttgatttttagtgggcagatgggagaaggaaaggttatttattctatagaagagactgcggacaattagtattcaaagtttattttcagaaaataaaataataaaagcccagggtattttaaatgcttctaatataagatgtgatatttagtagagtttatctgttatcatgcatgtggtagtaaagttgaaaaaaaaattgcaattttccaaaaactaaagcaaaaatcagtgtctcagaaaatttaagaatgtaatgacatgccctgtagtccatttcttcactcttaacagaaaaccaaaaatttagatttaatcatcttactcaatagcttaaaattcctcaaagttttcccaccatctaaaggaaaaagctaattgtttgcttaacataatatacaaggccctccacgagccagccaccagcttttttcccaacttgatttcctatcagctccttgtactcatcttatgctctagcccaacttctcccaaaatctgttccagggataccagttcaagattcatcacagaaaaggggtccatggtcaaatacatttttacacattttgcaaattactgcggaacacatctctcagaaacctagactattaagggctgggtgcagtggctcacacttataatcgcaacactttgagaagctgaggtgagagttcaagtttactttgggcaacatggcaagaccccatctccaaaaaaagaattaaactattatgtacattatgaaaggcagcattccccaaaagtatttgatcacagaatcattttcgtgtaatgcctactattttgtttgagaacatctttcaaaaaatcttttcctaagccgggcgcggtggctcacgcctgtaatcccagcactttgggaggccgaggcgggtggatcacgaggtcaggggttcaaaaccagcctggccaagatggtgaaaccccatctctactaaaaacacataaattagccaggcgtggtggcgggcgcctgtaatcccagctactcgggaggctgagacaggagaatcgcttgaactcgggaggtggaggttgcagtaaggcaagagatcgcgccactgcactccagcctgggcgacaagagcaagactctgtctcaaaaaaaaaaaaaaaaaaaaaaaagcttctccagccatactaaacgattgcaacgcttagtgctggccactccgttttagagttctgtgcctttgcaagtgttccttctggtagtatggctcctttagtcaggctggggagagcctttcaaataaaagcaaattccaggcctggggcggtggctcagagaggagggtggatcgcttgaggccaggagttcgagatcagcttggccaacgtggcaaaacctggtttctactacaattacaaaaattagccaggcgtggtggcacacgcctataatcccagctacctcgggaggctgaggcacgagaattgcttgaactcaggaggcagaggttgcaaatgagcagagattgccactgcactccagtctgagcaacagaatgagagcctgtctcaaaaaaagactgaaaaattgcacatctttcttttcacctaatcccacggagagttgtctttctgcagctttactatgagaactgaagaacaagttctgtgcactggacaataactttttattttttatagtaagaagtcgatgtaattaacattccattttaaatgaattcaagtatatcaacataaacatatgccaagacatagctttgatgtcaaataccatacgttctggttcacacattgttcatatattgacccaaaaaactgaaatacgatccaatggcagatccgcctgcaaggaaggtgattcagttttcactgattaagctttatgttcatcagattaattgctcgcaatagaggacaccctacaaaaaattattctccttatccttcgtcttgtctttgcaaacaggactttcagacacagaacgccccagaagtatttcgaaacagttacctctcctaagaggagctgctgaaagaatttgttactaaacatgcttcgtgtatattctggagcaagctctcacgcctaacagaaacaagagctacttgatgtgagacactttgtcacttaagtgtgataattgccacaacttcggagtccgagtaacttggaagacagcccctctgggggatggcacacttttctctctgcagtcatttcggcttcacaaaatacctcaacggtagagaacacactgggcccacccctttccaggagcagccggtatagaagaaatccgcggagcacagagggttggggagcggaggccccaccaggagaagggtcagccgaaccagggatcgcctgagaccaacttgggtccctccaggggacaccatgggaggagaccgtgggagaagagtctaacctgagaggccgcggacgtttgctacagcgggaaccagcttgggggctgagagcagccaaggcattacggcctaactcacgcgtcgggaagagaaagagggtaacgacggggaacgcaaccgcctgcagggccgcgtcgccaggaaaccgggccagccgcacctccccttccggcggaggcggctcgcgggccttccttgcgcggcggcgcaggttgtgacgtcatgccccgagctgggaccgaccctccggctccacgcccttttttttttttttttttaggtcccgggcgttgagctctactcagtgcacgcagccacacaatatgctcttggacgtcgccccctggaggggatgttatctcccgcctccttgaagtcgcccatttctggggttgccccatccagggagctggttcctagttaagaatatgagaatgtatgcgcagggaggcaggcaacagcacgaacagccacgcttctagaagattctagggagcgcgcaggagcagcgcagagggagtaggaatgagcaggcggaggacccgaggtcacgagaccgttgggtgggaggagccagcggccggggaggttctagtctgttctgtcttgcggcagccgcccccttctgcgcggtcacgccgagccagcgcctgggcctggaaccgggccgtagcccccccagtttcgcccaccacctccctaccatggacccccgcaaagtgaacgagcttcgggcctttgtgaaaatgtgtaagcaggatccgagcgttctgcacaccgaggaaatgcgcttcctgagggagtgggtggagaggtgagacccaggcctgaggaccgttgggggcgggggaagcacggccccaggggggagccaggctggacctggctcggtccggcgggcgaggcggggtcgctgccccttctttgcccgggaaagggaggcaacttcgaggggtcatggaagatcgcgagccttgggtagtacaggagccgcggggagcaggaggcagagctgggttcctcgcaccctgaggttgcccaggggtgtatcttgggcgaaatacaaaaacaggactgcggatgcgtggacactggagacgcgaggagtgaaaactgcaagacttagattttgcgtggggttgtttttctttcagtcttgtgtgccctgctcaggtctcattggtacatagcagttcctttacgcactattcctttacgtcgtgttataataatataacactagtaagttaaaagttacaaaactagtaagaataaaaatgataactgtaaaaatgattgtttttaccttacagcgtttgtagctgcgtaggattaattatcttgagaatcacttattatacctccgttacttggcagtgttatcactccaaacacgtctgagaaaaataatttcttaaggcctggcatgtttccaggatataatcttgttgtctttaactgtagagtacttcgctacgtgcaaggagttaattgacaaggcattgtgcctggtgctaggaaacagtataagtactgtctatttagacgaataaatagaaaagttcgttttgatatttactatataatagtaattagcattttatgtgttgaaggagcaccgaagagaaaaagtgacagggaagtcttcc

SEQ ID NO: 3722 - DNA, 6000 bp, Homo sapiens
caatttacacttttatcagcaatgtatgagaattccaattgtttcacgccttggccaatgcttagctattgtccatcttaaagattttttagccattctgataggtgcctactggcatctcattgcagttgagtcccttttcatatatttactggtcatttaaaaagacttttttgtacagttcaactctcatccagctttctaatagattgtccttctttatttgaaggtgttgtctgtattctgcatatgaaccctttgtcagctttatgtgttgcaaatattttctcccaccctgtaggttgccttttcactcccttagtatcatctgagaatcccaatatgaagcaaaagtataaatgcaaagtagcagatggaatgaaaagaaacagaatttggaatttcttataagcaccattcaaacgaagaaaatgtgcctactttttccattatgtttaatatgatagaagaaaatgttacacagtacccttaatatggaatagctcccatgtcaaacataaagattatatgatccaaaacatcctaatctgcaattcagcaaagtaaaatgatttaatgataaggaacaggcatatagacaccacaaaattcttttctatggaaacactactttgcaaaagagcacagtaatcaccagtcctttgtagttaaattttaatgaagacacagggtttcttacactgtgttcttcctaagtttcaaaatgcagcgtcaggaatgtatttagagtgacatccagacatagtataacttacagtacactaactttgggaagtgatattcctgccaagaaatgtattaagctaaatccaatcctaagggaaggccagacaaacccaaattgaaagtctataaaataacttgccaataacattcaaactgttaagatcatgaaagtcaaggaaagactgaggaactgtttcagaatggagactacgtgacatggcaactaaatgcaacacataaatctgaggattagatagcataaatgcatcagcattagtttcctaagtttagtatttgcattgtaaagactttgtaggaagtacacactcactggtgttggggtataatgttggcagcttactctcaactagttcagaaaaaattcctttgtaccatacctgcaatttttctgagctagaaattgttgcaaaaaaaataaaaactttaaaaaaaaaagaggatttactcataagctagatttagtttctcccatcccaaattctagttaactaatggaagaaaacaccaactcataggtacgaaatttcaattaatgcttccaaggcttagaacaagctactttctggccaaaaactgccacttagactttggcactacaggcttttttatgttacacaatcaagtaggaccagtgtagagacttttctcacataggaccacataaaacttcattcacatttctcttaatttgataaccttctaatctgctttgtgctatggttatttgtacacatgtacaaaaaattggttgctacactctaaattctatattgagggtagaaatgcattctgttcatttcctttacaacatttaggaaaagccatgtgccacgtactgtactagggagtagaaaacaaagacactctcttcgatcttaattaccatcaagtaaagccatgaaaccacatacaagatactaaattgttaaacgggagaaaatagagtgggagaatgcttctgtctctaaaaagggaaaaacaaaaatatctcaaaacacagttcttgaaaagaacagtctcctggatcctcactgacaactagttcagaaagacttttagtatttctctttgtgcaatttaaaaggttaaactaataaatccttatatcaaataaaactaagctataaacaatgctagcaattatagcaaataggcagatgtactgttcttcaacagctaagcctgtgagaaacacatgttttcaacttgagtaaccctaacagtagcatcaggcctaggaagacgtctggacctagaagtctccacattcagccccatctgccacaatctcgaactgcagactgatgaaggcagagagagaaactgacacaaacgcaaaggcctcagagtttataaaaatcttagtttaaatacagaaataaagagaaaaagcttctatattaaatatctcaatttaagttcagaataaagtccctacatatgccatgatgcttcaccccatacttcagccaactcaggatggctaaagaatgtaagtggaatcagaaagaaaaactggaattacctatgttaaaataaggtatatgactatttcttgtttttgtttgggagatagtagtgcctgacaaatattttgcaaaccttaaagtggaattctctacataggcacaatcactccagcacaagtcaggaggacactgttcttacacatgcttttaatttgttcttctgtgtctcctcttcctcactagtaagaatgaaacaaaaacattgtatccacttaatgtaaagtggagccagctcttggagccggctattttcttcctgtgatacttgtctacgttacctggaattttagaaagaatttattaactgcaggttctttcctataattaggataaaagcatacaaatatcttaaggcttttggatcatcaagctgttcaatagagaaaacgactaaaacctagccctcaattcctaatcctgacatttcccggttgaggagtttgcaaaatagacttcttaccaatattcataaagttactattaacatagtaatattaaatggtctcagaatttcacatataagtaagtcttccagtagttagacaattggtggggagctaaaaattgaaaaacttcttagaggaaaaaaatacaacatacaacgctgacagattgtaacgagttttttccttagaaccagattgttgttaagaaatattctttgagctatttggtaatcatgagctcatcttcccacacaaaaatatcacgctgggtgaagtggctcacgcctgtaataccaccactttgggaggcgggggagtcccttgaggccaggagttcaagacaagcctgggcaacttaatgggacccccatctctacaaaaaaattaaattagccaagtatggtggctcgatcccgcactgctagccacctgggagactgatgcaggaggatcgcttgtgcccaggaattggaggctgcagtgatcccgccactgtatgcggcctggacaatacagccaaaccctgtctctaaaagacaaaagtcactaaacacataacgttcacagcagcacctcttaggagtcgcaatggtctgcatagttgctatttatccctgtttagtgcaatttgtatgtcatcttttcagttccccattagtaataattttttaaaaagtcatcttagggaagacttccctgtcactttttctcttcggtgctccttcaacacataaaatgctaattactattatatagtaaatatcaaaacgaacttttctatttattcgtctaaatagacagtacttatactgtttcctagcaccaggcacaatgccttgtcaattaactccttgcacgtagcgaagtactctacagttaaagacaacaagattatatcctggaaacatgccaggccttaagaaattatttttctcagacgtgtttggagtgataacactgccaagtaacggaggtataataagtgattctcaagataattaatcctacgcagctacaaacgctgtaaggtaaaaacaatcatttttacagttatcatttttattcttactagttttgtaacttttaacttactagtgttatattattataacacgacgtaaaggaatagtgcgtaaaggaactgctatgtaccaatgagacctgagcagggcacacaagactgaaagaaaaacaaccccacgcaaaatctaagtcttgcagttttcactcctcgcgtctccagtgtccacgcatccgcagtcctgtttttgtatttcgcccaagatacacccctgggcaacctcagggtgcgaggaacccagctctgcctcctgctccccgcggctcctgtactacccaaggctcgcgatcttccatgacccctcgaagttgcctccctttcccgggcaaagaaggggcagcgaccccgcctcgcccgccggaccgagccaggtccagcctggctcccccctggggccgtgcttcccccgcccccaacggtcctcaggcctgggtctcacctctccacccactccctcaggaagcgcatttcctcggtgtgcagaacgctcggatcctgcttacacattttcacaaaggcccgaagctcgttcactttgcgggggtccatggtagggaggtggtgggcgaaactgggggggctacggcccggttccaggcccaggcgctggctcggcgtgaccgcgcagaagggggcggctgccgcaagacagaacagactagaacctccccggccgctggctcctcccacccaacggtctcgtgacctcgggtcctccgcctgctcattcctactccctctgcgctgctcctgcgcgctccctagaatcttctagaagcgtggctgttcgtgctgttgcctgcctccctgcgcatacattctcatattcttaactaggaaccagctccctggatggggcaaccccagaaatgggcgacttcaaggaggcgggagataacatcccctccagggggcgacgtccaagagcatattgtgtggctgcgtgcactgagtagagctcaacgcccgggacctaaaaaaaaaaaaaaaaaagggcgtggagccggagggtcggtcccagctcggggcatgacgtcacaacctgcgccgccgcgcaaggaaggcccgcgagccgcctccgccggaaggggaggtgcggctggcccggtttcctggcgacgcggccctgcaggcggttgcgttccccgtcgttaccctctttctcttcccgacgcgtgagttaggccgtaatgccttggctgctctcagcccccaagctggttcccgctgtagcaaacgtccgcggcctctcaggttagactcttctcccacggtctcctcccatggtgtcccctggagggacccaagttggtctcaggcgatccctggttcggctgacccttctcctggtggggcctccgctccccaaccctctgtgctccgcggatttcttctataccggctgctcctggaaaggggtgggcccagtgtgttctctaccgttgaggtattttgtgaagccgaaatgactgcagagagaaaagtgtgccatcccccagaggggctgtcttccaagttactcggactccgaagttgtggcaattatcacacttaagtgacaaagtgtctcacatcaagtagctcttgtttctgttaggcgtgagagcttgctccagaatatacacgaagcatgtttagtaacaaattctttcagcagctcctcttaggagaggtaactgtttcgaaatacttctggggcgttctgtgtctgaaagtcctgtttgcaaagacaagacgaaggataaggagaataattttttgtagggtgtcctctattgcgagcaattaatctgatgaacataaagcttaatcagtgaaaactgaatcaccttccttgcaggcggatctgccattggatcgtatttcagttttttgggtcaatatatgaacaatgtgtgaaccagaacgtatggtatttgacatcaaagctatgtcttggcatatgtttatgttgatatacttgaattcatttaaaatggaatgttaattacatcgacttcttactataaaaaataaaaagttattgtccagtgcacagaacttgttcttcagttctcatagtaaagctgcagaaagacaactctccgtgggattaggtgaaaagaaagatgtgcaatttttcagtctttttttgagacaggctctcattctgttgctcagactggagtgcagtggc

SEQ ID NO: 3723 - DNA, 6000 bp, Homo sapiens
cccagagtgctctcactttccccaaccccgtccctgaagcatgtagggcccaggccacgcttcacagtcaggtggacacagaccccctgcaggcccctcccatctgctggctcatcttgagagggcccttgccccttaaagcctctgttttctcatctggaaaatgtcctaatagtacctgcatcagatccttgtgagggtgtcttcaggagaattggggcacaaaaatcgacagaaacccccttctctctgaagaccccaaactatcttgttattttattattattttttttttttctgagatggggtctcgctctgtcagccaggctggagtgcagtggcacgacctcagctcactgtaacctctggcttccgggttcaaacaattcttcctgcctcagcctcccaagtagctgggattacaggcgccagctacgacacccggctaatttttttttttttttaaatttcttatagagagagggtttcaccatgttggccaggctggtctcaaactcctgacttctggtgatccacccgcctcggtctcccaaagtgttgggattacaggcatgagccaccacaccaggcccaaattatctttttaaaaagagtattcagtgaattaaaagtagagcatggtggccgggtgcagtggctcacgcctgtaatcccagcactttgggaggccgaggcgcgcaggtcgcttgagaccaggagttcgagaccagcctggccaacatggtgaagccccgtctctactaaaatgcaaaagttagctgggcatggtggcacgtgcctgttatccgagctactggggtggctgaggcacgagaatcgcttgaacccaggaggtggaggttgcagtgagccaagatcgtgccattgcattccagcctgggcaacagagcgagactccatctcaaaaaaaaaaaaaaaagacttgaataaagaaattaggccaggagtggtggctcatgcctgtaatcccagcactttgggaggccaaagtgggcagatcacctgaggtcaggagtttgagactagcctccccaacatggcgaaaccccacctctcctaaaaatacaaaaaattagccgggcctggtggcaggtgcctgtaatcccacgtactcaggaggctgaggcaggagaatcgcttgaacctgggagttgggtgttgcagtgagctgagttgggtgttgcttatcgcactgctgtattccagcctgggcgataagagtgaaactccatctcaaaaaaaaagaaaagaaattaggccaggcgtgttggccaaggtgggtggatcacttgaggtcaggagttcaagaccagcctggctagcatggtgaaaccccatttctactaaaaatacaaaaaaatttagccaggcatggtggcccgtgcctgtagtcccagctacgtgggaggctgaggcaggagaatggcttgaacccaggaggcagaggctgcagtgagccgagatcacgccactgcactccagcctgggtgacagagccagactccgtctcaaaaaaaaaagggacgcggtggctcacgtctgtaatcccatcactttgggagggcgaggcgggcagatctcgaggtgaggagatcaagaccatcctggctaacggtgaaaccccgtctctactaaaaatacaaaaaatttgccgggcatggtggcgggcgcctgtagtcccagctactcgggaggctgaggcaggagaatggcgtgaacctgggaggcggagcttgcagtgagcggagattgcgccactgcactccagcctgggcgacagagagagactccgtctcaaaaaaaaaaaaaaaaaaaaaaaaaagccacggggaaataagaatacattgaggagtaaactaacattccccacattggtctgattgtgaattcttcttaactgttttgtcatccaagtagcgacacagggcctgctgcagccccccacccccaccccatttaggaggcccaagtggaaaggttcatgtgaggccaggcacctgcacacaacacagacacgaatcccgcaggccttttgtcccggcacctggcccagcacatagggagcgcccagcaaacatttgtgtcacatgagtgggtgtctcatttgtgtctgctgctcttagcagctggcctccctctctggccaaggtaagggaccctggaactctgacagtgggctccagccctcccactctctctggccttgagagcagtctcctcgagtctctgctgggggtcagagcagccagtgcttctgctgtgaaacgcagacctggggcaggcggaccccctcctcctaactcctgtaaattctcccgactctggcctcactgggccaccctctccagggacaggttccccgttcctgggttcccacaagcctcagtctgcccacatggctggcacaagggctaaatgagctgcctggtactcagtcaggcctctgcagccctcactaatgggtaataccagcaccaacatggatggacgtgtatgtgggtggcagggttatggctcagtcttctggctttgtccccacctctctgcctcacagagaggccttccctgccctggctcccctccagggtcctgtcccccatccctgtaccgtacacccacgctcacccacacctgcccccacccccacatcaccatacacccacgctcacccacacctgcccccagccccacttctcctttgcagctcccctccgcccacaccttcctgcctgggagctgctggcccatgtacaggggatggagagggtgggccagcgcccaccagtcagggctggctgactggggttctttgtgaaccttcagggtctcccaagctggaaacctgggggtcggccttgctcccctcactccatggccagccgctgcatcatcccctgccctgggccacctgccctggacgtgggccacagtgccagagagagggacccttgcaggtacagctcagaatctccctcctacccagacacccccaggttctgtactgccccgggactggtgccctgcccatccgcagcccggatgctccctcctccctcccagcatcccctgtggcagtggccatgcctgcccccagagcagctcaggctcccctttcatctctccaagccttagcccctgcagccctccgcctggagtgtttgcctccccctcgctgctgctcagggtctccctctgcccccaggctccctccccagcccctgagtttctcctctcactgtgcttccccagccctgagtgcttaggggtctgggtggcatgtgtggcatttaaccccatgctctctgctgagccctgagctcccagagttccctccagccctggccctggggagggggtagcatgtgaccaggagggcggaggggcttgtgtgtgtttctgagacgcagtctgagagagacacgggtgacagacagttggggaccccaaacactggggagcagagatagacaggaggggcccgcagtgagacacagaggtgagcaggagaggacacatagccctggagaaaaggagcaggtgtgggcgggcttccctccactgcagtcacagttccctcactcataggcagatcttcctgggtcctccctgcacaaagccccagtggctccctcgtgtcccccagccacagtccaagctccctaatgtgctagataaggccccagtccagcctttcggtcccagcactccctggacttcctgtttgggcctccaagcctttgctcccctttggccttcacccccatctgctccctagacctcagtccatctggcaaacacttcaccatcgccctctccatgaagccttccggcccaccttccaggatgacgtgagctggtgcccttgctgcgaggctgtcttcccccatcagcacaagtgtgagattccctcagggcagacccacatgctacttgggcctggtacaagtgtctgatgtcaggctgggcactgtggcttcacacctataatcccagcactttgggaggccgaggagggcggatcacctgaggtcaggagttcgagaccagcctggccaaatggtgaaaccccacctctactaaaaatacaaaaattagccgggcatggtggtgcatgcctgtaatcccagttactcgggaggctgaggcaggagaatcgcttgaatctgggaggcagaggttgcagtgagccgagattgcaccactgcacagagccagactctttttcaaaaaaaaaaaaaaaaaaagcaggtgtctgatatccccaaccagctctgtccaggaagggcaggaagagaggaggagacaggtgggttgggggagatggcaggggagcactcggggtcatggagaggctttggctagacggagcagaggaaccactcagggtctgtgtcctggctgcggggtccatccccctccctacccaagaggaggctctggtctgcccccagacacctcccagcacccagcagagggcccacccaggcggtgctggttgaggggctgaattggggaaccacaggtagaaagagaggccaggccgggtgcggtggctcacgcctgtaatcctagcactttgggaggccgaggcaggtggatcacgaggtcaggagttcaaaaccagtctgaccaagatggtgaaaccccgtctctactaaaaatacaaaaattagccgggcgtggcagtgggcgcctacaatctcagctactcgggaggctgaggcagagaattgtttgaacccgggaggcagagcttgcagtgagccgagatagcgccattgcactccagcctgggcgacagagcgagactccgtctcaaaaaaaaaaaaagaaaagaaaggggggccccaggcgagctcggtcccacccagcaggcgggggcggggcagggcagagtgctccccccgccccccgcttcctccccgagggccccggagcccagctcagcctcagtccccgcagcttgtgcggcggcgtcggcaccatgaggcgagggccccggagcctgcggggcagggacgcgccagcccccacgccctgcgtcccggccgagtgcttcgacctgctggtccgccactgcgtggcctgcgggctcctgcgcacgccgcggccgaaaccgggtaagggggacccacggggcgcgcggcgccggcagctgcggggagaacggggccccgatcgccagggcgcaggcagagccccgacccccgggggcgccgagggctgaaaggaccctgtgggcagggcctggaggggcccgcgatcaccgcgtggccctcaccgccgcctctctccctccccttgtccaccgccccccggctgtccctcccctccccggccagcctcgcccccctccgcccctccccgtccccgctcctccctcccctcggccccctggcctccctccctgtcccctcccgaagcagccggggccagcagccctgcgcccaggacggcgctgcagccgcaggagtcggtgggcgcgggggccggcgaggcggcgctgcccctgcccgggctgctctttggcgcccccgcgctgctgggcctggcactggtcctggcgctggtcctggtgggtctggtgagctggaggcggcgacagcggcggcttcgcggcgcgtcctccgcagaggcccccgacggagacaaggacggtgagttccgtgtgtaggggaaccagtctgagcggggcgcaggggctggggtgtcgggacggtctagggggagatgcatggcccctgagggggagagaagggctttaaggggaaacggagacagagtggaaaagagtttgcgctgaggagctcaggctggggagggagacatagtcctgcccctgagaccctggtcggagccaggaacagctctgccctgacagaccccagtgtgaggaagagacaggttgcaggaagggggccccgtctgagggaggagtctgtcctgccctttgggagtctaacggagcttggttccccc

SEQ ID NO: 3724 - DNA, 6000 bp, Homo sapiens
ttttttggagtcaagggttgcaacctagggcaactgtaaaatacatgtaaatagtgaagagataactcattttgaatcccagctctatcccttaacctctgaaagctctgtttcctcacctctaaagtgaggataatgaaaatagcatctgcctcctgaggttgtgagactgagataacgtggttgagaactgggcacatgttaatctatgttagcactaatgtgctgagggctctggctctttcttttttctttttcttcttttttttggttttgttttgttttgtttttgtttttgtttttttttgagacggaatctcgctctgtcggagtgcagtggtgcaattttggctcactgcaacctctacctcctgggttcaagtgattctcctgcctcagcctcccaagtagctgggattacaggcatgtggcaccatgcctggctaattttggtatttttagtagagacggggtttctccatgttggtcaggctggtctcgtactcacgacctcaggtgatccacctgcctcagcctcctagagtgctgggattacaggcgtaagccaccgcgcccagccgatcatttctgttttctagaaaattattttgtctgtttccccactagcattcctgatggttttccagagtcctatcccctgaagttctaattgctggcataatcacactctaaaaggctgaaccccagaatcattacctgaaaattcgtactaccagtggttcttcttcatgataaatcatggacaaattaagcctgagtttgtaaactctttggataccaactttctaccactcttggaagagatggaggaggtgtcagtcattttggttgatactagccctaggcctgccttgtcccaggagtttcttcaccttaatcacagaccaaattgcatacttttatcttcgaatcatctaaaatataatttcaaatcacaagacagaataaaataatctttgagagaggcagaaccttagaaaggagatattttatctcatttattttacagatgaagaaagtaaacttcagagagatcaaagtgatttgtctcaggtcacataaccagtggcagaaagaagagaattgctggaatgtcaagataagaatgaattctaggtttaaagttgtttaagtatatcccaaattaaatatttcattcctgagctctaaaacctatttacattgaagcctgatgtcctaaacacggtaattacaaagctgggtaatggtctccatcctttcctttcatgaatccatgtatgaaagttagctttatcaaactatttcatctccagaaaggcatgtacatttcatactgttcaagtctgtaattgtcagcaaaatcagacccaagaccgctagcttctcaattcagcctacagactgctcctctaatagacacactggactctcagggaggtagaatgggcaagctctaacaaaggacagcacttctgtgatggtgtggaagtaccaaaggtttgactgtactttaaaaaggtgacatggacggctgggtgcagtgactcatgcctgtaatcccagcactttgggaggccaacgcgggcagatcacaaggtcaggagatcgagaccagcctgaccaacatggtgaaaccctgtctctactaaaaatacaaaaaaattagccaggtgtggtggcgtgtgcctgtagtctcagctacactggaggctgaggcaggggaatcgcttgatctcaggaggcagaggttgcagtgagccaagatcgtgccactgcactccaacctgggcgacggagcgagactttgtctcaaaaaaaaaaaaaaaaaggtgacataggtgcagaaacaggtcagaaatgatctaagtcaagcttgtccaacccgccacccaggggccacatgtggcccaggacaactttgggtgcagcccaacacaaactcataaactttcaagaaatatgagattttgttgcaattttaagctcattggctattgttagtgttagtgtattttatgtatggctgaagacaattattcttccaatgtggcccaggtaaaccaaaagattggacacccaatctaagtgagcccaatttccaaatttactataaaactacattaattaaaacagtgtgccacttcacatccattaggatggcaataaagaaaaccaaaaaataacaagtgttggtgatgatgtggaaaaattggaaactttgtgcactgctgatggaaatgtaaaatagtgcagctatggaaaacagtatggtaattcctggaaaaatcttaaatggaattagcttatgatccagtgattccatttctgggcatatatccaaaataattgaaagcaggtttcaaagaggtatttgtacacccacattcataacagtactatttacaacagccaaaaggtagaagcaatctaaatatccactgacatatgaatggatagacaaaatatgatatacacatacaatggaatattattcagcctcaaaaaaggaaattctgacatgctacaacatggatgaaatggaagacatgctgagtgaaatcacccagctacaaaagaacaaatttttttttttttttttttgagacagagtctcgcactgtcacccaggctggagtgcagtggcgcaatctcggctcactgcaatctctgcctcccgggttcaagtgattctcctgcgtcagcctcctgagtagctgggattacaggtgcctgccaccacgccctgctaattttttgtatttttagtagagacggcgtttcatcatgttggccaggctggtctcgaactcctgacctcatgtgatccacccgcctcagcctcccagagtgcagggattacaggtgtgagccaccgcacctagcctacaagaacaaatattacatgattttactcacatatgagtagacaaatactagagtagacaaatttacagagagaaagtagaagggtggctgccaggaacttgggaaaagagggaaatggggagttactgtttaataatacagagtttcagttttgcaagatggaaaatgttctgtggacggatgggaggtactgagggttgtacaaccgtgtgaaatacagttaatgccagcgaactgtacacttaaaaatggttaaaatggcaactttcacataatgtgtatatatatctatagatctatagatatctagatatctgtagatctatagatctatagatagattttttttgtttgagacggagtctcgctctgtcacccaggctggaatgcagtggaccgatctcggctcactgcaagctctgcctcccaggttcacgccattcttctgcctcagcctcccgagtagctgggactacgggcgaccgccaccacgcccggctaattttttgtatttttagtagagaaagggtttcaccgtgttagccaggatggtctcgatctcctgacctcgtgatccgcctgcctcggcctcccaaagtgctgggattacaggcatgagccaccacgcccgcccatgtaatgtgtattttatagtttaaaaaaaaaacttataaaatagtgtggtactcagacacagatcattggaacaaaaatccagaaacagacccacacatatatggtcacaaggcgaaggtaattcaatgtataagagtcttttcaggccgggcgcggtggctcacgcctgtaatcccagcactttgggaggccgaggcgggcggatcacgaggtcaggagatcgagaccatcccggctaaaacggtgaaaccccgtctctactaaaaatacaaaaaattagccgggcgtagtggcgggcgcctgtagtcccagctacttgggaggctgaggcaggagaatggcgtgaacccgggaggcggagcttgcagtgagccgagatcccgccactgcactccagcctgggcgacagagcgagactccgtctcaaaaaaaaaaaaaagagtcttttcaacaaacggtaatggaacgactgtatatcccaataggaaaatgttgacacttacttgacaacataagcaaaaattaatgatattagatcatatcatagacttacacgttaaagactatgtaaaacatatatgagaacacagaatatcttcaagaacttgaggtaggcagagatttcctagcacaggaaaagcacaaaccattaaaatataaaactgaccaattgacttaatcagaattaaaaacttctttgccaaaaacgtcaaaacaatgaaacgacaggcccagattgggaaaaagacttcgcaatcatttatgtaacaaaagattttcattcagagcatacatatatctaacaaaacatttgtatccagaactgttaaacacgaaggaccagatttaaaaacgggcagaagactggaactgaaacttcacaaaagatgcagaatggtcagtaagcacaggacaaaaacggtgccagtgacgctggtgccaaagcgggaaggaacgcattcttcagcctaaaagacctaacagtaggacacggacataaccactcccggccaaaaagaacacagagcaacacaacgtcttggctaacgaaaactcaaagcctcaattcactcagttccttcacagcgctcggaaacagagaagtctcgcggtatcggaaaatgcgcggcgctcacagccacacctgacgagatggagggcgcaggcgcatccacggctttcagattgggcgactgacttcaaaggggggggcaaacagggaacgcgcaggtataggagcgctggctggaggctcctcgagagctccccagacacgcccccgtgcgtacgcccccgtgcgtacgcccccgctgccgccaccttcggttgaccacccccatctagactgtactctcgcggtatttgtcccgactctcgcggggtttagcgtggcattgggaggcccggcctgggggaggagacggcgttccgttagcggcgttggggtttggctgcagtggcagtgctttctcttctgctcacggggacccgctcaggctggaggccagccaggtgaagagctcgcccgcatgcgtgcgcgctgcgtgggagccgcgaggcccggggcgggagggggcctcgtcttggcctcctgcgctgtcgcgacgggccggcgtgaggcaccgtggcgcggacttcgtctcagccccgccctcgcccctgccctcgcccccgccctcgcccctgccctgaccgcttttctccccctctctcccagctcttgccgccacctcggtcgcgatgggggcgcaggaccggccgcagtgccacttcgacatcgagatcaaccgggagccgggtgagctggaaactggggagcgctgctggggccgaggcctgccttggcgaaggggaggggtctaccctcagcaaccctcccccggcctttttgggagcgggtaggaggcgcaggcaactttccgttttctcttgagagaaaatcagtgggagaggaaggtggcctgggcacacccctaactcgcagtccgggcctcttcctgccaaaccccacacaccccgctgcatctccggactgagtcctcgtagccagcctggcgccaagaaaaggaggtgcagttctttgaggactttttctctcccagtgtctccgtgaggcagacactcccgatccgatttccggttatcttgcttggtgctatgaagtttcaactagtaggaaatattgtgtgtttcctaatcacgatatatcactaatatgttaattttgcctctatttttccttaagaatctttagctagaatttcgtggttcctgggaaaatggcttagtgaagatcttttgtgataaaccagagcattttgtaccagcagaattgcagcatgcatgcacttagcattaatgtttgtctttagggaatccagacatttgttagtgtattttttttaaatgaaacatttccttctaaagcatagttatttcattctaagtagcagagcgtgcagggtttcaaactgt

SEQ ID NO: 3725 - DNA, 6000 bp, Homo sapiens
ttcaaatcagttaggacaaacaagaatgactcagagcagcagagctatccaactgttctctcccacgccactcttccccacctgcttatccgattgttataccaaacagtagtgtgcctaattaaaattgtgctccttaatccaccctattagagtaagttcatgttactctaatacaatctataagatggcattatttaattactcttctcaacaatcttgttatgtaagcactattacactggagtcctattattaggttaataatataacaggttaatgagcatatacagtgcaagtcatttaaatttcaggccattgcatctagtcactctactcatgagcttatgacccagggtgaccttgagagcggagatgcatttctcctattccctcagaacaaaccagatcccatatacctcactcgaagtatgagctattttgaatgtgagtctaaagtttagtttaattttgaatataagcaaattttcctgtcctgttagctttggaaccaaattaagaacaaaactgtatagtagttccatttcacaaagaggttgttaaacggcttgaccaaggacacaagtagtactcaaacatttgcctgaatcctttgtcgcctcttaagactaatttcttggtatcacttctaaatactttacaatgtttgctaaaaacacattttccagtctgtttttatgaatcttaagcagtaaagcaaatctaaacataactaattatattaaatgtatacagttaaacatactgactaaaagacattgtcagagtgggacaagacccatctatttgctatccagaagaaatccactttaaatattatacagaaaggttaaaagtaaaaggattgaaaatgatataccatgtaaacactaataaaacggaagtaactatattcatatctgaggcaaaggaaacttcagagccaggaaagttactaggaatataaggtgtcattacataataataaaagagttcactaagaagacaacaatcctaaatatgtatgtacccacctaagagcctcaaaatgaatgatgcaaaaactaagagaacttaaaagagaaatacggccgggcatgatggctcatgcctgtaatcccagcacttcgagaggccgaggcaggtggattgcttgggcccaggagttcaagaccagcctgggcatcatgaagaaaccctgtctctactaaaaatacaaaaaattagccaggcatggtagctcacacctgtagtcccagctactggggaggcagaggcacgagaatcacttgaaccaggaaggcagagggtgtggtgagccaagatcatgccactgcactccagcattccagcctgggcgacagagcaagactcagtctcaaaaaaaaaaaaaaaaaaaaaaaaaaaaaaaaaaaaaaaggagagaaatagataaatccacaattacagttgttatagttgcagacttcaatactcttctcctggtaatcaataaacaagtagaaaatcagcaaagatataaaagaattgaccaacactaatagccaactggatttgacatttatagaacacactacacaaaaatgtacattcaagtgcagaatgtacattcaagtgcacaaagaacggaaatcatgtgtgttctctagccataatggaattaaattaaaagtcatttgagactgtctcaaaaaaaaaaggtatcaaatcaacaatctatgcttcaacattaagaaactagaaaaagaacaaaataaaaattgaagcaagcattagaaagaaagagaacaatgaaattgaaaacaaaaatagaaacaaaattcaatcagatcaaaatctggttctctgaaaatgtataatgaataaacctctcgtcagactgacaaaggaaaaagacaaaaggaagaattatcaatatcaggaatgaaaagagacaccactacagaccccacagatattaaaagaggctgtgacaaacaactctaagcacataaacttgacaacttagataaaatgcaccaatttctttaataaaaaccacaggctaggcaccgtggctcacacctgtaattctagcactttcggaggccgaggtgggcggatcacttgaggtcaggagttcagaccagcctggccaacatgatgaaaccctgtctctaataaaaatacaaaaaaattagccaggggtggtggcacatgcctgtaatcccagctactagggaggctgaggcaggagaatcgcttgaacctgggaggcggaggttgcactgagccgagatggcaccactgcactccagcctgggtgaaaaagtgagacttcgcctcaaaaaaaaaaaaaaaaaaaaagttgtgtaaaatccactatttagttaatatactcaaaaagtgctagttatttcacaagactgaaccatatgaaatttccaactatcaaatgattaaacctagaacaatgtaagcattgcatttccttgttttatatgattcggcgttctcaagagtgctaatcacatctacacatctatcacaatgaattgccttggatgttgaggaatgaggttcattgaacatttgtcaaacatattctggagatttttcacaacacaggttatgtgcaaatctaggatctgaacatttactaggaaaggagtacttaactacagaaatttttatttgtactttttcttaagctgtttttttttttttttttttttttttagaaacaagatcttgctctgttgaccaagctggagtgcagtggtgcaatcatagctcatggcagccttaaactcctgagctcaagccatcctcccacctcacccttccaagtacaggtgagcaccaccatgcctggctaattaaaaaaaaattgttttttgtagacagggtcttgctatattgcccaggctggtctcaaactcctgggttcaagcaatcctcctgcctgggcctccctaagtactgggattactggtatgagccaccatgcttggtcatacttctactcttcagcaatctactatttttcttttcttttctttttttttttttttgagacagggtctcactccgtcacccaggctgacatgcagtggtataatctctactcactgcaacctctgcttcccaggctcaagcagtccttcagtctcagcctcccaaatagctgggactacaggcaaaaactaagagagccaccatgcccagctaatttttttattttttgtagagatggggtttcgccatgtaggccaggctggtctcgaactcctgacctcaaaatgatacacccgcgtctgcctcccaaagtgctgggattacaggcgtgagctatttttaattcttaatagaaaataaccctgttatctaaagcatggattcactacaaaataaagattaaggtccatcaaggctttctagtaacacttatttaaaaaaaaaaaaaaaaaagatcaatcaaggctaaaaacattaaaaagagagagaaggcaaccaaatttccaggattatctcatccctttgctcgaaaccctttaatatcttcctacctcactgagtcagtcctacaggccatttcttactattctctttcctcttctactccagccacactgggcaccctgctgtccctcaaacatgcaagtacagtcctccattgtttaataaccaggacggattctgagaaatgtgtaattaggcaatttcgtcattgtgtgaacatcatggaatgtatttaaacacacctagatggtacggcctactacacacctaagctatatagtctatttgctcctaggctacaaacctgtacaggatgttactccactgaataccgtaggcaactttaacacaatgaagtatttgtatatctaaacacagctaaacattaaaaagttaccaaaaaaaggtattatatataagaccattgttaaagatagaaatgtcatttggcgcctgactgtatactactcctcacctcagggctgtgctgtttccctctaccacgaatgctcttcttaaatacggctcacttcatctccttctgatacctgcttaaatctcatcttctcaaaatggccttgtctgaccaacttattaaaatagtatcccaactacaagtcactgttatttttttcctagttgtccgtcttccccccaatagaatataaactataaaaggaagaggcctttgttttatgcgctgctctatctccagaccctagaacagtagcaggctctcataagaatatgcagaacaagatgttgcacaaagacaacacatatatatatgtctccaattaaaacttttgtcacggataacaaaaaaagctaagaaaacagtttgaaaccctgcacgctctgctacttagaatgaaataactatgctttagaaggaaatgtttcatttaaaaaaaatacactaacaaatgtctggattccctaaagacaaacattaatgctaagtgcatgcatgctgcaattctgctggtacaaaatgctctggtttatcacaaaagatcttcactaagccattttcccaggaaccacgaaattctagctaaagattcttaaggaaaaatagaggcaaaattaacatattagtgatatatcgtgattaggaaacacacaatatttcctactagttgaaacttcatagcaccaagcaagataaccggaaatcggatcgggagtgtctgcctcacggagacactgggagagaaaaagtcctcaaagaactgcacctccttttcttggcgccaggctggctacgaggactcagtccggagatgcagcggggtgtgtggggtttggcaggaagaggcccggactgcgagttaggggtgtgcccaggccaccttcctctcccactgattttctctcaagagaaaacggaaagttgcctgcgcctcctacccgctcccaaaaaggccgggggagggttgctgagggtagacccctccccttcgccaaggcaggcctcggccccagcagcgctccccagtttccagctcacccggctcccggttgatctcgatgtcgaagtggcactgcggccggtcctgcgcccccatcgcgaccgaggtggcggcaagagctgggagagagggggagaaaagcggtcagggcaggggcgagggcgggggcgagggcaggggcgagggcggggctgagacgaagtccgcgccacggtgcctcacgccggcccgtcgcgacagcgcaggaggccaagacgaggccccctcccgccccgggcctcgcggctcccacgcagcgcgcacgcatgcgggcgagctcttcacctggctggcctccagcctgagcgggtccccgtgagcagaagagaaagcactgccactgcagccaaaccccaacgccgctaacggaacgccgtctcctcccccaggccgggcctcccaatgccacgctaaaccccgcgagagtcgggacaaataccgcgagagtacagtctagatgggggtggtcaaccgaaggtggcggcagcgggggcgtacgcacgggggcgtacgcacgggggcgtgtctggggagctctcgaggagcctccagccagcgctcctatacctgcgcgttccctgtttgcccccccctttgaagtcagtcgcccaatctgaaagccgtggatgcgcctgcgccctccatctcgtcaggtgtggctgtgagcgccgcgcattttccgataccgcgagacttctctgtttccgagcgctgtgaaggaactgagtgaattgaggctttgagttttcgttagccaagacgttgtgttgctctgtgttctttttggccgggagtggttatgtccgtgtcctactgttaggtcttttaggctgaagaatgcgttccttcccgctttggcaccagcgtcactggcaccgtttttgtcctgtgcttactgaccattctgcatcttttgtgaagtttcagttccagtcttctgcccgtttttaaatctggtccttcgtgtttaacagttctggataca

SEQ ID NO: 3726 - DNA, 6000 bp, Homo sapiens
caagatcgcgccactgcactccagcctgggcgacagagcaagactcctcaaaaaaaaaaaaaaaatagagctttgatgtaccagtgccacccctaggtgcatgcctatgtcccaaagttaaccattattctaaactttggttataattttgttgtctttctttatagctttaccccaagtgtttctatctttatacaatgttatgtttgcactttttattaagtaaaatacttttatatatatagatgttctacatttgccttcttcattcaacattgtgttctagagatatatccttgctgaaacatgtagctgtagttcattttcttcagaatatttcgttatatatctctaccttaatgtttttttaacccattctaccattagtggagatttggtttattttcttctcagtgttattggtgttataaatcaggcttctatgaacatacttgtgccaatcttttcttgtttttctttattttcttctgtttgattttaaccatggttgttttgagagttcctcattagctgacactgtcatatccactgtgaggagtttgtgagaggcctttcttcttgttgtgttttcccctttctgccctaccagtaattaattttaatatcatgatgagtcaacataattatatattttttcaattgctttaattgtagatcaagaagctactctagaagtcggagcagaggatggtacagcagaggccgaaccagaagccggagcagttcctaccggagttacaaaagtcacaggtgagcttgtgatctcaccctgtgatgtggtctccatcatgtccactttttaaggctacataggcagagggggtagttgttgagaagaatcatgtcattactgaatatactactggcctattttctcatgtagttttttctatgtaagagctgtggaattcttgactattcctctgttgggatcttatcagagtgaggcaagaggagcagtagaaatatttaagaagccttgacccctacctccacctcccccacatgcatcttccttaacctaagttttacatctgcattcacctcttgacatgggttagagattgggataggaagattgtagagaggggaccaagaggaagaagtatatatatggtgggaagggtggccccagatttctagttctcctagcttctttccctcttttgcatctgaggtattttctactgctgtcacttcactttacttacaaaggtcctacctgtacagacctttcccctaactccacccagtttagagcctccctagtgactatatgcatctcagagaagaactgcataaaacttgatcttatgaaatccaataggctttttaaaaaatccaatatacttttgatatgaaaacaaaacaaatgtagctgtgggatttcactgtattttcaccttgatgggcaaataaatgtctagatatttggtatagcctgtcctgccctgatctataagatgatggtccttcatgtgattaatattaggacgtccagcaggagcagatccaggagcagctcatatgatccccacagtcgatccaggtatgaacagggattgggaaaccaccagtggggcagaactgaaagatcttgttttgtaaactgtttgttcaaagtggtattttattgagtaactaaatgcatatatttgtctcctgaaaccataccttttctaaatgaggtctgttcgacaagttttatctgttggcccattgtactccagtgtcaaaaatgacaatatcaaattgtaatggcaggtgtttattgaatataattgcctacagagatccaccaggttcaaactaactcgttaactttgtgatatttttcaatgcagaaaagaaattaacatttttctctttaattatggtaagtctcatttggggcaattgttaaatgtttccagtacttgttttggaaatatatcctcatgctgtcacctagtgcccatgttctaagctagaacactcctgagatcctaaaaagaaataggaacatatgagtatctgagtgggaaaatttagtgtttgttgttgccgttaaagcaggtcctacacctacgatagctactatagcaggagtcggagtcgaagtagaagccagagaagtgacagttaccaccgaggcagaagttataatcggcggtccaggtgggtctctctcctttatcgtcctttatcgcactgtaggccacggtgggcacttgatgtgggagggtgatgggctgctagtggaagagaaagtggtataatcttccaaggacagaaatacttcttcctttaaatctgaacaacccacaagcagccactaaaagtggcttttatattaagagttgccaggtaatatttgttggttattattaatgtttgaatctaaaatgggtttctaaatattcacatatcttggacagacctttcttttggaaagaaagaaggccacccaaaccatggccacttgcttaaatagaaccacttgctagcagtagccagtttctcattttttttaaataaaaaaatacataatataatttgcttcagcagcaggattgaggtttatatgttgtcaattatttagtaaaatacattttttatgtattatatgtattatgtttaacatattttggcttctgcaaaagtctttatgttaacttttgtactgtccttttctggtggcttctggtcttgccttcccctgtccattgcaactgcaatgatgcttgtaaatatcagtctgatctggatactcccttgcttgaaactcttcaaggactccctgctgctttcatgatcaggtccagcctcctcagcaccaactccagctcacactctttctggcttccctcctttaaagtgttgggacttttccttctgcctggagacacacgtgtcctcttcaccatctccccttttgccacttgaaatggccagttcccatctaccctgcagatctccactgtccctgggcagccctccctgatgcctaatcctaggatacagtccctcccatgtgcctctaagacagccctttgctcctactgtggctccccttgctcctaaattacttgtcttgctgactattctattctgtccttgaaccccagagaactatacttggttttgtgtctttgtgtgtgtgtgtgtgtgttcccagcatcttgcaaaatgcctggctcacagtgaatgtttttcaaaataactgaatgggacccatgaccaggtcctcttgactcaatatcccagtggtcctgttcatgcccagggccacccccacccctcattggaccccattttggtttccattccttgagtgaaactatttgtgcaccttttccccattacttttctcaggtaatctattcaaatattgatactcattttgggtaatatggggaaactattctgctcattggttttttgtttttgtggtcccagcatttgcatgaatgaatttcacacaaatttcctaagatgtgatgtttctttattttatcttaatcttgacattactacaacttgtcatttaaaacagcttcaaaaagtccatagtgtgagtcgggcacggtggctcacgcctgtaatcccagcactttgggaggctgaggcaggtggatcgtctgaggtcaggagttgaagaccagcctggccaacatagtgaaaccccgtctctactaaataaaaaaaattagctgggcgtggtggcgggcacctgtaattgcagctactagggaggctgaggcaggagaatcacttgaacccgggaggtggaggttgcagtgagttgagagcatgccgttgcactccaacctgggcaaaaagagtgaaactccatctcaaaaagaaaaagaaaagtccatggtgttgccatagtcagtaccctacctctgtgttatgctgcatcaatagtgcatcagttatatgagtggcttgaaaacactattgatgttttcaagccactcatataaaaaacaagctataagaggaattcaaagattttacagttacaagatttttatatattttgttttgttattacaggagttgtagatcttatggctctgacagtgaaagtgaccgaagttactctcatcaccggagccccagtgagagcagcagatacagttgaaaacgtccggatacaaattatatcttatttgtaaatatctggcaacttagcttaagaaatgtaatgacagtctgttgttctatttcaatatcagaggtgaatttcaaaaatagacacttcttaattgttactggttcatttacatgtggggagaagaatttaaaatacagatatgtctcctaaaaatatttttatgccacattttacagtagccaactatggaaatgaatttcattttcttgaatcaagaaatcgtgaaatttatctatgtataatttgcaatattattttaagtctatttcactctatcttacgtatcccttagaatacagattctttttgcctgtttttccagttttagcatatatgctgccaagcatagaactgtgaaggagaactgttaaaggcggccaaatatttatatactgattacatagagtcttgtacatatgtgctctaaaaacaaaccacccagaattgatactgttggtaaccaggagtataaggcagtggctctggggttcttaattcattcctaacttctttgatacttcacaggattaggaaagtggtcatcatacatcccacacagtctgtattacttcaggcttgtgggcaaggttaggaagaatcaatcagccttaactataaatacctgcactgtctctgaggacttactattttatgttctttttaatcaataccgatcagaagtttaggttataaaaacaattctacttcatgctttggtgcttggtaatttttggtgcgtctttaagcattactcttatatatcatatattaaaataccataaaaatgaaattcagacaaaatcactggcaccaaaaatggtttattctgagctgtcttcactttgactatttggggggcttctctcaagtacagatgtgggttggggtcccctggagcaggcaggattggcagtaagagatattggccactcaagtctactgtgtgtgtgtgcctctggaagagtgaagaatggacttcaaaagtaacatcaaaaatctaactgccaccatcctggagacattttgcagggctttcctttcaagtctttcaagtacaggatattaccacaacagcagctgaactgttgtaaccagcatgtttttcctatttccactgtgacctgcagctgactcaaagccttgcgtgacctgacccaggtgcaagagacaggggaagagggatagagggtatagcataaattacatattttcatggctttgggtggttcctccaaaaataattggacctgtaaaaactagtgtgtgtgtgtgtgtgtgtgtgtgtgtgtgtgtggtttttttttttaatctttactttgaatttgttccccaagtgtacttaatcaccttagtgccagtttaatccagttatgcagaagaaattcatattggttgcctgatgtagagctcagcaccaccctaccacaggccttgtctggtgtatttgggaagtggaaaagagccctcagttggagggagctgacaacccttggtggagggagggtgcccttgaatgtattaaaactatcacccaaagaaggtatgaaaacagggtaaggtggtcagttgtttgccaggtcaatagacagaaagtacattagaaaacaggacttaggccaaacaaacaatactggatactgaatacaaaacagtatgatttatattaaaggtttccaaaggttgcctgcaaaggagaatattactactagtcagcaggaaaaaaatgcattcagaacccaagcagaaactgccaaatgtaattaggttaagaaaagttacccttgggcagtgtattagttttctattgctgtgtgaca

SEQ ID NO: 3727 - DNA, 6000 bp, Homo sapiens
ttcctaagcaccagtgccacagagagtggcttaagaagcagactccagcaaaaccctggacctcaactgttagactaatctagggtaaacaaaggcaaaaggcagcttcccactccctctttgtataagctgactcctgccagacttgcaaaaactggaacagacatcagaggcttggaatggacaaaagagcaagtaggtggccaggccaacagcatctttatagagatgtcagtgctgacgtgcactgattgaagatatccttgtggaaaaaccacactccagacaccctgtcttgcttgtactgagccacaatataaggccctccaatgtatcccagactcactcctcctagagctgtggcctccagctctcttgggcgggtaagacagatactgtatcaaggggcagggtatcaagcgcagcaccccccgcccccgccacctcctttctgctgagtgcctgctgccctctagtggtacacacccacacacatcagctggccccagcccctatgtcctgctctggtattttcagcactggtgggttgagagataaatgggaatgaataaccccccaaactctgcaactggaaagcagaaactggtaggagcctcctggggcaaaaccccattttggtattcactataattctgcaaggacagctagaaattttttttctttaataaaaaaatcccagacacactttgaagtcctagagtacaccagcaacagaaggaagggaatcccctcatgggggtactgtagggccagcatcatcaggaaagctccaggcttcacatctgatacagtattgtcaggagcccacttaaaaaataaattacaaaaaggctgttttgggagtaagcagttgaactgttttttccccctcaggtgcaacagagattgagcagactacaaatcggtccgtgcactggctgccttgggggcatatttaggcatcagttcatttatcttccggatgtagtcagacttttctgcacagcctttgcatgtctccccccagtcatccagaatcttcttcagctctttaactcggagcttcttcaggtccactgtgctcaggtcgatctgcttgtctggaggagagagcagggagagtcactgactgggtggagcacctgcagtcccccagtagtcccagagtatgtcactccctgaacggccaaaccagccctactggtttcagaggaagagacatttccagacacatttacaggcatgtcagtgcctactgcccccacaagagggaactagcctcttcaccaggaaggctggctacatattatgtctactacagatatgcagcgtgaacaaggatagggacagaggccacactgtccttataggagaaacatggttcccatcttccaagtgcctctgacatagtcaccacatactaacaactccaggctggtgccaaagagcagccctgctcaggcctttgagttaggaacttactctccatgaccacagtgacctggagccaactggacctgtaccaggaagacgcaagtaggtgaacacaggtccttggccattcaagtttttcagaagaggccctgactgtttctgaagactgggactatgtacaccagagacccagtcagcaagagagatgctgtagttcctaactcttgggcttgcatgcttggacatagtgtttcttttcagaatagtaaaaatcactggggcttcagagcttgcagccagaaccagcctgttaaacccaagtcgtactatgtcccttctctgctgaaaaactcctaatgctcctaacttcacgcagattaaaagccctcaccagcctgcaatgctctctgacttgccatgccactggacacctttatcctgcctgtatcctcttccattagctggcctcttggctaatcctcacctccttcaaagtttgctgaaatatcacttcttcaataaggcctattctgacctccacccacttccatgccagagccctccagcatttagcaccatctgtcatacaatacaacccactcatgactctagctcatcattttcctctcccagatgggaaacaaacccagaaggtgcacagcattcattaagaaaggactaggcatactcaccatacttaagctcacatatctggctgtccttcttcttaagcttctcacagatcttctccacagggatgtggtgggccagaggctttgatacctcattgatgattttggtggctgcatcatctgtggccccgatatagtagcactggagcaataaaggacaatggccttcaggaggtgcttgagagccatctcctccaaacatactgacaccttgaaacatcatctctctgtagggccttacttgtgttttgagatagggctccctgtcacccaggctggaatgcagtggcatgatcacggctccctgcagcttcaatctgttgggtggtgatcctcccctctcagccaccctagtagctgggtctaccggtgtgggccaccacacccagctaactaaaacaatttttttttttttttgagataaagttttgctctgtcacccaggctggagtgcagtggcgcaatcttggctcggctcactgcaacctccgcctcccaggttcaagcaattctccctgcctcagcctcctgagcagctgggattacaggcgcctgtcaccatgcctggctaatttttgtattttttagtagagatagagttttgccatgttggccaggctggtcttgaactcctgacctcaggtgatccacccacctcggtctcccaaagtgctgagattacaggtgtgagccaccacgcctagcctaaaaatttttttgtgcagacaggatttcaccactttgcccaggctgatctcaaactcctaagttcaagcaatcctcccaccttggcctcccaaagtgctaggaagacaggcatgagccaccgcacctggcccacagcggcatttttcggtgccctgcctgtactggtagtcagattcagccagtgtaaaccctggactcttaacacatgctcagtccaagctgacagccaccaaatgaatttaagtgtcaccagggttcaaacctttaacagagagaaaagccagagactgtcagagaaattcaagttagaaaacccattgcttcactagggcttttgtcttggattcggcccttgcctatcctgtaggcaccctgtcaccttctcctgtccacatacatgccacactctttcaggcctctgggcactcacactgctgttccctgtatgggatggtcttaccccacttcaatgataacccttcctcagagacttcttggccactctaaatcagcacctgctggtccattttcttcatgacacccagacattgcattatttgtgtgtccgactgtcacttctttcccctgatattcccagtgcctagcacatagtaggtgcttaataaagactaacaggataaaaaaaaatcacagttgcagaacacatgctgctttgggaaggacatagaagcacttcagtcttctcacattagtttatggagagagtagctggcttcctgaacagagaggtgggcaaggccttttatcaaacggctggtgaagccgagggttaacatgagccagggccagttggggaggatcaccagctacttaccaaccgattctctttgcctcttgcttcccggcagaactttataagttcgttttcaatagtggctggtgagaatgtgacatctctgtctttgaggtcctggtaaaatcttcccagataagaaatacaaactggaaaagagagggacgggagatgctcagcaatcaccaagctgttccaatccaccagaaaagaactccgccagcaattttaataggagacacggagatgaatcattagaggtgagcttttccatcaccgatttttctcaggtgtctacaggtagacagaacccggttccaagtggcgggggtcccctggtacacccagggcatcaaaggaccaagcatcacccaatgacctataaacgacttctccctgctcctttcatcaagtttaagcccatggtgaacacgtgtccttgagacgggactcactgtgacctcataaatggagagactggaaggtgaagagaaaaatgatcaaaatgctgctgctaatttccaaatacaacagcggacccagaggtgcagcttcgtgatcccaacagacagggcgcagcacccacggccagccctggagctcccgacgccgaacggggagcggtaacctctagatggtggtggggacaataactcaggagtgatggagatttcaggacaagttttcaacgggatctagtctcaacttttcttcgtcggaccaatgttttctaggcccaagaaagatttactagggcgggcgccggagcctcctcatgcaggccccgcggggacctgctgtcgcccccgcccccgcccccgccctcgccctcttggccccggccgtctggtgatgttgtggggttcagcgccgccgccagaacggtcacggagcgcggcccccggccccctatcccgcaccttcgcagtcgcccggccgcagcgcccggctgcccggcagcacgctcagagccagcgccaccgccagcccctgcgtggcccacatcctcctcatcctcctcctcctcctcctcctcctcctcctccgctgccgccgccgaccgactgaaccgcacccgccgcgccgcaccgcctccaagtcccggccgcgcgccgtagctccccattggcggggggccccccggcgccctcccacatgccacttccccattggtccaggagccgcgagcccagacgggcggctccacgctgccctccctcattggctggtggtgtctgagccctagacagttgtcggccgctgattgaacccgggctggccgcaggaagcgactacagcagcgacggaagcggtgtgggccgccatcttgggtaagggcagcgactgtggctgaggctgggtactgctagctgaatggggttcggccacgccttacatctgttgagttgacccgcgtacccctgccctgggccccaggctccctcgaaaacccctgctgatctcctcgcccggactccgactcgtggtgcaggagttctggggtcagccaagacaacaggttaggcaggaagggcgggcggccgcaggcaaggctcaaagaggtttcttttttcttctttcattcgcgtgggcaacggatccaacctttgaaagcccacctgctgatcctccacctgaccggagcccgccgtgcataggctgataggagacgtgcggggtggacggactgcgggacatctgaaggaagggctcaaggcgcgccaagctcaaagctgggccgccactctagaccgtggagggaagcgcccgggccagatcatcggtcgaggacatggggtcgcctcagagtgggaaggtgaggggctcgggaggtgcccttacaagctctgaatcgtggcttggtggctggccagcctcctcctgcctccccggctaggccctcggggtcccccgctgccgtgggacctcctgagtggggtcccgggaatcaccagagaagcactggaggatgtttccttttcgactgccctcctttcaagtgccctcctggctgcctgccttcaaggcaggatgcgggaaccgttggctctactcagtgcaaaaaggacatgtctatagggctaaaaagggcttggagcccggcgacaagggttggagaggggcacatcctctgctcccattcagtgaattcagtggatcagtatcacgtatttatctttaattcacatcacagcagtcaaggaagtggggaaagggggaaaaaaaatcaagtggcagatatttacatctaaaattcacattacttgttggattttgaacatgctaccacaatatatacagtaaaatacctcttgggacaatggtacaaattttgtttcctttaactttgct

SEQ ID NO: 3728 - DNA, 6000 bp, Homo sapiens
ttgtgtcctgcagcaaatgtgatgggggcagggagatcagagggtcctggagacaacaacacacagtaccaagagtgtgtgggcagtgagcactgggaaacctgggggctctcagccagcaccaaggtatcaacacactgtagttcgctagctaaacaaatgttcctgtggtggatcagagagcatttcaaactagaattcagtaaaagcaagaactttatgaaaaactcaggagagtaaaatttcctacctgttagcttgtctgcaaattggaaaagactgagtctatcacagattttagcagcagaatacattcctctggtccacggcccaccagggttctttctgcccctcctcaacaggcctgatgacccagcctttatgtcagtatcccagagccaccgacggcagcctgggacctgggaccagggggcaccaatgcccagcagccagggcagggcaattttttggccacagaaatgcagatgattctggagttccactggcttaggggtggtgggaggagctgggagcttgctgctgaagaaacaagaaacatgctgttgatgagggttaaagttcattcataagcaggctcttggtcttcctatggcgggcaagtcagcctgtctggagagagggattctaacatgcccaccctttccttcgcagtctcctctccaccctatcccagcctcccccacaagcccccagtcaggtctggacggcagcaactctacgctgtccggcagtgccagcagcggcgtgtcctccttgagtgagagtaactttgggcactcctcggaggccccacctcgcactgacaccatggactccatgccaagtcaggcctggaatgctgacgaagatcttgagccaccctacctccctgtccactacagcctctctgagtctgccgtcctggactccatcaaggcccagccatgccgaagccactcagccccagggtgcgtcatccctcaggaccccatggacccgcctgcgctgccgcccaagccctaccacccccgcctgccggccctggagcacgatgagggggtgctgctgcgtgaagagactgagaggcctcgaggcctgcaccgcaaggctccattgcctcctgggagcgctaaggaggagcaggcccgcatggcctgggagcacggccgaggggagcagtgaggggcaacgaggcggctgggatgccgccctcagtaagcagcttgccaatcactccaggtctgaaaagcaagtcccccagccccaccccagggagccagagaggcttgcactcaggagagaaccacccccaagtctccgttctactgccgtgaactcatgtgttgccatgtacagaggccacagcagcatgaagggttgtggcttccctttttatttttttacatttccatttctatgggttttcctttctttcctttatgcagtagatgctttcttcctcctgcagttctggaccatgtggagctacatggagaaattgcacagacagaatcactttgccacactgcagggcccaggagtgggagcccaggccctccctccagggtagagatgcaccgaatggaaattgcactaaggacctcttcctttgctgtatggacagaagagttcatggttgcattcagggattgcaaggaccatatagacatgtcacaggtggaaaaagggccacaagccgttttgcacaaatgcctgcccacctgcccctcttccatccaggagtgtgctactgaggggctggctggaccaacctgctggctcaggcatgtgactggcctaactgcatgcccagggcactgccagggttcaatgggccagccgtctcctactccaccttggatttttctctccatcacatcatttctgaccatttgctcccttccattcttgaaacacctcatgccccacaggagccccagtggtgactggatctgcaagggttatctcccgccctctggggtttgagtggaggtatggagccagagaggctatcctagctaccttcctcctagggggagctggtccccttcctatgtggtagagagactggtgtaagagtgtggggtgtggcaggcgccggaaatcctcaaagctttcagaagcatccagaatgcctaccatcagctcctgaatcagggattttcagcactacctctgagccatggggttggctgcccagccaggcttccaggccctgaggacatgtggtcaggttcagcaggctcctgggtaaagagggtgggagggggcttctccttttggaagcagatagccatgcaggtagaattgtcatctcccaagtggccacatacagcaacccactccaggccatggggaccaccactcagggttcggggctggcaggagggtagtttctccagtctccccagtctgttggtgtctttataggaaactataaagcagagcagtggtgtctttagaggaaactcattcaagtcagggcactgattttcctctcagtttattatttggggggatagggtcaggtgggtatagtagtactttaccagggtgcttttaagttactttaaaaaaagcctacaaaatattttttttcttttatttgctcgagttcacattaatgatggtcacaaggctgccttgttgggcaggcgtattgcccccagttcctcttctgctggcctgtatgacctccacagccaggccctgggcccaagccccttgtcccttctccactgcccctctttccagacagtaaaggccatggtcagtgtgtttttctcttgtaaacaaaccccagcttgtttaacagaaatgctaataacctactgggaaagatggaggtctaaattacctccagggtttttctgggggtttatcaccagtgtgggtcccttctgataccaccaggttcactccaggcagagtggggcggaaggctgctgaggatatgggtcagttacagcagccctcacctcaaagggctggcctgcttctcagcctacattcatttgcaagcttcaatctctggaccatctggtgttcacaggtgttagagggttaggggttaggggctagttttggatttgattcataggtaggagggcttagattttaaggcacttctgaaagtcaatccctggacaaggcagtcatcacataagaacagctaccttctccacttggtggcacaagaggtagggaggggagtatgggttcatttggcttcgcattatgcaaggtgaaaccgtttgttttccctctccattttccctaactaaatgaaaaggacacattctgaaatcccttttgttggagaataagtcagtctgaggggaaatgggaggccagagatgagaaccctttgaaaagattgtaaaatactgattttcattctttcaagcttatttgtaaatacctatttgaatgctgtgtatttgtacaggaatttgagcaaaaaatgtatagagtgtgatgtccaattggtattcagcactataaatgtgtttttaacctcccgcattctgtgcttatttaaaacaaggaaacttctaaccatttcttttgtgtattcatgtttaaagaaaaaaagtgatttaaaaatgatcttacctgtaccagaaaagcaaagttaaaggaaacaaaatttgtaccattgtcccaagaggtattttactgtatatattgtggtagcatgttcaaaatccaacaagtaatgtgaattttagatgtaaatatctgccacttgattttttttccccctttccccacttccttgactgctgtgatgtgaattaaagataaatacgtgatactgatccactgaattcactgaatgggagcagaggatgtgcccctctccaacccttgtcgccgggctccaagccctttttagccctatagacatgtcctttttgcactgagtagagccaacggttcccgcatcctgccttgaaggcaggcagccaggagggcacttgaaaggagggcagtcgaaaaggaaacatcctccagtgcttctctggtgattcccgggaccccactcaggaggtcccacggcagcgggggaccccgagggcctagccggggaggcaggaggaggctggccagccaccaagccacgattcagagcttgtaagggcacctcccgagcccctcaccttcccactctgaggcgaccccatgtcctcgaccgatgatctggcccgggcgcttccctccacggtctagagtggcggcccagctttgagcttggcgcgccttgagcccttccttcagatgtcccgcagtccgtccaccccgcacgtctcctatcagcctatgcacggcgggctccggtcaggtggaggatcagcaggtgggctttcaaaggttggatccgttgcccacgcgaatgaaagaagaaaaaagaaacctctttgagccttgcctgcggccgcccgcccttcctgcctaacctgttgtcttggctgaccccagaactcctgcaccacgagtcggagtccgggcgaggagatcagcaggggttttcgagggagcctggggcccagggcaggggtacgcgggtcaactcaacagatgtaaggcgtggccgaaccccattcagctagcagtacccagcctcagccacagtcgctgcccttacccaagatggcggcccacaccgcttccgtcgctgctgtagtcgcttcctgcggccagcccgggttcaatcagcggccgacaactgtctagggctcagacaccaccagccaatgagggagggcagcgtggagccgcccgtctgggctcgcggctcctggaccaatggggaagtggcatgtgggagggcgccggggggccccccgccaatggggagctacggcgcgcggccgggacttggaggcggtgcggcgcggcgggtgcggttcagtcggtcggcggcggcagcggaggaggaggaggaggaggaggaggaggaggatgaggaggatgtgggccacgcaggggctggcggtggcgctggctctgagcgtgctgccgggcagccgggcgctgcggccgggcgactgcgaaggtgcgggatagggggccgggggccgcgctccgtgaccgttctggcggcggcgctgaaccccacaacatcaccagacggccggggccaagagggcgagggcgggggcgggggcgggggcgacagcaggtccccgcggggcctgcatgaggaggctccggcgcccgccctagtaaatctttcttgggcctagaaaacattggtccgacgaagaaaagttgagactagatcccgttgaaaacttgtcctgaaatctccatcactcctgagttattgtccccaccaccatctagaggttaccgctccccgttcggcgtcgggagctccagggctggccgtgggtgctgcgccctgtctgttgggatcacgaagctgcacctctgggtccgctgttgtatttggaaattagcagcagcattttgatcatttttctcttcaccttccagtctctccatttatgaggtcacagtgagtcccgtctcaaggacacgtgttcaccatgggcttaaacttgatgaaaggagcagggagaagtcgtttataggtcattgggtgatgcttggtcctttgatgccctgggtgtaccaggggacccccgccacttggaaccgggttctgtctacctgtagacacctgagaaaaatcggtgatggaaaagctcacctctaatgattcatctccgtgtctcctattaaaattgctggcggagttcttttctggtggattggaacagcttggtgattgctgagcatctcccgtccctctcttttccagtttgtatttcttatctgggaagattttaccaggacctcaaagacagagatgtcacattctcaccagccactattgaaaacgaacttataaagttctgccgggaagcaagaggcaaagagaatcggttggtaagtagctggtgatcctccccaactggccctggctcatgt

SEQ ID NO: 3729 - DNA, 6000 bp, Homo sapiens
ttgtggaaattccataggtattttctttgtgctcactgtgggacttacataaaacagcttatagatataactatctttttaaagccgataaaacttaaattcagcttcatataaaaactttgcttttacttccccccccccacagttatggatgtcacaaattatatttttaataatgtacagccattaatatatttttataattataattacttctatgcttttgttttttttaacttttataccagaattaagtgatttacacaatactgttacactattacagtattctgtacctgtctatatatctatctttaccagttagctttatactttcatgtttttgtattgctgtttagtatctttccatttcaacttcaaggactctctttagcatttcttgaaaggcaactctagtgatgatcttattctgcttttgtttgtttaggaaagtctttatttctcatttttgaaggctagttttgccagagagagtattcttggttggctggttcttttctttcagcacttttaatacctcatcccattcccttttgtccttcaaagtttctgctaagaaatccattgctaatcttataggagtgtccttgtatgtaatgaactgcttttctcttgttgctttcaaaattctctttttggctttcgacaatttgattataatgtgcttcagtgtctatttgtttgggttcatcttatttaggcctattgggcttcttggatctgtagtccattttctccctcagatttgagaagttttcagccattatttctttaaatgagctctccaacccttctctttcttggactgctctaatagatatattggtacatttgatggtgtccaataagtctctcaggctttctttacttattttctttgttgctatttttattgttcctttttgctcctctggataatttcaaatgacttgtaattgaattgctgattatttcttctgcttgatcaagtctgtagttgaacccctctagtgaatgttttagttcagttaaaattgcattctttggctccaaaatttctatttggttccttttaatattttctatccttattgaatttctcattggttcatgcatcactttcctgaactcattgagcatcaatatgatggttatttagaattttttgtcagataattcatatacctctgtttctttaggatctgtttctggagacttattttgtttctttgacttgaccatttcccgtttcttcatatttcttagaactttgtgttggtatctgcatattaaaaaacaaaacacacaaacaaacaacaacaacaacaacaaaccagccacttcttccagtctttaccagccggctttgtactgggaaagaccttcataatctttagcctggctaaagattctggggacctctcaaacattttctgtggatacgttttctctgggcttatgcacgtagattcctaagtagagagattttctggcttctcttttttaagagttcattatctcttgctccatctgttgtctatcttctatagtgtgtgtcctccaaagtagcagcacactgtccagctctttttttttgatcttggcagcccctagtcttctagagtatgttagaccttctctgccttaagtggggctacatggaaaccagtccctttggcagccctttgaaaagccagaattctggacacatgttctatttttctcttgccctcctgaagaagagggcactgagctgtattggcctctgctgtgccacaggtcctctgaaatagcatcatgctatttagctctttggtttcttttcatggggccccaggcatctagagtatgccagtgattcaagacagacaagaaagaaaccaatcctatgggcatctccccatttccccaaaaagcaggaatattggttgcatgcttcactcttttccatgtcccctagggataggccactgaactgtatcagtctgtatctgctgtagcaagaaccctctaggacagcaatatatcacccagtatttttttgttctcagtgtcccccaggcatctagagtatggtgggtcctataaactctctaagacaggtaagacagaggctagtccctcaggcagcccccaggaaagtcagaactttggttttttgttgttgttgttgttttgagacggagcgtcgcttcttcgcccaggctggagtgcaatggcgcaatctcggctcactgcaacctccgcctcccgggttcaagcaattctcctgcctcggccttccaagtagctgggaggaatgtgccagcatgcctggctaatttttgtatttttagtagagatggggtttcaccatgttgaccgggctgatctcaaactcctgacctcaagtgatccgcctgccttggcctcccaaagtgctgggattacaggcatgagccaccgcgcccggccaaaaagtcagaactttggatatatggtctagtcttctcatttcttcttcagggagaagccaaaaactgggaatttcctcctaaccatgtggccctgtgccgagaggacagactatggtgagggtataccgtgaattttcctactggcttcagtgcagttgttttttttgctcacctagtgtgatgtagcctcttagccagcttctggatttctcacaaaaggaattggtctgtgtatagttaagttagtgtctctctgggagggagcacaggctggggtttctcattctgccatcttgctgacgttcactgtggttttgatttgcatttccctaatgactagtggttttgagcacattttcatgtgatattggccatttctatatcttccttgaagaaatgtctgttcaactcttttgcctactttttaattgtttgttgtttcttctgcaaagttgtaggagtttttttaatcatatattctggatatcaatccctaaacatttattgttttaaggaaataaattttgagataatttgttatacagcaatggataactaataaatactaaaaactcctaaatgtatatactaaatatattaattagaaaattgtaatataaaaatactaaaagctaaaactgtctgatattaggaagataattttactacaatatataccttttttgtgtgtatgagacaaggtctcattatgttgcccaagatgttctcaaactcctgggttcaagcaatcttcccacctcagcctcctgagtagccaggattacaggtatgtgccattacagccagctttcacagtgtatacttgatgtactattaatgtactatttaatgactactaaaaagtttatgataacaggagaaaatgcttatgctatcttaaataaaaatttgagtgtatgcattgataccaagaaatggaaatttgagtgtgtacactgctaccaagaaactgaaaaatgacatcccatacctttaatatttaatatttataacaaatgaggtttacatggatttttttatctcatcttatttctgatgtgttatgtagttataaatactattttatttgcactcctgctctgcaataattttgaagatagataacttatattattgctgtcttcattttttaaaattctcaaatccagatgaaattatcaaagttgataaaataatcattgttctatcttcttatttgaagattaataattgtgttgattttgcttccttgctctagttagcagtgatgtcatctgctatttttaaacttccttgaaataatatatgtaatctacttctaataagtttttcttatttagcattttggtctaaactaatttataattatttagccttatttctccatgtttaacttgctttaaagctcagcactggtgttttcagccatggcttctccattttaaggctattttaattcatttattattctggaatatatccttaaataatttatttaggaaggctgtcttggtggtggtatttctgttgcagttgttgttttcttgcctgcttggtgacatatttctattgacttgacacttaactggcatcttatctaggtagataatgctaattcaaaattctgcagatattgttctgttgttttttgccatttagggttgagtaagatgccaagttgttttttgtttctctgtagtcattctgttttcattttgtttttagctttgcctttggaatttaaaatgttcaaaatgatttgtctggatgagaatcgattttcataacttttgctttgatacactaaacagtttgagtttctagatgatgcccattttaattcatacgaggaaatatcttctagtatagtttctgcttgattaattctatgtttgtctcttagggacatctattaattttataatgctgcctttttttcagacttctgtttcagaatattcgctttcatcaatgtaatccttggctatagtaggaatgaaataataaaagcagtagcttctgtctgccctccttggttatgcagtccttacagaacatctccccatctcccatccccccaccccagctcagtgaaactctccacactttggttgtggaaattggcagggttaggtggctactcactcccaatccacatccacaataaatcactttttattatcttatcaaaatctgtagaatgcctctttattctattttgttgctgcggaggtttgttttctctttctaattattttattttctaggttttttgagggaatttcaagaggggagattttttattcaggctcatcttaacgtcatgtctggaactcaagctactgaattatatattctttaatacatatagacctacgtcaatgagtttaaactgcaaggaaagggttaaatttcttcctcaagtgtggtcaaaatctgtagagaaaagaggaacagcttctcttaaagaaagttagctgggtaggtatacagtcattgccgaggaaggcttgcacagggtgaaagctttgcttctctgctgctgtaacagggactagcacagacacacggatgagtggggtcatttccagatattaggtcacagcagaagcagccaaaatggatccccagtggtgagtaataattcttattctttgcagagaagttatgagttgtgactgcagtgaaaggctgaggttgaagatggtgctttgatgtgtgtccttcacttagttcctaagtggagaagctttctttttctacaaaagatctttggcacataaaggcaagaattatttgcaatgcccaaagcagttcattggtggtagttatatatatttttaggtgcctaattttggttttgtaaatctgttattcaaatactgaatgttacagtcattgattttagtgaagaatcaggaatttttaaaatatctgcataagaatgacaaataacagggaatatgttttttgtctaccagggtcagtttggtctgagggtggaggaatgagatagagaaggtagagggagagagatcaagaaaaagaaagagaaaaaagaggtataaggagaaaatgcaaaactcagttaatatgtcataatcaggccatgggagattctgggcagggttgggtagtggaaggaggtagagtgattaaattagttaccatgtattgaacatgcatgatgtgctgggtactttactagtgctatttcattgaattttattcttcacaatgacttttggaaagacatcatcattctttttgacagatggggtaactgtggcttaaaaaacttgcccaagttcacactattcataaggggtagagctaaaatctttcctgcccgcttcgtggtgcgccagaaggtttctccatgctgtggagacttcctggaaggagtcacacccgcccttctcttgggtggtggcagctggcgccagtcactatgtatttatttatttttaattatttatttttgaaacagagtctcgctctgtcgccaagctggagtgcagtggcgcaatctcagctcactgca

SEQ ID NO: 3730 - DNA, 6000 bp, Homo sapiens
ttgtataaggtgtaaggaagggatccagtttcagctttctgcatatggctagccagttttcccagcaccatttattaaacagggaatcctttccccattgcttgtttttctcaggtttgtcaaagatcagatagttgtagatatgcggccttatttctgagggctctgtcactatacatctactagaatgggtaaaatccaaaaatctgacaataccaaatgctgctgaggatgtggagcaacaggaagcctcattgctccacatcctcagcagcatttggtattgtcagatttttggattttagccattctactagatgtgtagtggtatcttactgttttaatttgcaattctctaatgaggtatgatgctgaccaccttttcatatgcttatttgctgtccgtgtaccttctttggtgaggtatatgttcagatcttttgctccttattaaattgggctgtttgttcttttatctttgagttataagagttcattgtgtattttggataccagccctttatcagatatatcttttgcaaatattttttccccaatctttggcgtgtctttttattcatataatggttgatacatgtttctgctttaaggaggaagggttttaaaaatacaatttacagtagcagtaaaaataaaaatttattgcaaatgtcttatgttcactctcaggtgatgtcagggaactatggacccagcagggtttaattaaaggggagtgtcaagtcctgggggctgtggttgacaatcctcctttattggcaattgtgcagcagggctgggagtaagaagacaacccagtcctgagctgcatcacttctaaattaagaataattcaggaactgtgtttacggtgaaatcctggcccttctcacatagattatattatgcataggatatgaatttctgtccatgaatccaagtatatatgaaatcatcactttgaaaatttcctttaactcaacttaatcccactggtgagcctcaatcctgccagttgaaaaagagactgtaactgggtcatgcaggagtctccttcctttcctgcagcccagtcagaattcaagaagttcacctggtaactggaaaatgatggaagggcctcaagtccctagtctgtcctggttgccattggcacccttactatctgagcccatagtggtctgtgaagtccggcagctccctgcccccatgccacagtggggaatgagaatatctactgatgctgggccccatgagcaaagcatgctgcctttctaggcatgagccatcacacctgaggttgctaccccctcgggagcactgatggaggggcagttgggtttctactgctcacaggacccagacaaccatcccctgccctcccttcttcttgcacttcaaaagcactctcttcctctcttttcacctctaagccaccggtatcatctcttccatgggctttcacaaaagtctggatgaacctttgaacttgtatctcttctgctttcccccttgcatcaagaaagcttagaaaacaaacactaattaacgtttcaataaataatgctgctctaattatttgtggaaactattctgtattagaactaccatcagcaccgcctcctagagtgcttttagacttgaccactggccgcaggaggccacttccatataacaacaaacagatggctgaaattggaaaactcagctaaatgttcagatgtttctagactcccacgggtttctggctctggcacatggagtagatcctgactgtgtggtcctcaggggactctctctggtgaagtttggtgaggtcaacttccacacccacacacaccagctactgtgtgtagcctgtcctcctctggttgcttctacttgcagccttggcctcttcagtcctgagagcgttggagaatgaggcagtggaggaagcagccccacacagaaagcagtttctgaagtaacctcagcaacttcctcctcaccaaacacaaggaactgatcttctccactgggctcggcctctggtcagccaaggacaacactgttgaccaccatcacggttggccccactccacccttggctctgatgacatatgtgggagtcagaggaattttgattggctgactgctggcctgtcacacaaacaagatggggcaagggggttgcgatatgacttgacatgtgaaaaaaaaaaaagccgtggtcagcaaccccctgcaactgttgaaaggctaattcaatctctgactctttaacaaaagtgatcttgttcactgcctgttctgccctgagagccttctctgctaggaggtaggttgactgactcagggagaagggtgctggtggcagagctgccaatgggtgagggtcctagagactatcgacatgaggggcagttgagaacactgtagtatttagctgagaggagagactattaataaaatttacaaaatcagctttcagctatttggaagggtttatataaaaggataaaataatatgttctggtagttctagaaaacaggacagagacaagtagctggtacttatggattggaggagtgagtggcagtagtttggggattatttataaaaaagacatttttctgttaactctcttttctaatagtgaatttcccaacctgacaagtaagaaagcacaggctagacacgcatctgtcatgacactgaaggggtccttgcttgagtgagagactggaatgatgagttttgaggtcccttacagtccagcaactctagctaagttggagaataagagaattccatgacaccatatcaccccctcatttctgctgcctgcctcaccattcatctctctttactccttttaatatcattctacgttacagcattggaggaggctgctctaaataggaactgaaataagtagattaaagaagtgctatggaagggaaaacaataaaacaacttgttttttaagagcctactattgccaggatctgtgctaagcaccatatatatgccatgttatttaaccgtcatgacatgcctatgagatatttagtattacttctgtgaggaagccaaagctcagagaggttaaataactgccccaagaacacacaggcattaagtagtggagcagggtttgaacacaggtctctatgactccaaagtgcagtgtgatatgttatttttactgatctgtttatggaaaatgatactgctttctaatttagtattaacacaaagatttttttctaaatagatttacttaaagtatgttataaaaatactatataaataatgaaacagattttacatgagtatgaagtggtactagtagctagaatgatgaaagtttggggaatactactccaaatattttgatagctagcctttcaatttagcctgtcttatatttggactgctgagtacaaggaaaagaaggaaacatgaaaattaagtgaaatatgagttacttcccctgtgctctgataggtgggtaattgatcatatgtcacaataagaaaatcaaatgaaccctttcaaacaacagcaaaatctgtgattgtaaaatccagaggaaaaccccaggtgggatctatctgtatgaaggatgaaatttccaaggtctgaacatagaatggctgagaggaagtgatgaccctgtgagtcaagaccctggaccctgggggagccctgtgggtttgagaagccctgggtgaaaggtgaagggttttacaggcctgtttacagacctctgtagtgacagaagggagatctttgtgcaaaggtcaaagtaagaattgggaaagtctgaaaagaaaacaggaaagtaataatgaagatgaaataactacttggcatactctgccacatgatttacaggcaaggtttcctttgtttttcacaacaatgcagcaaagaagtgattatgagtcacatttcataagtgagaagactgacattcaaacatgttcaataactggcccagggtccagtggtcaagccaggactggacttcggaccaccagttccaaacccacaccccttcccttgcaccacacgcttttgtgtggatgagcctccccaaccctgtcaacaacaaactgtcactttgtcacttttaatgtctcctgcttcacaggacacagctagcctccaagagatcagggaggcatgcccagagggtgctgcttctctcttttgaagctcaagtgccacagacctcagaggcacataaatgtcccccacactgagcagaggactttgcagtgcctgatcagggcagaaaaaggaggcatgcacctgggggaggatcacatacgagtgaaacctgtccccgctgaagcactaggtttggagaaatctactgggcatttacacacctttcccacttctgcttatgacttgtagccaaactcaagagtaccacccacttccaggaatagtgtaccaaggtaacagaaacattctagattcatacaattggggttagattaggatcatctgaaaatgaaggttgtgtatgtcaattgccttctaacaggatgggtggagagatgtacttaatgaatgattttggggaagggctagaagtgaagcacatggcctctctgccctcactcattgaaggctgtcttctgaagccccgtggagctcagtgcctgtcacatggttgcccacatttgttgaactgaactgcattttcatctatgggcttcaaaggctgtgtgtactctgggatctctgggaatctgtcagggaaggtgtctttgtcatgtttgtggatggggctccctttgggggtttcccagggctttacactcatgctccgagggtacgtttgtagtcattctcatcagtggaaatgcccacctgccggcagaagttatttggaaccaagcaagagcactgtccctggctgtggtgttgtttctctagtcagttcccctttctgtatttgagttctaccgtcagtcctggcattatttctctctctacaaggagccttaggaggtacggggagctcgcaaatactccttttggtttattcttaccaccttgcttctgtgttccttgggaatgctgctgtgcttatgcatctggtctctttttggagctacagtggacaggcatttgtgacaggtatgtttgtggaggctcagacgcctagggagtggcatgagataaagctgcaagctgcatctggggcagaaatgctgatgtgctaatggccggccagagaatgagtaaaagggattgcagagagcatgcttaaaacctctgaccatcaggtttgcttctcagattgactacattggaggtgggatattacaaaaatctgtctcttcctgccagatcccttcatctgtttttcgtgagctaagagacaaaataggcaggaaatagaaggtgccacttaccaaataattggcagctgttcttggctttggggtgctggggtctccgagcagcctctgctctagaagaagcagtccaaagatgtcagctcgcctcgcctgagtcccctgtgccagtgggaaatccagagaagggggatttcctcctcttgcagcctctctgcaatggacttacttggctttcctgtttgacctttcccttctctggtccagagacccttccccaatatttcttcccatccaagtgccccatcccaatattagccccacttggcaccagagaccaagatctaatttaaaaagaaatattcttgggtcaaaaaagagcccaagcaagtgattgaacataatgtgtttcacatacggtgaacctatttgcatttgcatttgcaaacgggcttaaaatatcatctctattaatagcaatttaaggttctggagagccaggtgaaaatagtttttgacaaagggaacttcctactccccttaaactgtaataatgaaggaaatgaactgtttatcttacatgtaacctcaatcttgggactaaggccctgtactaaaatgcgtctatttatgtgc

SEQ ID NO: 3731 - DNA, 6000 bp, Homo sapiens
ggccgagacgggtagatcatctgaggtcaggagttcgagaccagcctggccaacatggcaaaaccccgtctctactaaaaatacaaaaattagctgggtgtggtggcacgtgcctatagtcccagctacttgggaggctgaggcgggagaattgcttgaacccaggaggcggaggttgaagtgagcagagatcatgccactgcactccagcctggtgacaaagcgacattccatctcaaaaaaaaatttaaaaaacaataataatagaattcatttcttcactcaaagacagtgtgtccaagacctgacaagacttcatttttatttttattttactttttatttttttgagtctacgtgtcctgctcttgcccaggctgaggtgcagtgcatgatctcagctcactgcaacctcctcctccgagcctgaagtgattctcctgcctcagcctccggagtagctggaattacaggcacgcaccaccatgtccgtgagccaccgcacgcgcccagcctaacagctcttataattaaatccttacttcagaagaaaagttttaaaatctttaaaaatcttcaaaaatcttcacagggcaccagtggcagcaacagcttctgtttttcccttcatgttaaaagcaaacaaggatcaactattggcaaaattaagtgctggaagtatagatcttttagagaaatacccagccttatagtcccgaaaccttttcctgcatctctgcttgaggaatgtacagtcttctcttcacctcctttgtcccttggtctgattaggaaaacaatccaagcctcccagtgtggttacttaaacttactttaacatttacattttaactaacatctttattcacagaatgaaatatttggcacttagtctagggatgtcatgcactaggaaacaagtaatagatttcttgtaaggcttggtggggaagacttaacaattctgtgtctgtgaccattctgcagaacacactgctgctcctgaggtaaagagccttaagattctggagactatgaaatgctcattcatccaaccagcatagatcgtgctcacagtgtgcaaggcattggtagcaatgcatgtggcaaagtttcactctcatgcaacctacattcttataaatggggtagccataaaataaacaaataagtatagaaacaaacaagaggctgggcgtggtggctcacgccggtaatcccagcactttgggaggccgaggtgggcagatcacgaggtcagaatattgaggccatcctggctaacaaggtaaaagcccatctctagtaaaaatacaaaaaattatctgggtgtggtggcatgcacctgtaatcccagctactcaggaggctgaggcaggagaatcgcttgaacccaggaggtggaggttgcagtgagcggatacggcgccactgcactccagcctgggggacagagtgagattccgtctcaaaaaaaaaaaaaaaaaaaggaaacaagatacactggaagttctctaaccttcagtcagtatgttccacacagggaatgaagaacttaggctattcttctgtttccatctatatatctaacaagaattaaattattctcagaactgattatgccagttgtaattacatagttcatataaatatcatggaagccaataaaatatgagttgtttcttggaatgctgaatttaatgctttgtaaggacttcattaaaaattacttaaaaattataaaacaggccgggtgcagtgtgtaatcaagcctgtaatctcagcactttgggaggctgaggagggtggatcacttgaggtcaggagttcaagaccagcctgaccaacatggtgaaaccccgtctctactaaaactacaaaacattagccaggcatggtggtgcacagctgtaatcccagctactcaggaggctgagacacgagaatctcttgaacctgggaggcggaagttgcagtaagccgagatcccaccactgcactccagcctgggcaacaaagtgagactctgtctcaaaaaaaaaaaaaagtatttttaaaaggttctcagccgggtatggtggctcacgcctgtaatcccagcattttgggaggccaaggcaggtggatcacctgaggtcaggagtttgagaccagcctggccaacatggtgaaaccctgactctactaaaaatacaaaaaaaaaaaaattagccaggtgtggtggcgggcacctgtagtcccagctactcgggaggctaaggcaggaggaccacttgaacccaggaggtggaggttgcagtgagctgagattgtaccactgcactccagcctgggtaacagagtgagactctgtctcaaaataaataaataaaataaaataacaaattctcactccagtttaaagaaactgaattgctgattaaaggttatggttaatgtatggatgccagtcagcagatccatgctagtaataataataataatggctttagctctatattatttaaacattgttataacaaaaagattaagatttctctatatcaaatatgtatatataatatcttcatatttaatacgttaggaggctcaaagatagaggtagccagacctcttgactttttttttttttttttttgagctggagtcttgctctgtcacccaggctggagttcagtggcacgatctctggtcactgcaagctctgcctcccgggttcacaccattctcctgcctcagcctcccaagtagctgggactacaggcacccaccaccatgccctaataattttttgtatttttagtagagatggagtttcaccgtgttagccaggatggtctcgatctcttgacctcatgatccgcccgcctcggcctcctaaagtgctgagattacaggcgtgagccaccgcgcccagccgactcttgtaactcctcaaatcaccccatctcttgacctgaccccgagataagcctccttatttccacactctagactttcttacgtgcttataagatagagatgttgacttcctgcacgtttcccattccttcgtttcatgcctttcacgtacatcatagccgtaatgtttctatttctggattataacaaaggtgttaagttggttttctttggtcttctcccctgtgtttctctgccatctctcgtttcttgtttctgccctgcccggctgtgtgtcttgtgcattacggttatcctactcatctttcacctgatttaaaaaactcattcagtctaggacttagagtgtaagtgtgttcaaatagtgttaggttcacataatgtctaaaacttttagtaggaaaaatgctaccttgccaatttgtctgtgtctgaaaggaatttgcatttaaaaatttggcaatttgacagaggcaaatttaaaatttgaaaatattttcttaaatatagactcatttacagatagaaggcaagggcaggaagtgatggtgaccagcggtgcctgaatgaactcaggaatgtaactgtagatctagggtcccaaactttaggtttcaaaggatctcttggagtacttgctgaaaaatgtaggttcctaagtccactgccagaaactctgactcagtgggtcaagaatggaataactaaacaatggccccatgcagtggttcatgcctgtaatcccagcacgttgggaggttgaagcaagaggatcacttgaggtcaggagttcgagaccagcctggcctacatggtaaaaccccatctctactaaaaatacaaaaaaattagctgggcatggtggcatgcacctgtaatcccagctacttgggaggctgaggcaggagaattgcttgaatctgggaggtggaggttgtagtgggccgagattgtgccattgcaccactgcactccagcctgggcgataaagtgagattctgtcaaaaaaataaataaatacatgaaagagagaaagaaagaaagaaagaaagaaagaaagaaagaaagaaagaaagaaagaaagaaggaaagaaggaaagaatagaaaagaaaagaaagaaagaaagaaaggaagaaaaggaaagaaagaaatgctgaataagatatagagacaacatacagctgggccagcttatgacatctgatagtggggagatttggggctgggtcctgaatctgagggtaattaactccctgtaacttcttttcctaatctgtaaaaggatagtgacagcgagacattgtgatggggttaatattttggaaaacatccacatgtttttttcctttgcctttctgagtgtgtcaactacttcctacctgtccagcctaacacacaggcatgttgtcttggtagggatggagatctgagaaggagattagaatttgtgtctgaaggtttgcaaagaggaagaagtcgtcaatatttagattctgacattcaagatggaattatgtagcaagaccattgctatgagacagtatttctattttcctttatccactcccaccctgccctcttcccaccctcacagtagcatgagaaaaaccacatatggaagtttcaggtcataaaaattatcttataatttagaaaacaggccttgtgcctatgacagccaggccatgaggcttagagctctgtggtagaatgaggatatgttagggaaaagcaaagaaaatccctcccctctttggctgaggacattatcaaaaggagagcaagaaagagaagagagaaatgggcttgaggtgagtgcagataaggggtgcatggatcctgagggcaaggagaggagcttctttcagtttccctcctttccaacgactactttgagacaagagctgtccctgggcagtaggaaaggggagggacagttgcaggttcaatagatgtgggtggggccaaggccacagaacccagaaaaacaactcattcgctttcatttcctcactgactataaaagaatagagaaggaagggcttcagtgaccggctgcctggctgacttacagcagtcagactctgacaggatcatggctatgatggaggtccaggggggacccagcctgggacagacctgcgtgctgatcgtgatcttcacagtgctcctgcagtctctctgtgtggctgtaacttacgtgtactttaccaacgagctgaagcaggtcagtgcagtgcagtgcactcagtcttcgaggcgcttagcaaatgtctggttacctgcttctttgcatgtcagcttgcccctctctgaagactttcctgcttcctttctctgtgggtacactctaactgctaaatcacataacaactgaggtctttgcaaaactgtaagttcaagaaattgtgtaaactaagtgcagttacacaactggcttcactagttactagcagatgtgggcaacaaaactcctgagggattttttgtttttaaaagtatgtgtattttataatatcagccattgcaactcttcatgaaagctttctgctaaatgctttgtagttcttttgttttccttttccaaacttttatttgtgcacattcaattgaaaaagataatttttacaggttctttggtgcccattttcagcatacaaaaatgtaaaagactattcacagataaaacacattagctcaaaatggaaaaaaataacaatgacaacaataaaacaacctaaggtagtgcacactgtgacagctctgcttatggggacatgagaattcctgcgaaaataaatagaatgtccttttgtaaaagcagcaatgacatgtcttgtaaacttccttttttatattataacaaggtttggaataaaatccaaagggactggagcttacactgtagccatgaataaataaaagagtctatttcctcaattaccgttggttcagttttccttttgagtccaatgtgcagcaggttttaaaaggtgcacagtaagagattctaaccaattaagtggtgaatgataaaatttctttcctgctttcaaacacaaatgggtaaatctgtt

SEQ ID NO: 3732 - DNA, 6000 bp, Homo sapiens
gtcacaggctgccagagctctacggaacatgcaagatcatctgctttaagcctcttgtggtggcatctgttgttttccactgccctgtacctattgctctttccttggttaacagaacctttattttcttctgaaaactctctgctcagtcatggtagggccatcagtccagatgatcaggcctctcctggccaaacatggcatctttcttttgggaatttgaatcttaagctgaatagctgaagttcaaaaaaagctgttgaatctgacttacgcctacagtggctttgcaaagtgactgtccattcctatttcttaagtccctgaatttataatttatcctggttacagccctttctgagatgtgtggttttttttccaactgtctcttatagtctgtgaattttcatatttcttttcatacattttcatgttttgtttgtttgtttgtttgtgtgttttttggctttaggtaggcagaatcagtttctgttgtttatacccaaggaatcctgattgatacatccttcccctttaaaaataaagtatctaaggctcaaagagagtaggctacctgcttgaggtctgggagtaagttagtaccagagctcgtactaaccccaggttagccaactgctttacacaacatttgctctctccttcagagttatagcagtcttggaagaaagaagctactattttgccaaagacctcaggaggaccaagaacaagttctgggatatgtgatgattgaactcttaaaaagtttgttggacttctggccataattgtgtatctaagaccagatttcattcttaatagctaaacaaacaaacgagagatccacaggttcagcagctataataagagtgaattactgatacagttgacaacatgaatatatctcagaaaccatggcatcaatgagcaaaaaaaatccagacacagaagaatacgtaccatatgcctgcatttatgtgatattctagcattgtattgtccaacatagtagccagtagcctcacatggctattcaaatttaagttgattaaaattaagtaagaataaaaatttagctcttcagtagcgttagccacatgtaactagtggctaccacatcagacggtgcaaatatagaatatttcctttataacagaaagttctattggaaaacaatgttctagaaaatatacacataatctataaaaacaaaaagcaagtcagtgattgtctaaggccaggggtgaggggagatcgattgcaaagtggtatgaggaaagttttggggtaatagggttgttggaatcttgattgcgatgaaggctactcggtgtctaatgtgtcacctcctcagactgaacacttggaattggcgaatttcattgtatgtaaattatacctcataaagtaactctaagaggtcaagtgttttgtggaaattatttttaatcagttgcaatacttattatgagatgatttttgcaaatacataaacatgttattcatccattaggtgcaatatttttgctagctcctgaaaacacagagatgaattagaatagcaagcctgccctcaagctgttcacaatccagtacaggagatgagtctattcaaaaatagctagactccaggaagaaagttataggtgaccttacacaaaaaagtgcagatataattatgtaggacagtagaagtggggaaggtttcttttatgtggaaaaaagagggagaatttttggtctttgaaggatgagcaagatgtgaatatgcgcagatggagttttaaaacattcctggtggagggcagaatatgatccaaggcacaagagcaaccagaaaaatatgcaacctagaggaaagtgcatgaaggggagcagttgtaaaataattttcatgaatgtaagtgagaagaatttgtatcatagacacctgagtttggcagagtgcatgttcttggctcctaggagtcaagaagaacaaagtgtccctttctcctacgttatgctcagtggtccaagtccaaaacacctttccttccttaagtactttcttctcccctccatacaaatctaaagtcttcacaaacatcatttaaacaggcaggtcatggtcagaaaggcaattgcttttcctagacttctatgtacgttattatattacaatttctgcctaaaagactctaaagtcttggaaaagtttccaccttgcacatcaaagatataattcatgcatttgtatagtaaccttagtcccctaagagaataaggatgaactataaatataagaagcaattatggtaattataatatgattgccacttatttttcacttgatcgtgtatggttgcatgctactggtgttctgttgaattctagagagtttgcctctttttcctgggtcaactctcgccatttatttccataatgcaataggagccaatctttttcataattacttatttaaaatttgttgccatttaatttctgttcctcttagcttagtaactttaggatttttaaataacaactattgaaatcatgacatacgtttaaatgatattatttaaatacgttaggctataaaccttttaaattttttaaaaaaatagatgagtgtggtggctcatgcctgtaatcccaacactttgggaagccgggtcgggaggatagcttgagtccagcagtttgagaccagtcagggcaacacagcaagaccccatatctaaaaaaacaaaacaaaacaaaattacctgggtatggttgtgctcacctgtagtccaagctacacaggaagctgaggcagaaggatcacttgagcccaggaggttgaggctgcagtgatccatgaacgcgctgctacactcagtctgggtgacagtgcaagaagctgtctcaaaaataataaataaataaaaataacttttaaaaaacaaaaattaattaaattttaaagacacaacacactagagatgtttgcaaattgattatttgggagtctatatccctggaagttaatttaaaatatttagaagagttcttcctcatttcctagagacgtcgaattgtaaatatcagagctagaaggaacactagggctcgccactccaaagtgtggtccaaggaccagcagcatcaagtaacctgggaacgtgttagaaatgcagagtcttaggcctcaccccagacctactgaaccagaatctgcattaacaagatttctaggtgcctcacgggcacattaaaacttgagaagctctgcactagaaatcttcactccacctttcattataaatggaatcacttggctgtggtcacaggaaattgattatttttaatttcagaaccttctatttaggtcatctatatttgctaatagcagggaagaaagccaaactctttaactgcaattaacaaatctataattaattagttaagcaatcttccctttaagttttacattttgtggagcaagctgtttgatttggctggggctcaggctggcctgtttgtgaatttcacaattcacagatgttagccgctctcgggctaagtaaaggaagagaatgtcaagttttaaatagcttctcccttccatcctggctgaagcaacaaataaaatatttttatgaaacacattttgagttagatttacttacagggaaatgtcaaatttctctgaaagggctttagattgtctcacaactttgacatctactgatgtcacctatttacaggtgtgtcctgtgactagggggtgaagggaagatgtgaactcaccatgttagtgaccgttagatacacagagtggttttttttccccctgttggagtctatcctaactgagcttctgaatcatatttcattcaatttccaaatccacaaaaccaggataagtttacagcccatattcagaaaggaaataaattattttgtgtgtagactttcctgatattacactgatttgggaatatatgaacaattttatggtttcctttcgaagtaggtcaagtcaaagcaaaaccaaaaacagcaaaaactgtaagacataaagaatagagtggagccgactgagagattaaaataaactagaatatttttattaacaggcaatttgaaataatttgtgcacttcagaatattctacaataatatattatttccaattttaatatctttaagaaaattactatattatatgtaagtacatgtgcatgtgtttgaggtaggatatttaactcaataaaggttattttcttttattcgggtcaggcaaagcttctaaggggatgtgaaagggatatctctttctcttagctgagaggaagagtgagttctaagttaaatataatcaaggaatttccctgtctttgctatttgagattgtgaccacaacaggcggttggctgaaagggaaactgaagggcggggagggagggaaatagatgaaaaaacaaaacaaaacaaaacttccctaagcagctctacaaaacattttagccccagaaatagtcacagaaatcctcaaatcaaaccagtatccagatacaaggaagtgttatgtagctggagcagggtggacactcatcagctcagttcagttacaaaagtccaggctgctgaaattaaactctgatgccattcatgccagcatccaatcacgacagagatcagaagttcagagatgcctccagctccaaattgccaacaacaagtgtggctactatacgtcaaggactctgaagccgtgagagagggggaagaacaacagtagagaggatgcccagctggtaagaatcgagtgtttatgaagttttagtcaattgatgaatctcattggctaaaatcaagaaacgctccgcctctttgcaaatatgtatgaaggagagaagtgcctaaacttctatgtctgatagcatttgaccctattgcttttagcctcccggctttatatctatatatacacaggtatatgtgtatattttatataattgttctccgttcgttgatatcaaagacagttgaaggaaatgaattttgaaacttcacggtgtgccaccctacagtactgccctgacccttacatccagcggtgagtttgaatgtgacataacttctctcaaaacttaattgaagtgccttgtgtattatgaatgtgtcagctgtgtacaaagaacaattcctccttgtttagtcagcacagtgatattattttggactttctgtggacttaaagtggtctgtggacatattttctgaatgtcttttttggttgatatttggatctacaaagtgaaaaaatttgaagcgaatcttcccatttaaaaaaaattatcacgccatttaagaatgtttaaaatatattatttgccttgttcagcacctactcactcaataagaaatttcactgggcagggatataataatgtatggataatcttcaagtcaaaataaacaccaaataattttgatttatacattaagaaatagataactagccattgttgtaccaaacagattgtggcttgtcattgcattttataaggaatattttttggtatgtttgataatgaaaatcttttgacaaatctgacttttaaagcttgtgattgtagtaaattttatttagaaacatttgcctagtactaagagagaatattagtgagggtgcacaattgtgtatgtgcttcaaattagactttgctatttttaaactggtaaatgaaatctgaacagtgtttttccagtcataaagttatgggagatattcaagtcatatgtagcaatgtgatgttagtttaacagcatgagatttcgtactttattttataagactaatgagagaggtcctttgcgtgttgaaaatggtgaggttacaaagggttaacttgccatttaccacctgtgtctgttggagcttgatactagaagcagattctgctctctctgggcaggactcacttactgtagactagtagagtgtgaaagatttgtgatcttcct

SEQ ID NO: 3733 - DNA, 6000 bp, Homo sapiens
tgttgaactaattcagtggccttcagtagcttcctcaaatgctaattcttatcacctatctgaggcaggagaggaaggtaaacacttaattcatgcaatattagaactttaaaagttactcagtgtgttctgttgatcatccttcaacttaatggtagctgataccaaaaagatctcattggttttgttctgcagcagcctggaaagccccaacatttcttagctttcacgcatgttctaaaaaccccaaccttttttgactattacaggtttttcatgctgacaactgtcccttttcacaaataattatcaagggcttgagatacggagcttgaattgaaagcgatattttttctctcttctattttagatactatactttgatttttacaagatcaaaaggcatctctctgtaaaatctctctgtaaaaaggcatctctctgtgtccgtctcataataaatgctttgggtaaatactcttctaattctagttctttcttatagaattatagaactgtttaattgagctgatactcaccgagcttttggagtactaaatgtgacatgatgaacataaatgtattctgacttcaaaaacttcacaatcttgttgaggagagcgttaagtatacaactttttgcattgaaagatagaattttattactgcttttatttatattcatataaaataagagaaggtttaacttcaactagggtttagagaaattctcacatcggtaggctttaaagaatctaaaagtatttgaatatatcgggaaagcaaatgaaggcattctaaactgagggaccggaatgaacagaaggacaaaaatagccagctggggtccacatttgctaagcaaagtggattataaggaaagtgaagctgaaatggtagtttggggccagattttaaagggccttgaatgccattctaagtaatttatctggtcctgttggcactgggacaccctgaggagtgacatgatcagagttgcactttaggaaagatgaagttatatagtgagggagctctagcagggaggaaagaaagtggagacattgctgtatgttccttttttgccctcattcagcattcaggtagatttgttattaaaacatagaaggattgattgtcagcccctgtacctgctagttctgtattcatggactcaaacaaccatggatcataaatattcagggaaaaaattaaaaataaaaatacaacaaaccaaaaaaatccagtataactatttaactttttcacatagggatgtcaaatggagccattgacatcggtattttatgaaaatggcatttcaaatctgagaaaaatatatattattcgataaataataaagatcagttttcgattgatgagagtggattttcctttgtttttcatacagacatacattctggaaagttaaaagacttgcatgtgaaaacattcaaaaatcctaatattgtaatatggttgcaaaattttacattgggctgggaaaggcctttcacgctgtgtctgaaacacagtaagtcataaaacaaaaaaggataagttgactatggaaaaattagaattttcctacaccaaaaagcaaaccataatactgtatgcaaatttgaaagaccagacatacctaaacacacacacacacacacacacacacacacacacacgcatgcacaaatacatatacaaacacaaacacaggaaaatatagcacttataataaaaagttggatgttaaaaaagatagtcaacaaaatgttagcattttgttatttctggaaagcatatgcttcgatctgacatcttggacttctattcccaaagctatggctttacagcgccgccatttttacccagggggcagcgtgacccctaattcagagaccgtggagctttacgaagtctgaggaaatgactgagaaaaggcaagagctctaaatagagttgttctaactactgaggacttgggacattgacgtaaaatccttgcatttctttatttatctgaaaaatgtagataataatactaacttacaccactaggtggttagaaaattaatgcatgttactaaacatttagtacatttgagatccacatataagcattgttgttgagtgcagagaattgttacttctttgtaacctgcttaaatcaatgcatgatatttacatcagctactcactaattctgaaaccaaacattatcaggtatactttaattagctcttttatggaaatgtttgtgctgagttcaaatctacatgaactattagcgaatttttcattgtgaggataccttaaagcaaaaaatatggattttccaccaatatgttccttttcctttatgtcatttaagtatcttaagtagctgtgcagcttgactacttcacttgtacaatatgaagatgagcaaactgagggacaaataaatatccgagtaaaatcagaggaatatcctctaaatcacttctctgattctggacaaaaacaggctcttatctttgtaattgtctttagaaatcatttagctctgccctcatttcacaaatgaggaatctgaatccagagtggttaagtaacttgccccaagggcacggagctcctgtctcctaactcccagtccagtgctcttttcttccaacatactcaaagttctcaagtagccatagtggatatattgtcttagattttgtccagaatctttgtagatatgttagacagagaccgtatttggattcatgctgatagctgaggtggcacatggaaggaatctgactttttcatctttcaaatcttgctgggaatcttttgacttcgtgaaaggtgaagtttgtttacatttttagtggatatcaatacttgggaccctgagccttagatttaggtgttcaaatggctacatgatcccattagtgtaaaaaacaatttaataatgactttggtaggcagttgtgctaacagcatttcctctagatcattgattcccaagcgtgactcatccagaaccgcctagcaggctgtataaaatccagttgttggggctgtaaccctgcagagtctgattcaggaggtctggggccacgtccagaaatctgtttttaaaaagcaccctggatgattttcaggatcatccaagtttttgggccacaggaattatgcatacctttaaggaagtaaccatctgctttctactgttgactcttaagctgtcagtaggtgtagaatttagacacattgtacaaaaaattatactgtattttgtaagtaggtttttttttttttgccttctaggcagtgctcatttggttaattataggtagaaagagagatcattcttcccaatatatgtgtgaagaaatgaatgttttgtctgatataaatttgtagtgttacagagtactgtcatattcttgcatactcaagatcaaattatattatgggagttttttggtttttgtgtataaaagaaggaagcattattaccagtaacctatgggtcttatatatcagccaatgaccacgtcatcctttaagtgcataaattttatggatgcaaaagtagaagtaaaggggaggcaaatccgaagtcgtgaacgtatttgcaaactttgtttctgaaatgtatgttctaatctcttctggcttccaattctcttctaaactttgtgtcttctaaattttagaagaaatcacaattttcacttatagttatcttggccacttacaacctttcaagcaaaatagaggaaattgggtccctgagtggggggtgggggtgtaggatgatgtcaagaaataaatctaactgaattacaaatactcagcagtaaagagagtattttaatgaatcagatgataaccatcagggtgcatttcatctccactaaatcttcgtaccaaggccagattctacatgaatgttggtacgtatttatgtaaatgtatttttaaaacaaaagccaattgatatcttatgctttaatacttattccactaatcatttacatagatgcatcacgtgcagtaatcatttttattacctattcacaagcaaaaatattagtataaactgggtacaataaaatagagaaaagaaatattcaaatagataagcgttttgttaaaaaaaaaaaaaagaagaaagaaaggacacatttatcaggattcctatttcccgtacataatatggatgtttgtttgtttttgtaagttaacgggaccggtggtttaacttgttattgaaacatgctcgaaaaaatcaggtagcttattttgtaattgcttgttatgaaaccactggcatttctctggggaaaataagttaaaaactctttagctatcaggcagtgggttttaattttttatattggttaaatgtaacagtggatttgcgtactctctcctaatttctaactttgtgtaatcattcttgaaaccccaaatctagattttaaaaaagaagccttctaaaagttttcctgaagtttacttttcagttacaaagagtaaaataactttctgaaatgccttctgtaaatcgtggtggtggtgcggtttgtttggggagatttgttttgtttttaaaagacagtgcactttcttatgaaagagacagggaaagttttacctgtctgtctcctgggtttgttttttttttctttctttctttttcttttaaagattggtgataaggaattctaactacttaatgagatgggagaggcctcactccattggagtggaggagtccaggtggaagttgatggattggacaggtaaagagaagagtcccgcctcctcatgcctatagttgggtatatattaggaaaccttaaattatgtacagagagagaaagagagagagggacttgagttctgttatcttcttaagtagattcatattgtaagggtctcggggtgggggggttggcaaaatcctggagccagaagaaaggacagcagcattgatcaatcttacagctaacatgttgtacctggaaaacaatgcccagactcaatttagtgaggtaaggattttagattttagcactccatttagagatgctttttaatttttatttttgtaaaaaaacttacgtatttgcggttctcggtcacccaatgtaatgttttgcaaattgtatataggaatctccttttcttggttaatgttttctgtggtggctgtaagatttttttttttttattaagtaggagatgaaacagtaggagaagatgaaaaagaaaatctgggtgacattatgtatttgaaaaaataatattcaggagtttataaaatcactttttagaaaaacagactcagagagcagatcacactctgctagatacattgcaatgaatcctctgatgggtattcatgtaccagtaagaaaaatcagttgactgtgtcttaacttcttagcatagttctatttccagacttcatcctaaaagcaaatgaagcttttttcaaaataatcaggtgagattttttaaagccatcttcgtttttaagtctgtcaatccagagacccacctaaatccagaaggggctgtgataacgtttctgtcgtctggagggtgacttgtactttcacgtgtgatgacaaataaagttattttggagggatgcattgttaaatatttatacatgcatacatgtaaatgtgtattatagcatacaggattttatttaagaaactgattatttgcatttctgatctcttctcagcaagtttgtcttaggtatttaaacctgtgcaaagggataaaaaaaaaaatcctgaagagactgtaaggctttgaggaagtttcctaaggttgagggaggtctaacaacaatattagtttacattcctcagaatggggcagctgtgttgacactaatcagattgggttgtggtggggagtgttgtggagagagagagttcggtgtttcagataaaaatgcttgcaggtgagtgcttggaaaagtggactagagta

SEQ ID NO: 3734 - DNA, 6000 bp, Homo sapiens
atgaatatgttttcaccaacacttgagagcttggattgctggaaacaaacagcctaggttcaaatcccagatttgtttcttaccttctgtgtgacattgagctggtcacttaacctctgcatttcacagtctccattggtaaaataaggataatgttggtatctacttcataggcttgttggcagcatacgatgagtttgtacatttatagagcactaaaatactgcctaatacatagttaacgctcaatgaatgtttgcaattattgttactgttgctttgaaatcatagaaggaaaaaagggtctgacccatttttaaaaggtctgtggaatgaaggaagctgcatttctagtggaaatgctccaaatacctgaggaggaaacaaagtgtatgaactaggactttctgtacctctctctgttcagagcagttcaaagccagtaggaaaagcatgtggcctcagtgaatggcagtttgtaggaaaattagctcttggtcagcattaataagacatttactctatttccactgagaagcagcctggaacagtcaatgtcagaacacacagtaaagcaaacatttaggcaagtggagtttatagcagtaaatgctacggagagtatttaacttgtattaataacttggagtttataaattcctttacgctctgctttgaaggttgttcatgaaaatctaatagtaagtcattggataattttcttaataaatgcatacatttttaaaagatggagagtaaattttgttttcaacatctatttctctcactaatctttccatgattttcaatttacttagcctattagcacacaatttataaagctcaaatttgtacaagtactcacaactggcatttagctggattgtctttgcaagggcaagaaagtagggatttacagttaacataaaaatagctatcaaagggcaaacagtttcagttatatatgatgaataaatcccagatatttatcatacagcatagtatctatagttaacaatacttattgtatgcttaaacatttgctaagagaaaagaaattatatgaagtgttcttatgacaaaataacaataataataaataaggagggagaaaaaaattttggggggagatgaatatataggtggcattgattgtggtttcactgatgtatatttatctccaaactcatcaagttgtacacattaaatacgtatagcatattgtataccattatacctcaatatggtattctataaaacagctctcatttgttgagcatttactattgggttggaaacttttctccattctttaaatataatattttacttaatggtccaagaagctttcaaagtgcttgtattagagcaactgacactagctaactatgacaaatatatcccaaaactcgatggagagacacaatgtaagtgtgtatactattcaggaagattcgatgcaggctaagcaactctcctaggcagcagaccactgagggatcccccagggttcagccttccttctattactgggctccacctcctctgagtcatttgcttcctgccacatggagagaaggagaaagaatgtggagtaggcacatcagctcttgattacctcagcccagaagtacccaccccatgacttctgctcacgtcccattgaccaaaaatcaatcatacagtcaaccacactgcaaaggaggctgggaaatgtagaagaatacacaagcatcagtaagcaccaaaagtatctgccatagtttactccctggttaccaagaatcaatgtcctctcctctttccaaacaacagaacatccctactgcccctgccactgcccccactccaacccctgagagtaagcaacctctaatcccaccgctcactgcattcagcacctccaaggtaatctggacttctggggcatgtggagttcgctgcgtaactctgggtgtggctgtctcttgatccagtgacctatgaactagaaaggaagtgatctatgaatgaaacgtacaagttctctctctctcacacacacacacacacacacacacacacacacgtacacactgtgttagtctgttttcatgctgctgataaagacatacccaaggctgggtgatttataaggaaaaagaggtttaatggatccaaggttccacgtgactggggaggcctcacaatcatggtggaaggcaaaaggcatgtcttacatggcagcaggcaagagagaatgagaatcaagtgaaagagagaaaaaaaagaaggaaaaaaaacagaaacgaaaataaaaagagaatcaagaaaaagggatttccccttacaaaaccatcagacctcatgagatttattcactaccatgagaacagcatgggagaacaacccccatgattcaattatctcccacctggtcccttccacaacatgtggaaattatgggaactacaattcaagataagatttgggtgggaacacagccaaaccatatctcatacacacacacacacacacacacacaaacacacaatgtaatagcaataagagaaccataatataaaatccaatttggaaaagggaagaatgggaaacagagcagccactgatgcccaggctggccaggccaacatagtaaaggctcactaccttgtaggtggagttggttcttggctgtggttctgctctccagggaatattactttgtccaccaaaggagtatttctctgtggccaccagttcttccttctgagaggctccccttgcccattctccttggccacctcagaggtgggtttcggggagctttccctccatgcaggcctacagccagcctcctgccagtgggagaagttgttcccagccttgagagatatttgtagtacaggattacaggttttttgtttttagcaatatacatccctcaaaaaattggaggctactacaagccatcaaatgtaggtactctttcccaactccctcttatttctgtttataaattagctatttctttcctgagctcatctcattcttgaaacactttgccaaatgcactcaaaagtacccaacacacataactaacattctctccccatccttttcccttagagctacagagttacttagcacatattgccttacaaactgtcataggtgtcagtttcaccaaatgtttagctactgcgaaacatggaacttcatctttccagcctttgatatcagttcccttgacactcacaatgaggccaatgccactatgtttaggtttgtgtcagagcagcatcccatgcccattatcagttttgaaacgggtcaggaaaagctaagctagctgctatcatgaacatccctaaatctcagtgactcctcagtaggtcttgttaactacctgatgggcagcaaagtgcttaattcatatttgttgtatacaattatgtgaatagattgcttttacttattggcatttaatatttctcaactgaggaaaccaaagctcaaagaaagtaatacatccaaggtcacataactggaatgtggtaaatccaggatctgagttcaggtctatgacactacatgtgctggtgcctgcaaatctctcctcagtggaaattagagtgaaaatagactccatcttttctctgcattcacagcaattaaaacctaaaacttgaacatttccttgtagttttaaatcctttctttctttgcataattaaaatcagaggtattatcctctgcccattgcataatagttatttcaggtgactcagaaaacatagcagaaaggaagctatagtttttgaaataatgaatgaggtttgtttcctgaaacttgtttgcataactttgcacagtgaacatacttaatagattatgcccatgtcaatatttctattatctaccaattggtctgtttatttaactgatgttttctattcatttaggaaactttaatacatcataactattcattaatgtatgcctggcaaaggtatgtattgtcctatgtttacttctatacaagctttgacatattaaccatctctaatgggaacatatacgcaaaccaaaattgtcaaatctgttggttggtgtgaacatatgcaatactttatttattcagtattttttgagcacctattatctatcaggtactaagcaagatctgttttgagatataccatcaaatatttttcaaatcatcattttcagttgatcacactgtaagttggctataatttgaattcacaaatgctcctctgtgtgtgtgtgtgtgtgtgtgtgtgtgtgtgtgtgtgtggtttagtggcagttgatggaaagtagtaaaaataataacatttgtaacattggttacagatcaaatgtcagaagatttattcagccacagacactgcaaagtaagcatcttctctagtttatgattcgtatgtaagataaagtttaaaataagaccaatgcaaacatcattttaggtagttccccttttgtgaaaaaaattgcatataataattccgatttttcattcagataaattaggcacaaattgcatggaaataattctgttagcaaaagtgacgtttaaacataatttcactagcatcacttttccataagttggggcataaactttcctatgtactctttttgcttccagtgaaatgatatcatttggtctttaggcatcactttaaaaggcaaagcaactagaagtaacatggtaagaagagcaatggataaaagagagaaagagaactgtttagatacctgagactcctgcttttcatttgcctcagtctggggtttgcagaagaacactacccactcctacttgttcttaactagtgtatatattaagctctttgaaatgtgagtattatgggaaggatcgcagttgctttaaattatagaagttggcaagtccctgggagaaggagtgggaggttgtttaaactgagaaagacagttgcaaaacttcgtacaacagcatgagctccaagcttcaaacgcattctcatgctcagacgagcactttatttttcatcaagttattttttgcattgttttggagtagcttcgaataataaacacatatttctgctttaaatttttaatagttaactacattcatgggacaaccaaagcaagaaagcctcatgttttgggggaaagtttgatatcagcaatgtccagacaaggtaagctaccattttcactgcagtttttctctttttccctcctattcggccttcatcaaaatatttcctgggagaacttaagaaagctccttgtaaagaaatgggggaacttgtaaaaatatgtcaacaaatgataaatcagaggttagaaaacctccgcaggagagcgttctcctactttctattctgcttgattcatgaacctctgtaaatatctttcactatataaaaaatcccatttgtttcagaaaatgtaagcggagtcttcaaaatctccaatctgatgaacttagcatttgtcagtgtggtgacaggctaacttattcccaaggtcagcttatctatgttttcttatccccttatatgcaactcaacttccggagctgtgattcttctattaacttggaaatgtttcccaaggaagattttaatatctttccaaaaatcctcctaagtgcagttactatggcttcttattaacttgttttgcagaatatatttttaaaagttaaataaatcatttgtcttttcccttgtaattgacacgggaggatgttacagatattatatatcctgggagaaggaaacagttcaactcaacattcattaattcaagtcacagtcggctgacaatgttatctaaatagggtgactttgccttctcgattgtgcctcatacacaggtagggagcagcgaggataagatattttcttgtttttctgtgcattggtcacttgagaagtatcttgtgcattgaggtggaggggcatataaatatgagatgtgttgttccctttttcc

SEQ ID NO: 3735 - DNA, 6000 bp, Homo sapiens
tgtgaagtagaaaccaggtatcagtgaaggctgtagagcaaagactcttttggccaccctgcagggacctgagttccagttctggtttagcataaataggttatttgggcaagtcacttcttactgaatctggctttttatctgtgaaacaggaaactcaagcagataacctctgagatcccttcttctctaacagtgtgaaattcccagtgcagtgtaagaactgtgagttgagatcctgtcttcgctttcaagctgtatgttcagggcccagcacagtgcctggcacacacaggggtcaatgacatttgttcattccatgagtcactgaattgccttttttaaatatgcaaactccttttctcataagaacccacctctttccctgcaatgaaagcagattcagtttagaaaccaaactgagtcatttcagctggttgaagtccgcttgaaaagccaggaaagcggcagcaggcaccacctctacctggtcaacagcctggttcatgaaatcccactcacagcccttctgaggaacctactgaccccaggataaggaccaaaacctcccgtggccaacagagccccgcctggcccaggcacatcctccctgcaggcttatgcctgcctttgctctttcccactggcctccactcagcatcatcctcttccacctcagggcctttgcatatgacattctctcagcctggatgtgttttcctgcccttctgccaggttcatgcctaccgtttcccccccttttaggtcagatgtcattcctttaggcaagttctctcttatttaggcaagttctttaggcaagattcaactgggttgtccggctaaacactccacaatatcctttatttttttccttcaagcattctccaaaacttattgagtttatcaaatggtattaactgtccttaatatgaaatgaataaaaaataacctcatttttcttccatcatttgttctagccaaattctgttggatctttcttccctgcccttttatgacatctcaggcaaatttcttggctttctggtaacttccagttacatgaacaattttattagtcaattgtgactcattttcagatattaaaaagacaaatctcaatcaaattttctattttatatccaatacaatacttgtccatctccatggctgtagttcaggatatgctgtaccctttcactcttcccccatctcctgccacttcctttcactttcagctcctcttgagtcaggtcagagagtagaataatcaggaaaaaagtgactgaattattcttacttagtaagtgctacttgtatgatcctctcctggctccaatgtctgctatgcactccaggtagccaaatgctggctctttcggggtgaaggtgttccttggttgatagcttgcagtgctccccccaccagcctcagattctgtactcagtgatacacccagtgacttcttagtggcctccccccactaggaggactccttggctcaggaagtcccatcacgatggccccactcagctgccttcctcagtaccatctccctcttggggagtgcatatattcttgcctctctaacagctgcccctgcactcctctcccttctccacaactctaccttgatgcctctcttcaaccactaatcttttctgaatttctagctttcttttatgtggactgaaaatggctgatggtcactgtcagatccagctggattttaacaagttctaagtcgatgtatgagcattggttgcctatcattctctgctttgtgttctcagctgaaattccaagtggatgggaattcccaattcatatcctgttaagcacagttctgtgattatttcataaatatctctcttcctcactagattttgtctctacaaggtctctttgtttgctctctactgaatacccagaccaagcattcagcatctgacatatagtagcagctaaataaataagtgatgaagtaataaataaaagaacaggatgagacacaaagaagaccagatttgtatcactacaactccccggtttgtaaggacaagcagataaggcatcatttgagcaagagtagataaggcaaagattcctagagcctggctgcccattggaatcacccatagagcttttaaaaaatattaatgcctaacttaatctactgatatgctcattcagtagatctagttaagagccagtgagctaaagtgcatggcagatccaaattacgtgctagaagggttcaggagaagacagggttgtgcctgcttgagaatatcagggagactttctgtagaaagtgatgcatacagaagataaatgtgaacagatggagaaagaggcataggggagacatggttggtaatggcttgcagctactggagatgatataagcaaggcactgaggttacaaagagaagattcaattcctaacagaacccagggcacccatggagaggaggaggaagaaacagagggtatgcaactgcaagttgtttggatgcaaaaacatggtcttttaaagttagcaacaacctagggaggaaatatggtaagtagttaggtgtgtcaattgtggatcagactgtctaaattactcatctgtagaaggaggataatacaattactcacctcaagaggttatgatgaggattaaagaaagtgatgcttgtcatgtcttagcacgttgtacatgctcattacatatcagctagaaccttctttttaaaatacttctaccacctagaaaaatggtgtgtgagtgtgtgtgtatgtatgtgtgtagtggtgagcagagctggcttatacctgccagcaagtgcgaattctacaattctacattctataactttccaactctgcattcagtgaaggtcagattgttagcttgaaattgaccatggcgggggtattcactccaagaaaactaacaaaagctacaaatctgaaccttctttttgagagctaggttagcggcaaactgttaggtgctctgggaacactgatgggattggaatggaatggaatgaattcagttgaaaagtaaataaaggatatggggtaaaaaagagcacaagttgagaaaggaagattatctgcctaggaaagacaaaataagaccccgtccttggggtgagtggcaggtaaaaatggaatctgacttttactctgagccaatacttccttaagcatatttttctacccatcacttcaccactgcttctaagtgtgaaaataactgagtgaaatagacactgacaagctttatcaacatctgaggttctgaacactctcagagacattttcaaaggttcattctctctgggaaaaagaatgagttcagaaagacacagattacaataaattatctgggatgaaaataataaagaagaaaaagaagaaattcaatttttattgaagaacagaaaaaatactgtaatactttaatgatacaaaaaaccttattttatgtggtaagtaacattaaagagaaattagagaagttgtgaatgacacagaaaagaaaatatgaatatccacaaattgtatcaacactttaaggcagaaaaataagaatgcatctattcttttattggtctacaaattcatccacttctgagctccctggcagagactgggctactccaaagcagacataatggaaaaagcccacttaagaagttatcacttataaacaaataaatgaacatattaaaaggctgtatcacctgaaattaagcttgtaaatgggtgacatcagacaccatcatttggttcgagaatattaagaactatgagaaaccctggaaataatcaaggacaaccatcttattttgaaagtgagaaaacagacacagagactttatctgattaaaatctgactctaatttagcaataagttatgactagcttctatgctcaagacattgttttgaccatcctatgatggcattaagattttggaaagccaacaaattcaaaggaccatttcctccagtgtggagagtggatcccaaaggcaaaattaagctggtcagaacggggagcccagcaatctcgttggtcaagtgtgtggtcaacatccacttcactaactctggaaacattcctttcaattagagttctcattgcttgagaagaatgagaggaaaagaaagataaaaacaagatttttttcagtcgtctaatttccataaatgacatcataaattatatattgctgttgccaaggaaatataagaaatacatagcagaaggaaacaaagaaattgattgcaccatagacgactagtcatatgctttggagaatcattctgccttttgagatgttatgatcagttctttacaggcacaaagacatattagttttctaaaaatacccaatcatttatccattcagcaaagaacaaagaaaacaaaatcagtgcaattctcataaccctctttctttgcacagcacatagaatgaggggctattttcctgccatatttaccaagaatagggacagtgttcattattccacaagacaccatcctaggtccagaatctaaaggctctacctccaaaactctcaaatataaaatggcttttttctctaagttaacaactaatttccagtcagtgagtaatttttttcctgaaacattcactcagtggaaaacaaatgaagagggaaaaaattaagtaaacaaatctgaaaaagaggccacaacacacagagatggagaagctctaaacttaccactgaaggaaagcaggcacttaaagtttatcccaaacaaaactgtaattttaactggtccccgagttgagcctcactcgatgaatgacttccagggcctttggctctttgggactaaacgagaaaattatttttagcacaactatttggaaatctttgagaatttggatctgttattctgtctggtaccaaagcaagtttttcactgagctctcatgaaagatcctcagtctcttgtggatttagaatcctgcagcagcccaccatctaagagcaaggtatggtgtttactcttttttttagaattttggcaaatgtagatgcaatggcctgttctcgtgacgggagctttttagcttattaaacagatggctctgtaggaagaatccataaaactgaagacctagcttcaagtctctggactgacactagctttctaaccatagacaagttgcgggacttctcaggaccttggttccccatctaacctaccacaagatggttttggggaggacgatatgggcttagcattgctctctaggatataaaatgttttgcaaatgtcagggttttttttaatcactgtgccataaagtagtcaaaactttatcaataatgaactgttgacaataataaatattgatgaatttttttttcttcattgagcctctactgtagactagtctctgtcctagagtttgcattttagtggggaaacaagcaagtcaatagatagccataacacagtgcaattgtgtggccttgcagggacttgagtagtgccaggaggagaaggaggttaattcatggcaaacaggaaaagcagttctgcagaggaaaattggagcccccaaaagcaaagaactggtgaacaacaacataaaaggaactgaggcatgagcagctcaggtctccatcctgtcccaatcacagtgccactcccagtgcaacaagagaaacacagagcttgctgttgtgaaatctccacctctgcaggccaagaaaatgtcccgttttggcttttcctggttacctattctcttcttaatgatttccaggcaaagcacattttcaacttgaattaattatcaagtccagccctttgtcatgaagtaatatgttatagtttccctcacatgatgtagggacaaactcaagtgtttgaagacaaaagaactcagtacaaattctggctgcaccatttcatgcctgtgtggacttgagcccacagagtatcaatgt

SEQ ID NO: 3736 - DNA, 6000 bp, Homo sapiens
gtaacctgtgcccaccctcctatatactttaaatcatctctagattacttatactactcaatacagtgtaaatgctacatacatagtgttatactgttttgttcagggaatagttataagaaaaaatgtctgtacatgttcagtacagacacaaccatcctttgttttttccaaatatttacaatccacggttggttgaatccacagatgcgaaacccatgggtaaagagggtcaactgtatataaattacaatgtgttacaatgtgcagtttccactgtgactcttttttacaaaaatttctgccctttgttatgagcacctgtggtccaagaataagcagtgtttaagagagctttacctcaaagtttacacttttcatttttctattatgcatatagattataatacatattgtcagggctggccgtggtgtctcacgcctgtaattccagcactttgggaggctaaggtgggaggattgcttgagtctaggagtttgagaccagcctgggcaacatagtgagaccttgtctctatttaaaaaataaaaaataaatatcttcccccaaaatacatataatctgcttcaaataaactttttttttttttttgaaacaacgtctctgtcactcaggctggagtaccggtgtcgtgatctaggcttactgcaacatctgcctcccaggttcaagccatcctcccacctcagccttctgagtagctggaatgacaaccggctaatttttgtattttttgtagagatgggagcgggggttctccctgtgttgcccaggctggtctcgaactcctggacttcaagcgatcacccatctcagcctcccaaagtgttgagactacaggcatgagccaccacacccggcttaatgaacttctaatacactatgccatttaaaaatttgtttcattcgttgtctgactctcttttcactaggatgtaagtttcccgagggcaggggttttggtttgttttgctcacagatgtgttgccacagactagacagtacctggcccccagtaggtgctcaatacatattgaatgtgaagtgaataaacttccagcagactatcctcattgtgctttaacacatttaaaatgaccaaatggcttttccctgtacttccattctgtgtcttttccccttgacctcatgtgatatgctcagggacgccaactaatgttagtattaacttaagaaaagtggagtgtagccgggcacagtggctcacacctctaatcccagcactttgggagaccgagatgggcagatcacttgaggtcaggagttcaagaccagcctggccaacacagtgaaaccccatgtctactaaaaattagccaggtgtggtggagcacacctgtagtcccagttacttgggaggctgaggcacgagaatcacttgaacccaggaggtggaagatgaagtgagcagagatcgcgccaccgcactccagcctgggcaacagagcaagactccgtctcaaaagaaaaaaaaaaaaaagaagggagtgtagaaatgaatttcccccaaagaagccactgatgcatgccacggtgaaacttaaagaattactcctatccggtctttgggattatctgcaccatggcctccctccccttacaggaaggatcaagctgaccacataaacatttagactccctacgtgagatgggagaacataagcccctcatgagtttgtataatactcatggccacagttacacaatgtggcagacgtatctcttcctttccaaaagaaggaaagagacaaatgtatgatacctgatatgacacatgttttcattcttcacaatcattaaagtaataaataacactactttttagagacaaggaatttatctgttgacaggaatatgtattgctgggcacagtggctcatgcctgtaatcctaacactttgggaagccaaggcaggaggatatcttgagcccaggagttcaagaccagcctgagcaacacagcaggacccctctctacaaaacataaaaagattacctgggcatgggggtgcgtgcctgtagtcctaggtactcaggaggctgaggcaggaggattgcctgagcctaagagttcgaggctacagtgagctatgatcacagcctcagcaacagagcaaggtcctatctcttaaaataataaaaataaaaacaaataaataaataatatagaaagagaagagagttgagattccaaaacagtctttctgactccaaactccatttttatcctacaccactttttcataaaagttcagaacagattgtttgatgtttttcttattgctcattattactttttaaaaggtcaattctgacatgtgatttacatttcctgacaaactacatatcattttcctccctcccttctgtctttccttccttttattcttccatttataatgcaacagatgatagtttttcatggtgtcctgtaggtagtgtattttattttaaaataccagataaaattatcagcagccacttgtggaaagcttcactggaaaatattacttcaaccatacttatatgttttttaaaatgctatttttgttgatctctgcttagaacaacagaaacacagatggctacagttactggatttgctgccagtttttatgccccttttctcatatacgtttatggcgaccaagtttactttcaaaaacatatgctaagaatagtaacacatttttcagatttgaagttgtctaggaaaaaagtatgcttcatattaagaaagagtctgtaagatcaacaaagcagattcatctcctagaaaacccattctctgagcaggccattttcatctctaaccaataaacaccagattccttagcttggcaatcaagaaccttgaccatatctggtcccagatgattcttcatattttttatttttgttccaagatggtgtactctattttccagcaaaatgggacagttaatttttcctcgtagccatgctttcctctgttttgttcattgttgtttcttttgcctggggagatttcctcttcttttacttaagcattccgtctctcctagctccttctcttacttaagcattccatctctcctagctcaaatgccacctcctccagaaagtgttcctggattagatttgctttcacacctctagacctcctttatttgtcccttctttaggacacatatatgacatcttttactttaattatttctgccccaattcagagtactattagaaggctgttaataaaaaatgaatgtgtcggaagagttgaaagaagttgtttaataataattcctgctaatggtataatgagacaggattacagacaggtggcctgcaaactttattgtaaaagttgcctaccatagtgtttgaagaaaaacaattcaattggaatgcctgcagattggcacacacactctaccccaccagtctccccgttccccattgtcttccactggcacatcatatatttacattccctcactgactctgggtggcacttgaatttacaagctccatatagaggttacatcaatcagttgatataccaggtccaagtcatggctctgtcactttctagctagctgtgtcaggttaagagcaagacttctaatgatacctttgaatggccctttgtatttgaggtggccttatgcaaataaacaggcacagttgacccttgaacaatgtgagggttaggggcgccaatcacctgcatagtcgaaaatccacctataacctttgactcccaaaaagcttaaccgatagtcttccgttgacctcaccaataacacagtcgactaacatatatttcgtatgttttatgcactatatcctgtattctcacaataaagtaagctgaagaaaatgttattaagaaaaatcataaggaagagaacatattgcattattcattaagtagaaatagatcatcatacaggtcttcaccctcattgtcttcacgttgaataggctgaggaggaggaggaagaggaggggttggtcttgcagtctcagaggtggcagccgcagaagaaaatctgagaacaagtggatccatgcgactcaatcctgtattgttcaagactcaactgtatatttttgcatatgggctcaaatacgtacgcacatatgtcactgggtcaaagattcatagaatgaattagacaacaagaatatttatcattgaattgaaatggctcactgcaaaagtgccctcaacttatctctaggccttagaaacagaagtgaccctttgctgctgtgaatcaatagcctggactagattggggttgggttggcaaaggtatatagtcattgccatagtccagtattcctgcccaagcaagcaccattagtagtcacgttgctcagagagggcctctcggctctccccaccactgcatgctggattgtctgccaccagtagatcagagttggcaaaagggataactcgggatgaaacatttgagcattttgcagtttagagaaacttcaggggtgctgctttagtaaaaaatggaagacttgcatttattaaaggttagtaagaagtgaaataatgtatgcaaaagtacattataaattagaaaatgcaataacggcagaaactatttatttattggttgctctgccctttacctaagtggtttttgaccatttaacaatgtgtaagagttgggttttacctccattttatggatgtggaaatagggcttggatgttagctaacttgcccaaatcttacagctaacagaaagtggtactcccgagattcctacccaggtttgtctgacctcaggcctgtgctctttatatgagttcatgctaactctcagatgatgtgctaggcacaaaaattagatattacaccaatttccactatagttaacattctatctaaatataaagtgggaccacggtcttagatgaatgtggctgttgagagcggcaataatccagaatggctactctgatctacgttgataaggaaattggagaaccaggcacccgtgtggctgccaaggatgtgctgaagctggagtctagaccttcaatcaaagcattagatgggatatctcaagttttaacacgacgttttggcaaaacatacgatgctccatcagccttacctaaagctaccagaaaggctttgggcactgtcaacagagctacagaaaagtcagtaaagaccaatggacccagaaaacaaaaacagccaagcttttctgccaaaaagatgaccgagaagactgttaaaacaaaaagttctgttcctgcctcagatgacgcctatccagaaatagaaaaattctttcccttcaatcttctagactttgagagttttgacctgcctgaagagcgccagattgcacacctccccttgagtggagtgcctctcatgatccttgatgaggagggagagcttgaaaagctgtttcagctgggccccccttcacctgtgaaaatgccctctccaccatgggaatgcaatctgtttgcagtctccttcaagcattctgtcgaccctggatgttgaattgccagctgtttgctatgacatagatatttaaatttcttagtgctttggagtttgtgtgtacttgtattaataaagcattatttgtttaacaacataataaatacataaatataaagtgggtcatattcctctttatgtgcatctgtctcagctgtcccttgtttctatatttcttccatactacagcccgtactctttggggatatgtcaacatgatttacttctgtagagaaacaggagacaggaaatagcaaaggataaaggagaaaaggccagggccaggccaagaacttctacatcttttcttcccagcctagtgtgaaccagatgaaagccttaaggaggtcctagcagcaaagggagataattaaaagaatgagaattttgtggaatgctaaaaaaaaatagggaacatatttgc

SEQ ID NO: 3737 - DNA, 6000 bp, Homo sapiens
aaccatggaaacactatactaagtgaaagaagccagtcacaaagggccactttttatatgattgcatttatgtgaaatatccagaatagacaaatctatagagaccagtatgatctatagagtagattggtggttgcctagggcttggatacgtggagaagtggaggtgatagctaaggggtatagtgtttctttttagtgtaatgaaaatgttctaaattgatttggtgatggttgcaccactctgtgaatatgcctagtcattgaattacacattttaaatgggtgaaatttttttatggtttgtgaattataactcaatagagctttgttaaaaaaaacaagcaacaactaattacagatcacatctaattgacagcatatttttactgccctgaatccaaaaagaagtgcccaggtatgggataggggtgggcggagaaactgctatgaagagatgtatggggttgcttagagtataaagtatgaagtctttattttgaattaactctgtgggctgctgttaactggacttaggcttgtacttctttgcatggctgtgataatgctattctaaacctgcattgtccaatatggtagtctctggccaaacgtgattgagtgcctaaaatggtataacccagttgagatattctgtaagtgtagaacacacagtggattttgaagacttagaatgaaaaaatataaaatacctcattaataatgttttatattcattgcatgtttggatgtattaggctaaataaaatatttttaaaaatttaaaaagaagctgtattctctgagaatggaagttttccctgggaaatgaggctgtgtcaacgcatggtatacatgattacaagtgtgtgtgtttttttttttttttttggcattgtacatggcagagactggagcccggacttaaacctgggcagtgtggctcacagtctgtgattttaataactgcaaatcttaatttcagtatcctatttttcagttctggaatttccatatgatccttttttatagtttctagttttctgctgacattcttgtcatgttattccctgaatgcatttttttaaattaattaatttatttatttttattgatcattcttgggtgtttctcgcagagggggatttggcagggtcataggacaatagtggagggaaggtcagcagataaacaagtgaacaaaggtctctggttttcctaggcagaggaccctgcagccttctgcagtgtttgtgtccctgggtacttgagattagggattggtgatgactcttaatgagcatgctgccttcaagcatctgtttaacaaagcacatcttgcaccgcccttaatccatttaaccctgagtggacacagcacatgttgcagagagcacagggttgggttgggggtaaggtcacagatcaacaggatcccaaggcagaagaatttttcttagtacagaacaaaatgaaaagtctcccatgcctacctctttctgcacacacatggcaaccatccgatttctcaatcttttccccacctttcctccctttctattccacaaaaccgccattgtcatcatggcccgttctcaatgagctgttgggtacacctcccagacgaggaggtggccaggcagaggggctcctcacttcccagtaggagcagccgggcagaggcgcccctcacctcccggaccgggcggctggccgggtggggggctgactcccccacctccctcctggacggggcggctggccgggtggggggctgacccccccatctccctcccggacggggcggctggccgggcagaggggctcctcacttcccagtaggggcggctgggcagaggcgcccctcacctcccggaccgggtggctggccaggtcgggggctgactcccccacctccctcctggacggggcggctggccgggcgggggactgacccccccacctccctcccggatggggtggctggcctggcgggggctgtcccccacctccctcccggacggggtggctgccgggcggagacactcctcacttcccagacggggtggctgcctggcggaggggctcctcacttctcagacagggcagttgccaggcagagggtctcctcacttctcagacggcgcggccgggcagagacgctcctcacctcccagacggggtcgcggccgggtagaggcgctcctcacatcccagatggggtggcagggcagaggcgctccccacatctcagacgatgggcggccgggcagaggcgctcctcacatcccagacggggcggcggggcagaggtgctccccacatctcagacgatgggcggccgggcagagacgctcctcacttcctagatgggatggcggccgggaagaggcgctcctcacttcctagatgggatggcggccaggcagagatgctcctcactttccagactgggcagccaggcagaggggctcctcacgtcccagacgatgggcggccaggcagagacgctcctcacttcccagacggggtggcggccgggcagaggctgcaatctcggcactttgggaggccaaggcaggcagctgggaggtggaggttgcagcgagccgagatcacgccactgcactccagcctgggcaacattgagcactgagtgaaccagactccgtctgcaatcccggcacctcaggaggccgaggctggcggatcactcgcggttaggagctggaaaccagcccagccaacacagcgaaaccccgtctccaccaaaaaaatacaaaaaccagtcaggcgtggcggcgtgcgcctgcaatggcaggcactccgcaggctgaggcagagaatcaggcagggaggttgcagtgagccgagatggcagcagtacagtccagcttcggctcggcatcagagggagaccgtggaggtagaggtagaggtaggggtaggggtaggggtaggggtaggggtaggggtagaggtaggtagaggtagaggtgtagaggtagaggggaagtgtgtgtttgttgattgatgggtgtacatgattacaagtgtgtgtttgttctgtggtgacccactggacagcagggggaaaaagaggcaggtaggtgcctccgaattagacactttattttatttatttatttatttatttatttatttatttatttatttattttttgagatagagtcttgctctgtcacccaggctagagtgcagtggtgtgatcttggctcactgcaacctccgcctcttgggttcaggcgattctcctgcctcagcctcctaagtagctgagatcacaggcatgtgccaccacgtccggctaattttttttatttttagtagagacggggtttcgccttctctactaggctggtctcaaactcctgacctcaggtgatctgcctgcctcagcctcccaaagtgttgggattgtaggcatgagctaccatgcccggcctgaattatacactttaaacgggtgtattttttatcgtttgtgaaattttttatggaaggtgaaattttttatggtttgtgaattatatatcaataaggttttgttaaaaaaaaacacaactaactacagattacatctaattgacagcatatttttactgccctgaatccaaaaagaaatgcccaggtatgggctaggggtgggcagagacacacacacttgtaatcatgtacacaactgggagtagtggggatgagtctgtggggaaaaacaggaattcagagtgctgagaagcttcccttactgccctgcccacttccctcccctgggcattgctccctcagcctggattcacaaagtcaatgcctttgggagccaggaactaaattcttagtcaaagacacctccctcctgtccagttatgggtctcagggaggaaatggcaggtgggtggtttcattctttcagtttcagaaaatatctgtagacataacatatttcctctattaaacaaattctgaggtaaggggaaacagagagagacagtcagaacattataagtcgaaaagaatctcagcattcttagtttagggaagttggccttgctcgctgtgtggtagaaaagctgattacgggagagaaccgtggagggaaggaagggaggcagttttgtcatccccacatccggttttgactggacaccatgcaggctgagatcaacttcagaggcagtcagctggaatcccatagctttatttgcccatttattgtgttgttattttgttgttgtcattactggaaaaggcaagagtagagctatcagaatgtcttccttgaacatgctgtcaacaaaccccaggatttttataaaccctatgtgaaaaacacgctaagaatctcttttcttcttagcatatttttcacttagggtttacaaaaatatgttttgaagaaagcttgaaaagatcagtggaaaaaaattcagcaccaaattttctctgaaaatcaacttgtcaaaaaagacgtgattaacatccatcctgtaaccagcacatgaatgatcttccctctttacgagtgtgcttcagcaaaactttaatctcgacccctccctctttccacttttaatagtggatggatgaaaaggcaagaggaaaaacaaagcagccgaaacacacccagacgcacacttctgccaagcatagccaccacggtaagcattttgaattcagccaattatgatctgtggattattaacattacctcatttacttcatcagtgtagacaatagtaaactgactgtagtgaaatttggaaccatagaaacgtgattctattttaatacaggcctatcaggtaacccacagactatgctacatatgaataagagaaaataagtttattcttaactatgtaatgtaattccagtggaattcggtaggtggcataaaacagcctttttgttttgttttgttttcaacaccaaatgtggttaacagtgaaataaattcaaggaagtgcttgaatttcttacagactgccaaatggaacagacaagcaggttgtcttggtaagcaacacattcttttcttttgtaaaagaaaataattgtatagctagttattaagtacagaagtctcaaaaatctgtgtaagtcctgggtgtttttctaagtgggttatatttctgatatgtatatagttactgtgtagtttgtactggcatttgtgtatcagttctgagtcctaaatcagagaaagtccccacactcctctgggaataacacctcgtgtgtgatttgcttataggaaatatttttgagttgggaaatgaatatttgggtcacacacgtcttctggttttcttccagagcagctgctagttgttgattttgacagcatttctcttcacctaatcccgccatttgtattctcttctcagtgttaaagaaaatgagatataagtcagttactcccggaggcaatgctgctgttcagctcttctgtttttgtggccaggtttgtttcagtttttctctctggggccttcccactagctagtccttctgtttctcaggccactaacactgttctggggagctagacgtgaggtagaattgcaggttttgaaaatgtttcccaggctacatccaatttggtcaaaagacttgaaagtgaatttgttttataacaaagcaagagttcacaaaaccgcatagaaagcaaagcagaacagttcttgaactgtctcagattcttttaacctttggttaatagctatttggtcttgtgcagagaaggcccttagtaaatatttacaggactaaacttaatgggccagatagattgtatgggtattgtccattaagaccagtcaaagccttgatttgatgcctccaaagtctccaaaagaagacaaattaaatgtattgattcattgtatcatataatgtgaggctaaacctatcataataatgaaaattcacagaagctcacctagaggcattttacactttcaaattaaagcatcctt

SEQ ID NO: 3738 - DNA, 6000 bp, Homo sapiens
ctataatacatgtagccagtttgagagttatatttttcattataaatgaatacattaagatgatagtttttgtacatgagtctctgaaagccttattcttgtgatggagacagatccattcctgggacactggcagtgagtttcctgcacttgaataatgaccctaaacatgtaattccaccaaaattgtaacatcctgaccagctgaccaacttcctctcttattcctttgttcctcattttgccctgtactggtggcaaggtgaacccatttttcttcaaatggcaatatctaatatctataggcaatgtcccctttctgaacacactctgattctttttaaaacttcttcttcaactggaatttctctgtagagcatctgaaaaagcccttaacatgaagtcataaacaaccaatacagctaaactacctcatctcaaggtgtatattaattttatttgtatattgataaatctctaattggtttaaatcaaagagactaagccttgattttagaatctcagaattcactgtgcttagtacggggagtatttttcactgggaagaggcaagagagaggtgggtcacatttccactgctctcgaaaatcatgcaaacagttgcctcctttagctgctctttaagttggcactgatacaaagacacgttcagtccaacacagttcttgactgtcccttggccagaccataactgatctccttttggcttaggccacagtgaagcaccatgggggaggccacggagtacctacacatcttataacggcctcctttgtaaagctaaacaaatatttccctctgccttgcaaagctgagtcacagatctggcttttacatgtatattcatatgcatctgcacctctgctgctcacattagtggccctgccaacgtcctaactgggcccttggggccaaggcaggcaggatgcagtgacagtcccagtgtatccaggagcctgatgtcctcaggtgtcttttgtgaactttcacagccagagacaactgtgcagaactgggacttcatcacctccagggaggttgcctggggcagattctagatggttttaatattcaacccataggtaaaaaattatgcccaattgttattcacatctttgaaaactagacataaggaacattctggagcatatatgaaatgataaccaagtaagatttaataataaaccaatgtttaaaatgcatttaatgagaaattactggagggaagtaaaagatacctatattgaaagatgagggactcttctctctggcccagttttctacttactgcccatgaacttaagtaatttactaaatcttttcagactgtcatctctgcgtgtacaagatagtacatgtgtagactccagacctctactgggtctggagtgtttttgttgttgttttgaaaagttttcatacatgttctccctatttgtttgctaagactgacatagcaaaatgctacaaatgagatgacttaaacagtgaaatttattgtgtcacagttttggagtctcaacgtctgagatcaaggtgttagcagggttggttccccctaagggttgtgagagaatcatctgttccacgcttctcacctaccttctggtggtctgctggcaatctttggtattccttggcttgtaaatgcattaccctcatccctgctttcattttcacatagtgttctcctgtgtgcatgtctgcctctgtgtctaagttctccctttttataaagacacagtcattttgggtcagggcccaccctaatgacctcatcttaagttgatcacctttaaagacctattcaaaagtaaactgaggcacaatacagttttaaagagtttgagcaaacagcaattcatgactcaggcatgagtctaaaccagaagaggttcaggagctctaccaagggagcacaaggggtggggaggcttctacaggacaaacacagatataaagcaaataaaatagttgattggttacagttgtacaattgccttatttggtctctcccattggaaagcttctgagtcatttaacttacattgtgtttttctttaatataggcatttacaaaaagttgctgaagttaagttttgcctatgtttgcaaaccaagcaaggttaaggccacttatgaaacctaattggctttgtctgctaagggattcttcaggcctggtgtctattttcatttactttaacaatccctatttttaaataggtcatatttgcaggtactagggattaggacttaagtttcttttgggggtacataatccaacccataatactttctgaccccaattcttgaaggcaggctccctggcagctctcagactgaccttcttctctctgccattgacccattattgatttcttgggagagatcaataatgggccaatggcagagagaaggagagatccttctttgcagaatccttctctgtagatctttctctatagcaaggcaggagaactcactctggaaagacagatggagtccagttctttccagctgcataacacaagacaagtcactttacctctgcaagcttctatcacctcatctataagatgggatcataggtttgccaacagaagtcagtgagataaagcaaagtagtacttggctagcacatggtaagtgcttaacaaattatggatattattatttattccttttgagtcaatgagaggatggatcagtgattcctaaccctggatgcaccttagaatcatctgagggaagcttttaaaaactgcccaggccccagtacagattctgactcaattggtctgggatagagtccaggcattaatatttttagaagctccttggtttaatatgcagccagggttgagaaccactagaatagatgacaggattgaaaacacgaatggaaagtctcaatgcggtagaaagtcagaggctgatttatagttacttagcagtatggcccacttcgtgggggatgcatgatggtgagagccagagacagctcttggaaaacctgtgaattgggtgacctagatttcagagccactgcttgctttgtggtctccctgtgacattttctctgggcctccctgaggagggaacacccccactgagacactgctctgggctttccttcccacagcaaaagcccatccacttgctcaccctccaaacacaggcgccatcctttccccagctccagctccaggtctgggaagaaaatcctcagttactaagaataacagtttgacacacttcccttcccagggacatctaccttttaatggtggacatgacagaactcaaggaatcctccagtgaggaaggtttagatgctcaagggtagacttgtagcacagagatggctgaatttttatgccctactaggtgggaactgactgcttggactgaacatgactcccaaggcccctgaactgtggcctggagagcttttagttcacagagtaactctctccctccgtccccagcaccaaaccctttccatgtataagtgtggactctggaagcggctgttctggtagctgcaggaggggccaggctagttttgacagttctggccacttccagagatggctcttggttctcaggcccttggctgagcaatgggggcagctgtcaacagctctctctcctctcccctttccccagctgctctgactcttcatcagcaggctgagcttctccaagcctcagtttcccacagtgcctcctcgcccccttctcatcagacgcttgccacccatgctatttacggtcctgggtctctccagttttcatgagagaaggccagtaacattttcttaagcgagtgaatgagtaatataaataaaatcatatgtaaatagaagcaatttttgatgacaaaactgtttaaattctcttaatttattatcctgaagcaattaggaatgtccattttctttttggctgaattaataaaagtatagcaactaaagcaaagacatgagaatcctcttaatctggatacgctgtgtttgaaataacgtgtttggtgctttccacttcttcagttttgttatttatttattttttaagtagagacagggtctcactaagttgcccaggctggcctcgaatttctgggctcaagggatctacctgtcttgggctctcaaggtgctgggattacaggcatgagccactgtgcccggccccgtttctattttaatcaagaatatgtcaaaagaaagaggagccagagacagccttctcttaacacaaagcagggtgttgtatcttcatctgacaataagtgacttagttaactttgatttaattttggcttttgggaagtcatggggaaaagaagtaaagctgagggtggcgaaatacctttgctaaacccagagacactgcacctgaatcctgctcagtgttttgtaggcaaccaactgccttctgccactggtatccggaaggggaaatgagttaccttaagtgggccaaagtggggaaatactaacagtacagctagaaaccaagagctgtcgtgaaagccctgaatgggttcccactgctatttcagacaaaactgatgcagttaagcctgaatttcctggcaagcacaagggtagatttttccaaaaggctttttagactgcaaatacacagcctttccatgtctaatcacaaaagcaaactgctggacacatgctctctgttcccagctggttgtgtatgttttcttcacacttcaacagaaacgtgccaaggtgtgacatttatgaatttcgccaactgggaactgtgcacacaaatcgttcttgcttgtggtgtgggaaaatgatgaatgggggctgttctgcctggggaggagggctgctgtcactctggcatgcctacagccttatttattacacaccaaagtataaaaccactccgccgctgcagctctcagctccagtcctggcatctgcccgaggagaccacgctcctggagctctgctgtcttctcagggagactctgaggctctgttgagaatcatgctttggaggcagctcatctattggcaactgctggctttgtttttcctccctttttgcctgtgtcaagatgaatacatggaggtgagcggaagaactaataaagtggtggcaagaatagtgcaaagccaccagcagactggccgtagcggctccaggagggagaaagtgagagagcggagccatcctaaaactgggactgtggataataacacttctacagacctaaaatccctgagaccagatgagctaccgcaccccgaggtagatgacctagcccagatcaccacattctggggccaggtactcagaattctcttctaaggatttttgtgaaagcttaatgagtgttgttgttgttgttttgttgttgttctttttttggctaagattcttagaatcaatgaatgctttcgagaagttcgctaagctgcttgtgaatctctttctggattgctcttgggtacaagagagactgtcggtctctgttagaaaatcagcagaggcagcaatgatgtgatgggatagtggccgtagcatcaccccatcagaaaggggaacctggccagccagcttcctgctatgctgggacttgatttccttcttgctctgttggtccggaaaggagtgctgacccatgcagacagatcggtcactgtagacaatcatttgttgttcttaagagaattgggctttcttcatcccttccggcagggagaagctgccctttgagtttgtcaaaagcaatcaaagtttttttactttgatttgtgagtatactgtgacatttcatggcagtcttgtttatttgatttatagcattctagattgttaagcctctctgttcagcctgttttaaaaagaattaaagagttaaataaaaaataaactgtttgaaatgcataccttatagcatgatttgatgcctgataatcacagaggacttgatct

SEQ ID NO: 3739 - DNA, 6000 bp, Homo sapiens
taaatcaagttcatacccatcgcctctaataattaccatttatttctcctgtctcacagaaatattgcactctttcaacaatatctcttcattcctctcactcctaaatctctggtaactattctgttctctacttctagaattcagctattatagagtccacataaaagtgagaacatatggtatttgtctttctgtgcctggcttatttcacttagcataatgtctttgtattagtccttttacacactgctgtaaagaactacctgagactgggtaatttgtaaagaaaagaggtttaattgacacacagttcctgaggctggagaggcctcaggaaatgtacaatcatggcaaaagacaaaggggaagcaagccatcttatatggtggcaggagagaaagagtgtgaagggggaagtgccaccagatcttatgagaactcactcactatcacaagaacagaaaaggggaagtgtgcccccatgattcaattacctcccaccaggcccctcccccaacatgttagaattacaatttgagataagatttgggcagggacacagagccaaaccatattgttctgcccctggcccctttaaaatatcatgttcttctcacttttcaaagccaatcatgccttcccaagagttccccaaagtcttaactcattccagcattaaaccaaaagtccagtccaaagtctttctgagacaaacaagtcccttccgcctatgagcctgtaaaatcaaaaacagattagttacaatggggttacaggcattgggtagataactcctgttccaaaagggagaaattggtcaaaacaaaggggctatgggccccatccaaatccaaaacccagcaggacagtcattaagtctcaaagctctgaaataatctcctttgactccatgtctcacatccagggaatgctgatgcaacaagtgggctctcaaggccttaggcaattctactcttgtgtctctgcaagatacagcccctttgattgctttcagggcttggcattgagtgccgacagcttttccaggcagccagggcgagctatcggtgaatttatcattctgggttctataggactgtggccctcttctcacagctccactaggcagtgccccagtgggaactctgtgtgagggctccaaccccacatttctcctgtgcactgccctcatagaggtttccacgacagctccattcctgcagcacacttctgcctggatatccaggcacttccatatattatctgaaatctaggtggaggttcctaaacctcaattcttgtcttctgcacacctgcaggcccagcagtatgtggaagttgccaaggcttggggcttgcaccctctgaagcagtggcatgagccatggctggagctggagctgctgggacacaggtcttcacgtcccaaggctgcacagaggaccgaggacctgggcccaacccaagaaaaaatttttcccttctaggcctttaggactgtgatgggagttgcagccgtgaagatctctgaaatgccctgaggactttttcctcattttcttggagattaacatcaggatcctcttgatttatgcaaatttatgcagccagcctgaatttctccccagaaaatgggtttttatttttttaaccacatggtcaagttgcaaattttccaaacttttaatgtcttctttccttttaaacataaattccaatttcaaaccatctctttgtgaatgcatgtgactgtacacttttagaaactgccaggtcagggcgtggtggtgcatgcctgtaatcccagctacttgagaggctgaggcaggagaatcgcttgaacctgggagctagaggttgcagtgagccaaaatcacaccactgcactccagtctgggtgacagagcgagactccgtctcaaaaaaaaaaaaaaaaaggaaaagaaaaagaaaccaccaggtcaaatcttgaatgcctttctgcttacaaatttcttctgccagatgccctaacttctctctctcaagttcaaagcttaacagatctctaggagaggggcaaaatgtcaccagtctctttgctaaagcatagaaagagtgacctttactatagttcacaataagttcctcatctctatctgagactacctcagccgggactttattgtccatatcactatcgacattttgatcaaaactattcaacaagtctctaggaagttccaaactttcccatatcttcccgtcttcttctgagccctccaaactctcccaacctctgcccgttacccagttccaaagtcacttccacattttcaggtatctttgtagcagtgccacactttcccggtaccagctttctgtattagtccattttcacattgctatgaagaactacctgagactgggtaacttataaaaaaaagttttaattgactcatagttcatggctgtagaggactcaggaaggttacaatcatggcggaaggcaaagagaaagcaaggtacatagtgacaggagagagcacaaaacgggaagtgccacacacattcaaataatcagatctcatgagaactctatcactatcatgctaacagccagggggatgtccgcccccatgattcaatcacctcccatcaggctccacccctgaaatgtggggattacaattctagatgagatttgcatggggacacagggccaaagcatattggtcttccaggtttattcattttgttgcagatgacagaatttccctctcttaatgctgaataatattccattgtatatatataccaccttttctttattcattcatctctgatggacacttggttgattccgtaacttggctgttatgaatgatacttcaatatctgaagtgcagatatctcttcatcatgctgatttcatgtattttagacatacactcagaaatcagattgctggatcatatggtaatttaatttttagcttcttaaggaacctccatgcagttttctgtagtggttgtactattttacagtttcacacacaaaatacaagctttcccttttctccacatcctccctaatacttgtaatctgcattttgtatatttttaattttctgagttaaataaaatgtatttaatgcagtaaatatatatttggatcagatgatcacttcagagctattgccaccaaggttcttatgcaagactcttcttgataaggtagattgcagaagtaacaaaagaggtttcaataaacataactttggctgtgtgtacttcctattactccagcaatgcataatggaggtaaatattaggacttcatgtggataatttatagaatgtaaatttgatgtatgtatatccaatccatttctaagtatgagatattataggcaaacatttactttctgtctgagtagaacatttctcgctgacaagggagatgatttttatgttgttatttgcatttgcaaaagaacactatcttttctttatcaagatgttcttgatcctgtgtgaaatattttcagaaaaattaaagagaaattaaacttagacaattccctcttatacacctgaagcaagccccttgacactcaaatagtcacataataattctttcctctttttgtggaaaaagcctataataaaagctaaataaatttagtattgactattaaagtcaagaaagtcacaacaaatattgtgtttaccattttcaacaaaacctattttatttattacaatataagaaatatgaaatgcatatatctctcgtgtgaaataatttttaaatttttctgttgaatatttcatgtcattaatagacgtgaaaccttttaaaaatatataaaaggatgtaatcactgttccttcgttttgattcatgaatgtttagaaatgtgcagacaatgtgctgtacttttgcagaacacagtaggtcacatgcaaaaccagtggtcacttgccctccaacagtgaggttctgaaactcctcacaactctacataagaaaatttccccagaaaaatgtgaaactcagtgtgttaagatacaatatgatgcaattttttgaataggaaatagataagcattgtaataattcaatgtttgatctcttagttttataaaatgtatactttgttaattattttaaaatactaaaaaatagaagttacctctgcttttggcaggtacctcatataacttattgttgaagatatgagaagtaaatggagaaatattataaaatttccttagcttatatgcatggacccttgggttatattcctgagagcttgctggagctgtggaggttacgtatacaacatttagtgagagtgatgcttagcaatttgtcatctggccaacccactcatcacccatctcattttgctgatgaagatagctgaattccaccttttgtggctttaaaaatgactcaaaggtagagaagttttgtcatgcttgccttctctttcctttctttcctctctccatcacctcttggagtcagaaaggatagaggtgaggctgagagatttgagtccatttcctccccttccttgccttgtaatggagagggccaacctgagagtggcgtataggagatatcaaatctctatagcataaacccatttttaggaatcatgaaactataacaatttagtggagaatcaatcacttttgtagaagaacttctcatttctttccccaaaataggtcagattacttaaaacaaaaactatttgaggaagtcttcctcacttgtccttgaatataaagactgcttaagacaaaacaaaaatcctaatctggtgatataatttggatatgtgacctcacccaaatctcatgttgaactgtaatccccaatgttggaggtggagtgtgatgggaggtgattggatcatgggggtggatccctcatgaataccatccccttagtgctgttcttgtgatagtgagtgaattctcacaagatctcattgtttacaggtgagtagtgcctcctcccatctctcttgctcctggtctcatcgtgacgggcctggtcctgcctcactttctgccatgactaagagctccctgaggcctctccagaagcaggtatcactatgcttcctacacagcctgcagaaccgtgagccaattaaatatctcttcttataagttacctagtctcaggtatttctttatagcagtgcaacaacagcctaatacatctggcaatgtttttggatgtgattatagataaaaataaatctaaaaagtttaccagctttccagggatctagccatctttatacaaagggcttcaaaaataaactaattaataaaaggacggctaatcattagaacaacatttcagtatctgtgtgggtgttatattttatctgttagtaaatattttataataagggagcatgtttctttctgacttgacattaaagtacctatacatctgttaaaaagtgctttgacctttagcaatgtggtatgatcaacgatattataagctgatttaggttagaaaaaagacacatgggcttatcagttttagaagtagacatctgtgtgcaaaaaaaatgtatttctgtatttcaagcacaaaattaagaacacttaatttttcctttggaaaaaaattaaacacatacactcgcatacgtataccactcatacacaaacacctattgtttgaagctttgctttaaaacataacattttagaaataaaatcgtggatagaaggagacaagtgtttagtatgaaaaaaattgcagcatttatcaattagaatatactcattaatttggcaaagccaaatgtgattacaaattaaactgtgtcttaaaccagtaattttcatttgtagcatttaaagcacaaagaaaaaaaaaaagcatatctgttctgctgtcctggaaattgggagtacaacataatcattgacaacatgaagagaatatagatcagggtgtagagtagttaagaaa

SEQ ID NO: 3740 - DNA, 6000 bp, Homo sapiens
aataaattgcaagcattcctagaaccacagacttcacttaagccaaactctgtcaatttcacactgccatgtatggatgagcataaatgagtttctcttttcaggccccaattgtatatactttacagaacttcattgagaaagttattcgtttctttccttttctcctttgtatcatagctcatttaatttcaatataataaaatccattaaccttctagaaactaaggttttgaaaagttatttttcccatgtttagttattgcaacagatattcattatagctaaggcaagacagttagtagcataacaccatggtccctcaaaaaataacaataaacaaatctacatatttttcatcccaatatttttatcattcctttaggcatatgcaaagatcatgttcactcctggctggataattcattctttctttgtgaaatagctgtggcagagggagccataaataaaataaagcctcctaaacaaaggtttgctttaatctgttcatattgacaatatctagtaaattctgatatttcaaacaactcaccataacgggtatagatctgggtttttaagaaattgacatgatttatccagacacatttgtgggttttctttgaaatagtagagctttactgactatgacactttgcattttaaagaaatttcattgctttctcttgtgtgtcatagataatttttatataactgaattgtgattctccagtagataaatggacaagaaacataaacatataattctcaaaagagaaaacacaaagcaaaaacggctaattaacatatgttcagtgcatatattcagtctcattagtgatgaaagaaatacaaatttaagaaatatgtcatggtgacttacctccttgttgacacgagcaaaggtaaaagcaacaggaatacagaagactggctagagagcagttagatgggcctgtcacctactgaggaaggttggagacaggtggattccctgggttctgtaaggctgcaagaactggaaacatgctcaggttaccttagacagcagtatcttgtgaaataaatgcctgagggagggaaaatgggaaacatgtgatcagtcctcgtggcacctagaatgttcttcaggatccacaattctagaagttcaagggcagctgtggtcactcaacttgcttgagttgttcctacagaatctggcatacattgctcgctcccatagtgctctgttgtatggtaatacaggactctctctgaagactgactccaactggctaaatcaaaaaggaaagcattggtcctcttgaatggaaggtctaaggacaggatttgctcaggacagctggagctgagggctttagtggaggtattctctgtctctgtcagccctgctgtcctttgaactggcttcactttaaagcaggctttttccatgtggtggcccctggtaggtcacttcacatctctaatcctgtttcctcattctagaaaaatggagctactagccacctgcataagtacaatgtgaggatcccatgagatagactatatgtaaatgctttcaagctgccacatttcagaggactttattatttgatatgagctcagtggcctgttttggaacagtctttaacatggcatctgtaccgtcttccctgtttctgattattaataagatggtattgcttttgttaagcaagcctgctctgcaacttggcacagagggggaaaaaagtcatcctctttatcaagaatatcaagaatgaggggcattattatttttttttaaattggcatttaaaaaaattaagttctaaggccctgggagcctatggaagagtctcaaggaccacaatgtgtgtggaagggccggatagcagtgggcaaggctgactgggtggagctgccctgtttaataagagcaggcctgcttttgtctgttttctacaccatgattctggatgagattttacatcaaaaaggagagtggtaatatgattaaaataggagcagctttggcagcaaaacagaagaaatgagccaaacgctgacattaattgactaaaagctaatgaaagcagaactgaatcaatcaattacagcaaaattgaacatcacttgacaatatctagaattcaatattttttaagtagatcagtaatagctcaaagtggtatgtatttcattggcctaggcctgaaattctcctcattcctctggctcacctctgggactaaggacactgagaagcctctgcaatggatgggctcaaccggccaaccagccctcctacactatatggtatacaatattagtgtttaccaacccctccttgttctggccaatgcaatgtgagtagaattagtgtgtgttttctctttgactctgagcaagttgccgacctgtctcatttttctcatctataaagcataatatctacattacagggttgctgaagagatcaaattataaacacacacatgcacacatagctagcatttaacagtatctaacagttggtagggaatcaataaacctaggtaccctttctctctgttcccttccttctaaccatttctaagctcggtaatgtgctgttttgatctcacaggctctagaactaggactccttaaagtccttactccaaggtctgtgtcctctacatccctgctagggctttgaaactagaagtgaatgctgccaaatcctctgacttatcgctctttgtagtgcacttcaactctaaagacgaaatcacggccagggcgacaggctaaagtctgagtcagggtgagcttttggggaaacggcgtggagcgggtggtggtgtcagctctctcctcgcctacacttcagctcctttctgcccacatccattcagggcattgccctgtttgtctcctcagctgtcttctgtattaacctccagcctgttgggtgcattcagttctgccagctggactttcaatatgtatttaaaaagacacataaacaaaaaacaaaaacaaaaacaaaaaaactttactagaagccaaaggaaaaccatcatattcaaaaatataaatataaaagcaaagaaatgcatacatttactggacaaagaggtctcatcttgagtaaactgggagcactccgagatgtctggaggtcttggaggctacacgctatccattgatacctcctgtcaaattctgaacatgcagaaattaccagatctcaaagtcctcatttcttgttgaattttagtgaaaaaaacttccctggatcccaccgtagttgagtcttggaacagggtgttaatctttatattataaaatgtccttgactagagataataggcagtatgaaacattatatttttaaaaaggaaacataatattgaaaaaaaaagagaaatactgttgcagtgacttggaatccccagttctcaaagggaagaaggccaataaagaagtgggagaagaaagtctgagaaccgcatgaaaagggtcctgttcccactaggaccatggtccactcaccaaattatcagagacgtttgaaccagagcaactccatcttgaataggagctgggtaaaataaggctgagacctactgggctacactcccaggaggttagacattctaagtcacagaatgagatagaaggtaggcacaagacacaggtcataaagaccttgctgataaaacaggttgcagtaaggaagctggccaaaacccaccaaaaccaggatggcaatgagagtgtcctctggtcgtcactgctacggtctcaccagctccatgacagtttacaaatgccactgcaacgtcgggaagctaccctatatggtctaaaaaggggaggcatgaataatttcccccgcttagcatataatcaagaaataaccctaaaaatggacaaccaacagcccttgggggtgctctgcctatgagtagccattcttttattcctttagtttcttaattacttgctttcactttactccatggactcccctcaaattctttcttgcgcaaaatccaagaaccctctcttggggtctggatcgggacccattttcggtaataaacttgtagcatttggtgttttaatgtttgtgttttcttgacttgttacctcatttagcctcaactgtttaaagatggtctttttggccattttattcagctttaattgttctaaggggagtgaagaaatggtcatttactttgaaaaatcagagggaacgtgttgatgcgggaagcagctaatccttggggtacagtggcccttggtagtgcaggaaagtcctgggggccacctctaacccaccttcctcctctacagcatctcccactgtagtcattctctaccgaagccccagaaggtgcggcactttgccacgacagagtactgggttcatgtttctttccgaggcgggccaagagctctcagcccactggcagtggcgagatgacggacacccagcgagtccaatgggcgtcgaacgcgtctaggcttggtggacttgtcagcgcctgcctggcttcggtccccaacttgagcaccggccctttcctgcatgcccctaaccctcgcaacgctaaacagtgaaaaaaaaaaaaagacaaaaacaaaaagcatctcaacacacacacacacacacacacacacacacacacacacacacacacacacacacacacacacacacacacacacggatccgcgttcagaaaggcgtgcacttcctacgcctgatcccccgcatcgcaacctcgcagcttccccggcgtgcagcgctcatttaccaattcccttcctgggagttgcggcttccctcgctcggccccactcccgtttaccctttccccagctcccgccttagccaggggcttccccgcctgccgctagggctcgggccgaagcgccgctcagcgccagcctgccgctccccgggctccactttcactttcggtcctgggggagctaggccggcggcagtggtggtggcggcggcgcaagggtgagggcggccccagaaccccaggtacagcgcgctcgagccgcgggtaggggactgcgggccgggaggagagcgcggcacccgccccttccctgcgcccgtcaagtggggggctgagggcctggggcacgggaggagggagacggggcacgggaggagggagacggggcgcgggaggaaggcgacggggcgcgggaggaaggcgacggggcgcgagacagggcgcgggaagggcggggggagtcgctggctaggcccgagtccgcggggtgcccggcgggttggcggcgggcccacccctgccggtccctgtccctgtccctccgggcgcgtggccggtgcgcctgcttcacgggtctccccgctgttcggccggcgggagcctccctcagcgctccgcctggcgcctggatgcctgccagtcctgcaggccaccgacgcccgcgcgaggccaaaaggcggggtggggcgggcagctggctcgggctgaggagggcacctgcccatagctgctagagaaacccagaggctttgggttaaagactctggtggggtgggatgcgcgggccgtgtgtgttcttaaggtcacttccctccctgcttctcctgttcttctggtcagcaattctctctctccccttcgctctggctctggctgggttttattcagataaagcacctctgttgacgcaaattaaaagtttcctatctgggtgcctcactggccaggtggtcctacaaagttaattccatgaggggaagggggagagcacacacttcctcacgcttttggatttctttgtgtaggctaggttcagaaagaaattatctgtttcctattaaacacccagaggattcgctctgaactcaggacgtggtcaacaattaacaaaacaacaaaacaaaacaaaacaaaacaaaaaacttgaaaattgggcacagttgtctcttgcctgaggatttttaattagtataagtagcacatt

SEQ ID NO: 3741 - DNA, 6000 bp, Homo sapiens
caaatacccctctcctcccatacgaaacaaggaaggtgatcttaaactcagcagatttaggctgtactttgtctaagaaactagtcatagtgttactgaccactggttcttgggctgtcaatgcaatagagattgatgtgaggccaaaacagtttccctagacaagccttcattggagcttatgcttggacataagggaggtagcacaaaagagagaattccctgactgactccccaaaaagaactagtcgtggttttttattaggcaaagtgcgggaattgacatcaggggtaggatatgcaggctggactgggcaaagcatatcatgtgtaggctatgcaggtcagcattacctggttagtatggctatcttgagtaatgggcagccagaggcaacaaggctgtaaatcaattgttcagcattccttccctacctaggacactccacaaccttggtcatctcctaaggccagttctgggaaatctttttttttttttttcccagacaggatctcactctgttgcccaggctggagtgcagtggtgtgatcttggcttgctgcagcctccaccttccaggctcaagcaatcctcccacctcagcctcctgagtagctgggaccaaaggcacagaccaccacgcttagctaatttttcaattttttgtagaaatgaggtcttgctgtggggtacacgttggtcttgaacttctgggcccaagcaatcctcccaccttggcctcccaaagtgctggaattgcaggtgtgagctattgtgcccagcctagttcctggaattctttaagtaaaaggcatggtttaaacattaaggcatcagtgaggtagtagtgtaggttttgtgctcggtgagggtgcatgaaagaatgctctagtaggggtgaggtgaagctaagccccatttctactctgtctcaattataacctcattttcatttccagtgattggtctacaaatgtacaaaatatagttttggtaaatgagacctaaggagaattctaatggggaatttctgagaagggtttcccctgctctcaagaaagagacacggaagagtaagttccttcttcctcccctgctgcagccaacttttgaccatatggtagtctgggctttggggaattgctcatatagaggactgaagagtggagagagagaagttgggctcttgatgaggctggtgagctgtgattgaagattatcttatcagtggacttgttatatgaaatgataaatgtctgtatcatttaaactagttttactcagagttttgtcttttgtagcccaaggaatctgaactagtatatcactgttctttccaaataataacctttcactttatttggctgcgtttttttgctaatgcctaagctctacttgaactttattagataattattctgctttcttctgtgctctaaacatttcttgatttgatacaacttcaaacattactaattaatgcagtgtatgtatgctacaaatgggttacaaaggcaatgagatattgactccttcggtccttagggtggccggaaacctcatgatggtcagccttgccctggcgggaagcagcttcctccatttattcgagtgctgaacaaataacattttcaaatgtgttcaatgaattaatgtattgttgcttatttcaaaataattagaaagatcacttagcagggctgaatccaaattccctatggaatatcaactaattaagttggaatcttaattaaatgattaatggaatagacttctaatagatgaaattagctatatttctctctattccatattcttttcgtggatttttgtcattgaccccaatttgcttgtggaaactgggagacaacagaaaactctgaagcactggtttagaacacagatggcctgagttccagtccatgtctgctcgtggattgtgcgtaaatattctaccctctctagacagtagttccctccttatctgtttcaatgtgaggcttggatttgctgatctatggaataccaagtgttttattttgataaaaatatccctatattcattgattatcaagtttgtcagttctttaaacaaatgcaatttgtttttcagggtgcttatatttttttcctgtcatgctatttattatgtattataattaactctccaaattaatggttttcaagtgttaaatggtagagagcaatgattccgaagacagtagatgggtatagtagataatgtcacattatctcctttgataatgaatcgtaacttcataataacttaaactgtcatattcttaaactaaagaggaagttctgtgtgggaggataggcgggtgttaaagataaaaacataatgggttttggttgtgaaattgtgatatcatattccctcaaaaaggctctatgaagtcaaatgtaaaacagtatccgttgaaacaaaacaaacttcattattattcttttgctcctaggtaggcttctgaaacatttcgtttgtttactatttttacttcttatacaaaaccacgtcttttttttttttttttttttttttgagatggagtcttgctctgtcgcccaggctggagtgcagtggtgtgatcttggttcatcacaacctccgcctcccgggttcaagtgattctcatgcctcagcttctcatgcctcaccctccggaatagctgggattacaggtgtgtgccaccactcccggctaattttattttttgtatttttacatgtctttaaatggtccttcatgtctttgtgtgtgtgaaggaatgggaggggtgggaggcaagaggttggcaaagaaatcatttgtctctttgtcaaagaaatctcaaaaagacataatgatccacctatattcgctagtgcatttttttttatcacgtctctgcagagttgggatatgtaaaacaaaacacaaggtaacatgtttcacacttaaaagcatgatagactgtaggttacaggtgaagtgaggtgaggtgatttaacaagctgcagtgttttaaatatctcctatactaagtggtttggttgcaaaaggaacttcaagggaacatgacatgacctaaaatatagagaagagcgtcttatttaagcaatacaatgtgtgaagtatgttaacaaaatctagctctgcgtgtactatataatatctgaactgggatacatcagctcctgtggttcactatttttggttctaaaatgtcagtactaggggccagcctaacggttctgattacctttcacacattagggagatagcagctctgaggtatcatatgatacagacaccttctctgtactgatcaaacacatcattcagtatggagtcattaactggaagggtttgcagcagtggaagtgaactctaaacaccactatgtccttcacttattcatgcaaaaattatttattgtatacttacccaggcattggggatacagccttaaaaaagattacgactctgccctcacaaagcttgcattcttgagaagggagactgataataagcaacaaatccaaaacattgtttcagacagtgatgagtgctgagaaggaaataaagcaaggccaagtctttatagagtgtttgtggctattttagatgtatggtcagacaagggttctttgcagaggtgacatttgagccgagacttaaatgacaagatggaatcagtaggcaaagcactaagcagaagaaacagttcttgtgcgaggagcgagcaaaaggaattattaacaatgatggatggaacttggcgacttccgggaacagcatgaaggcctttgttaccaaaatatggtgagtatgtgctgatgaggtcccagagttaggcaaggagtttcattttttattctaagtgcagttggtatccactggaagtttcaagtagagcgtgcgttgtgagggatgtaataacaacaggcagtttaaaatacaatattgtacttcgatttgacttcttcgaaacctagtttccaattccagtgctggtcaaacaacaccctggccgtccctgtttgagcaggctgtttgcgcttgccgcggcttgtttgtccctggcgccccgctgttgaaagcctcagagcgtgtgacagttggcaggcgcagtgaggcgcagcccgagccaagtcaatgcaggggccggggctgagggaggggaagaggcagaggaggcggtgatggcgcgctgggagggcggcggcctctgcagcgagggtggtggcgatgcgcataccgagaggataaggaagcggttcccgacgagcctcctcggggcttatggggcccctggcggttcggcctcggaggctagcggggctgcccgatttggcactggaaacaatggtggctcggggctggaggcaatggcgcgagtgctggggggcaggggcgactaggggagtttcggtttctcgggcctagcgccgcggagccttgctgcgggccccagtggtagcacccccgggaaccgcaggtgttgatttaaggctcggaacaggcgggccttctgcccacatcctgcggcgcccgcgacccgggccgggcgatccggcgccgggttttgttatccgcccgcacctagaggccgcaaggcagccgccagccccgggactggaccccagggcgccctcggccctgcgaggtccccgccctctcttccgtctcctcctcaccgccctcctgaggcactctgatgcgggcgggcatctctgccgaaaacacctacagcgcccgctccctcggtccttcgagcagtgatccctccgcggccaacctccccagggaaaccagcgattcgcggttcagatagcgaccttcgcccgcaggttcctgctctgccttcagacttcggcttcagtggcacctgctcagcgaggcctcgtctaaccaagccatccgaattaactacccactcactcgccatcacatcaccccgatttaattcgcagcggggcactgactttacactcgtgtgtcttctgtgtttatttatggtctgtttctggaatgtccgctcctgggactgggaccatgattttctggcgcagtgcgggtgtctcggcgtccgggatcgggcgggtcgcagtagggctccacatttgttgagtgactgaacaccgttcccggccggggagagcgccgcagccgggtccacttcaggtaggggctgggctttcccggccccgcctaggccccgcccccagcgcgaacccgctcccacctcgcctgtccacggagcagcagggggtttgactgtgcttttccctcttgcttccctcgctctttctgcagctgccacgaaaacccggaacggcggagcggcgccgcccctcgcggcacctccctggcagcccttggaggccgcgctgggcatgctcagtcagctgggccgcctcagctctcggagtaggaagctcgggcgctccggctgtaaggagccgcggcggggggaaaatggagcccttcaccaatggtgagtgggctgccgaggcgccgggacccgggctctccggagccctgagggtcgtgggcagtcgtgacacgcggggtcgggctgcagccgtctcccccaacaccgcgggcttcccacgagggctgagggaggcagggagaggggatctgggggaggcagggaggttcggggggcgggcggcggccagtgcgggacccggggctggcttgaaggtcagcgccgccgccgctcgcccggggtgcggccggtgggcaaacagcaaagtttgggctgctgtgcgcagaggagtgggcagtgggaaagttggcagctcaggtttgcccccggaggaggcggtgtcggcccgactctcctgtaggagcgttaagttgtggcagctgccgagcccaacttttgtggggcgccaggagctgtccccctgcccttcagtgagctgccggcgtgacttttcctaatagggcggggtgggggtgggaggcttggcaggttaatgttgt

SEQ ID NO: 3742 - DNA, 6000 bp, Homo sapiens
caagaaccacaggcctcatctaggtccatcccaacatctggggtaatcttggctaaactctttcaaatctcaatttcctaatgttttcatagacagggttaatactgctgtttcctaataggagtattacactaaattagtagacatgcaaacagttatgaacagtttctgtacatttatttcataattagaatactgtcttagacaaaactttattgcttttttatttcttctgtgtttccatatttcatattagcatgacaacaaaactaggttcttctattcatttctcttatttaggtaagcattatctgatgacgaggttgtgggttttttttttttaatgtaactgtgtctagcagaaaatctacttgtaaatgggcattcaaaagatagctgtatgattgaattactgagcagaaaattaccacttattttctatataatttccttataaccaatctctctggttatctatctttcaggctgagttctcaaggataacctacagataaatgataatcaccggttataagagtttctaaaatatgctgtttttatgcatgtatcaagacagtttttggaaactggcaagtaatagcaaagaacttttctaccactagtttccagttaaaaactgggctgtttctagctatagctttaaccctagattgttagtgatgctaacacttaattcctaacagtcttatttcccccaaataaaattaaaaacttaagacagaaagataaaaacaggatttaacttatattccatcacacagagaaactatgagctcctatttcttaagagttgtctttcaatgtggaaatttatcatagagcaaaagaaaaataaaaacaaaatgtggtatgctcacatttttgagaagtgatgctaaaaatttttttttaaaaagactcacatatctatagaacaattgttatttgtaagattaaaagatggaatcacaattttatactgtattacaacccacaaatatctcatttgttgcccagacttcccatttttgaagttgaaaaatactttcaactggataccaatctgaacatgaaagcaaaaataattttttaagacaactaagtcctccttgtttgattatgcaccacactgcggtaataaaagtgattcataggacctacattcatatgaaaaaaaaaactatttatgttttcagttctgggacctcaaaatgccaaaataccaacctttagatatactttagaatatatcacaaactagaaagtatatatactttcagctgggcgcggtggctcatgcctgtaatcccagtactttgggaggctaaggtgagcggatcacttgaggtcaggagttcacctggccaacatggtgaaacctcatttctactagaaatacaaaaattatttgggcatggtggcgggcgcctgtaatcccagctactcgggaggctgaggcaggaggatcacttgaacccgggaggcagaggttgcagtgagctgagattgtgccactgcactccagcctgggcaacagagtgagactgtgtctcaaaaaaaaaaaaaaagaaagtatacatactttctagtatgtatttcatatataatcagacctccttaatcagattctgagggtgaaccttagcatttgcatttcttaagatgaatttaagtttttacaaaatataccaaccctgcatgcaaatgaagacaaaaatctggataaacatcaaagaattatttaatctaatatctctaaccaaaaaagcagatagttgccttcaatttttttttttttttgtaatatacaaatcactattacttaacagttttacctctacctgcctaataagacataatcattattgccaaaacaatcttaagtactggtccagcacatctctcttcataaaaaaagccaccaaagatccaaacccagaccagatgtccagacttcaacataatagcaatccctcccaaggacaaagccaaaaatagatcctgagctaaatgggaattcctagcactaagatccatccttataagccctttccagggatatgcattttaaatgggttgcagaagtatgttacctgaacaggttaacataggatattcatcaaatgaaccaattatcaacaggtagagagcagggcccaacaaaaataggtcataccagtggcaactttggacagaaaacagggaaactacaaaaaaaacgtactggaatagatgagtattgaaggctagagtgacaagatataagctaaattcacttcctttacaaatgcataggtcagtagatggaaccactgacaagattttaactaaaagatatgtggtcctaaattactgaaactgttttttgttaagctcatacacctctctacatatatagggatacatgaaaaagtgtaagtgggaaagattccattaaaagaggatgaacgtgtaacaaaatccaataccaggcttgataaatcttgcaatcataaattctatggataatgaaatactctgcatcatcacacccagaccaatgggagcattatacatgcattattttttgtactcaaaaggatgaagtatataactgtctactgtaccatgtcatttgaaaacactagaaaattctacagcaatccttcaaaagttttcaaataaataccctgtccatcttaaacctgaaaagcacttcaaattgctaacatttaatttcttattgactgtagatattgtcgtttctgttttccttgtaaaaggatgctaaataaggctccaaggagtgattgctacattaaccaaaattatgcactgccaagctgtctccagcatcaactctgaaagataggaaagaatcagaaatccaatttcctacatgaaagttgaagcattgcttctttttttgttctcttctgtgggatttttccattgtcctcccaaatgtgacagtttgcaaatacccacatctagaagcaatctagaagcatattctataagagaaaagacaccaattttaaaacttgagaaagtactttaattctgtaggcaaaggttcagcaaatcagctagcactaatcttgaccaaatgggtgagtcagcctcatcacagagattttttttttaatttagatgaaatttcacatttaaaaacatggtaactccaagcattcttccaaaaacaaagaatgaacattggaatagtcacttacaaggacttaacgacttgtattaaacatattttacactaaagtactagatggtctctagttcattttagctcaaaccttccttaattcttcgagtaacttcaccagactattctttaagtcttagtaattacaaatagaacctgaatgagaaagaaaattcagaattaaagttgttatcagtaagcctaattaaacagtgcagacagaaagatggcagtagaataaagcattctacattaggaatagggagaatataatcagtagttcacagccccatgaatgaagcacagcatacaacaaagtctggctgggatttgggataaagtggacaatatctgtctgctcttgagtggtaactaacaaactaaacagggatatagactgtggcccctattaatgtgatactgtacctgaagtaaccaaccacactcagcaaaacatgtcaaccagagactgaatcctcttttagtgagtcgtctcccttactggcagttttcctactttctatcttaaaagggaatccacacactcaacaccgcaaaacggtaagacatctcacccctatattgtggctctggcacttctggtccgcacaaaagccatggttctaactagggtgggatttatgctccccgttcagtgaagggctgtggctgtttgcagggtgcaggctccctgcgttgactctcgcttcctgtcacacagtggtatcaccaccgtgacggacccttgacattaacaagtctttgactgaaaaactgatgtgatctgcagccagtgaggggatgcgtggtggccctgccgagtacctcggcagggtcaggagggtggcactgtggccaggcacctccgcggcaccgagcgaggtgagcaagcctttcctgaagtttcccttccttccacaacattaacctgccaagcctcccacccccaccccgccctattaggaaaagtcacgccggcagctcactgaagggcagggggacagctcctggcgccccacaaaagttgggctcggcagctgccacaacttaacgctcctacaggagagtcgggccgacaccgcctcctccgggggcaaacctgagctgccaactttcccactgcccactcctctgcgcacagcagcccaaactttgctgtttgcccaccggccgcaccccgggcgagcggcggcggcgctgaccttcaagccagccccgggtcccgcactggccgccgcccgccccccgaacctccctgcctcccccagatcccctctccctgcctccctcagccctcgtgggaagcccgcggtgttgggggagacggctgcagcccgaccccgcgtgtcacgactgcccacgaccctcagggctccggagagcccgggtcccggcgcctcggcagcccactcaccattggtgaagggctccattttccccccgccgcggctccttacagccggagcgcccgagcttcctactccgagagctgaggcggcccagctgactgagcatgcccagcgcggcctccaagggctgccagggaggtgccgcgaggggcggcgccgctccgccgttccgggttttcgtggcagctgcagaaagagcgagggaagcaagagggaaaagcacagtcaaaccccctgctgctccgtggacaggcgaggtgggagcgggttcgcgctgggggcggggcctaggcggggccgggaaagcccagcccctacctgaagtggacccggctgcggcgctctccccggccgggaacggtgttcagtcactcaacaaatgtggagccctactgcgacccgcccgatcccggacgccgagacacccgcactgcgccagaaaatcatggtcccagtcccaggagcggacattccagaaacagaccataaataaacacagaagacacacgagtgtaaagtcagtgccccgctgcgaattaaatcggggtgatgtgatggcgagtgagtgggtagttaattcggatggcttggttagacgaggcctcgctgagcaggtgccactgaagccgaagtctgaaggcagagcaggaacctgcgggcgaaggtcgctatctgaaccgcgaatcgctggtttccctggggaggttggccgcggagggatcactgctcgaaggaccgagggagcgggcgctgtaggtgttttcggcagagatgcccgcccgcatcagagtgcctcaggagggcggtgaggaggagacggaagagagggcggggacctcgcagggccgagggcgccctggggtccagtcccggggctggcggctgccttgcggcctctaggtgcgggcggataacaaaacccggcgccggatcgcccggcccgggtcgcgggcgccgcaggatgtgggcagaaggcccgcctgttccgagccttaaatcaacacctgcggttcccgggggtgctaccactggggcccgcagcaaggctccgcggcgctaggcccgagaaaccgaaactcccctagtcgcccctgccccccagcactcgcgccattgcctccagccccgagccaccattgtttccagtgccaaatcgggcagccccgctagcctccgaggccgaaccgccaggggccccataagccccgaggaggctcgtcgggaaccgcttccttatcctctcggtatgcgcatcgccaccaccctcgctgcagaggccgccgccctcccagcgcgccatcaccgcctcctctgcctcttcccctccctcagccccggcccctgcattgacttggctcgggctgcgcctcactgcgcctgccaactgtcacacgc

SEQ ID NO: 3743 - DNA, 6000 bp, Homo sapiens
agtgcagtggtgtgatcttggcttgctgcagcctccaccttccaggctcaagcaatcctcccacctcagcctcctgagtagctgggaccaaaggcacagaccaccacgcttagctaatttttcaattttttgtagaaatgaggtcttgctgtggggtacacgttggtcttgaacttctgggcccaagcaatcctcccaccttggcctcccaaagtgctggaattgcaggtgtgagctattgtgcccagcctagttcctggaattctttaagtaaaaggcatggtttaaacattaaggcatcagtgaggtagtagtgtaggttttgtgctcggtgagggtgcatgaaagaatgctctagtaggggtgaggtgaagctaagccccatttctactctgtctcaattataacctcattttcatttccagtgattggtctacaaatgtacaaaatatagttttggtaaatgagacctaaggagaattctaatggggaatttctgagaagggtttcccctgctctcaagaaagagacacggaagagtaagttccttcttcctcccctgctgcagccaacttttgaccatatggtagtctgggctttggggaattgctcatatagaggactgaagagtggagagagagaagttgggctcttgatgaggctggtgagctgtgattgaagattatcttatcagtggacttgttatatgaaatgataaatgtctgtatcatttaaactagttttactcagagttttgtcttttgtagcccaaggaatctgaactagtatatcactgttctttccaaataataacctttcactttatttggctgcgtttttttgctaatgcctaagctctacttgaactttattagataattattctgctttcttctgtgctctaaacatttcttgatttgatacaacttcaaacattactaattaatgcagtgtatgtatgctacaaatgggttacaaaggcaatgagatattgactccttcggtccttagggtggccggaaacctcatgatggtcagccttgccctggcgggaagcagcttcctccatttattcgagtgctgaacaaataacattttcaaatgtgttcaatgaattaatgtattgttgcttatttcaaaataattagaaagatcacttagcagggctgaatccaaattccctatggaatatcaactaattaagttggaatcttaattaaatgattaatggaatagacttctaatagatgaaattagctatatttctctctattccatattcttttcgtggatttttgtcattgaccccaatttgcttgtggaaactgggagacaacagaaaactctgaagcactggtttagaacacagatggcctgagttccagtccatgtctgctcgtggattgtgcgtaaatattctaccctctctagacagtagttccctccttatctgtttcaatgtgaggcttggatttgctgatctatggaataccaagtgttttattttgataaaaatatccctatattcattgattatcaagtttgtcagttctttaaacaaatgcaatttgtttttcagggtgcttatatttttttcctgtcatgctatttattatgtattataattaactctccaaattaatggttttcaagtgttaaatggtagagagcaatgattccgaagacagtagatgggtatagtagataatgtcacattatctcctttgataatgaatcgtaacttcataataacttaaactgtcatattcttaaactaaagaggaagttctgtgtgggaggataggcgggtgttaaagataaaaacataatgggttttggttgtgaaattgtgatatcatattccctcaaaaaggctctatgaagtcaaatgtaaaacagtatccgttgaaacaaaacaaacttcattattattcttttgctcctaggtaggcttctgaaacatttcgtttgtttactatttttacttcttatacaaaaccacgtcttttttttttttttttttttttttgagatggagtcttgctctgtcgcccaggctggagtgcagtggtgtgatcttggttcatcacaacctccgcctcccgggttcaagtgattctcatgcctcagcttctcatgcctcaccctccggaatagctgggattacaggtgtgtgccaccactcccggctaattttattttttgtatttttacatgtctttaaatggtccttcatgtctttgtgtgtgtgaaggaatgggaggggtgggaggcaagaggttggcaaagaaatcatttgtctctttgtcaaagaaatctcaaaaagacataatgatccacctatattcgctagtgcatttttttttatcacgtctctgcagagttgggatatgtaaaacaaaacacaaggtaacatgtttcacacttaaaagcatgatagactgtaggttacaggtgaagtgaggtgaggtgatttaacaagctgcagtgttttaaatatctcctatactaagtggtttggttgcaaaaggaacttcaagggaacatgacatgacctaaaatatagagaagagcgtcttatttaagcaatacaatgtgtgaagtatgttaacaaaatctagctctgcgtgtactatataatatctgaactgggatacatcagctcctgtggttcactatttttggttctaaaatgtcagtactaggggccagcctaacggttctgattacctttcacacattagggagatagcagctctgaggtatcatatgatacagacaccttctctgtactgatcaaacacatcattcagtatggagtcattaactggaagggtttgcagcagtggaagtgaactctaaacaccactatgtccttcacttattcatgcaaaaattatttattgtatacttacccaggcattggggatacagccttaaaaaagattacgactctgccctcacaaagcttgcattcttgagaagggagactgataataagcaacaaatccaaaacattgtttcagacagtgatgagtgctgagaaggaaataaagcaaggccaagtctttatagagtgtttgtggctattttagatgtatggtcagacaagggttctttgcagaggtgacatttgagccgagacttaaatgacaagatggaatcagtaggcaaagcactaagcagaagaaacagttcttgtgcgaggagcgagcaaaaggaattattaacaatgatggatggaacttggcgacttccgggaacagcatgaaggcctttgttaccaaaatatggtgagtatgtgctgatgaggtcccagagttaggcaaggagtttcattttttattctaagtgcagttggtatccactggaagtttcaagtagagcgtgcgttgtgagggatgtaataacaacaggcagtttaaaatacaatattgtacttcgatttgacttcttcgaaacctagtttccaattccagtgctggtcaaacaacaccctggccgtccctgtttgagcaggctgtttgcgcttgccgcggcttgtttgtccctggcgccccgctgttgaaagcctcagagcgtgtgacagttggcaggcgcagtgaggcgcagcccgagccaagtcaatgcaggggccggggctgagggaggggaagaggcagaggaggcggtgatggcgcgctgggagggcggcggcctctgcagcgagggtggtggcgatgcgcataccgagaggataaggaagcggttcccgacgagcctcctcggggcttatggggcccctggcggttcggcctcggaggctagcggggctgcccgatttggcactggaaacaatggtggctcggggctggaggcaatggcgcgagtgctggggggcaggggcgactaggggagtttcggtttctcgggcctagcgccgcggagccttgctgcgggccccagtggtagcacccccgggaaccgcaggtgttgatttaaggctcggaacaggcgggccttctgcccacatcctgcggcgcccgcgacccgggccgggcgatccggcgccgggttttgttatccgcccgcacctagaggccgcaaggcagccgccagccccgggactggaccccagggcgccctcggccctgcgaggtccccgccctctcttccgtctcctcctcaccgccctcctgaggcactctgatgcgggcgggcatctctgccgaaaacacctacagcgcccgctccctcggtccttcgagcagtgatccctccgcggccaacctccccagggaaaccagcgattcgcggttcagatagcgaccttcgcccgcaggttcctgctctgccttcagacttcggcttcagtggcacctgctcagcgaggcctcgtctaaccaagccatccgaattaactacccactcactcgccatcacatcaccccgatttaattcgcagcggggcactgactttacactcgtgtgtcttctgtgtttatttatggtctgtttctggaatgtccgctcctgggactgggaccatgattttctggcgcagtgcgggtgtctcggcgtccgggatcgggcgggtcgcagtagggctccacatttgttgagtgactgaacaccgttcccggccggggagagcgccgcagccgggtccacttcaggtaggggctgggctttcccggccccgcctaggccccgcccccagcgcgaacccgctcccacctcgcctgtccacggagcagcagggggtttgactgtgcttttccctcttgcttccctcgctctttctgcagctgccacgaaaacccggaacggcggagcggcgccgcccctcgcggcacctccctggcagcccttggaggccgcgctgggcatgctcagtcagctgggccgcctcagctctcggagtaggaagctcgggcgctccggctgtaaggagccgcggcggggggaaaatggagcccttcaccaatggtgagtgggctgccgaggcgccgggacccgggctctccggagccctgagggtcgtgggcagtcgtgacacgcggggtcgggctgcagccgtctcccccaacaccgcgggcttcccacgagggctgagggaggcagggagaggggatctgggggaggcagggaggttcggggggcgggcggcggccagtgcgggacccggggctggcttgaaggtcagcgccgccgccgctcgcccggggtgcggccggtgggcaaacagcaaagtttgggctgctgtgcgcagaggagtgggcagtgggaaagttggcagctcaggtttgcccccggaggaggcggtgtcggcccgactctcctgtaggagcgttaagttgtggcagctgccgagcccaacttttgtggggcgccaggagctgtccccctgcccttcagtgagctgccggcgtgacttttcctaatagggcggggtgggggtgggaggcttggcaggttaatgttgtggaaggaagggaaacttcaggaaaggcttgctcacctcgctcggtgccgcggaggtgcctggccacagtgccaccctcctgaccctgccgaggtactcggcagggccaccacgcatcccctcactggctgcagatcacatcagtttttcagtcaaagacttgttaatgtcaagggtccgtcacggtggtgataccactgtgtgacaggaagcgagagtcaacgcagggagcctgcaccctgcaaacagccacagcccttcactgaacggggagcataaatcccaccctagttagaaccatggcttttgtgcggaccagaagtgccagagccacaatataggggtgagatgtcttaccgttttgcggtgttgagtgtgtggattcccttttaagatagaaagtaggaaaactgccagtaagggagacgactcactaaaagaggattcagtctctggttgacatgttttgctgagtgtggttggttacttcaggtacagtatcacattaataggggccacagtctatatccctgttt

SEQ ID NO: 3744 - DNA, 6000 bp, Homo sapiens
ttcccacaaagatgtggttaaggcacaaaggctacataaacctttatgtgggctgcatttaagttgcacatctttgcttcagtactttgcagcttgctggaaaatgttaaacctatctttcccttttctcttacttttgcccatagtatcctcctctgcttggcgaactccagttcatccttttaactcaaatggatggaacctcctttgtgaaatcttccccattttcccagggaatgtgagctacttcttttctctcctcccagactatttgtgcatacattttttattgcatgtatcacagtgccacacaattatttccttacactcaaaaagaagatgctttcttctgagtaagcagagtaggggcttggaggaaaagagaagagtacacaagaaaactgggttagaagattttttaaaacttcacaactttctctggagttagtttccttaccttcagctgggcagaaacaaaaatagaaggcatgcacagaggtatttttggcatgcagctacagtaacagctatctctacttcatgtgatttatggagtttgggggtttttgggtccgggaggattcatcaatttagatgtagctacaattattttagaatatatttagccattgagtaatggactagttattaggagcttctagattccaatgtgttttattggccccaaattggaaacatgcaagagatagcttgaaaaggaaatgacccaattatctattggcccaaataagacagcaaagttagttatcttgctaatttctaaacatcatcacactatgaaataaggcagagaggaaaaaaagccctattcaatttcattagtaacaaaatgatgaattgattttcaatgcaaaggaccccagggttgcaagtcacataacctgagcatgcccacataaaccaagtgttcccaattcatgaccccggagccaaccacagcagaatgtaagtactcagattgaagaatgggaatggaattaagaagtgaggggtactgtgttttgctgcagtatggatttaagagccaaggacccagcatcacctctttgcatgacccaatcagatcatgcctccttgcattgttctgtctctctcacagttatcctctgcctataaaccctccctccagaccccagcctggggagacagatttgagcattgcatcctatcaccttgccagtcaacttgcaataaagctttctcatttttcaaaagccagtgccatagaattgttttctaaacacattgggcggtgagctcactgataggatgcaagttgcctaagatttcaggggtgccccactctccattcctccccaaaagtaaacactgagacagtggtcactctgcattgtttctaccattagagtctctcgtctcttaagtttagatggttctagaaagtggatcatgctgagagagtgggacctccatgtagaattttaaattttgtattattttttaaattttagcatttttatgttttgcaggggaagtacagaaatgaaagattgaggataaaagtgaatgaatagttaatggatatggcctctgtagatagaagaaagtgatcatcgaggacccagagaactgctgaatgagtttgctctgatccattgagacaagaagaaaggaagtcaagatgaatgtggatgcagagagcattttgggtggctggggcatgatgtcaagaaacttctctattgatgatctctaaatttcctatgaactaggaagtgaaatcatatatcaagagagtgggaaaaatgtcttgaggacatggtaaaaagattaaaccccttctccttcccatccatgatgctggaggatatgcaggctgcaggatggcttagtggagacttgaggtcataaatctgtagtggtaccaagtttcacactttttggttgttaagtagtccatataaaaaatgtggatggctaaaaagatttgccaggtgggtacagggaaaggacaatgggataaagcaagggagtgactgatgtgttgactctcggagttaggctggataggaaaagaggctgagtggaagaaatgcaaatctagatcagataaaagaagattgtggggatcaagggtgggaggttgtagttggggtatagaatgtcagagatacagataataaaggtagaggtggctctgagggtgctgctacagagtgcagccggggacaagggagactaaaatcaagcaatggtgaaagttactggggttgaggtttcaaacaccatgacatcctgggtgactctcacagcaatcatgcagatggagcttctccttctatctcacacagtagaagctaagtctcattaaggttttgggctttgcccagagtcatccagcttacacaaggcagttccagtattagaattctcaattggtggtaacaaatatcactatccatgggcattcagagatagtttctgattatttggggatgggagaggttgggtgtctacaaacccttttaatcctttaaattctagtttagttgcattactgcagaatccagaggtatttagaaagtacctatctttgtccttctttccactgaatgacaccaccaacgactgaccctgccagtcctgaaaccctttaaatctacctacatgactcaccttccttcactccctccatcccctcaatctccaggcttttataagtcttgaatgcatattctcctttccatccacatagtttaggccctcagcatctgtattagttttctactattgccatagcaaatgatcacaaatttaggggtttaaaataacacaaatgtattactttacagttctgtaggccataaatcagtattagtctcaccaggataaaattaaggtgtcagtagagctcaatcactttctgaagactctaagggaggatccatttccttgctcatttaggttattggcagaattcagtttctgctgttgtaggactgtggaagaaaaacaagtctagaccagataaagaaagtgaattttttgttggctgtcagctaaggtcctttcccagctcctggaggttatccacagtccttggttcgtggttcaggttgagtccctctcacactttgaatctctttgacccactcttcttccattttaggggattcatgtgattagattgggctcactgaaataatccaggataatcccccatctcaatggcatcaatcttaatcacacctgcaaaatttctttattcttttttttcccatgaccgaatgagaaggtaacacctgcaaaaattcttttgccatgtaagataacatatttacaggttccagggattaagaagtggacctctttctgtaactctactcattctgcctactgaagtatctcaccgacatatttcaatatttcctaagcaagtttcttggttctgggatcttctatgtttccagattaaactttctagaaccacacctgacatatctcctgtgcttaaaacccttctggcttcctaccaatcaaaggtcaaattaatgttgtttagtttctataggaaaacagcccttgagtttggtcctgttttactgttttagctttattccggccaccattccacttctcctccatccttattcaggcttgaaaaagtttactgtgattcttcttcacttataagctgcctttgaagctcccatttcttcttccaaacccagctcagacatcacctacaccaggaagatctccctgacgcccttccccaaagttataaccacaggacaaggtcctcttttaaaaacctccgtaccttgtgtatgtttctatcttttgcattaaacccaaatgtgttgtgattttgtctatttcacctatcaagagtttactttcctctctccaagccaaactcagccatttcccaaacgtgtaactttctttgggaaggctatttacttcacgatgtctccctttccctttgtaaaacagggatagcgacaggatctatatcatagattgttgtaaggagtagaacggtgacctacacatattaagttttactagtattattaatatttccagccctctgccccccgctgccatgtactaggtgcttaatggatgtttattgtatggatggattcatcgtactcccaccaaggtccctcgcccttgaaaatggctaccccgggccagggctcctcaacagactgaaggtccagatcctactccatcctggcggtctcgggtggcccctgaggagggcaagccttctgctccacaggcaaggacagtcacagctaagtccgcggggggcggcagagagcgagggctttccaggagccaatgagtctttaactccaagaggaagccctgcattctccgcaaatggaaaccaggaatcgggagcgcgtcagctatcgtagggtagacttaaggcccgcagaaaattaaaagcaaaagagcaggcggaattcaggggctttcacggatcatcatcataatagtcaataatgatggcagcagacactaacattcacgcgttcttgttaagtgcaaggcacagtgcaaatgtgtatggccccatttaaccatctcaacacactacgaggttggcgtctcatttttacaacggaagaaactgagaggctcaggaataccgtatcctatgcacatctcccaagagggtcctgttctccagcgcccagcgatctgggcctcgcggtccgagtccggctcccgggccgccgcccagcccttctccgcgctctcctgcgcctgggccacttccgactcctgctgtccggtccccagctcctcctcacccactccgccccgccatgccccgccccagccgctcggctcctccttccctgcacgctccgcccccgacctcccggctcctccccggcctgcccgccacacccttggtccctcctgcaagttccgcccctggcctctgcctccttttctcccgccggctctaacccgcgcttggctaaggtccgcgggaacccgtgagccaccgagagagcagagaactcggcgccgccaaacagcccagctcgcgcttcagcgtcccggcgccgtcgcgccactcctccgagtaagtggctcctgggcgcgcccgtcccgcgcacactccagcgcgcctctcccgccgctgggctgcgggctgctctcggggagcgcctccggctcagagagtttctgaagcgagtgtgagtgagtgtgagtgggtgcgtttgaacaacttgtttaggtgggtgtgcgtacgagtgtgtgcaggagcgcacagcctcggaaactccgcgaaattttactcggttccagtgccgcactgaggatccaagaccccttttaggaacccttacctattcagggcgacctcttaaccacctcctgccgtgagcctcattccttccctccctttgtaactgggttcccgctatttgtcacgtcctcctgtaaccgcacatactggcgaaagcactgcccgggttatcagggtgccccagattgcagactgagatgctggcctgagattgtaatccaaccttgcattgtaaaacgggcagagaccagagccctgctttgagatcattcggtggagacttcctttgaggaagaaaatgtgtgtgtgtgtgtgtatgtgtgtgtgtgtacatgactgcacatgtcgcactggagccctcagcacctgctgcaaagacacctgatgagcgcccaggctccacggactcctcgcgactgataggcacgttcaagaccaggctgacccaacaggcttaggcaccttgaatatgtttattgcttcagtgacactgtatttctaaaccaacagattttcgaaaacacagaagctctaagtagaaaaagcagtatccctagaggaatcatggaaggaatcaaacagtagttcagtgcccagtgttgaaacaagaaaatccttggattgcttaagactgataattccatccctacataattatttttatggggggaggt

SEQ ID NO: 3745 - DNA, 6000 bp, Homo sapiens
aagtcatttgaacagagagatttgacgatggttcaatgctagaaccatggccagccataaactctatggggacctcccaatattagcaatctttgagttactcctctgcaaaataagggacttggattttataggaacagtttaatacagtgagaaagtctggatataggagacaggaggcttagattgcattcattgtggtctaaagaacattattacttagttttgtgaccttgagcaaatcatgtaacctccatttctttaattacatatctgtaaaatgagtatgatgacccaagggggctaatttgggagtctaaataaaacctaatacaagacattactgctaagtacatccagccctccatatctgtgcgttccatattcatggatttggcatctgtggattcaatcaacagcagatcaataatattctgagggaaaaaaaattccactaagttccaaaaagccaaacttgaatgtgccgctactatgttgaatttacgtgaatgaagtgctatgtagccattgtattaggaattataagcaatctagagataatttaaagcatatgggatgatatatgtaagttatatgcaaatacttcaccattttatatgagacttgagcatcttcggattttggtatcctcaagggtcttggaaccaatctcccacagatgctgagaaatgactgtgttataaaagaaggaccgtgggtcataaattgttcagataatattttctgacctgatttggagagtatgcttgtgttttatcatctgctaaaagctttttaacaaggaagatttcttagaagagaaatacacctagaaagcctaggaaacaagcacatcccagatgtattattgtctctctgtgtgtgctcatctccgatgtcagcaattcttcccattctctcagaattaggcactcacatccagagcattagtgaatgtgtagaatttatgggagaagtcactgggcagactgaggagagggattacccataacttcaaactcccaggactggccaccagtggctttctccttccctcatctccacactcatcctcagcatcttcctctcacatggttctgccccagcccacatcagcctccccagtcttatcccagtgcagatggtccctgacttacaattttttaactctatgtgtatttgtgtgtgtgtgtgtgtgtgtgtgtgtagagagaggggtctcactctgtgtgtgtgtgtgtgtgtgtgtgtgtgtgtgtgtgtagagagagagaggggtctcactctgttgcccaggctggaattcagtgtatgatcatagctcactgtagccttgaactcctgggcaagagtgatcctcctgcctcagtctcccaagtggctaggactacaggcatgcaccaccatactcggttaaccttttaaaaatttttttgtagagttagggtctctctatgttgtccaagctggtctcaaacttctggccacaaacaatccttgcacctcagcctcccaaagtgctgggattaaattcatgagccagtgtgcccagccttactctatttgtattgtactaaaagtgatacacattcagtagaaactatactttgaacacccatacaaccattctgctttttttgctttcagtgcagtgttaaaaagttacctgagatagtcaacattttattataaaataggctttgtactagataatttagcctaactgtaggctaatgtaagtgttccgaacacattttaggtgggctaggctaagctatggtgttgagtatgttaggtgtattaaatatattttcagcttatgatggttttatcctgatgtagccccatcgctaagttgaggagcatctgtactcagcacttaaggctacttgaggcacagagcttgatcttctgcaaaagtgtataaatgactccactgtcattttagcattccctttttcaattctagtatatacaattttcttttttctttttcttttctttcttttctttttctttttttctttttttttttgagatggtgtctcactctgttgcccaggctagagtgcagtggcacgatctcagcttgctgcaacctccacctcctgggttcaagcgattcttctgcctcagcctcacaagtagctgggattacaggagcctgccactgtgctcagttaatttttgtatttttagtagagatgagatttcactgtcttggccaggctggtctcgaactcctgaccttgtgatccacctgcctcggcctcccaaagtgctgggattacaggggtgagccactgtgcccggccataaataccattttcttaaggctaagagagccaaataacctgggccagggagaggccatggagagatacccacttaggcttacttgtgttatggaagggtaaatgtaaatgtgtctgaggataataggaagaactcaaagcctacaggcctaaccaggtgagaccaagacacagatctctcccgcatatggggaaacaggagtgacagccaactttttatatagatcacggaagccttcgaaggctttcaagggtgtagacaaaaatgatacaagagaagttgaagaaggtctcaaagtgaaattgaaggaagcagattcagcctcagcaggttagaaaaaaaaatgaccatttttggtgacctgaagtttttgcgaactagaggctataggtccataactagtttacagaggtgcttcatatttttcactgcagagaacatataacattcttgaatgtgagtggaatatttgatacctcctaattaaaaggtaccttgtcttcccagttctgccggctggccttctaatttgtgtgagtctgaaaactcactgatctccccttttcttaacagacatctggggagctgtgagcaaaaggcctaaaagtcaggcctttaaaaaaaactctttgaacagctttatttaaggcataatttggaaagagatttttctgctgccctgtgataaagttcagtcgagagttggtgttaataaaccttccttagaaccaaggtgacttggaaagttgagttctttaggtctgtggtcaaattaacaaaattatgtcaataagccccaggtgagtagggtcaatttacatatgacacacacaaatatttgattatacctcaatgaatgaataaaccttcagaatcttagctaccattttcattcttccatcttgacacaaaaggtgggagttccattattagacacttgcaggagttcaacatagtatttaaatttaagtacagtttgttattaaatgagaagtgttgctaacttagttgcaattttgtatcaggcgggcggtaatagtttgttggtatgacttccatacatgttgccatgtgaaggatgtttggggtgtttcttaaacatacaagaatcaacaagtcccacctacaggagataacaaatcattatgatgtactggaccattattcactggggctaagaagtaaattatccccttttgaataaaagcacagcaaaatcaaaatgacctagtacatatctgagagcagcagaaggccaaggggagccctagagaatcagctgccctttgtcaccatgttgcagggtaggggtatggggcaatgcagcctgcccagagcagatggctttgaggttatacgggagactgaggaatgtacttattcacataaagccttttaaaataagctgagcattcattgctcttgagctaaaacagagcattcttccccaaggtgactgcttgcttgcatttaaatacaaaagaagtttctctccaggcttcctgaggccgatggtgaatgttcaaagatcaacgaagctaacatgaatctaaaatgaattataaggctgacggagcgcttgaactattcattcagcagttgtaaaacaagtagcacattaaaggacatgtattttaacatatcttatgtggtttgtccccagttggacttgcaaaatgacatttaataaatatttcttgtaagggtactttctaaaagaagagagtgaaagtaattctgctgtaggcagattgggcctgaaatttgggttgtctggatttgcataatcatcaccttgaaaaggtgttgctttaccccaattatagatcagtggaagctctcttgtgtagcacacggccctggtgagatcccttaagatctcttgtggactatctgtggacatctgggttgcagtgaggaagggcaaggatagatggtatagggagagaggggcagaatgttgacttgggcaggacaggaaaagccacttgtgactggtgagggagcatttctttgggttcagaatcatcctcatctcagtgtatctccccataagtctgagattactgagtgcaaggtatacatatcagcagctcctgactcaggatgtgtggcagaggggaccatgaagttaactgtgactttcggaagggtgcagtctgttaccctttcggtggcgaggtcagtttccgggaggctctgcaacactgatattttccagatgtttctcctcttctcccttctctggctggctatatcttcctcccttcatcctgctctttcagtgaaattgagataacatgttagaatcttaggcaggttagaatctctcagcagtaggatgtgatttaatatctagacctcttacattaatatttataatagccttcactgcttgtgaatagcataagcactcttttctgttcaaagtcaatactgaaataaaacccaagagtatgttttataaaaatttacttttaatggtgcaatggtaataatctatgtagtccttatggttttcaaatccctttgtgcttatattaccttatttaatacagacataaatctgtgaagtaaataatactatttttatcttcattttacaaatgaggaactggaggctcagagaggttaatttgcataaggtcatacaaatgatagatggcagaactggatttaagttcagactccttaaatccatgtcttttgtacgttcttttcactaaatttgccatagtgtttctattggtttttgcctatataaaatcggaaacgaagaaaaagaaacgaactggaaaataaatttgtcaaaagagtatatttttttctcataatttccaagcggatctttcagatatgttatttgaggactttttgcctcagactggcgataaaacaagtgttctacaaaatacctccgtaagacaggcctatcagtggcagctcttgtccccgctttgcagaagggaaaaccaaggctccacagagctaaggggacttcctctcagccaatttgtaggggcctgtgggccagacccgggggcagaattgagatctgttgtgaaggctgtccggcttctttattctatcagcatttcaaatcctgaaaacctcccctttggcattttgaaggaattcatccccagtttttgctggtagccgggagggaaccgtgctctccccctgaggaaggccctttggagtaactgcagcaatgagtgcccgggctgtgcttggagtaccagtgctcgcccggggctatactgaatgagtaagcagccccgtctgcttttgctgtgcaaaggtaagggtggaggccgctccactttcttcaaaaggccccgctctgggacttgtgaaattgtgctctcttaagctggtccttgcaaccccatggacgatatccatgcgactttcctacaaaaataacataccaaagccgctttaaaatccgtaatttttgggttgcaagactccaagacaaagtcaaatgggcatcaaaaaatgtaatccaaaaatacagaggcattggttctaccctatatgcatttgctatttatgtaaaactacagtgtgctctgagatgagactttttttttctttttatacctttttttccgcccgtctggtgcgtttgccgacggttcttctcggccctgtgtctcgggagagtcggctgccgtc

SEQ ID NO: 3746 - DNA, 6000 bp, Homo sapiens
gttacacgtagaaggtgaaacaggaaatcttcatttgtttaaacattcatctgcgttttataaatccccccaagaggtagtgaatgacaactatacaaacagactaggtctgtcctacttcaaggagagtgcatacaaatacccaggatgctaaaacctgtgtttgcaaaaatccttgcttgcagaacatgtattaaagaggatagaaagggcttggcaatcaccttgctgggcctcagtgcctcacctctaaaatgaagaggtcagaaagaaggattggcaaagtcgcttttagctctaaatcatggtgattctatgtgtatttggtgggagaagggcactttaaattacagaagacttcttactacagaccttccttaaacattaaagatatacatatcatttggttttgttttaattcagcttacactatgttttaaagaacaatcttctctaaatgaagacaggtctataaccacactaatctcactgacttacaagttgctagcataaagacagaaatgctgacaaataaatgatttataggtaaatccagcaattctgcagtgttctgaaatgcaatcgctgggtcctgagtttttctggctctactgcattctctttcacccacccactttttggctacttcctggatcaccaacagtcaggagcaggaaatttaatcatccatataatcctgactgttcaatggcgtaaggtgggggcaagaaaggtaggatgcatattcaatatgataaaaatttcagaagtgaggggaaaaaagctccaaatgcatttaagtttacagagctggaggtgtctggcaatgccaagttatcaagtgatgtccactgtagaggagagagtatgatagatctctaaatggattttccacttttagtccttgtcagcacacaacactccaagcctaatgactacataaaaggaaacagataagcacgtcaaagtccggtgtttaagagcatatgctgtaccttttacattatgtatgacatcaaggtcagctataccccttggtttcatcagagctgaaccactgctttaacctccttttctcttcattccctctgcaaagcaaaggctggggaagggcaggaataggggagaaaacttacaaaatagtccttagtgatgaatgatattatataagctgccacaccatgtgaggttaaaacagagtactacacagtgtggtagcttataaaatatcattgggattcttattacagaagaggatattaatcaccactacggaacaactaaacttttttttttttgccaaggattaactttaaagaatggagaccattcactcaatctacaacatttaatgagcaccttttactctgtaggtcctagacatacagcggggaataaaacagacattgtttttccctgcagagcttgtggtctagaagagatgttaagcagtgtggggagagccagcaaggaaaggaacaggtgctctgagagagggcgacaggggatctgagtttaggttcagaaaaagcctctttaaagagctgaccaagaaaaggaggtcaggtggagagaaggatattttgggcaggaagaccagcaagtgccaatgtcctagaatggggagcttgagttcttctatatgcagaaaagaaggagccaggaaggatatgggctgactggtgtaggaggagcccaaggtggaaggcggggcattctgcagtaggaatgacacctgttccacagacacagggaggatagatgtggacggagatgagtctgtcagtctgggaacaggacgttgagggagttatctaatggctactgttttctttgtgaaatagcaggcctggtgaggcatgagagtaagaactgggtgaggtggtggtgggaaatggctactatgggcaatggaggagcgagccagactcactcaccactcaatcctcactcttttccaagtccccacaaagtgacacctcgcccaccccttaacaatggctttctcaatttctggtatcaatgcttcaacatccagagcaaaggagccctggatgccttgatgcttagcactagaaagattctcagagatctcaactgccactcactttaactacttcataattaagcaatttactcaggaaacaactaaatgccaaatacacggctatcagcctatctcctcaggaagccccatccactggaaactgttgatatcctctttttaatggtagtcacctttttaaaaaagtgagtttcttctttcatttccccttctttcctatttattctatgtctgaataatttaaactcattcagtttttaataaagcaaggcctggattatttttctctgtttaatacccaagcacaatcacttattcattgttaagcaggaaaaattaaatcaattatttaggagatggctataggctggggacaaatatccagcacccctggcacagagtcaagtatgttttaagctctgatggcttaacaatatccccagtcatttgcttctacattcacgcatatgcaaaaatatgctggcctccaaggacttagattcaaccccaaagtatactagtctctcactacagttgagaaaaatgacttaaaagtatctcctcttacagcgtatcaggcatgaagcatccaaaggcagttttcttgcaatacagacattcttaagaactcatggtgatctcacactaaatgggatacataagttcaccaggatgaaaaaaaaaaaaaaagctacgtataagaggaaaaggactagtaacgatagagaagataactgagttatttacacaacatagctcgcttcatcgacatctgagtggtggtagctaaccagaaggttctagattacagccaatgaaccagccttggagaaaacacacccaaaacacacagacacctatccttcatttcctggcagaagctatatgattctatctgattaataaagtgttcaatctccctcaagagttattcagtatcccaccctaattgctatcaatttaaaattctactacctcagattattttaaaagaaacattctgggctttctttaaaaagcagagcgccatatcatttgtggccgatctgcagaatgtaaatgatgacaagtggagggaaggtgaggaacaagcagaaggggccccattaacctcttcataggccagtttgcaggctgcttccaaacttaaaaccagagagctgggccctcgaggagggaagactgtggatgttgctatgggaatgtataatacacactttgggatactgtttttccactttctctcccactctctctttctcaaaagacagggaaaacacacctgagagaaaacgccagcttaagtgctacttgtaattcacacagaagttcacccttgagttctctcagcctggttcctatttgccttcaactacctttgactttgaataaactgctggtataaagacatagaaaagaaaagcatctatcagcacacagctccatcagaacacaggacacggcaagaaagcattactccccccatactccacatcaaactcaaaaacaatgctcctggctgtcatttttcattcatgccagccccgtatttctattaaacaaacctcctttttattgactatttccctcacacagcataataaggtaaacgtgagcccacaaagactacatggtgaaacacaaagctttcctctgggaggggaatcagtaaaaggcagaagaggacaagtttcaagggctcttcctaactggtgtctaccaaatggagaaatgatggggctgctcctctgccagaactgctgtgattgacttgaaattaaccagctttccaagagactacatgaaaagaaagagtatttcacaatcttgaatagtctcctctcttactctctaattttccccaaccacccttactcccaccccccacttacaagagaacttttgtatacataaagtttcaaggaacaaagcatacaaacactcacacacaaataaactccccaaactaacaccagcgtataattgtgttttggttggagcttttccagccctgtcacctgttctctgttaggagtaaatgaaaccctttgcttttgcgaagttagaaacagacaaactcttctcagtttcaagctgcacaaggaccccctcatatctttcagccccctcaaacccccaacgaaatgaactcactgctgaaaacccagcaatgaaaaaaaattaatctatttctcaaatacagattttcgcttcccctcactcagcttccccttttagccggaaacatatagcgtttctaatttctcaaaccccttttcaagggaccctccactcagggctcttccagggatcccgctttcagtctttctgatgcaggcaggcagcccttttccaagcacattttgcattcttggagtccaagtggggctctttcgtttccagagaaagctaaaaagcagacttagtgggctggctgaactaggtccgacttttcctcccctcccctctgaacggctgcggggggagaagggagcccaagatgagacccgggctccgcttatccagctccgacttggcttcgaaggcgcagggcatgcggacaaagtgcccaccgctcactttaaaactcccatcctcttctaccactgccttcctccaaattcctccgcagaacttggccggcccccaggagaaaccagaatcctaccttccttggattcttctgcttcggagtgcataatgtcaggataaccagctgcaggggcgattaccgctcacatgtactcggacgagccgcaagttcgctctgcagcgaaatccgcacacgacggaaaataaaaggaagaaagccactaaaatcaaaacctccccggggcgggagagcgggttctggtgcagggattttcagggggaaagttctgcaagagtgacgaatcgcgtgtcagctgggcggcgggagtccgcccccggagccgcgcgctcgggccggcagccgggcggaggcgacctggcggggctggctcggcccgggcgcacgcaggtggggcacaggcccagacggcagccgactctcccgagacacagggccgagaagaaccgtcggcaaacgcaccagacgggcggaaaaaaaggtataaaaagaaaaaaaaagtctcatctcagagcacactgtagttttacataaatagcaaatgcatatagggtagaaccaatgcctctgtatttttggattacattttttgatgcccatttgactttgtcttggagtcttgcaacccaaaaattacggattttaaagcggctttggtatgttatttttgtaggaaagtcgcatggatatcgtccatggggttgcaaggaccagcttaagagagcacaatttcacaagtcccagagcggggccttttgaagaaagtggagcggcctccacccttacctttgcacagcaaaagcagacggggctgcttactcattcagtatagccccgggcgagcactggtactccaagcacagcccgggcactcattgctgcagttactccaaagggccttcctcagggggagagcacggttccctcccggctaccagcaaaaactggggatgaattccttcaaaatgccaaaggggaggttttcaggatttgaaatgctgatagaataaagaagccggacagccttcacaacagatctcaattctgcccccgggtctggcccacaggcccctacaaattggctgagaggaagtccccttagctctgtggagccttggttttcccttctgcaaagcggggacaagagctgccactgataggcctgtcttacggaggtattttgtagaacacttgttttatcgccagtctgaggcaaaaagtcctcaaataacatatctgaaagatccgcttggaaattatgagaaaaaaatatactcttttgacaaatttattttccagttcgtttctttttcttcgtttccga

SEQ ID NO: 3747 - DNA, 6000 bp, Homo sapiens
tagagagagagaggggtctcactctgttgcccaggctggaattcagtgtatgatcatagctcactgtagccttgaactcctgggcaagagtgatcctcctgcctcagtctcccaagtggctaggactacaggcatgcaccaccatactcggttaaccttttaaaaatttttttgtagagttagggtctctctatgttgtccaagctggtctcaaacttctggccacaaacaatccttgcacctcagcctcccaaagtgctgggattaaattcatgagccagtgtgcccagccttactctatttgtattgtactaaaagtgatacacattcagtagaaactatactttgaacacccatacaaccattctgctttttttgctttcagtgcagtgttaaaaagttacctgagatagtcaacattttattataaaataggctttgtactagataatttagcctaactgtaggctaatgtaagtgttccgaacacattttaggtgggctaggctaagctatggtgttgagtatgttaggtgtattaaatatattttcagcttatgatggttttatcctgatgtagccccatcgctaagttgaggagcatctgtactcagcacttaaggctacttgaggcacagagcttgatcttctgcaaaagtgtataaatgactccactgtcattttagcattccctttttcaattctagtatatacaattttcttttttctttttcttttctttcttttctttttctttttttctttttttttttgagatggtgtctcactctgttgcccaggctagagtgcagtggcacgatctcagcttgctgcaacctccacctcctgggttcaagcgattcttctgcctcagcctcacaagtagctgggattacaggagcctgccactgtgctcagttaatttttgtatttttagtagagatgagatttcactgtcttggccaggctggtctcgaactcctgaccttgtgatccacctgcctcggcctcccaaagtgctgggattacaggggtgagccactgtgcccggccataaataccattttcttaaggctaagagagccaaataacctgggccagggagaggccatggagagatacccacttaggcttacttgtgttatggaagggtaaatgtaaatgtgtctgaggataataggaagaactcaaagcctacaggcctaaccaggtgagaccaagacacagatctctcccgcatatggggaaacaggagtgacagccaactttttatatagatcacggaagccttcgaaggctttcaagggtgtagacaaaaatgatacaagagaagttgaagaaggtctcaaagtgaaattgaaggaagcagattcagcctcagcaggttagaaaaaaaaatgaccatttttggtgacctgaagtttttgcgaactagaggctataggtccataactagtttacagaggtgcttcatatttttcactgcagagaacatataacattcttgaatgtgagtggaatatttgatacctcctaattaaaaggtaccttgtcttcccagttctgccggctggccttctaatttgtgtgagtctgaaaactcactgatctccccttttcttaacagacatctggggagctgtgagcaaaaggcctaaaagtcaggcctttaaaaaaaactctttgaacagctttatttaaggcataatttggaaagagatttttctgctgccctgtgataaagttcagtcgagagttggtgttaataaaccttccttagaaccaaggtgacttggaaagttgagttctttaggtctgtggtcaaattaacaaaattatgtcaataagccccaggtgagtagggtcaatttacatatgacacacacaaatatttgattatacctcaatgaatgaataaaccttcagaatcttagctaccattttcattcttccatcttgacacaaaaggtgggagttccattattagacacttgcaggagttcaacatagtatttaaatttaagtacagtttgttattaaatgagaagtgttgctaacttagttgcaattttgtatcaggcgggcggtaatagtttgttggtatgacttccatacatgttgccatgtgaaggatgtttggggtgtttcttaaacatacaagaatcaacaagtcccacctacaggagataacaaatcattatgatgtactggaccattattcactggggctaagaagtaaattatccccttttgaataaaagcacagcaaaatcaaaatgacctagtacatatctgagagcagcagaaggccaaggggagccctagagaatcagctgccctttgtcaccatgttgcagggtaggggtatggggcaatgcagcctgcccagagcagatggctttgaggttatacgggagactgaggaatgtacttattcacataaagccttttaaaataagctgagcattcattgctcttgagctaaaacagagcattcttccccaaggtgactgcttgcttgcatttaaatacaaaagaagtttctctccaggcttcctgaggccgatggtgaatgttcaaagatcaacgaagctaacatgaatctaaaatgaattataaggctgacggagcgcttgaactattcattcagcagttgtaaaacaagtagcacattaaaggacatgtattttaacatatcttatgtggtttgtccccagttggacttgcaaaatgacatttaataaatatttcttgtaagggtactttctaaaagaagagagtgaaagtaattctgctgtaggcagattgggcctgaaatttgggttgtctggatttgcataatcatcaccttgaaaaggtgttgctttaccccaattatagatcagtggaagctctcttgtgtagcacacggccctggtgagatcccttaagatctcttgtggactatctgtggacatctgggttgcagtgaggaagggcaaggatagatggtatagggagagaggggcagaatgttgacttgggcaggacaggaaaagccacttgtgactggtgagggagcatttctttgggttcagaatcatcctcatctcagtgtatctccccataagtctgagattactgagtgcaaggtatacatatcagcagctcctgactcaggatgtgtggcagaggggaccatgaagttaactgtgactttcggaagggtgcagtctgttaccctttcggtggcgaggtcagtttccgggaggctctgcaacactgatattttccagatgtttctcctcttctcccttctctggctggctatatcttcctcccttcatcctgctctttcagtgaaattgagataacatgttagaatcttaggcaggttagaatctctcagcagtaggatgtgatttaatatctagacctcttacattaatatttataatagccttcactgcttgtgaatagcataagcactcttttctgttcaaagtcaatactgaaataaaacccaagagtatgttttataaaaatttacttttaatggtgcaatggtaataatctatgtagtccttatggttttcaaatccctttgtgcttatattaccttatttaatacagacataaatctgtgaagtaaataatactatttttatcttcattttacaaatgaggaactggaggctcagagaggttaatttgcataaggtcatacaaatgatagatggcagaactggatttaagttcagactccttaaatccatgtcttttgtacgttcttttcactaaatttgccatagtgtttctattggtttttgcctatataaaatcggaaacgaagaaaaagaaacgaactggaaaataaatttgtcaaaagagtatatttttttctcataatttccaagcggatctttcagatatgttatttgaggactttttgcctcagactggcgataaaacaagtgttctacaaaatacctccgtaagacaggcctatcagtggcagctcttgtccccgctttgcagaagggaaaaccaaggctccacagagctaaggggacttcctctcagccaatttgtaggggcctgtgggccagacccgggggcagaattgagatctgttgtgaaggctgtccggcttctttattctatcagcatttcaaatcctgaaaacctcccctttggcattttgaaggaattcatccccagtttttgctggtagccgggagggaaccgtgctctccccctgaggaaggccctttggagtaactgcagcaatgagtgcccgggctgtgcttggagtaccagtgctcgcccggggctatactgaatgagtaagcagccccgtctgcttttgctgtgcaaaggtaagggtggaggccgctccactttcttcaaaaggccccgctctgggacttgtgaaattgtgctctcttaagctggtccttgcaaccccatggacgatatccatgcgactttcctacaaaaataacataccaaagccgctttaaaatccgtaatttttgggttgcaagactccaagacaaagtcaaatgggcatcaaaaaatgtaatccaaaaatacagaggcattggttctaccctatatgcatttgctatttatgtaaaactacagtgtgctctgagatgagactttttttttctttttatacctttttttccgcccgtctggtgcgtttgccgacggttcttctcggccctgtgtctcgggagagtcggctgccgtctgggcctgtgccccacctgcgtgcgcccgggccgagccagccccgccaggtcgcctccgcccggctgccggcccgagcgcgcggctccgggggcggactcccgccgcccagctgacacgcgattcgtcactcttgcagaactttccccctgaaaatccctgcaccagaacccgctctcccgccccggggaggttttgattttagtggctttcttccttttattttccgtcgtgtgcggatttcgctgcagagcgaacttgcggctcgtccgagtacatgtgagcggtaatcgcccctgcagctggttatcctgacattatgcactccgaagcagaagaatccaaggaaggtaggattctggtttctcctgggggccggccaagttctgcggaggaatttggaggaaggcagtggtagaagaggatgggagttttaaagtgagcggtgggcactttgtccgcatgccctgcgccttcgaagccaagtcggagctggataagcggagcccgggtctcatcttgggctcccttctccccccgcagccgttcagaggggaggggaggaaaagtcggacctagttcagccagcccactaagtctgctttttagctttctctggaaacgaaagagccccacttggactccaagaatgcaaaatgtgcttggaaaagggctgcctgcctgcatcagaaagactgaaagcgggatccctggaagagccctgagtggagggtcccttgaaaaggggtttgagaaattagaaacgctatatgtttccggctaaaaggggaagctgagtgaggggaagcgaaaatctgtatttgagaaatagattaattttttttcattgctgggttttcagcagtgagttcatttcgttgggggtttgagggggctgaaagatatgagggggtccttgtgcagcttgaaactgagaagagtttgtctgtttctaacttcgcaaaagcaaagggtttcatttactcctaacagagaacaggtgacagggctggaaaagctccaaccaaaacacaattatacgctggtgttagtttggggagtttatttgtgtgtgagtgtttgtatgctttgttccttgaaactttatgtatacaaaagttctcttgtaagtggggggtgggagtaagggtggttggggaaaattagagagtaagagaggagactattcaagattgtgaaatactctttcttttcatgtagtctcttggaaagctggttaatttcaagtcaatcacagcagtt

SEQ ID NO: 3748 - DNA, 6000 bp, Homo sapiens
gggtgatatagttgtgaagggatttagacagtgatgtgctggtgaacaggctgggggctggggtagaggaaacagtgctctgatttgtagaatttgctgatttcatggtgtgattactttcacattaccaacatgacatcactaaactcagagttgggaagagatgcatggaattggctgctgggatccaccaaaccacaagttaagaatgcaaagaagggattttcttcatactgttctatgctgagaggacttcataaaagaggaaagatttggactaggcattgaaggatattgattaggactttccatggtaactgacagaaacaattcaaactagcttaaagaaagaaaaagaatatgagaatgaacctgttttagcacaagtatctgaaaaaagggctttaataatgtagtcatggcacttgctccacctttcagttcttcttgaatctacttctatttgtgtattcatgtcattgtctcctgccataagcaggctgtctccaagtggcaggaaaaacatggctagtggcagcccaggggctacctctttgcagtcaacaattcaaaagaaaagcaatgcactcttatggagatcacgtggaaagactgattggctcacttggatctcatgcccaccaattcaactcctaactgggcagaaagggaaagggtatgtaattcacatgcccctggcactgtagccagagagcagacagagcactaagatagacctctcttcccctaccacccaaaacacatgagagtcatccaaacagagttcaccaatggaaaaagccatgaatttctggtagaaataatggtaaggctttgtggagaggtagaagaagatatagtaattagagggaatggcatatgtaggtgcagaaatgtaaacattgatggtgcatttgggagtcagtgagaaaaccaccctgagcaaagcagagcttacctataagacagtggtttgcaacagagggcaattttgcccctctggaaagatttggcaaagtctgaagacatttttgttgtcccagctggggtcgaggagggctgctactagtaggtagtatctagtgggtagaggccagagatcctgctaatcctacaatgcataggacagtcccctcaacaaaaaaaggctgagtttaggctttatcctctgttacacagggaagcattagaaagatatttagaaggactaaggtagcttgtacataccctgctccttctgcctggcaccactcctcaccttggctacctttgtatgactagcccttttttatcctttgggactcagcttaaatatcacctactgaagagatcatctagacttttcaatcaaagtaggttatctcacagacttcataccgttattctttcccatgtttccctcttattttcaccacaattttgaattatatgtttatttggttgctggtttcacatctgtctcataaggagagaccttccttattcattcatcactgtgagctcaacatcaagcagagtgcctggtgcattgtagttgctgatatttaatcaatgattaatctgaaggttgatgggaggattgaaatggggttgagcataggaggtggatagaaagaggaaagaaggcagtcctctagatttcttctctgcttgttctgatccacactcatctcctttccctgactttcacagcacctatagttcataacatgacatgtcagttaggattttaagcagacatgaatttaataaaaagaatcaaatagactcagaaccattgcagaacaagttctggcttgggcttgcaggaatgagtcccaaaacctgccgtcgtactaaccccaccaccccaagggatgtggccttctgccacaatcaggaggccggcgactggcctagtctgactacaagaacacaacatcttaggtgtaatctggggatcaggaactggcagaactctagagtcacactgcatcttccaggtcaccaccagcaaagtggattcctcccaggctgctacctcctcttcacataactgtttttgttttttgtttttctgaacacaattttgaattcaggtctttcccaggtgcacaggactggctaaacctaaattataatgggagccccaacagcaaggagtctaggaaatggatttttagctttctagtctctgttgtataggaaagcacaccaagaaaagtttggacaattgtggaacaagccaatctgccacatctgcctcatggctgccccgctctgtggccatcaatgtcataatatcattcgtcttctctaggtggatactagcatgttctctagatgtgaatggatgtgaaatgaattgaatgaaatcgaaggggaaaatcctcctctttcatgttcacactttgcacctttcctatggcacttaattgtattttgcctcctggtgtaatttgtgttctcattcagaagttcatctctttgtccccatactcataataggtaataaatgtttatagactgtggccgggtgcaatggctcacgcctgtaatcccagcactttgggaggccgaggcagttggatgacatgaggccaggatttcaaaaccagcctgagcaaaatagtgaagccccatctctactaaaagtacaaaaattagcctagtgtggtgttgcgcgcctgtggtcccagctacttggcaggctgagacgggagaatcgtttgaacccgggaggtggagattgcagtgagctgagattgtgccactgcactccagcctaggcaacagagcaagactccatcttaaacaaacaaacaaacaaatgttcgtagactgaattcaagcagagagtaaagacagagagaggctagggagaggaagttctaagccccattctagcttgacacagttcctgcagctcgtggaactgccaccggacaagtattttggattgcatgctacatgaagccatcaccactgcaaggaaccataggacagggacccaggaactctgctaggcttcaggaaacctaggttccaggtatccttcaaaagttggaaaaacatgtgcccccattcattcaatcagtagtgtttattaaatgtttcacactaccaggtatagcagcactgcctttcttaacttttcattaaccttttttttttaaccaatgagagcatgccagtgatttcaacctctgtcatgatggagccacatggataacacacagatattaccactctactctaggagaggggctttcctgagccctttagattctgaatggcctccaggcattctaagcagtttcctcacctttccaattgctgacacatctgacccaagaggcggtggatggaagtttcctttccagccatctgtgtatcaacaccctaaactccactccacatgttatcattccttcattttttgagctcacacttcccctacattcagacaagtctcagtcatctctcagggttcacctgaaacatcagtttcccaggccttcccctgactgcccagtttatactttaagcttttcttttctataacactcatttcacttgtaaccacttgtgtcatccccagctggaggactctaagtttcatgagggtaggcatcaagcctatttgtttccctctatgtccccagcaccttgcttggggactgacacacaatggatgcttattaaatatttgttgaatgaatgtttgttaagcctacaaactttctttctcaaatagtatttatgtgatattagtaataattccctacatagttcaatggcttaccaaacatctttatgagttagtgtcccaactttggggtaaaggcagtgcaggtaatattattctcccattttttttagaaaataaaacaccatctgtgagattatctgacttgattaaggtggtggatacaacattagaattcaaatgcatatctgtattaaaattctgactgtaaattttgtgtcacttaccagctgttaaccagatgctctggctgtgcagagtgaaatatgggtagctagtggaagagagcagtggaaggaacagggagaagcaaaagccaggccttggaggatttcctttcctccagtgcctgcttgattcccaaataggattgctttgcctatcctgggagctgagaccctccataagtctctcaatgacttgaggctgggccagagtgagtgagaccagtgaatcctcaccttctggggagaagagaaatgagagctggtacacaggggaactcacccacactagtgtgtatgtgcacactcacatccggacaaaatccacaccaaggcatgcatagaaatcaacacatagaatgagccactgcacagtcatacacacatttaaacatacaccccacatacagatgtcaaaccaacacacagaatgagcccctgcacagtcacacacacatttaaacatgcaccccacatacagatgtctagccactatcgtgtacatccaaccactgatgtgccctccagttttacaccaagctgccatcttggacatgtgcatgcatgtgtacatacaccgaacagccctgatgaaaatttggataaacgcacgtacgcacacacacaactaaacacatccctatgatttatcatcacactcaagtacatgcacacctttgcaaacgcgtgggaaacaatcactctgatcactctggcgcacaaaacctccaaatacgctaacaagctctacaaacgcagagatgcatcgacacacccgagttgtcatcagcactgcaagttttttccaaacagctgctaaaaagagaatgctgcgctgcgggccagcccacgtgaccgggaggaaggctctcccgcccatgacgggatgggaaaactatgcctggggccgacgctctgcccggctgctgccgctgaggaaagccgggacgcggagccccgccgagagcttctttgctccggacgcccctggacgtggcgggcagccgcgagggtgagtgtcccgcaccgcggtcgggcgggggcggcaagtgcgcgcggggaggaggaggaggaggactcgcactgctgcgggcggggcgggatgcggaaggtgggagagctgccagcgcgcctttattgcgggctgggcagctcctgcattcctgcctctcgacttctaccttcgtattataatacaaattaacatgttttgagtccttactgtgtgccaggctctgtgcccagtggtttacccgttacaatagtaacacccgtagctctgccatttattgagcgcctactttgtgccaagtcctgctagcactttacttgtgctctttcattttcatgacaacagattatccccgtctacaaaagaggaactgggctcagagacattaatgacttggacagggttgcacagctagtaattgataaaaaagggacttgaagtctggtaaatctgagtccaatacccgagctaacaatcacagttaacatttactgaatgcattatttcacttaaccttcacatttatttaaatatatgatacagactggcaaactgagctcaaaaggtattgaacggcaggcagagatttgtactcaatgcctcatgactctcttcactctccttccccacctaaactacttgtcttaatatgctttgtccttatttctccatccccactgctgctgccccattctaggacctcgcttttcagctaaataattgcagtgggccctaatagtctcccagcccaggtctctcctctgacaccatgagtcccttgcattacctcattgtgatcctcctctgctccttgaccacaaaattgccctgcttggaagcctgcagaggtcccttccttagactggccatctctcagagaccctgtgtttccaccatgctgaagtagcagtaatagaaagacaatgtcttacataggtcaatccaaggctggtgctcagttagcactgttaaaaatctgtcctctcacatccttatttttgccctccctctgcacc

SEQ ID NO: 3749 - DNA, 6000 bp, Homo sapiens
actccagcctgggcaacagagtgagactccgtctccaaaaaaaagaaagaaaaaaaatccagggccagtgtggtgactcatgcctgtaatcccaaaactttgggaggctggcccagcatggtggctcacacctgtaatcccaaaactttgggaggctgaggcaggcggatcacctgaggtcaggagtttgagatcagcctgactaacatggtgaaaccccatctctactaaatacaaaaaattagccgggaatggtggcatgcacctgtaatcccagctacttgggaggctgaagcaggagaatcgcttgaacccaggaggcagaggttgcagtgagatgagatcagtcattgcactccagcctgggcaacgagcgaaaccgcctctcaaacaaacaaaaaaaaactttgggaggccaagatgggcagatcacttgaaaccaggagttcgagaccagcctgagcagcatagaccctgtctcaacaaaaattttaaaatattttttaaaattagccaggcacagtggcacacacctgtagtcctagatacttgggaagctgaggtggaaggatgacttgagcccatggttttgaggttgcagtgggctatgatggtgccactgcactccagcctaggccacagagcaagacaccatgtcaaaagaaaaaaaaatccaatcacctctgctcacctccctctttctctctctctctctctctccctccccctctctcccctgcaacacacacacacacacacacacacacacacacgcacgcatgcacgcaccacacactctgacgacctttaaaggcttcctgtggctggatgaaatctagaggctttacccttcttgcatggccctgcatgacctggcccctgccctcctctctgacctcatctcccacccgcctcccagtctctctctctgctccagccacactggccttctgtttgtcgtcaacacccccagcttggttccgccttccagcctttgcagtagctgctccctttacctgaaatgctttgctcccaaacttttacctggtcactattttttgtcatttgggtctcagctccagtgccacccaaacactcaaagaggattttgctgactactgtatttaaaagtagctccctgccactcttacaacatcagcctgtcttattttctcatagtaccaatttcttcttcagtttctttcttttccgtctggcctcactggaatacaagctccacaggtgctggtaccttctctgatccctttgcctccatgtccctcctgccttaggacaatgcccagcatgtgttaggcacgcagatactcactaaatggaggaatggatgaataattcataaagcaggataaagttcaactttaggcttgtggctcagattggacttacatttagagtcagatttaagtttagtgttaggagtggtggtaaactggtttcaagattagccctagaaacagggttgggttggggtagaggagaagttttatttagggggttattaattgggatgtgtttagatttaaggttagggttacagttggggttgagtttgagttgtgatttgggttgaggttaaatttgggttagggttgatgttggtattaaatcccaattcaggttttgaggctaagttcaagtttgaagctaatgtcatttcagtctcatttggaggcttcagagatttcactagtttctccacaaagaccactataaagactgtatttccctgagtctggggcacaagactccagtcatcagctctcccacccagggaaagtcccaaaccaactgctggcctgcccaagaaagaaaccaaattcatacaacctccgaaactgagattgaaaccaagattggcccatctcaaggagcatccttcgcatatctcacatgcacgtgacactgagcctcagcccagtcttacccttccttcctctgtgtctctcatgtctccccatcacccttcttgccttcccttttttgtctttcaatgtcccattcttcctctttaatttaaatttctctctgtgtctcactgttaattgcaatacctttttttgtttgcttgttttgttttgttttgttttttggtttgtttgtttgaaatggagtctcactttgttgcccaggctggagggcagtggcacgatctcggctcactgcaacctccgcctcctgggttcaagcagttctcctgcctcagcttccctagtagctaggattacaggcgcgtgccaccatgctcggctaattttttgtatttttagcagtgatggagtttcaccgtattagccaggattgtctctatctcctgaccttgtgatctgctcgcctcagcctcccaaagtgctgggatgacaggcatgtgccactgctcctggccttgtaataacattttatattttaatatagctcagctggggtcccagtccatcagctcataccattagagaagcagaaagagacaacaggaagcaaaaaggaccctgagagaaagggcaacacagagaaaaagaaaggagcaggggctaaaagggaaacccacactgacacaagagataataaggttaaaagaatgagaagaaggttgggcgcagtggctcacgcccataatcccagcactttgggaggccaaggctggtgggtcacctgtggtcaggaattcaagaccaacctggccaacatggtgagaccccgtctctactaaaaatacaaaaaaaaatttggcgggcttggtggcgtgtgcctgtaatcccagctactcgggaggctgaggcaggagaatagcttgaacctgggaggcagaggttgcagtgagccaagatcgtgccactgcactccagcctgtgcgacagtgagaaactgtctcaaaaaaaaaaaaaaaggaaaagaaattttctgacctatctcatctgatagtaggttataagaccctcattccagaagaggttctgccctatacctgggaggaaggaatgctgtacagagagaccaagaagaatatggccaggccttgctgggatccccccagtcccagtctgtgaccattagatgatactccttttgttcaattacatttctgcacagctgttcattcttcatcaaatctaagcataaaaatagttttcccctgggtccttgggtcttcatttctgaaggctcccatgtcacctaaaactttgattaaataaatgtattatgcttttctcttgttaatctgtcttttattataggagtattggccataacccttatgatgggtcaggaagggatcacccctttctgcccctacagaaataatagctaagactagtaaagcataaaaggcaaaggggcaggtcctcaagtagagaagaacaggagaaatagctcatacacacccagaatgttacttacatgtccctccatgttacaccaagacccctcagggaccttgtgcctggggagagaagtggtctgccccatgcaacagtgggctttaccccgggtcaccaccagccccagctccaacccctctaacactctccaagtaaaatcacatcagtagcagtaataatatttgaggtgacaagttggtattatctcaaacttaggaaaagtgaataaagtcatctttagaaactgctttttttaaaccttgtaacttgcaagctaagtgaaaatgggctcatgtatgagaatgttcgtgttagacattttttgtgttagacaaaaactagaaacaaaccaaatccccatcaacagaatatattagaatatattgatacaatagaatattacatcataattttttttaaaaacattactgatacatacaaccacgtatatgaatctcacaaacataatgctgactgaaagaagtcaaacagaaatgagtacattctgtgtgatttcatttatatgatgccccaaaccaggaggaaataatctatggtgataaaagtgagagagtggttggttatctttggagggtatcagcagggagggggcatgagggaacctgctggggacctgaaaatacgtggagctgggtggtggctacatacagatggaaaaattcatcagctgtacacttaagaggtgtccacctcatacctaagttacatatcaataaaaaggaaaaaaattttggaaactttttttttttttttttgagacagagtcttgctctgtcccccaggctggaatacagtggtgcgatcttgactcactgcagcctccgcctcccaggttcaaataattctccagcctcagcctcccgagtagctgggactgcagatgcgcaccagcacgcctggctaatttttgtatttattatagagatggggtttcaccatgttggccagctggtctcaaactcctgacctcaagtaatccgcccacctcagactcccaaagtgccaggattacaggtgtgagccactgcaccaggcctggaacaattttaaaataatgtattggctctgcaaatgcagcttcagaacaagtcccttagctgtccccaccccaccctaagtcaccacccttaagcctcacccatgtggaattctgaaacttcctttgtagaaaactttggaaggtgtctgccacattgatcctggaatgtgtgtttatttggggttatataaatctgttctgtggaagccacctgaagtcaggaagagatggagggcatccttcaggagtgagatgagacctcatcatacttgactgtccagcatcatctctgagtaaggggaccaaaaaatttatcttccaaactaggacactttcaagagtggaagggggatccattaatattttcacctggacaagaggcaaacaccagaatgtccccgatgaaggggatatataatggaccttcttgatgtgaaacctgccagatgggctggaaagtccgtatactgggacaagtatgatttgagttgtttgggacaaggacaggggtacaagagaaggaaatgggcaaagagagaagcctgtactcagccaagggtgcagagatgttatatatgattgctcttcagggaaccgggcctccagctcacaccccagctgctcaaccacctcctctctgaattgactgtcccttctttggaactctaggcctgaccccactccctggccctcccagcccacgattcccctgacccgactccctttcccagaactcagtcgcctgaacccccagcctgtggttctctcctaggcctcagcctttcctgcctttgactgaaacagcagtatcttctaagccctgggggcttccccgggccccagccccgacctagaacccgcccgctgcctgccacgctgccactgccgcttcctctataaagggacctgagcgtccgggcccaggggctccgcacagcaggtgaggctctcctgccccatctccttgggctgcccgtgcttcgtgctttggactaccgcccagcagtgtcctgccctctgcctgggcctcggtccctcctgcacctgctgcctggatccccggcctgcctgggcctgggccttggtgggtttggttttggtttccttctctgtctctgactctccatctgtcagtctcattgtctctgtcacacattctctgtttctgccatgattcctctctgttcccttcctgtctctctctgtctccctctgctcaccttggggtttctctgactgcatcttgtccccttctctgtcgatctctctctcgggggtcggggggtgctctctcccagggcgggaggtctgtcttccgccgcgtgccccgccccgctcactgtctctctctctctctctctttctctgcaggttctccccatgacaccacctgaacgtctcttcctcccaagggtgtgtggcaccaccctacacctcctccttctggggctgctgctggttctgctgcctggggcccaggtgaggcagcaggagaatgggggctgctggggtggctcagccaaaccttgagccctagagccc

SEQ ID NO: 3750 - DNA, 6000 bp, Homo sapiens
tctcaacaaaaattttaaaatattttttaaaattagccaggcacagtggcacacacctgtagtcctagatacttgggaagctgaggtggaaggatgacttgagcccatggttttgaggttgcagtgggctatgatggtgccactgcactccagcctaggccacagagcaagacaccatgtcaaaagaaaaaaaaatccaatcacctctgctcacctccctctttctctctctctctctctctccctccccctctctcccctgcaacacacacacacacacacacacacacacacacgcacgcatgcacgcaccacacactctgacgacctttaaaggcttcctgtggctggatgaaatctagaggctttacccttcttgcatggccctgcatgacctggcccctgccctcctctctgacctcatctcccacccgcctcccagtctctctctctgctccagccacactggccttctgtttgtcgtcaacacccccagcttggttccgccttccagcctttgcagtagctgctccctttacctgaaatgctttgctcccaaacttttacctggtcactattttttgtcatttgggtctcagctccagtgccacccaaacactcaaagaggattttgctgactactgtatttaaaagtagctccctgccactcttacaacatcagcctgtcttattttctcatagtaccaatttcttcttcagtttctttcttttccgtctggcctcactggaatacaagctccacaggtgctggtaccttctctgatccctttgcctccatgtccctcctgccttaggacaatgcccagcatgtgttaggcacgcagatactcactaaatggaggaatggatgaataattcataaagcaggataaagttcaactttaggcttgtggctcagattggacttacatttagagtcagatttaagtttagtgttaggagtggtggtaaactggtttcaagattagccctagaaacagggttgggttggggtagaggagaagttttatttagggggttattaattgggatgtgtttagatttaaggttagggttacagttggggttgagtttgagttgtgatttgggttgaggttaaatttgggttagggttgatgttggtattaaatcccaattcaggttttgaggctaagttcaagtttgaagctaatgtcatttcagtctcatttggaggcttcagagatttcactagtttctccacaaagaccactataaagactgtatttccctgagtctggggcacaagactccagtcatcagctctcccacccagggaaagtcccaaaccaactgctggcctgcccaagaaagaaaccaaattcatacaacctccgaaactgagattgaaaccaagattggcccatctcaaggagcatccttcgcatatctcacatgcacgtgacactgagcctcagcccagtcttacccttccttcctctgtgtctctcatgtctccccatcacccttcttgccttcccttttttgtctttcaatgtcccattcttcctctttaatttaaatttctctctgtgtctcactgttaattgcaatacctttttttgtttgcttgttttgttttgttttgttttttggtttgtttgtttgaaatggagtctcactttgttgcccaggctggagggcagtggcacgatctcggctcactgcaacctccgcctcctgggttcaagcagttctcctgcctcagcttccctagtagctaggattacaggcgcgtgccaccatgctcggctaattttttgtatttttagcagtgatggagtttcaccgtattagccaggattgtctctatctcctgaccttgtgatctgctcgcctcagcctcccaaagtgctgggatgacaggcatgtgccactgctcctggccttgtaataacattttatattttaatatagctcagctggggtcccagtccatcagctcataccattagagaagcagaaagagacaacaggaagcaaaaaggaccctgagagaaagggcaacacagagaaaaagaaaggagcaggggctaaaagggaaacccacactgacacaagagataataaggttaaaagaatgagaagaaggttgggcgcagtggctcacgcccataatcccagcactttgggaggccaaggctggtgggtcacctgtggtcaggaattcaagaccaacctggccaacatggtgagaccccgtctctactaaaaatacaaaaaaaaatttggcgggcttggtggcgtgtgcctgtaatcccagctactcgggaggctgaggcaggagaatagcttgaacctgggaggcagaggttgcagtgagccaagatcgtgccactgcactccagcctgtgcgacagtgagaaactgtctcaaaaaaaaaaaaaaaggaaaagaaattttctgacctatctcatctgatagtaggttataagaccctcattccagaagaggttctgccctatacctgggaggaaggaatgctgtacagagagaccaagaagaatatggccaggccttgctgggatccccccagtcccagtctgtgaccattagatgatactccttttgttcaattacatttctgcacagctgttcattcttcatcaaatctaagcataaaaatagttttcccctgggtccttgggtcttcatttctgaaggctcccatgtcacctaaaactttgattaaataaatgtattatgcttttctcttgttaatctgtcttttattataggagtattggccataacccttatgatgggtcaggaagggatcacccctttctgcccctacagaaataatagctaagactagtaaagcataaaaggcaaaggggcaggtcctcaagtagagaagaacaggagaaatagctcatacacacccagaatgttacttacatgtccctccatgttacaccaagacccctcagggaccttgtgcctggggagagaagtggtctgccccatgcaacagtgggctttaccccgggtcaccaccagccccagctccaacccctctaacactctccaagtaaaatcacatcagtagcagtaataatatttgaggtgacaagttggtattatctcaaacttaggaaaagtgaataaagtcatctttagaaactgctttttttaaaccttgtaacttgcaagctaagtgaaaatgggctcatgtatgagaatgttcgtgttagacattttttgtgttagacaaaaactagaaacaaaccaaatccccatcaacagaatatattagaatatattgatacaatagaatattacatcataattttttttaaaaacattactgatacatacaaccacgtatatgaatctcacaaacataatgctgactgaaagaagtcaaacagaaatgagtacattctgtgtgatttcatttatatgatgccccaaaccaggaggaaataatctatggtgataaaagtgagagagtggttggttatctttggagggtatcagcagggagggggcatgagggaacctgctggggacctgaaaatacgtggagctgggtggtggctacatacagatggaaaaattcatcagctgtacacttaagaggtgtccacctcatacctaagttacatatcaataaaaaggaaaaaaattttggaaactttttttttttttttttgagacagagtcttgctctgtcccccaggctggaatacagtggtgcgatcttgactcactgcagcctccgcctcccaggttcaaataattctccagcctcagcctcccgagtagctgggactgcagatgcgcaccagcacgcctggctaatttttgtatttattatagagatggggtttcaccatgttggccagctggtctcaaactcctgacctcaagtaatccgcccacctcagactcccaaagtgccaggattacaggtgtgagccactgcaccaggcctggaacaattttaaaataatgtattggctctgcaaatgcagcttcagaacaagtcccttagctgtccccaccccaccctaagtcaccacccttaagcctcacccatgtggaattctgaaacttcctttgtagaaaactttggaaggtgtctgccacattgatcctggaatgtgtgtttatttggggttatataaatctgttctgtggaagccacctgaagtcaggaagagatggagggcatccttcaggagtgagatgagacctcatcatacttgactgtccagcatcatctctgagtaaggggaccaaaaaatttatcttccaaactaggacactttcaagagtggaagggggatccattaatattttcacctggacaagaggcaaacaccagaatgtccccgatgaaggggatatataatggaccttcttgatgtgaaacctgccagatgggctggaaagtccgtatactgggacaagtatgatttgagttgtttgggacaaggacaggggtacaagagaaggaaatgggcaaagagagaagcctgtactcagccaagggtgcagagatgttatatatgattgctcttcagggaaccgggcctccagctcacaccccagctgctcaaccacctcctctctgaattgactgtcccttctttggaactctaggcctgaccccactccctggccctcccagcccacgattcccctgacccgactccctttcccagaactcagtcgcctgaacccccagcctgtggttctctcctaggcctcagcctttcctgcctttgactgaaacagcagtatcttctaagccctgggggcttccccgggccccagccccgacctagaacccgcccgctgcctgccacgctgccactgccgcttcctctataaagggacctgagcgtccgggcccaggggctccgcacagcaggtgaggctctcctgccccatctccttgggctgcccgtgcttcgtgctttggactaccgcccagcagtgtcctgccctctgcctgggcctcggtccctcctgcacctgctgcctggatccccggcctgcctgggcctgggccttggtgggtttggttttggtttccttctctgtctctgactctccatctgtcagtctcattgtctctgtcacacattctctgtttctgccatgattcctctctgttcccttcctgtctctctctgtctccctctgctcaccttggggtttctctgactgcatcttgtccccttctctgtcgatctctctctcgggggtcggggggtgctctctcccagggcgggaggtctgtcttccgccgcgtgccccgccccgctcactgtctctctctctctctctctttctctgcaggttctccccatgacaccacctgaacgtctcttcctcccaagggtgtgtggcaccaccctacacctcctccttctggggctgctgctggttctgctgcctggggcccaggtgaggcagcaggagaatgggggctgctggggtggctcagccaaaccttgagccctagagcccccctcaactctgttctcccctaggggctccctggtgttggcctcacaccttcagctgcccagactgcccgtcagcaccccaagatgcatcttgcccacagcaccctcaaacctgctgctcacctcattggtaaacatccacctgacctcccagacatgtccccaccagctctcctcctacccctgcctcaggaacccaagcatccacccctctcccccaacttcccccacgctaaaaaaaacagagggagcccactcctatgcctccccctgccatcccccaggaactcagttgttcagtgcccacttcctcagggattgagacctctgatccagacccctgatctcccacccccatcccctatggctcttcctaggagaccccagcaagcagaactcactgctctggagagcaaacacggaccgtgccttcctccaggatggtttctccttgagcaacaattctctcctggtcccc

SEQ ID NO: 3751 - DNA, 6000 bp, Homo sapiens
ggtctcagctccagtgccacccaaacactcaaagaggattttgctgactactgtatttaaaagtagctccctgccactcttacaacatcagcctgtcttattttctcatagtaccaatttcttcttcagtttctttcttttccgtctggcctcactggaatacaagctccacaggtgctggtaccttctctgatccctttgcctccatgtccctcctgccttaggacaatgcccagcatgtgttaggcacgcagatactcactaaatggaggaatggatgaataattcataaagcaggataaagttcaactttaggcttgtggctcagattggacttacatttagagtcagatttaagtttagtgttaggagtggtggtaaactggtttcaagattagccctagaaacagggttgggttggggtagaggagaagttttatttagggggttattaattgggatgtgtttagatttaaggttagggttacagttggggttgagtttgagttgtgatttgggttgaggttaaatttgggttagggttgatgttggtattaaatcccaattcaggttttgaggctaagttcaagtttgaagctaatgtcatttcagtctcatttggaggcttcagagatttcactagtttctccacaaagaccactataaagactgtatttccctgagtctggggcacaagactccagtcatcagctctcccacccagggaaagtcccaaaccaactgctggcctgcccaagaaagaaaccaaattcatacaacctccgaaactgagattgaaaccaagattggcccatctcaaggagcatccttcgcatatctcacatgcacgtgacactgagcctcagcccagtcttacccttccttcctctgtgtctctcatgtctccccatcacccttcttgccttcccttttttgtctttcaatgtcccattcttcctctttaatttaaatttctctctgtgtctcactgttaattgcaatacctttttttgtttgcttgttttgttttgttttgttttttggtttgtttgtttgaaatggagtctcactttgttgcccaggctggagggcagtggcacgatctcggctcactgcaacctccgcctcctgggttcaagcagttctcctgcctcagcttccctagtagctaggattacaggcgcgtgccaccatgctcggctaattttttgtatttttagcagtgatggagtttcaccgtattagccaggattgtctctatctcctgaccttgtgatctgctcgcctcagcctcccaaagtgctgggatgacaggcatgtgccactgctcctggccttgtaataacattttatattttaatatagctcagctggggtcccagtccatcagctcataccattagagaagcagaaagagacaacaggaagcaaaaaggaccctgagagaaagggcaacacagagaaaaagaaaggagcaggggctaaaagggaaacccacactgacacaagagataataaggttaaaagaatgagaagaaggttgggcgcagtggctcacgcccataatcccagcactttgggaggccaaggctggtgggtcacctgtggtcaggaattcaagaccaacctggccaacatggtgagaccccgtctctactaaaaatacaaaaaaaaatttggcgggcttggtggcgtgtgcctgtaatcccagctactcgggaggctgaggcaggagaatagcttgaacctgggaggcagaggttgcagtgagccaagatcgtgccactgcactccagcctgtgcgacagtgagaaactgtctcaaaaaaaaaaaaaaaggaaaagaaattttctgacctatctcatctgatagtaggttataagaccctcattccagaagaggttctgccctatacctgggaggaaggaatgctgtacagagagaccaagaagaatatggccaggccttgctgggatccccccagtcccagtctgtgaccattagatgatactccttttgttcaattacatttctgcacagctgttcattcttcatcaaatctaagcataaaaatagttttcccctgggtccttgggtcttcatttctgaaggctcccatgtcacctaaaactttgattaaataaatgtattatgcttttctcttgttaatctgtcttttattataggagtattggccataacccttatgatgggtcaggaagggatcacccctttctgcccctacagaaataatagctaagactagtaaagcataaaaggcaaaggggcaggtcctcaagtagagaagaacaggagaaatagctcatacacacccagaatgttacttacatgtccctccatgttacaccaagacccctcagggaccttgtgcctggggagagaagtggtctgccccatgcaacagtgggctttaccccgggtcaccaccagccccagctccaacccctctaacactctccaagtaaaatcacatcagtagcagtaataatatttgaggtgacaagttggtattatctcaaacttaggaaaagtgaataaagtcatctttagaaactgctttttttaaaccttgtaacttgcaagctaagtgaaaatgggctcatgtatgagaatgttcgtgttagacattttttgtgttagacaaaaactagaaacaaaccaaatccccatcaacagaatatattagaatatattgatacaatagaatattacatcataattttttttaaaaacattactgatacatacaaccacgtatatgaatctcacaaacataatgctgactgaaagaagtcaaacagaaatgagtacattctgtgtgatttcatttatatgatgccccaaaccaggaggaaataatctatggtgataaaagtgagagagtggttggttatctttggagggtatcagcagggagggggcatgagggaacctgctggggacctgaaaatacgtggagctgggtggtggctacatacagatggaaaaattcatcagctgtacacttaagaggtgtccacctcatacctaagttacatatcaataaaaaggaaaaaaattttggaaactttttttttttttttttgagacagagtcttgctctgtcccccaggctggaatacagtggtgcgatcttgactcactgcagcctccgcctcccaggttcaaataattctccagcctcagcctcccgagtagctgggactgcagatgcgcaccagcacgcctggctaatttttgtatttattatagagatggggtttcaccatgttggccagctggtctcaaactcctgacctcaagtaatccgcccacctcagactcccaaagtgccaggattacaggtgtgagccactgcaccaggcctggaacaattttaaaataatgtattggctctgcaaatgcagcttcagaacaagtcccttagctgtccccaccccaccctaagtcaccacccttaagcctcacccatgtggaattctgaaacttcctttgtagaaaactttggaaggtgtctgccacattgatcctggaatgtgtgtttatttggggttatataaatctgttctgtggaagccacctgaagtcaggaagagatggagggcatccttcaggagtgagatgagacctcatcatacttgactgtccagcatcatctctgagtaaggggaccaaaaaatttatcttccaaactaggacactttcaagagtggaagggggatccattaatattttcacctggacaagaggcaaacaccagaatgtccccgatgaaggggatatataatggaccttcttgatgtgaaacctgccagatgggctggaaagtccgtatactgggacaagtatgatttgagttgtttgggacaaggacaggggtacaagagaaggaaatgggcaaagagagaagcctgtactcagccaagggtgcagagatgttatatatgattgctcttcagggaaccgggcctccagctcacaccccagctgctcaaccacctcctctctgaattgactgtcccttctttggaactctaggcctgaccccactccctggccctcccagcccacgattcccctgacccgactccctttcccagaactcagtcgcctgaacccccagcctgtggttctctcctaggcctcagcctttcctgcctttgactgaaacagcagtatcttctaagccctgggggcttccccgggccccagccccgacctagaacccgcccgctgcctgccacgctgccactgccgcttcctctataaagggacctgagcgtccgggcccaggggctccgcacagcaggtgaggctctcctgccccatctccttgggctgcccgtgcttcgtgctttggactaccgcccagcagtgtcctgccctctgcctgggcctcggtccctcctgcacctgctgcctggatccccggcctgcctgggcctgggccttggtgggtttggttttggtttccttctctgtctctgactctccatctgtcagtctcattgtctctgtcacacattctctgtttctgccatgattcctctctgttcccttcctgtctctctctgtctccctctgctcaccttggggtttctctgactgcatcttgtccccttctctgtcgatctctctctcgggggtcggggggtgctctctcccagggcgggaggtctgtcttccgccgcgtgccccgccccgctcactgtctctctctctctctctctttctctgcaggttctccccatgacaccacctgaacgtctcttcctcccaagggtgtgtggcaccaccctacacctcctccttctggggctgctgctggttctgctgcctggggcccaggtgaggcagcaggagaatgggggctgctggggtggctcagccaaaccttgagccctagagcccccctcaactctgttctcccctaggggctccctggtgttggcctcacaccttcagctgcccagactgcccgtcagcaccccaagatgcatcttgcccacagcaccctcaaacctgctgctcacctcattggtaaacatccacctgacctcccagacatgtccccaccagctctcctcctacccctgcctcaggaacccaagcatccacccctctcccccaacttcccccacgctaaaaaaaacagagggagcccactcctatgcctccccctgccatcccccaggaactcagttgttcagtgcccacttcctcagggattgagacctctgatccagacccctgatctcccacccccatcccctatggctcttcctaggagaccccagcaagcagaactcactgctctggagagcaaacacggaccgtgccttcctccaggatggtttctccttgagcaacaattctctcctggtccccaccagtggcatctacttcgtctactcccaggtggtcttctctgggaaagcctactctcccaaggccacctcctccccactctacctggcccatgaggtccagctcttctcctcccagtaccccttccatgtgcctctcctcagctcccagaagatggtgtatccagggctgcaggaaccctggctgcactcgatgtaccacggggctgcgttccagctcacccagggagaccagctatccacccacacagatggcatcccccacctagtcctcagccctagtactgtcttctttggagccttcgctctgtagaacttggaaaaatccagaaagaaaaaataattgatttcaagaccttctccccattctgcctccattctgaccatttcaggggtcgtcaccacctctcctttggccattccaacagctcaagtcttccctgatcaagtcaccggagctttcaaagaaggaattctaggcatcccaggggaccacacctccctgaaccatccctgatgtctgtctggctgaggatttcaagcctgcctaggaattcccagcccaaagctgttggtctgtcccaccagctag

SEQ ID NO: 3752 - DNA, 6000 bp, Homo sapiens
tcgtgttagacattttttgtgttagacaaaaactagaaacaaaccaaatccccatcaacagaatatattagaatatattgatacaatagaatattacatcataattttttttaaaaacattactgatacatacaaccacgtatatgaatctcacaaacataatgctgactgaaagaagtcaaacagaaatgagtacattctgtgtgatttcatttatatgatgccccaaaccaggaggaaataatctatggtgataaaagtgagagagtggttggttatctttggagggtatcagcagggagggggcatgagggaacctgctggggacctgaaaatacgtggagctgggtggtggctacatacagatggaaaaattcatcagctgtacacttaagaggtgtccacctcatacctaagttacatatcaataaaaaggaaaaaaattttggaaactttttttttttttttttgagacagagtcttgctctgtcccccaggctggaatacagtggtgcgatcttgactcactgcagcctccgcctcccaggttcaaataattctccagcctcagcctcccgagtagctgggactgcagatgcgcaccagcacgcctggctaatttttgtatttattatagagatggggtttcaccatgttggccagctggtctcaaactcctgacctcaagtaatccgcccacctcagactcccaaagtgccaggattacaggtgtgagccactgcaccaggcctggaacaattttaaaataatgtattggctctgcaaatgcagcttcagaacaagtcccttagctgtccccaccccaccctaagtcaccacccttaagcctcacccatgtggaattctgaaacttcctttgtagaaaactttggaaggtgtctgccacattgatcctggaatgtgtgtttatttggggttatataaatctgttctgtggaagccacctgaagtcaggaagagatggagggcatccttcaggagtgagatgagacctcatcatacttgactgtccagcatcatctctgagtaaggggaccaaaaaatttatcttccaaactaggacactttcaagagtggaagggggatccattaatattttcacctggacaagaggcaaacaccagaatgtccccgatgaaggggatatataatggaccttcttgatgtgaaacctgccagatgggctggaaagtccgtatactgggacaagtatgatttgagttgtttgggacaaggacaggggtacaagagaaggaaatgggcaaagagagaagcctgtactcagccaagggtgcagagatgttatatatgattgctcttcagggaaccgggcctccagctcacaccccagctgctcaaccacctcctctctgaattgactgtcccttctttggaactctaggcctgaccccactccctggccctcccagcccacgattcccctgacccgactccctttcccagaactcagtcgcctgaacccccagcctgtggttctctcctaggcctcagcctttcctgcctttgactgaaacagcagtatcttctaagccctgggggcttccccgggccccagccccgacctagaacccgcccgctgcctgccacgctgccactgccgcttcctctataaagggacctgagcgtccgggcccaggggctccgcacagcaggtgaggctctcctgccccatctccttgggctgcccgtgcttcgtgctttggactaccgcccagcagtgtcctgccctctgcctgggcctcggtccctcctgcacctgctgcctggatccccggcctgcctgggcctgggccttggtgggtttggttttggtttccttctctgtctctgactctccatctgtcagtctcattgtctctgtcacacattctctgtttctgccatgattcctctctgttcccttcctgtctctctctgtctccctctgctcaccttggggtttctctgactgcatcttgtccccttctctgtcgatctctctctcgggggtcggggggtgctctctcccagggcgggaggtctgtcttccgccgcgtgccccgccccgctcactgtctctctctctctctctctttctctgcaggttctccccatgacaccacctgaacgtctcttcctcccaagggtgtgtggcaccaccctacacctcctccttctggggctgctgctggttctgctgcctggggcccaggtgaggcagcaggagaatgggggctgctggggtggctcagccaaaccttgagccctagagcccccctcaactctgttctcccctaggggctccctggtgttggcctcacaccttcagctgcccagactgcccgtcagcaccccaagatgcatcttgcccacagcaccctcaaacctgctgctcacctcattggtaaacatccacctgacctcccagacatgtccccaccagctctcctcctacccctgcctcaggaacccaagcatccacccctctcccccaacttcccccacgctaaaaaaaacagagggagcccactcctatgcctccccctgccatcccccaggaactcagttgttcagtgcccacttcctcagggattgagacctctgatccagacccctgatctcccacccccatcccctatggctcttcctaggagaccccagcaagcagaactcactgctctggagagcaaacacggaccgtgccttcctccaggatggtttctccttgagcaacaattctctcctggtccccaccagtggcatctacttcgtctactcccaggtggtcttctctgggaaagcctactctcccaaggccacctcctccccactctacctggcccatgaggtccagctcttctcctcccagtaccccttccatgtgcctctcctcagctcccagaagatggtgtatccagggctgcaggaaccctggctgcactcgatgtaccacggggctgcgttccagctcacccagggagaccagctatccacccacacagatggcatcccccacctagtcctcagccctagtactgtcttctttggagccttcgctctgtagaacttggaaaaatccagaaagaaaaaataattgatttcaagaccttctccccattctgcctccattctgaccatttcaggggtcgtcaccacctctcctttggccattccaacagctcaagtcttccctgatcaagtcaccggagctttcaaagaaggaattctaggcatcccaggggaccacacctccctgaaccatccctgatgtctgtctggctgaggatttcaagcctgcctaggaattcccagcccaaagctgttggtctgtcccaccagctaggtggggcctagatccacacacagaggaagagcaggcacatggaggagcttgggggatgactagaggcagggaggggactatttatgaaggcaaaaaaattaaattatttatttatggaggatggagagaggggaataatagaagaacatccaaggagaaacagagacaggcccaagagatgaagagtgagagggcatgcgcacaaggctgaccaagagagaaagaagtaggcatgagggatcacagggccccagaaggcagggaaaggctctgaaagccagctgccgaccagagccccacacggaggcatctgcaccctcgatgaagcccaataaacctcttttctctgaaatgctgtctgcttgtgtgtgtgtgtctgggagtgagaacttcccagtctatctaaggaatggagggagggacagagggctcaaagggagcaagagctgtggggagaacaaaaggataagggctcagagagcttcagggatatgtgatggactcaccaggtgaggccgccagactgctgcaggggaagcaaaggagaagctgagaagatgaaggaaaagtcagggtctggaggggcgggggtcagggagctcctgggagatatggccacatgtagcggctctgaggaatgggttacaggagacctctggggagatgtgaccacagcaatgggtaggagaatgtccagggctatggaagtcgagtatggggacccccccttaacgaagacagggccatgtagagggccccagggagtgaaagagcctccaggacctccaggtatggaatacaggggacgtttaagaagatatggccacacactggggccctgagaagtgagagcttcatgaaaaaaatcagggaccccagagttccttggaagccaagactgaaaccagcattatgagtctccgggtcagaatgaaagaagaaggcctgccccagtggggtctgtgaattcccgggggtgatttcactccccggggctgtcccaggcttgtccctgctacccccacccagcctttcctgaggcctcaagcctgccaccaagcccccagctccttctccccgcagggacccaaacacaggcctcaggactcaacacagcttttccctccaaccccgttttctctccctcaaggactcagctttctgaagcccctcccagttctagttctatctttttcctgcatcctgtctggaagttagaaggaaacagaccacagacctggtccccaaaagaaatggaggcaataggttttgaggggcatggggacggggttcagcctccagggtcctacacacaaatcagtcagtggcccagaagacccccctcggaatcggagcagggaggatggggagtgtgaggggtatccttgatgcttgtgtgtccccaactttccaaatccccgcccccgcgatggagaagaaaccgagacagaaggtgcagggcccactaccgcttcctccagatgagctcatgggtttctccaccaaggaagttttccgctggttgaatgattctttccccgccctcctctcgccccagggacatataaaggcagttgttggcacacccagccagcagacgctccctcagcaaggacagcagaggaccagctaagagggagagaagcaactacagaccccccctgaaaacaaccctcagacgccacatcccctgacaagctgccaggcaggttctcttcctctcacatactgacccacggctccaccctctctcccctggaaaggacaccatgagcactgaaagcatgatccgggacgtggagctggccgaggaggcgctccccaagaagacaggggggccccagggctccaggcggtgcttgttcctcagcctcttctccttcctgatcgtggcaggcgccaccacgctcttctgcctgctgcactttggagtgatcggcccccagagggaagaggtgagtgcctggccagccttcatccactctcccacccaaggggaaatggagacgcaagagagggagagagatgggatgggtgaaagatgtgcgctgatagggagggatggagagaaaaaaacgtggagaaagacggggatgcagaaagagatgtggcaagagatggggaagagagagagagaaagatggagagacaggatgtctggcacatggaaggtgctcactaagtgtgtatggagtgaatgaatgaatgaatgaatgaacaagcagatatataaataagatatggagacagatgtggggtgtgagaagagagatgggggaagaaacaagtgatatgaataaagatggtgagacagaaagagcgggaaatatgacagctaaggagagagatgggggagataaggagagaagaagatagggtgtctggcacacagaagacactcagggaaagagctgttgaatgcctggaaggtgaatacacagatgaatggagagagaaaaccagacacctcagggctaagagcgcaggccagacaggcagccagctgttcctcctttaagggtgactccctcgatgttaaccattctccttctccccaacagttccccagggacctctctctaatcagccctctggcccaggcagtcagtaagtgtctccaaacctctttcctaatt

SEQ ID NO: 3753 - DNA, 6000 bp, Homo sapiens
ctgttccccatcacttcctaagctcccaggactctctctatgcagatgcaagagacactttacttaccatcattccgcgataacattaggtcagggatcagggactggcctggaggtcaggaactctagtccttgctcttttaggcgaaatgatcaggggctggtgacttgcctcaagttcctcatctgtgaagtgaggggccctctgttataatcgttcccaggctggggagcctcccttatgtgccaaccctgagctgggcactttccattcctcactgctaatccccagaacatagggtatcatggtgcccgttgcccaagtaaagacccgagattcaagcctggactttactaggtcacccatcccagaaaggtggagctggggtttaaggccagctctgcccaactccagagcccagccctttcctctgccctgggctgaccacgtggtttggaggggacttttcagccctggatggttctaggtgctggtaaggggatgatggaggggaaggagcctgggcctgggtgggtgtgggcactggggggaagaagggagggtgatatcagcacacccagcaggtgggctgctccctgagccgcagagcagcgcgggagtgtgggggcccccttggctggtgtggagagctgcttcccacaggcagatgctgctagggctgaagtggggcatggaggagtatctggggccccataacttcccctcaggcacttcctcccctccaaccactggttcctgtttgagggtgaagagggggccgttctcttcaccccagagccagatatactgactagggtctggaaactgggacccttctgggtttaagaggaattctggggggtggggagcagaagtgcaggtggaggccataagggccgtgggcacagaaatgaattgtctttaatttctttggggagcagagactcagaggattcctcgacggcccagggaaactcaaacccatactctccctcccctcatcttagcttcaccccactctggggtgtgaccatccttccaccaaggtccctgcccattcccagcttacccagagcttgtggcctgcaggatggacagactccaaactggccagtgctgtctggctgaagagaagtgttgccacctcagacattcctgcccctcctctggctttaacttctcccccagcctgggttcctccccagcattgttaggagaggaagttcggctccagggttagggttacaacatctttcttttcaaacttctgggcctgtagctagggccataatctgcctcagctccagtcatttcactgatcctgccactagtcagcaaacacccaccaccttcaggtgtcttccttgattaactcttctctattacctcttacactgcatctgttgagacctcttgatcttggcatatgtctgtggacacatgtaccctgctccagttcagactgggagctctggcatatttggtgttctggtgacccacttggtgttctgcagctctatgcagcaggctgcttggctgtctgattaacaaacatgagagttaaaggcagccatactagatctacatgagccctgtggatagatcaaggacagaaagttggtgacaagttggtgacaggaaaggaggtgtgggcaatacaggtggacttcctgtaggaggcagcattctggcattgaacacagaactaagtaaaggcagcggcctgaggctctctggagagacctgggtgaaggcttcttagtggcactgtgatggagaaggagatgggtgctggaggattgcacacccactccttgaggagggtgaagactggggagcgcctgtaaggcaaggggtgaggaggagatgtggtgcctgggtgggtccatattaatttgcgtttccccttccaaattcaagaaccttctacttcctcccccacccttctccccatcctccatgttccccatgctgaataatattcagggttttttgtttgtttgttttgttttttttacattttattattaaaaagtgcaaacatagggtgaaatgagaataattgtacagtgaacatattcttaccacctagatgctactattaacattttttgttttgttttgtttttgagatggggtctcactctgtcactcagcctgaagtgcagtggtgaaatcatagctcactgcagccttgaattcctgggctcagaggtcctcccaccttagccttctgagtagctaggactacagacaccagctaccacatgaggctttgtagaaatggggtcttactatgttgcccaggctgattttgaactcctggtctcaagcaatctttccaccttagccttccaaagtgctggaattacaggagtgggccactgcacctggctctattaacattttttatttgctttatcacatatttatcaatccatctcacttttaaatatcttttaaaattacaaatatcagtacattttacatctaaacccttcagaagcttaacattgactggagttcagtatttatttccccatttcttttctggcctgaggaaggcaaattttacatacaaatctcaagtcagtactcttttttttttttgagacggagtcttgctctgttgcccaggctggagtccagtggtgtgatcttggctcactgcaacctctgccttctgggtacaagcgattctcctgtctcagcctcccaagtagctgggactacaggtttgtgccaccatatccagctaatttttgtatttttaatggagaaggggtttcaccatgttggccaggctggtctcaaactcttgacctcaagtgatccacctgccttggtctcctaaagtgctgggattataggtgtgagccatctcgcctggcctaatactgttttgtttgtttgtttttgtttttaagacagagtcttgttcttgtcacccaggctggagtgcaatggcatgatttcggctcactgcaacttccgcctcctgggttcaagtgattctcctgcctcagcctcccaagtagctggaattaaaggtgcctaccaccacgccccgctaatttttatatttttagtagagatggggtttcaccatgttgatcaggctgctctcgagctccttacctcagatgatccaccttccttggcctcccaaagtgctggtattataggcaagagccactgcgcccagccccagtattcagtttttaaactgtcttgttatcaaggctctggagccagatgcctgggttcaaattctggttctgccactgactctgtgagctccataagtttcttaacctctctgtacctcagtttcctcttagggtttttgtcaggattataattattggctgggcatgatggctcatgcttgtaatcccagcactttaggaggccaacacgggcagatcacgtgagtccaggagtttgagcccagcctgggcaatgtggcaaaaatccatctctacaaaaaatgcaaaaattagctgggcatggtggcatgtgcctatagtcccagctattcaggaggctgaggtaggtgaatccatagatcctgggaggtcaaggctgcagtgagccatgatcctgccattgcattccagtctgggtgacatagcgagaccctgtctcaaaaaaaaaaattattaaagtgtgtaaatcagtggcataaacatgttaagtgcattttgtgggtcagctatattattattagtattacggaaacacatagagatgttaccaagaaggggagatgattggagccacttccagcttccttggacctggtctttcttcccttgactctttttttttttttttttttttttttgagagagagagtctcagcctgttgcccaggctggagtgcaatggtgcaatcttggctcactgcaacctctgcctcccaggtttaagtgattctcctgcctcagcctcctgtgtagctggaattacaggcgcgtgccaccacgcccggctaactttttgtatctttagtagagacagggtttcaccatgttggccaggctggtctcgaactcctgacctcaagtgatccacctgcctcagcctcccaaagtgttgggattacaggtgtaagccactaccccggctactcccttgactcttaaccactcatgctgcctacatctaccattcatgtggtccttgctgctttgttttggttattcctgcatttatttgtccttttattcatttatgtataaacatttagtaagcacctactaatggatagggctcattgtagacttggaagctctctgagggtgggagtatgcctcgtccatctgtctttactttttgtagcaagggaggtaaagctccatttccatccctccttagtgagtcagtagtcagtggtgaggctaaggcttacctctccctttctcactcagcacagggggctggagatgagcaagggaacgggaggaggtcagcccagtatgggaatcagttcttctcagggaacccagacatccatccctcaagattccagtccttgtcctagtccggcccttgacctcagagacgggatcagctcttcctccagcacctaccttgagggtatagaagaatgcaaaccacattggaaacctggagatctgtgttctcatttcagctctgctgactggcttcctgcaagctaccttccctccctgggcctcagtttctctctctgctgagccagaagatgtctaaagacccctttggttccaccctgagagcctgtctccctaacctcaacttcttccccagttcagagaacccaggcatccagctgccccaccccagctctgggtaaacaggaagctgggtgaggggagcaggggtgtgcggaaagtcccagccaggtgtgcaggtctacagggagggggtgggcccgtccctgaggtatgaaagccccctgctctggctctggttcagtctcaatgggggcactggggctggagggcaggggtgggaggctccaggggaggggttccctcctgctagctgtggcaggagccacttctctggtgaccttgttgctggcggtgcctatcactgtcctggctgtgctggccttagtgccccaggatcagggaggactggtgagtggctgcaacaggccctggtggagagttgtatcttgcggatgcttggctccctctggttgtgcctgtggtcttttgccccctctggctcagctggctcggctgtccctggtggggatgtcttgtctctttgctgactctctttccatgttcctgtgatgttgtgcttgtgtcccgacataagccccttgtgtctcctctcctcttcccgaggtacatctgtttctccgcccaagtacctatgccttgcttgttctcccttctaaggaggtgtgtgttggggatggtgctggtaggagaaaccccaggcctgcagcttgggtccactttcagaggggtaggggtgacatgagctgaatctgaactctgggcactgtgaccccacccaaccaggtaacggagacggccgaccccggggcacaggcccagcaaggactgggtaagagcagactgtctctccttccccgcttcagaccctcaggggctcccagctccctgctgcgtccccagatacctcttcctctaggaatccaggctccccatccctgcgccctgttctctcaagggtagcctgcatgggtggctgccctgcccccaatcgtggactctttgccccttccagggtttcagaagctgccagaggaggagccagaaacagatctcagccccgggctcccagctgcccacctcataggtaaggacctccaagacctgaataagagtgtaaataatccgaaggttccagttctgctcgcccagagtccttcggctccatgattccagtgctcggtttcccacccgcttcacgaccttttgtcgctcgtgcccactcttacgctcgtccccgcagtgtagtttcttcttccc

SEQ ID NO: 3754 - DNA, 6000 bp, Homo sapiens
tttctctaacttccctgagctaggaagcacctgttcaattccctctcataggattctgtatttctctttctcagcagtgatttcaattctaattgagtaattactggtgtattctttttttgttcatcccagcctagaatgtaaacttcataagggctggaatagagttctcaagattctatcctcagcccatggcatgctgtcttgcacacacctattaggtcttcaataattatttgtccagtgaattcatagtgtctagtttttgctaaatctcatttctagtgttcagcctgggcccgactgtggagggatcattgtttgttggctctgcttgcgggagctggaattgtctcttgttgtatgaggtaatttaaaggtccttttttagagacacattgtctaaagtgggttacccagtatgaaacagtttaaacagggccgagttttgctttaattagaaacttgatctgttattccaaatgaacaaagagctctaaaatccacttacagtctgagaaagagtgttggggctgtggggtttggaggtgggttttatgtatagctaggaaaaccttttttggttttactttagatttagaagtgcatatttcgggggaagtatagaaagctgtaggaagcctaccccaactccacacccaaatccacacatacttgctattcatgacctcctgtgctcattctgcagagccacccttgtgagtgtgtgtgtgggtgtgtctgactgcccatcctcccacacaggtagggaggctgacttagatcacacagcacatcagagtgatattcatcgccgaccaccgctccctgcccagatcttgggttcagttctcttctttcttaattgaagtgtaacaacctgccacttgggttactaatacagctttcaaactttcagaacactgtagctgtctaaaactgcttttgcatgtagacatgccacgaagtacagagcagagccacttttgcaacctcttgggttgggtgtttagtagggagatagggtctaatcctgtcgttgatactcttttgtttctttttcttttttttgagatggagtctcactctgtcgcccagggtggagtaaagtggcgcaatctcggctcactgcaacctccgcctcccaggctcaagcaattctcccacctctgcctcccaagtagctgggattacaggcatgctccaccacatctggctaatttttgtatttttagtagagacgggatttcaccatgttgaccaagctggtcttgaactcctgacctcaaatgacctgcccaccttggccttccaaagttctgggattacaggcatgagccaccgtgcccggctggtattcttgacaaatgtaacttgggttccacaggatgggtccttttatccagtgcatccgctgtgctcagaaaaaggtgtctgaggcttattttcaaatagaaggaacaagaaaatgaaaggtaaagtcagaagggataagggaagacattacagaatttatcatcaagcaggaggttttttccaggttctaagatgaggttaagtttcttaacaaaagaatcaacaactgtcctttttttgttgggggagggtctcgacagaaaaaatgaatataccctcataagctgaaaatttgttttctgtattgttatttaactagataggcagctctgggacaggggaagggacttcagggaaatacttttgattcaaatagttaaattttggggtaggagagaattgaaccttgaattaagtgtcaaggtgctaaaaagacagaaactctgatcactgtgaaaaaaattcttgatttattctcttagtcactggtatagcagccaatttagaaggaatttgccctgctgagtagctggtagtttgaggcagccattatttccttgacacataaactttgtgcatttcataaaggatagtgaaaactgttggaacttttcaatattcattaatgcagaaaaactttctcttaatattcttattctcccccagtctcttctcagaaggacctcaggatttagtcccatgaatataatttcctttcccctaagtgcctgttgattccctcttgctgggtctagctttgtgcttcctctcctgggtggctgcaggcccatgctttcgtagctatggtcttcaaaggctgagcaaacagggtgtgaatctgaaagcatcaactctgttgtttaaagcacattacaaaaatgccaagggcccgcctctgttttgacaaataaataaaagtttagcttcatgtaggcaaagcgtctgaaaaaatcaggccatgactgtcaggtaatgccaagcaggcaatctggtgcatggaactggcagcttgaatgcatgccttcctggttcccagttgccttgtcctagcatcatgaaatggcagcttaacattggggttggggaaaggaagagaactattcagcaagttattttctttttcttttttttttttatgtttgtttctaccgctttatttttatttatttatttacttagagacactaaaaagggtatacagattttatgtgtacagctcaacgatctgtgacaaagcaaacacactccagtaaccagcatccagatcaagttacggagcgttgccaacaccctagaactcacccctcatgccctcctctaatcactgtaccttctctccactctccaaagcagtgtaacacagagattagctctgttttcaaacaagcagttggaatgatacaatgtgtacattttgtgcctgacttcctttactcaacattacgtttgtaagatttatccatgttactatgtggagctgtattagttcattttcattgttgtataatgcattatatgaccaaatgacaattatttatcctttctgccaacaaacgtgtgctgtttccaccttgggaatgttttaaatagttttgctataagcgttgttgcataccttctggtgcacatatatacacatttccattaggcatgtgtgtatatactaggagtaggatttctgggtcatagcgtatacattttcaacttctgtaaagagtaccaaccagctttcaaagtgtgtgttgcaatttatgcctttatcagaaatgtatgagaattccagttgcttctcatactcaccaagacttaattttatcagatagtctttttaactttagccattctggagtatatagtactatttcaatatggttttaatatgcatttccttaattaataatgaagttttacgtttttgtcctttattggctatttgaatattcacttttataaaatgcctgctcaagtttttcacccatttttatcttgtgttgattttctaggagtcctttacatattctgtccacaacccctttgtcagttataagagtagcatacatgacttgagccacaaaatatgtgtataaatttgaaatgtaaatttcaactgatttcttacaggtttagttaccatttcagttttatagtatagaactaagctaaacaaagtattttacaaatctgtgataaataattcttaaatagaaagagtacattttttattaaaatacatcttctaaagacaagaacagggcaagttttttttttaattagctcccttatccttaaatgaataaaatacccaatgttaaaaagtcagcaagttattttcctgttgcatttggattttgactagtatacaatttttcttttctttttttttttttttttttttttttttgagaaagagtttcactcttgtcacccaggctggagtgcaatggtttgatcttggctcattgcaacctccacctcctgggttcaagcgattatcatgcctcagtctcctgagtagctgggattacaggcatgcaccaccaagcctagttaatttcttatttttcgtagagatggggttttaccatgtcagccaggctggtctcgaacacctgacctcaggtgatctgcgtgccttagcctctaaaaatgcaggtgtgcaaaaattacagatgtgatgtaaggcaaattttgcaaattgcaaattttgcaaatgcaaaaattacaggtgtgagccagtgcgcccagccatatataacattttaaatctcagctacaaagtgttttcacatacatattctcaactgatttttataatcaatttgagatgcattgtcagtttcattttacaaatggaaaaaaaggaagctgaggcaaaggtcaggcagtgaaaccaaagcatcacagccagtagatcaagctgtagggtgggatccaagtcttcgtttctctcgttctactgtgttgcagcatgctgtcaagaggatgcagtcctggtcggatctttaacaggaatgatgatggtggtgctggaattgttggccctttttctgctctgctcctatgtaacatcttcttggtttttgttcctttccctccccttctgtttctttcagcttggattccttagcaccaccacagctcagccagaacagaaggcctcgaatctcattggcacataccgccatgttgaccgtgccaccggccaggtgctaacctgtgacaagtgtccagcaggaacctatgtctctgagcattgtaccaacacaagcctgcgcgtctgcagcagttgccctgtggggacctttaccaggcatgagaatggcatagagaaatgccatgactgtagtcagccatgcccatggccaatgattgagaaattaccttgtgctgccttgactgaccgagaatgcacttgcccacctggcatgttccagtctaacgctacctgtgccccccatacggtgtgtcctgtgggttggggtgtgcggaagaaagggacagagactgaggatgtgcggtgtaagcagtgtgctcggggtaccttctcagatgtgccttctagtgtgatgaaatgcaaagcatacacagactgtctgagtcagaacctggtggtgatcaagccggggaccaaggagacagacaacgtctgtggcacactcccgtccttctccagctccacctcaccttcccctggcacagccatctttccacgccctgagcacatggaaacccatgaagtcccttcctccacttatgttcccaaaggtaacttaacctcatgaattatttatttgaggaaggctttgagcccagtggaggtaccaagagtgggcttataccaaagatgttttctccatttcgtgtattccaaagtcaccccttggagagaggccttcatatggtggctaattaaatctggcttttttggacttaatagaaacatgtagactcagaatttttctgttaggggagatcagatatctaaaaactaggtcacatcaagctataaaatatgaaccaagagaaacaaggacagcgtgtgaccttatgtaagttacttaacctcttcaggcctcagtttcaaacttgtcaaacaaatgaataatttagatgtttaaggttccttccagatcaaaagttttccaacatggagtcagtcccaggtagacatagccaggagcagagaagagggagaaaggaagaaaataccattacatccggaagcgagagatgaattttgaatccaggtggggcaaagaatgggtaggaaagttagaagctcaggaaataagcaaatttgtatcagattgaaggtaactagcactcatgtctggaaaataataactttattttttccaaatgattttaactttactccttatatcaattattcaagttttccatcagaacctcaagcagaatataaaatttatcctttattttcaaatcctttttgatttaatgtaattttcatgagatgatgaccaacttgagttgttcctcctagtgtcctctcatgcatgattacatttagccttcatgataagcctgtgaagacagccatcttacaattgccagttgaaatgaagaaacagcctccaagagctcagatggccactctagctttgcttaggccaagtcctg

SEQ ID NO: 3755 - DNA, 6000 bp, Homo sapiens
gtccacgtggccaattcaacccactcaatttaacatggttggggttggtaaagcccctgaagtatatcaaagtagttatattttgcattgtgaagggcccgatggacaacctgggactattcaaccaattataactttctgtacctataaatttatggggaagagatttattacaacaatggggagcacaaattctaattccagaacaattatatagccctcaaagtcaacatatgattcatgaaatggggtatgtacccggaacaggactagaaaaaaaaatttgcaaggtttaaaaagttcccgccaaagattaggatatcatttttgatggcagccattgttaagcctccagaacctatacctttagaatggttaacagataagccaatttggatagaacaatggccgctaagtaaagagaaactggaggctttggagaaattagttactgaacaattagaaaatgggcacatagctccagcattttctccttggaattctccagttttcgtaattaagaaaaaatcaggtaaatggagaatgttaactgacttcagagctatcaattcagttatataacctatgggagcattacagccaggattgccttctcctgctataattccaaaaaattgggctttaatagtcatagatttaaaagattgtttctttactatccctttagctgagcaagactgtgaacagtttgcatttacaattcctgcagtaaacaacatgcagcctgttttcattgttttacagatgggtctagtaatggtaaatcttcttattctggatcaaaaggtaaagtttttcagatgccctatacttcagttcaaaaagcagagcttgtagctataattgaggtattgactgcttttgatatgcctattaatgtgatttctgattctgttcctataattggggcagaatcaggtttacaaaaaaattggggcagaatcaggtttacaaaaaaaattggggcagaataggtttacaaaaacctatttgtaaacaggattggacccagttagaaaaaatgaacgtacttgtttaggaagattgcattgcagaacaggcagaggtgctgcacaacgattcctatggaatcattattaattcgtcccctaaggggacgtttagcttgaattgcacctctcagtctgcatgccacggccacactatgttcagatgatctgaacaaaacggtcagatggtagaaatgataagaactacggcaaaagttcccattacctggaaccatggtggtatagcagcacctcagcctcaaatgatatagcccgctctaggagcttaacataaggaattaaaattaaaagaacaaatgtttaaagcatcgcaggcacacctgaccttaatgccaggaactggagtgcttgaaggagttacagacaaattagcagctagtaacccattacaatggataaaaacacttggaagctctgtgatttcaatgacgtttgtgcttttaatctgtgttgtttgtctttgtatagtctgcagatgtggaacctgactcctgcgagaagtagctcaccatgacaaagctgcctttgcttttatcgatttgcaaatcagagaagggggacatgttgggagcaggccccccaaaatctggccatatactggcctcagaactggccataaacaaaatctcttttgcactgtaacatgttcataatggccctaacgcccaagctggaaggttgcaggtttacaggaatgagggcaaggaacacctggcccacccagggcggaaaaccacttaaaggcattcttaagccaccaacaatagcttgagcggtctgtgccttaaggacatgctcctgctgcagttaactagcccatcctattcctttaattcagcccacccttcgtttcccataagggatgcttttagttaatcgaatatctatagaaacaatgctaatgactggtttgctgttaataaatatgtgggtaaatccctgttcggggctctcagctctgaaagctgtgagacccctgatttcccacttcacacctctatatttctgtgtgtgtgtctttaattcctctagcgccactgggttagggtctccccaacggagctggcattttcctgccaactttctgtcattccctcatagatcggctcaggatgtttgtcatgcagcagtcatttctcaaaatgtggacaattgttattttcattataaagaacatgaaattttactagaccttctgaaagtgtgcaggataagttaaaaaaataattaagacaagatggtaaatctggtgatttctttttttttttttttttttttttttgagacggagtctcgctctgtcgcccaggtcggactgcggactgcagtggcgcaatctctggtgatttcttcagtatccagatgtatatatcagatttttaacaagaaagataaaatagaaaaaaatgaaaggttaggaaagcattaattggaatgtactaaggacgaggaaagaattagcaatgatttttgaggttggaaaactagaaaaattgtacaacattggcagaaagagagaaagtccaaaggtaggatggagggtggagatagagtaatttttatggcaaagatgacattggattaactcatttaggccttcctttaaaatttagctataattatgatttatcaacacatatctcctctttccttggaactttgggagaaacttccttatgtatcattgaatttttatcctttcccagaaaacagacatgtctaagttaccacattgaaaatgtggcaatgaattatttaatggttgcagcattgttacttcaaaatggaaggcatgtatacatttcaattcaaagtaataaaatttcacactgcatctagattcaaattatctataatctatcactctatagagggacatgtatttaaatgttagtagtaaacagaattgagtaaattttttcatctctcaaaatgtatattaaatttcaacttgatatgatcaatggaacaccaggaattcatgaagtttcaaagtggtccaagcacaaataaacaattttcttttagttttaggaagacaaatagttgagaagaacttcttatacctgcatagtaacccagacactaaactctaaagttgcccaactctttagagcaaatcaatcatatattaccacgaaaaatgtgagtttggatgcaaggagtaaaatggactaaataaaaacgtatttgaagctcctcctcctctttaatacctatgtaacttcttaaaaaaaaacaacccaaccttataatagtattggccagtcatttgaatttttgaagaaaaaattgatacagttatgcatgaaaacacagcatctatccctcactctttcaacttctgaaaatagctagagagtggcaagtccaaccatcatcctttccccaaaactccataattaatggtaatattttctagaactcctttgaatttcactagaggttatatattgtagcttttttcccactctaacatttatagacaatactgacaaatgtttgaaataatagattggaattaaccctcatattaattttagcttctaccaaagtgtgcatagagcaaagaatcaaaggacaacatgttaactaataaagcaaataattggtacctatgacttagcaagttacctttattagcactgggtgttggatcttgaaactgatagtttaaaaagtgtgattcttttgaaatgggaccaaaggagcctaggataagcccagcaccatagggctcccaattgaggggtgtggactggatggctgaagaggtaatatcaatacagtgtgccatgtgctgtcagtacctagatgatggataacacgataccagaaatggtggccacagtcaggagactcggccttcccccaggtgaaacaaagaaaaggataacagctgctctcttacattcagaagtgtgtgagataccaacatccacgagaatattccagttctccttctgaagcagaatactacctattctaccacccacatcctgacaaggcctttggaaatcaactcaaaaatttttagcattattttttgggggaagggtgattaaaaaaaatctcagggataatccgattcaaaactcttgatttttaaattaggaaaatgcatcttttgatacatttcaaggagttcaaaagtccctccaagaccatccatggacccaacaccaatgactctgggttttaaatccttttagtttggatttccttaattgcattcataagcccatattaaaattaaaatataaaaaattaaaatctttgccccatattaaaatcaccctgaaaacttaaaaaacaaacaaacaacaacaacaacaaacctcaatgcccagaccagatcctgtcctgttccaattaaatcagagtctctagaggtgggacccaagaatcaatatatatgttttgaactctccaggtgattccacagggcagcaaagtttgagaagcaacacacaggtctcctttttcgtcacgcagttgatctaagtgctctgtggtctattcaccatcgctctctgatttaatcatcgtgtccgaaacaatggaaaggcgtatgtagctgaaataatttagttggaattatctcggaaaaaataagtaaagttagatcaggagtgagatgctttctcagcgctttccctgggtcaacaggcgcgtgcaatttcctcagcgaacgccaaggggcaccctctccctccccgctctacctggaacgccttcgcctttccaaccgcacaaagagcccggcctcctcccgggtgacatcacaaagggccggtcccccgccccttcggcgccaccacgtgtgtccctgcgcccggtggccaccgactcagtccctcgccgaccagtctgggcagcggaggagggtggttggcagtggctggaagcttcgctatgggaagtcgttcctttgctctctcgcgcccagtcctcctccctggttctcctcagccgctgtcggaggagagcacccggagacgcgggctgcagtcgcggcggcttctccccgcctgggcggccgcgccgctgggcaggtgctgagcgcccctagagcctcccttgccgcctccctcctctgcccggccgcagcagtgcacatggggtgttggaggtagatgggctcccggcccgggaggcggcggtggatgcggcgctgggcagaagcagccgccgattccagctgccccgcgcgccccgggcgcccctgcgagtccccggttcagccatggggacctctccgagcagcagcaccgccctcgcctcctgcagccgcatcgcccgccgagccacagccacgatgatcgcgggctcccttctcctggtgagcgcttgcgtggaccgggggtggcggcggcgccggagcagaaggaaccgctctccgggagccgggcgggtcaccgggccggggcttagggaggcgcggggcccggccgactgggttacgggcactgaggggtttccaagggaaggcaacacaccagagggcctcgactaggttatttgggggaatctcagggctcagccggggctggggaatgaagacgaattgttttccttgcagtctggctttgctggaggagacgctagaggtagccgcccagcttctgcgcatttgagggcttttccccctactcggcctacctcgcgctccccacgcccgcagccacagccccccacccatcggccactgcccctctgcgtggtgtggggcctcgccgcggtgtggggctcccacggccggccgaggccggcgctttgttgcagctgcaatgtcatgtcgggatgctaccgcagtggaagacagtggtaccggtgcgcgccggacaccggagacctccgggtgctgtcgcgcggtgcattcccgagcagggcgcaagccgccccctcctcaatccctttaccctctctcttccctcttggctcgggt

SEQ ID NO: 3756 - DNA, 6000 bp, Homo sapiens
ggtatagagccagtcagtgaagggttccaccatagtcagccgtgtgcccatcatatgttcattagtgtgtccctggtattagcacatgatttacattataggaagtgctcaatgaatgctagatgagataagaatctggatctgttgatttagtttgaactcagtgatagccagttaccagtctggcatcctgataagagttgtttttaccccaagggggaaaactgtgaccaaaggtcagtgttgcctcctgcttacataaagaaccattttgttctcccctgcaatctagcaaatcctcttgttttgaattcggtactcttggttccaactgatttattcattctttctttcaagagagctggtatattcttctatgcattgaggtacagctctgaatggaaaagagatcactgaagaaaatgagtgactcaatccactcaatttagtacacatttaaaggtctattgcacatgttgctttgggagcatgagtgatataagcaaagatgaaaacatggctcttgatttcatggagctaccttcactgtgcacatggaaggtcactcctggggaggccttgaaaattctccgtaagatgggcttagggggttcagtctggctagaaggggttggccaggggacttgagtctgtctttgcatagaatacactgtttaatctagattgtatatttgaggatgtatatttggagaaggaggctggtagagattattgggaagcagggtaaagttacccaaatatatgaagatcccagggaactatcctaaaacatgtatgtgagggcaagatacacaagtattggcacaagaggttgaggaagggaacaatgcctgaaagggtgatttgaggaaatctttttgtagaagttacacttctggttgttccagagagagctgcagaggattgcacaggcatggaggggagcagggtggatggaaggcctgtgatcacagaattttgatcggtttttcagggccttccaatgaacctaagaacaactttctcttcattttcttcatgtgaagaaaatggcaaagagttgttcgaacatgttacgctagaggaaaataactttgccctgctagaatgtgtcctgccttatgaaaagatgatgtgtaattttacccaatcttaatgaatgtaaaaaaagataagttactgttttttggggaatgtctgtgtatctctagggcacaatgcctgacacatagaatgtgtttaacaaatgtttgacaacctgaactgaactgagacaaattaactttttgcaggtcatttaaatttcatgtcagagcatttaaacgcttaatttttttccttcaaaaattggaaacaaaaatatggcgctctcatgagaaaagattgtgcagaaagagccttccttcaccctgggttttctcacttatcccagcaggctgggactgtcctcactgtgtagaaaggaaagtttttcacccattcttgggaaattaggctactctactctagttttacttttgattacttgtgtaaaaaaaaaaaagcaaaaatcaatagctaataggttatctcttcctaagcatatatgcccagtccagttggacacagatgtggggctcaagtccaaatccccatgtgcagcccaggattaggtggtaccctggaaatcaagtgggtgttcctggctagggattgaagatgatctcagcccctggtcagctggttgaaagcatccaaagtgcctccagtgagaagctgagattacctctttaatgagaaacactttgggtgtggtagggccaaccgtcaactggtaggcagtattcttgccacaggtagtatctggtctagaaactactagatctccaaatcctcttaaggtcccttacattgacaagaatgaattcaagttgcgaaatgacacaccaacttatacaaggtagaggatgtcattaaggcaacagtctcaccaagtccatgcgcagagctctgatcccaccgtctcctcccctcattctccaagtctgcttagttctgcccactactcttccttctcagcaacagttccagcatccagaagtcttgagcagccttctgcctcacaagttgggggtggcccaattaagaaacttcatggcaacttcaaggccaaggaaacaggctgcattggctgggaaggctcgggtcatcactgcatcagaccctttagacaaggatgtgattccttcatcccagatcagctccctcagcacatctccaaaactgttaggatatttcccaggaggtgcgtctggaagggatacttgagcacatcttgcgggactgccattgcccagttgaagatccctgcaatgcacccagccaccaggattcaaggcacactgagctcacagaccctctttccttccggagtgaagatattttttagccattcatttgtcatgaaatacgttccgctagctggaacgtctcacataagggtaagcacggtccctttgtagatgcctcggatctgaaactcctggtacaacttctttgcacagtccaaggttccagtgtacttggtttcccctgaagaaggctgaaagtgtaacaaggacttgatgggttctccaggggtcgcgatgcctgtggtgaatgtaccagataacatcccagctgcaaacagctggggatagctgagcacatcttctgggtgtttctgtcatagtttcttcctcaaaccaaacccaaagaagcacacagcaaagatgggggtgacaccgatgataggggcagccattcccttatatagccctgtgatgtcccttctaagagtctttgggagagagtcaaaggtcccagagtacatgggaggctgtctaggcaaactcggtggctgtgtctgcagtcggaccttgacagtgtccagagggtgccccatgaacaccaggcacatgccaccaaagccactggccagcaggttcttgagcaggctgatgggctttggctggtcggctatggtcagtctgcctatccctcagtctgtcagttcctgggccgtcctggctctgctgccccagctgcagtgccagggctgccaatcttgcatttaaaggcttctacttgctaattaattttggttaaaaaaaaccattcttagagatagccaaggtaatgggcatttaagtgttgcatcaatgtgattttacatatatgtatatttgtccatggctcctggttcataactcccacagccctcgttatatcctaagtgataaaaataataagcatatcttttgttagggtatttagcttttttgtctttgtttcctgaagcagcttcagacagcttcagagcaataaaggtgaaaaagacagtcttttattgtaatgttggggcactttaggcctaagaaataggcctcagaaaaaagaatctccctctctgaacttctcctgcccaccttttctccccaagaccatagaaacagaaaatatcctgtcatctaacatcaccccccacaccttttgtcttggagctggccataaagaaattctttgatttaccttgtctaatcataggccataagaccctcaattcaggaagggtcctcccctctacccaggaggaaggaaggctgctcagagaggccaagaaaaatctgaacaggcaggcctggctgaatttcctcattcaacctgttaatatcaggttataccctttttatccaatcacatttgtttacagttttccatgttgtaatcatgtctgcccaatgaagactccataaaaggcccaagaggatgggatacaaagagcctttggaccgctgaacttgtggaagttctaagaaaggtaaacagtaactcatccctgtgctgggagggtggtgcaccccagctccatgggaaagaacacttctgtgcttgtgaccctttcaaaccttgccctgtgtaccttttcatctggctgttgacttgtatccttaaaaatatcctttagaatatactggtaaatataaattagtgttccctaagttttgtgagctgttctaacaaattaatcaagcctaatcaaactcaagcggtttgtgggaacctgaacttgaggccagtcagtcagaagtcccagaggcttggacctgtgattggtgcttaaagtgggagcagttttgtgggactgagccttcagcctgtgggatctgactctacctacctggagatagcgtcagaattgaattggattagaagatgcttagctggcgttggatgcagaattgattgcttgctggttgatggagataaatgcccacatacatggtcatggaaatcttttgtgttgctggttgtggtgtgagagcagaggaaaacagtttgttttatcaacacaatgaatagtgattatttattaagcaccagtaggagtctaaccatggggttaaaaaataattagttcagggagataacaaaactaccagggtatatcatttctgaatttttcacttatgtcattcatttctttagttttgttttcccattcataaaatggaggtaaagatagtttagtaccaaggctcctctaaggatgagttttctcccatttaaatcacgattcatattgcgtgactggaaagtagaacatatggtccgtgacaagggtgttggcaatttgtggaagaacaaaaaagatttgacaacaatttctaacttggttcatctctgtagtaaattaaaaattttgctctgatttgtgggcaatgggggtggaagtagggtagaaggaaagaaaaatttggtccttttcctgtcatccctttctttagggtcccccttttgttccccttcgggaaatggaataaaaaaaaaaacccctgcattcgtcagtaactccgggtcaaccacaacttaaagacagtaagcaggtcaatcgaaacaggggcaatgattgctataaaactaacaggtactctcattgatagaacacaggcatacacaggaagatacattcacagaaagagcttcctgcacaaagtaagccaccagcgcaacatgacagtgaagaccctgcatggcccagccatggtgagtagcagcaatcattctggtttaaggactgtcatgcctaggatttcagaaaacagaatcctaaggaattaggtttgattggggtctttttggaattacttcttaaaaaacagagatgactttaattttgactcctgtctggtggagaaaaagaaaaaaataactagaaaagttataatggcataaaaatgcagctcctggccaggcgtggtggctcatgcctgtaatcccagcactttaggaggccaaggcgggcgggtcacatgagttcaggagttcgagaccagcctgaccaacatagcgaaacccggtctctactaaaaatacagaaattaggtcgagcctggtggctcacgcctgtaatcccagcactttgagaggctgaggtgggtggatcacttgaggtcaggggtttgagaccagcctgactaacttgaaaccctgtctctactaaaaatacaaaaattagctgggcatgggtcagttgcctgtaatcccagctactcgggaggctgaggcaggagaatggcttgaacctgggaggcggaggttgcaatgagccaagatcacgccactgcactccatcctgggtgacatagcgagactctgtctcaaagaaaaaaaaatgcagctcctcacccaatggcttttgcccaggtggtgttagtgtgtgcccaggtggtgttagtgtgtgcagtccttggcatcacagacaactagcatgttctttcctgtggccatccattatagagtcaggttggcctgaaattcttatctcatggtgggagcttggccagcactttagggattatgtacatatacattttaaccaaggaaactggggcctcaagaggtttaatgattcccctgagattacaggagtgccctggatggaagaaatgaaatcacccagtgttgactttggacagctcc

SEQ ID NO: 3757 - DNA, 6000 bp, Homo sapiens
tgtcatgctttctaatcgcatgaccaggcaagccttgggacaggactgtgagtttctagtcttgtctgaaaacatgactgtctcatgttaatgttaatgtcaacaccaatgttaatgttaaagcaacaaaatacattaagtaaggtatttttaaacagaatttcattgattcaatcaaacacttgcacagcgttttgcatctggagtggccatagagacaaaggagagggtgaaggtggctgttttaataagctttaaagaagttaagaaagttcaccatcttaaatgacaaggaaaagacaaagaaaagacaaaatagaaaaatcttcatttttataatatgttaacttcaataatagtcttctttggctaaaccattattagggggataacacaaacttgcctgactaattcctttactcttaagacacagctgaggcaagcattttgaaagaaacatttctgtacttctcaccagcctgagttaggaggcttccctcagtgctcacagacgcactgggcttaccctttatgcacagcgcttaccacgaggcgctgctttataaaaaacctgtttatccctccttctcaccagatcatgaactccctggtaaggaaggagcatgtccttaacccatacccttagcatctagcacagtccctggcatatagatgttcaataactattttggaatgaataccaatattttattattataaataatgattgaaaaattaaaagggtagcaacttaaaatgttataaatcagaaaaatgagtcagagtgtagatgaaggttagatgactcaagctgggaagtcattaactatttttagctcgttttagcagcagggagtcaaccctaacctggtgtttaatttccagggtatagaagaccagaacaacggaatagactttaaaagtgatttaatcactgattcttcacttcatgcatccctggtcactattaccaaaagtcatttaaaagccttatgcttagtgttctacatagtaattttaatggcaatgattacaaatcagtgagatcttcaacataacaaaaaccacactgaggtgctcgtacatgtgccaggaaaccatgagtagtattccttctttcaagaaaaaaatgtaagactccatttatgtttattagtctatactgtgcaaacttgggcatggataaaatataacctactggttagttaattgtttattcaataaatctttttgagctatgaaatttttataagactttttgtcaggaattatgggaggtttaacataatatccacactcaaacctgacagactttaccatctattttaagaaaggaagaggaaacaaaaacccaagtggcaaactattcaagaccaaatgtaaataagtaccacattgtattttacagatgaagatcgtgtagatgttgagaaaaaggggagatctgtaacatccaaagccagaggagtagagatgggagctgatatttcttactccttgtcatgctttctaatctcattaccaggaaagccttggaacagggctgtgaatttctagtcctgtctgaaaacatgactgtctcatcaacctgcaagtacaacctacagggactcatggatagagaccccagaagattcaagtttcctgctgaggaaaagcaaggcagctctgccttcttgtttcatctctccagtctataaacaaaccttttttttttggtgatttttctgggccccccaggatagcattgaagtactgtctagtgttcctaggtgcaagaaggttgtgatgtgccttagagagaaaatatatatgttaaataagcttaataaacttgattctggtatgagttttagtgctgttggctgttagctcaatgttaatgaaacaacaatatacatgatatacatgaaataaggtgtctttaaactaaaatatataaagaaacaaaattgtgtattgatcagttgacaaaaatgttagaaccacggcttgtggaaacctaccttcgtatctccactaagagtgatggctcagtattgtaaaaccatgttctcttcctctgtccagggcatagtatcagacctttacaggcacaacccgtcttattgcgcttctcttaactgtgcttcacagacactgcatttttttttttttgatggagtcttgctctgttgcccaggctaatctcggctcactgcaacctctgcctcccaggttcaagcgattctcctgcctcagcctcccgagtagctgggactgcaggcgcgtgccaccacgcctggccaattttttgtatttttagtaaagatggggtttcagcatgttagtcaggaaagtcttgatctcctgacctcgtgatccgcccaccttggcctctcaaagtgctgggattacaggagtgagctatcgcgtttttaacaaattggaggtttgtggcatccccatgttgagcaaatctattggtgccatttttccaatgccatgtgctcacttgatgtctctgtgtcacattttggtaattctcacaatatttcaagctttttcattatattatatctgttatggtgatctgggatgagtgatctttgatgttaccattgtaattattttggggaaccctgatccatgcccatataagacagtgaattgaatcaataaatcttgtgtgtgttctgactgctccaccagccagccatttccccatctctctccctcttcttaggcctctccattctctgagacacaacaatattgtagttacgctcattaataaccctacaatcgcctccaaatattcacatgaaaggaagagtcacatgtctctcaccttaaatcgaaagctagacatgattaaatttagtgaggaaggcatgttgaaagctgagataggccaaaagctaggtctcttgtacgagttattcaagctgtgaatgcaaaagaaaacttcttgaaggagagtagaagtgctactccagtgaatacacaaacgataaggaagtgaaacagttttcttgctgatatggggaaagtttgagtggtctggatcaaacccgatcaaagcagtcacaacattctcttaaccacagcctaatccagggcaaagccctcactctcttcaattctataaagcctgagagaggtgaggaatctgtagaagaaaagttggaagctagcagagactggctcatgaggcttaaggaaagaagtcatctccataacatgaatgtaaggtgaagcagcaagggctgatgtcaaagctgcagcaagttctccagaagatctggctaagatcattgatgaaggtagctacacgaaacaacacattttcaatacggatgaaacagccttatattggaagaagatgctaccaaggacttttacagctacaaagaagtcaatacctggtttcaaagcttcaaaggacaaactgactctcttgttaggggcaaaagtagctggtgactttacattgaagccaaagctcatttaccattctgaaaattttaaagcccttaagaattatgctaaatatattccacctgtgctctataaatggaacaacaaaacttgaatgacagtacatctgtttacagcatggtttattgaatatttttaagcccactattaagacttactgctcaaaaaatgtttctttctaaatattattgcttaatattggttaataatatactttgtcactcaacagttgatggagatgtacgaagagattaatgttgttttcatgcctggcaaaacaacattcatcttgtagcccatggataaaggagtaattttgactttcaagccttattatttaagaaataaatagatagctgccattaatagtgattcttctgttggatgtgggcaaagtaaattgaaaaccttctggaaaagattcaccattctagatgccattaagaacatttataattcgtgggaggaagtcaaaacgtcaacattaacaggagtttggaaaaagttgattccaaccctcctgaatgactttgggagttcaggacttcaaagcaggaagtaactgcagatatggtagaaatagcaagagaactagaattagaagtggagcctgaatatgtgagtaaattgctcaatctcataagacttgaatggttgaggagttgcttcttatggacaagcaaagaaaatggttacttgaaatggaatctactcctggtgaagttgttcacagcattgttgaaatgacagcaaaagatttataattatataaacttagttgataaagcaatggcagggtttgagatgattgactccaattttgaaaaaagttataatgtagataaaatgctatcaaccagcattgcatgctacagaaaaatctttcataaaaggaagagtcaattgatgcagcaaacttcattgttgtcccattttaagaaattgacacagctattgcagccttcagcaatcactaccaggatcaatcagcagccatcaacatccaagcaatgccttccaccaccaaaaagattcccattaggtgaagatgatctttagcattttttagaaataaaatatctttttaagttaaggtaggtacattgctctttctagacatcgtgctattgcatacttaacagactacagcatagtgcaaacgtaacttttatatgcattaggaaactgaaaaattcgtgtgactcgttttgttgcaatactcgctttattgcgggggtctggaacctaacctgcaatatctctgcgttatgcccttatagcgccgggagtgggtgccttccgccggctgtacagagcgccggcaggtggcgcccagcggcgagcttgttccagcttggtttgggccaggtggactggaaggggcggaggtaaccagaagcggctagtggcggctgcctgcgtccccaaccccctccgcgcagcgctcgcgacacgcgtgccaggagtgggagcgagcggcggggccagctgcgttctgagcctgggcgcagctgccatctgctctgggaagcaccagggtgtccccgccgccctcagctcgaagtcagccaccatggaggcgcaggcacaaggtgagtggtcgccgatcgccccgagagtcaggtcctggggcgcgcataaaggctcttttcctgcaccacctaacttcgctctcggacagaacagattggtgccgtgttgcacatccagaactccactcccacccgcgcctttggtataatgcctgctgcccaaactcaggatttgctgtgggtctggggatcaataaagtgacaggggatccgtaagtggagaggcccctcctcaggaaatgcgcccgtggaatgctctaccctcttccgcagccagtcgcccctggccttcccaacctcgcggctgcccgaaggacctgttgtgccgggtccggaaagcgtgtttcgctccctttcccttgagggagtggggagggaatgtgactcttttcgcccagcgccgtggactcgcggcttgtggctcccaagttagggagtgagaggatcgcccgccgagggggtggctccgcagcccggctgcgcgagacgcttcccgctcggggacccgccttccgaggccaggtgaacgttaccggccccctgacctccagcagatccacacgtgagtcccggtttccgcgatcggggagcgacctctgcctcccgtggcgcgcggggcccccggccgcccagctccctgctcccggggctgcctgctggaggagcctgcggtggcttcaggaagggcggcctcatatcttggggtcacacttggaacagggttggggaattccgatggaatcgttcaagaatgggggtaaacggaccgtggaaaggggcagaggtgggcggatgtggagcgagagacaagtgggaaggaaacggactcagtgatctaccttggggagcaacgcccagaagggatggcttgcggagttcagcctttaaggcaatcaaagccaccattcttttacacagtaggaaactc

SEQ ID NO: 3758 - DNA, 6000 bp, Homo sapiens
cattattagggggataacacaaacttgcctgactaattcctttactcttaagacacagctgaggcaagcattttgaaagaaacatttctgtacttctcaccagcctgagttaggaggcttccctcagtgctcacagacgcactgggcttaccctttatgcacagcgcttaccacgaggcgctgctttataaaaaacctgtttatccctccttctcaccagatcatgaactccctggtaaggaaggagcatgtccttaacccatacccttagcatctagcacagtccctggcatatagatgttcaataactattttggaatgaataccaatattttattattataaataatgattgaaaaattaaaagggtagcaacttaaaatgttataaatcagaaaaatgagtcagagtgtagatgaaggttagatgactcaagctgggaagtcattaactatttttagctcgttttagcagcagggagtcaaccctaacctggtgtttaatttccagggtatagaagaccagaacaacggaatagactttaaaagtgatttaatcactgattcttcacttcatgcatccctggtcactattaccaaaagtcatttaaaagccttatgcttagtgttctacatagtaattttaatggcaatgattacaaatcagtgagatcttcaacataacaaaaaccacactgaggtgctcgtacatgtgccaggaaaccatgagtagtattccttctttcaagaaaaaaatgtaagactccatttatgtttattagtctatactgtgcaaacttgggcatggataaaatataacctactggttagttaattgtttattcaataaatctttttgagctatgaaatttttataagactttttgtcaggaattatgggaggtttaacataatatccacactcaaacctgacagactttaccatctattttaagaaaggaagaggaaacaaaaacccaagtggcaaactattcaagaccaaatgtaaataagtaccacattgtattttacagatgaagatcgtgtagatgttgagaaaaaggggagatctgtaacatccaaagccagaggagtagagatgggagctgatatttcttactccttgtcatgctttctaatctcattaccaggaaagccttggaacagggctgtgaatttctagtcctgtctgaaaacatgactgtctcatcaacctgcaagtacaacctacagggactcatggatagagaccccagaagattcaagtttcctgctgaggaaaagcaaggcagctctgccttcttgtttcatctctccagtctataaacaaaccttttttttttggtgatttttctgggccccccaggatagcattgaagtactgtctagtgttcctaggtgcaagaaggttgtgatgtgccttagagagaaaatatatatgttaaataagcttaataaacttgattctggtatgagttttagtgctgttggctgttagctcaatgttaatgaaacaacaatatacatgatatacatgaaataaggtgtctttaaactaaaatatataaagaaacaaaattgtgtattgatcagttgacaaaaatgttagaaccacggcttgtggaaacctaccttcgtatctccactaagagtgatggctcagtattgtaaaaccatgttctcttcctctgtccagggcatagtatcagacctttacaggcacaacccgtcttattgcgcttctcttaactgtgcttcacagacactgcatttttttttttttgatggagtcttgctctgttgcccaggctaatctcggctcactgcaacctctgcctcccaggttcaagcgattctcctgcctcagcctcccgagtagctgggactgcaggcgcgtgccaccacgcctggccaattttttgtatttttagtaaagatggggtttcagcatgttagtcaggaaagtcttgatctcctgacctcgtgatccgcccaccttggcctctcaaagtgctgggattacaggagtgagctatcgcgtttttaacaaattggaggtttgtggcatccccatgttgagcaaatctattggtgccatttttccaatgccatgtgctcacttgatgtctctgtgtcacattttggtaattctcacaatatttcaagctttttcattatattatatctgttatggtgatctgggatgagtgatctttgatgttaccattgtaattattttggggaaccctgatccatgcccatataagacagtgaattgaatcaataaatcttgtgtgtgttctgactgctccaccagccagccatttccccatctctctccctcttcttaggcctctccattctctgagacacaacaatattgtagttacgctcattaataaccctacaatcgcctccaaatattcacatgaaaggaagagtcacatgtctctcaccttaaatcgaaagctagacatgattaaatttagtgaggaaggcatgttgaaagctgagataggccaaaagctaggtctcttgtacgagttattcaagctgtgaatgcaaaagaaaacttcttgaaggagagtagaagtgctactccagtgaatacacaaacgataaggaagtgaaacagttttcttgctgatatggggaaagtttgagtggtctggatcaaacccgatcaaagcagtcacaacattctcttaaccacagcctaatccagggcaaagccctcactctcttcaattctataaagcctgagagaggtgaggaatctgtagaagaaaagttggaagctagcagagactggctcatgaggcttaaggaaagaagtcatctccataacatgaatgtaaggtgaagcagcaagggctgatgtcaaagctgcagcaagttctccagaagatctggctaagatcattgatgaaggtagctacacgaaacaacacattttcaatacggatgaaacagccttatattggaagaagatgctaccaaggacttttacagctacaaagaagtcaatacctggtttcaaagcttcaaaggacaaactgactctcttgttaggggcaaaagtagctggtgactttacattgaagccaaagctcatttaccattctgaaaattttaaagcccttaagaattatgctaaatatattccacctgtgctctataaatggaacaacaaaacttgaatgacagtacatctgtttacagcatggtttattgaatatttttaagcccactattaagacttactgctcaaaaaatgtttctttctaaatattattgcttaatattggttaataatatactttgtcactcaacagttgatggagatgtacgaagagattaatgttgttttcatgcctggcaaaacaacattcatcttgtagcccatggataaaggagtaattttgactttcaagccttattatttaagaaataaatagatagctgccattaatagtgattcttctgttggatgtgggcaaagtaaattgaaaaccttctggaaaagattcaccattctagatgccattaagaacatttataattcgtgggaggaagtcaaaacgtcaacattaacaggagtttggaaaaagttgattccaaccctcctgaatgactttgggagttcaggacttcaaagcaggaagtaactgcagatatggtagaaatagcaagagaactagaattagaagtggagcctgaatatgtgagtaaattgctcaatctcataagacttgaatggttgaggagttgcttcttatggacaagcaaagaaaatggttacttgaaatggaatctactcctggtgaagttgttcacagcattgttgaaatgacagcaaaagatttataattatataaacttagttgataaagcaatggcagggtttgagatgattgactccaattttgaaaaaagttataatgtagataaaatgctatcaaccagcattgcatgctacagaaaaatctttcataaaaggaagagtcaattgatgcagcaaacttcattgttgtcccattttaagaaattgacacagctattgcagccttcagcaatcactaccaggatcaatcagcagccatcaacatccaagcaatgccttccaccaccaaaaagattcccattaggtgaagatgatctttagcattttttagaaataaaatatctttttaagttaaggtaggtacattgctctttctagacatcgtgctattgcatacttaacagactacagcatagtgcaaacgtaacttttatatgcattaggaaactgaaaaattcgtgtgactcgttttgttgcaatactcgctttattgcgggggtctggaacctaacctgcaatatctctgcgttatgcccttatagcgccgggagtgggtgccttccgccggctgtacagagcgccggcaggtggcgcccagcggcgagcttgttccagcttggtttgggccaggtggactggaaggggcggaggtaaccagaagcggctagtggcggctgcctgcgtccccaaccccctccgcgcagcgctcgcgacacgcgtgccaggagtgggagcgagcggcggggccagctgcgttctgagcctgggcgcagctgccatctgctctgggaagcaccagggtgtccccgccgccctcagctcgaagtcagccaccatggaggcgcaggcacaaggtgagtggtcgccgatcgccccgagagtcaggtcctggggcgcgcataaaggctcttttcctgcaccacctaacttcgctctcggacagaacagattggtgccgtgttgcacatccagaactccactcccacccgcgcctttggtataatgcctgctgcccaaactcaggatttgctgtgggtctggggatcaataaagtgacaggggatccgtaagtggagaggcccctcctcaggaaatgcgcccgtggaatgctctaccctcttccgcagccagtcgcccctggccttcccaacctcgcggctgcccgaaggacctgttgtgccgggtccggaaagcgtgtttcgctccctttcccttgagggagtggggagggaatgtgactcttttcgcccagcgccgtggactcgcggcttgtggctcccaagttagggagtgagaggatcgcccgccgagggggtggctccgcagcccggctgcgcgagacgcttcccgctcggggacccgccttccgaggccaggtgaacgttaccggccccctgacctccagcagatccacacgtgagtcccggtttccgcgatcggggagcgacctctgcctcccgtggcgcgcggggcccccggccgcccagctccctgctcccggggctgcctgctggaggagcctgcggtggcttcaggaagggcggcctcatatcttggggtcacacttggaacagggttggggaattccgatggaatcgttcaagaatgggggtaaacggaccgtggaaaggggcagaggtgggcggatgtggagcgagagacaagtgggaaggaaacggactcagtgatctaccttggggagcaacgcccagaagggatggcttgcggagttcagcctttaaggcaatcaaagccaccattcttttacacagtaggaaactctgtgttggctcttagtatagataaaatctcattaaaaagaaaaaaaaaaaggttcatgacctgatgcgctcgccctctaggggcagaacgccctgaatgagagtgggttggcgattgcgtgggcctggagtcgcccaacaggtttgctgccaggattacaattgtctgaacagcacgaaccttactcgtttgttccatcctcctaagtcctgcccgtaaagctgccgcttcccatattttttcctctattatgtagataggaaatgataattcaaccaagggtgagggcagttggtcaaattcaaaagcagaggtcaggttggaggccttcacgccagaactgaagctggtgggagcagcaccggagctttccaa

SEQ ID NO: 3759 - DNA, 6000 bp, Homo sapiens
tctgtgtctgttgagcagagcttcctcaatgtgttgtcaatggctcaattttggaaacgggcaatgtctcgagacagtgctgattgccacaacttacgggatgagtactactcgtatctagttggcagaggccagatatactgctgagcatcctgcagtgaacacacagttccctacaatcacaacaatgagttcccctacctgaaattccatagtgctgaggctgagaaatccggcgaaatggtcatagcaagatgagatgagtttagctgatttccttcatccttaggaataagaacatgttaacatattaacattattgacctctaccagcacttaaaggacaaaaagcctatcaaatctaaaccttgctatgaaacaaaatctgattcttgtgagagaaaagtcttccttgattctcaagagaaagtaaaaggtttttgtggttttgacttaaataattctaatgactcgatttgtttattggacaatagattgaaggagctaagctggattttgttgattttaatttttaccagtaatgtagtataaaaaatgttttgctagacttgtatgatttactaaataattattgatatttgcatatcatgtaggatcaagaaaaagtcacatgttaaattctgtgtacagagataattattttcagtcaaatgaaagtaaaagaggccaggcgcagtggctcacgcctgtaatcccaacactttgggaggctgcggcgggcagaatcacctgaggtcaggagttcaagaccagcctgaccaacatggtaaaacctcatctctactaaaaatacaaaattagccaggcgtggtgctacatgcctgtaatcccagctacttgggaggctgaggctggagaatcacttgaacctgggaggcggaggttgcagtgagccaagattgcaccattgcactccagcctgggcaacaaaagcaaaaccccatctcaaaaaaaatcaaaataaaagtaaaggagatattaagtttagcttgcctgcaatatacaaattaaatgtgctagaattgagcacttatagcacaaattataggaaataagatagtgaaaaattaaaaattacttaggtcataaaaatgcagaaaatacataaagatgctttggagccatagagcacctgttaaagcttgactttcattgtatttccatgttgttccattacattaggggaagcctccttagtggctcatcacctcattgcctagactgggtaagcagggacacagggtcattgctacctttcacaggtgctttactgtgctaaacttctgaaaagccaccttttaaaaagggaacatgcattttcaaagccactgattattaaacccctctttcagtcatcttatttgcagactttcatttttgagctttgtttgccatctgggaaggattttgaaagagaacataggcctcttcctgcttttatgttcagcatgccatgaattgcattaatgaattcttaagatcgtttgatctatttaaaaaaatagctctagattcagtcagttgttaaaaaaatgtgttcaagattgtctataattgcactagccacaaacagattttcgtaggtattttctttgtaaagaatctatttgaaatattggaaatgttttcaggaactagagacaaaagatatacatggttttttgaataatttagcatgtcctaatttttaaatgtccctcagtagtcatttatctgcagagcaagtaaatacaaattttaaaaaaattaacagttatatacgtgcttattgtaaacagtcaagtaatacagaggaatataaaacagagtgaatcatcttctccctgtccaacctcacccttttgcagcagccaacattaacaatttggtacatatcctttctcaactttctcaatgctcatacaaatgcatggatgttcatgttcacataaaaatggtgttttattcctcccccaaatggtgcagatgcaaatatgatgcagtaacttgatttttgcattcaacaatatacaatgaaaattcctcctagtcaatacatgtcaatccaattcattattttgtcaacctaaggtagtcataagggtcagaatccaatttaaggagaggttatttaagtgcatattgtgagggtggccaactcaaacatgccaactccaaaggaatggagtcagcgttctaaagtagggaaattaaggtttcatttatgtagtcagggacagggaagtttttagcatatttcatttttcagacagggttggcacattgttacagcaatttgattggtttataggcagcgtttctttttggaaaagttacatttaacattcattacagagggcatagtagtcatgggttttctgtcatgtggtcttagcaaagcaaggtaccaaagaggaagtcaatctatagcaagggtcattaagaaggcaggagatttttgtcctggacatttaattatctctagccattgtagagaacgagaaaaataagaaagtgagttaatgtataatctgagaaacagaaattataaccatatgtgactcagatcacagtcacatctttctcaagacttaaagtgctttgggggtcgcaacaacttttgcattatatttattttcacaaattttaataactgaaaaatagtatacagtgtgggtatattatacttgaatactggtgccctactgatggacgtttaggtttttgtagttttctaccactaccaacaatgatttatactctctccttaggtttgcacctttttttctgtaagattgattctcaaaagtgggatggcagtgtcaaaggctctcccaatcaggtgtcacagtgcaaaagccaacaatgtgtggttaaaggatccattttttcacaatcttgccaacacaggctcttatcccattttggcttctttgcaaatatcttagatgaaaaacagtatctctgtgattctaatttgtgctttccctattgctagtgaggataagtgtcttttcatatttcatctcaccattgcattttcttgtctgtgacttgagtgaaacttttctaattcttgcatattttattcttgctcaacatgtcacgactcagaaacacatatttccatctcctttagcatttattttgctactcagatttcagaaggaaaaaggatttttttcctgggcattgtcagtagtagctatttggaatgctaaagatttgataagagacattgaagaaatgtgaatgttactgaaccgatttgcttaaagtaaagggaagactgtctatacgtctgaccaatgctttttgaatgttcaggcccctgaatctggctgcagtcccagtaggcatgggtccaggcgtgatgtgtttgtggttgcatcatggcatcgctgtctaaccctcgcctttgcattgaagttgtgcaaagattagagaactgtaaaaatctcaggcctgtctgaggaagtctttcttactatctatccctttctttaaacatgccttgaaaaaaaaagctacattttgtcctgctttgtgttcatagtgaatatctttcattgtcaagaaaattttttcctgaactagctctgaaagatgactcagcactttataagatcagtgagcctttaaggaatgacctaagatggaatgtatcctgtccagtgaagctcaaggcatgcacaggtcgtgttcacctcactccctcaggagttgaaggagataagaaactggtcccacagccctcaactctagcttgggtgcctcgcagctactcagctaaccaaagaaatgagtggaaaatcagttctctggtctatttttgatggtgtgagaagaaggaggatgaggaggagaaggagaagaagaagagattacttctcattttaattgaaatgagtgactttttattaatgagcttgaattcagaataatttattaccctggagttttcttataatataataagtgagactgttttcctttttgcttagggcaaaaaatgtaaggaggctgagtgttacatttggaggtttatcttttttttttttttttgagacggagccttgctcttgtcacccaggctggagtgcagtggcccaatctcagctcactgcaaactctgcctccccggttcaagcaattctcctgcctcagcttcctgagtagctgggattacaggcacccaccaccacacctggctaatttttgtacttttagtagagatggggtttcaccatgttggccaggctggtttcaaactcctgacctcaggtgatccacccaccttggcttctcagtggaggtttatcttgtcaggtttggcttccttttcccagttccatgaaatgtgaatttgaatatgtgtttgtgtggtcagggagagtgttgggaaatgagggtgggatacagagagaaggatgatttaaaggtttagatggtctggttatttttagtttttctattcccatttctgcaatagtttttatttttcctcatacactatgggagtttgttcacagaaggaagttcctggagcctatccatcaggaacattaactatatttttgtttgtttttttgcataactatttgtttagtttttccttcccaaatttgtggctgctgtgttcttgtgactttttgtcgggggtgtttttttcttgcttgcagtgttacccacaatgcatctattttgtgtgtattaaacagtccctttcaagagtacaaataatggtttgaaataggaagagtatcccaaatgctttaatcttatatttgaaatgtaggaaattggaggagctgaggatatttgtgacacatattttacatcttctcattgaaagtagagctgttgtttgtctgcatggttttgagtttggtcactgaaatgctaatgacacagcagaaacccttggtgtgtgcataaggccacatgacctcaggtcaggaataaaagcttagggctgagcagctcactctttggttgagaatccagttggctcccctggagtgaagttctacacagaccctggaggaaccaccccatctgtaaggaacctaagtttctgtatttctggctttcattgtagaaaacctgatgtcttctatacttgttcccttgacctacttctaaaacagtttataaacaatttcaataatattcacagtcaagtagagctgtcttttactgatatattctaaacaacataaattaaggtggagcttagaacatataacacaactatgtcctaatgacatgaggagacacctttctcctgcaaatagtcccagatatacatcagttttcaacttgtcaggatggcggataagattctgctgtaggtgtctttaattaccaagtggaactaacattctagtgttacctgcaatgtaatgaagagcctgattcatcttgatctttttcactgtacttacttatcgttttcctgagaaagtgtggctttagcatttgttttacctgagcatataaaggtataaactcaagcagaacattgatagaatgaaagctagaccctggcttaatgtagtccttgaaggaacaagatgcattaacaaaaatggagtgatggttctagtagagctggtatactgatgcgtgctgattgttacttctctagcacatgttatttgctacccttgttaatggtcattgcattggttgcaagtcttggttattttatattcaacactttaagaagaaatgtgcttccctggctagttatcagattttttatttttatttttttttcgacggagtctcactctgtcgcccaggctggagtgcagtggggcgatctcggctcactgcaagctccgcctcctgggttcacgccattctcctgcctcagcctccctagtagctgggactacaggcgcccgccgtcacgcccgggtaactttttgtatttttaatagagacggggtttcaccgtgttagccaggatggtctcgatctcctgacctcgtg

SEQ ID NO: 3760 - DNA, 6000 bp, Homo sapiens
aagaagccttcgaatcaaacatgaatggtgacagtgaagaagaaagagaaatgtcatcacatcaataaacataggctaagtgagtaaaggaagaaacgtgtgtacatttcctacaataaggttgttcccctcccaatcttgttattaaatccatagtgtgtcttacaaacatggactctcagaatcatagaaataccacagctctttctccagcctgctaaagtgcttggaatttccaccattaagctctaggaagttctgtaagaacattttatcaagaaatataacacagtaacacatcacaatctgtttgaaaaatgagcatgatttatcttaccagccagtcccgggaaacaggtctctgaaagaatggaagcctttcaaattctttttttatggagatggctggcagccaaaggagcaggattatagagaccccaaactagactgaagggattgagggacaaatgagaaaggggaatgtcaaggcaaattttcacaatggcttgcactattccaagtaacaggaactaatttatctcagaaacaccgggcttactgctaaaaccaacactgctttctagctcgttcctaataacacccatttctgggctttctaacatcctatttggtcattaatagcagccttcacagaaacataaatgaaactaagaattgaatatttatatttatgatgtaaaataaaattactttcccaagtgtttcagccaagtgttgacaggaaataaaacagaattcacagggatagtggattttctgacaagtttgagatgtcagcatcgcacgctttcaggcaaagtgcaacagaaggaactgtacttgtcattacaccaactgcctccttcccagtggagggtctttgatcctggtactatgactcactgggtcactaaggacttcagttgtccctccaccatggtgggtcttgggtttctccattcagtccagataacacatgtaaaggatctgaggtccctagataagaagcaacattcagtagaatttggcattcataggatgatgaaatttatgacatcattatcccagttctcacggttataatccacagaaagcttctctttattctcagaactagcccttgtagtggccttgaatgtgcaaacgttaccctttagtaatgtttgaggcagaatttgaaaatctgaaacatgattcaaagctaccctacaataactaagctgccatagttacctaaggctgcttcccaatatgttttctatgaatctgcctttccaatagagcacagtgcagggaaaaggggagggggcaattgtacaaaagacacaaaaggtccagttttagtttggcccatgactgccatgccctggaattctgtacagtctcagaaagagagtgtcactgattattaaaaatacataatttcttcttttttatttttttaatttttagaaacatgggtcttactatgttgcccaggatagactcaaactcccggactcaaaggacccttccctctcagcctcccgagtagctgggactgcagacgcatgctaattaacaatcaacaaccaggggccaggcgcggtggctcacgcctgtaatcccagcactttgggaggccaaggcgggtggatcacgaggtcaggagaatcgagaccatcctggctaacacggcgaaaccccgtctctactaaaaatacaaaaaattagccgggcgtagtggcgggcgcctgtagtcccagctactcgggaggctgaggcaggagaatggcgtgaacccgggaggcggagcttgcagtgagctgagatcgcgccactgcactccagcctgggcgacagagcaagacgacgtctcaaaaaaaaaaaaaagaatcaacaaccaatcaactgttgctgattcttgattaagaaaggctcatgaaatatgtttgagctcagcagggtctcctctcacttgtcacacgtggtgctctctttcatcaggttcttcctgctccccccatctgggcaagcacatcttttttactgcatggtacagggatacaggctgcaagcacagtctcacgggaaccgtttaattccaagaggtcatgtgtgctcattttacatagttcatgacccataaaccccagcattggtgtcaaaatggcacgtaacttaggaactctccaaaaatatttcacataatcagaattcctttttcatctaataaggagacatattttttctcctaagtgtctactaaatgttaataaatattctcttctttaaagagttctgtccatcttgacaaggcctatagctcaaattaaatctccttcaaggcttttcagcattctatatctctttggtttcaacttattcaacaaatctccccaaattgtatttctcctttttttcataagaaggcattccatctatactctctccttctcttcttttctttccttctgattcaccaagaaaattgtcattggtcttgtccatgtgttacataatagaaggggaaaaggcaagggtacagcccaacacagcgctgatttagaaggtggaaaggacagtaaagaccgcctggtggtgggagtggcaattcacaagcccagcagtagaatcatggaaagtggagttcgaacataatccagggctatagaccactcctgcatctgactgctattaccttgtcacaaatcctggcaggcaagatgacaaagcagttacatcaggacagttggcagtggcaggtatgaacgtggcccctcaggcttgtcactcctctttactgcactcccagttcatgacaccagacagcaagacatgagccagataggggcagtggaagctgcaggaggattgaagtcatggagccagagatgagaggaaacaggccaactctgtttacaaaggagcaccagcaggagagtggtgtgaggattaacattccatgcagggtctttcagatacatgatcttcttctgccagctcaactgaaacccaggaggtttcctgaaggtgaaaccaagacccttctacctctgaagccgcattctgtctaaggtccgtgtttggctgttttgagaggctgggagacaggacaccaaaagagtacctgtctcacaggatctttcctgagaggaatggtctagtaagactggtcattatgggctttggagtaacacaggcttaatgccactggcgactctgccccttttggttgtggaaactgggcaaatgcctcaagcttcttaaccttcatataaaaagcatatataagcatatagcaagtacttgataaatgtcattttagaccctgtcatttctgctagccctggactccagcaaggtccatttacaatggatagctgactatccattgtttgaatgttgatagcacatttgtgaacaagaagagaggacaaataacaagaggtttggaactggaagaaattccagccatcggttttaaaagacgaggaccagtcttcagagaggccactagtgacactctgctccaaacttctttttgccaaaaaagtgccaccctccatccagcccccacccccatctctgcaagtccttactggcgagaggaggatacttttctaattaaaaacctgtgatatatggcctgacaagtattcttaaatgtaattaaggggaccatagtacagaatatttccatccggttctagtttagccaatctagtaaatgatccaaagggtcccgtgcttagagggcagtaagacagtaaaaacgccctaagactcctccctgcacagcacctgcacccccactgcccagggggctgcatccatctccacatgactcaccctccctgtgcaacgcatgggggtagggagggaagcgccagtattatcagccatcagcaccctggggtgaactgattatcaggacaactaaaaacacacctaataaagccttggagacacatggcaagcaccgtgatggactagaagcgatttctaagctgaaatgctgctttgaatgcaatgtcagctggatgcttggtgagcagaaatagacaaggggaaatggagcaagcgcggcataggggtgagtgttgttctgattcctaagtttacctaagactggggccacggggtcgggtgtcccctgggacctacgtctcatgcagcctggggtccagagctggcaggaacaatggagatggggaccaaaggctgtcaccgctgctttttctcgaaatgcccgcccgggtcctgtctggggctcccgcctacgcgctcatcacgtgcacagcccaaacttttcagagccggcccgaggcctgcgggcccgggcgccagggtggtttttagggttttctttctttcttatttcccttcttcttctccacagttgatgattttctgcagaaaaacaactgcgaaaaagaacctatttcatttccagttcccatcaccgcgatttccacatggatgtgacgtgaccccagcttccgaaatgcccaggtgactcacgcggggacaccccggggcggggcgagggagtttctccgggcgcctgcagggaccgggcggggcggggcagcggggcggggcagggaaagggggcggggcggggcccgcaggcccggtcgggcggaggccgcgcgcgcccctcgccccctgcgccctctggcggccggctggacgcacttcgcagcccgacccagagagtcacgtgactttggaaagtcccgtggaaatccccgggcctacaacccgcatacaactgaaacggggcaaagcagactgcgcagtctgcagtcttcgtggcgggccaagcgagcttggagcccgcgggggcggagcggtgagagcggccgccaagagagatcacacccccagccgaccctgccagcgagcgagcccgaccccaggcgtccatggagcgtcgcctccgcccggtccctgccccgacccccgcctgcggcgcgctcctgccttgaccaggacttgggactttgcgaaaggatcgcggggcccggagaggtaaccgccgcgcctcccggagaggtaaccgccgcgcctcccggagaggtaaccgccgcgcctccccgtgccgtctgcctcgggctcaccgcagtcaagggctgcgggtgcatgttgggcagcgacccccgggctggcaccgtctacctggcgttggttttgcagcgctcctggactgggagtttgttggacgtttctgtctgggttttgaagtgctgggagttgaggtcactgctgcagaggttggagtgacagccctggatacctccagccagctgttcctttcagataatgcacggaacttaagctgcagctgactggtgaagaggcgcccctcgggccctccgatcgggtggtcgttggcgctttgctcctttcgtgtcttttttggagccaagcgttgcatgctcatggccacgtagaccttgcagaagcgctgcggctttttcccaaattgtgcaggaccagcccgacggggcgtagggtaccgcagtggccgccagcccggcggaggtggggggcttcagtcccagagacagcttcccagacgctcacgggtccttgcagggggctggggtcctggcgcggggttcagcttttccagtagcagcagtgtaagagaagtatgcatgtagacgtgggtcgctggcccctgctccagcccctaccccacggttagactgtctttgtcagctggagtcgtcccacatcctgccacctggcctctcagaaaagcagtggcattaagtaaggaaggagcttaactctttttgagcccgctttgttttcggttctcctcgcctcagatcttcttgccttggaaagccagtctggtcaagtgtctcagggtagcattttggcagaaccattgttaattaaagggacttctggaccgcaaccttaatgtaccagattattgagcagccaatgaatgcttcattctcattgtttaaggtgctgctttgatttttttttcaattcttt

SEQ ID NO: 3761 - DNA, 6000 bp, Homo sapiens
ctaaatatcttttcttccttttttagaatcttaaggagttttcttgaaagtgaagaaacaaaaggactctgagtctaaaaatgatttcccagaaaatgttaccaaaatgcacctgcttttgtagttttatttgtagtgtggctccttgttgatttaaatgacatgtttacaaaataagtgtttcctatttatattccttttttttttctagtggaaatagagcatttcctttcttaaggaaataaagctaaaagtcagttaattctcttaataaggtgttcctctttctaccacatttttaattcagcagaatctttgtttccaactcccccaaagttgactccatctctttttggtaacaaatgggagatgattaaaaccacaaattgtcaggcacataaaccccgtgatgatgacttcacataattacctacctctaagtatcacttaatttaatgccaagaacaatgcagatagtagctatccccagttttctttctatctatgtttctaagaatcagtgtttcataaatctaggcaagacgttggggtaatgtacaagagcccccagaatcaaaatttaaaaacccatgtccaccaatcactctaagttacccaagtcaaaaaaagccaaagttaatgtacttggcttttgaatgaagttaattaagttagtgttcttatcgtaatccttgtcaacaaggattttctgcccttggacatattatttctattaggatggtttgggactgtcacagatataaggacctgagattcctgctcttatgtagactatgagcatttaattgagcttgtacagtcaacttccttattgtcataattatgcacatccatagagcagaattttgtgcctgcatgaaacagtatgctctgacattcctgttgatgcacatattcttacccaagggaaatgattaaaaaacaaaacagtaaagcttggaataggaaatagctactagtggtaaaggccattggcagaacagcacagacaggaaggaattcagtgactaagaacccctaaaaataatgaaggtgaagtctaaaattcatgctaaaaatctcagctatctgtctatttcaccttgcagggcataggcaatagaacctaggtcagagaggaggaggagacaaaagaagttcttcatgtcttcaacagccattcactggttaacccataaaatgctaccaattcaagaagtgtaagaacatcacaagcattttctaatgacagtgggaaacaaatgtactaccagttttcacaccattctttccttttgaacttaaaggcttttaacatttccattacgggccagagaagggtattttacagatgattagacatttgcaagaattagaaagaaatcacctaatggaggtatggtgtttacaaatgcattctccaagcctcaatgtgctctgcaatatacacaatcagaaaatatccttaataaatagattcacaaaacaagtctgctattatcacataccccgaatagagattctatataaaggtctcaatactaaatctcaagattgatttgagtttgggcttgtcctattaaagcttcatgaatggggatccagcaggcgggagctatcacccaggcaaaagaaacacaacagaacaagtcttaccgttcgttttcagcgccacaagcttccggacttctcgacaccagttgagtttcttctggctttccagggtggcctggatgtttctgtcgatgagggctttgtggatgatctcccgaaactgaggacaaaactggcaagttctgaacatttccagtgtgtatcggtgcatggttttaaaatgatgaatgatcccattagtaggtttaaaaatgtcttctggagttctctcccgtatcttcacagctttccgcatattgctcaaatacaaagcctgaggaaggacttgttcagccattgtgctctccaacacctgaaaaggaaaggaaaaaaaaaaagccattctattagcctgactttaatacgactcctctatagctgcctgcaggaaaccccagtgtttgatcttgtcattaccctgatctgtaggcaaaagatcttagcacctctactcccgggatactagctggccccagagattaactcacactggactgttttaagttacatcactttaaaagattagcctaaacaagagaaggaaggcagagagtgggtactgaggaggaggggaataacccgtgttttcagtaatgtttgtcagggagccaaccctgtctgtcagcaacaggtactgctcctcaaaaccaacttaagctcccgtttcattctgaggccaccctgaacagcactggatttggggagtactggatgccagttaagggctcaaagtagccctgacaagtctgtagctcctcccctcagaccaccaccaagcactcctgctcttgggcaaactcttgagttatcactccctccctatgctggaaggacagtaaaatactttatgaaaaatcttgcaattttatgctgtcacttaggctgctggttggtgtttcctctttagccccaaagagaagtatttataaagtgtttaatcatgaagtttattctgatgtttataaagagttaaaaccgaatgttttctaatcaataaaaaagtccatttccagcaagatgctttgcaattttaagagcagtcagcattccttcagaacctccgcaccggacttcatatcagaataagaaacagactaacaataggctaggcatggtggctcatgcctttaatcctggcactttgggaggtcgagggaggaggatcacttaagctcaggagtttgagactagcctgggcaacacggtgagacctaggtctctacgaaaacaaaaaatgaaaaaccgcaaaataataatagaacaataaattctatacttctaagaacagatattggagctcaatcattttaactcaactgccaatgaaattttatcatcaccctccaggtaccaacacagaggcaagtctgcctggcttttcaccctgaaatctttaagcataatcaactagtagaaggaatgaaaatctagaagtagacaaggaaagaagtttccaccaggaggccactctggcaaatgaaggaggaaaggtggcaaagaccagcatctacaacccatgccaacagcgcaggatgatgcaaattaacatgatgtaggatctctccagtgtggaacactgtaaaaagccagctgtgatttactagcccttagtagggtgtctggccacacttcctaatttccaagaagatgaagaagttttcagagcacaaagacattccctaggaaatttcacagtgattgttaattccattcctgcaacatcttatttgccagggcaactttccagttaataaaaatgttaaacctatggaagagggaggagaagaaacctagattttagggtagctacttctgtgtgggtctagactctcaacaccattgataaggtgttgagataattcttgtggcccactcaaaggagagaggttggactagatgacccatggtttctcctgaggagttttctggtgatagttttagattgggattcttaatctgattgctgggaaaggcatagtgggagtcattctctggatcagatggtgctctcttttgatgtcagacgtcctctacaggtggaattgggcaaaatcatagcaggataaaaataacacatatacctttcctttgtggcacagcaaaagtctctttcacaatatcatctatccgtccgtccgtccgtccgtccatccatccatccatccatccatccatccatccatccatctatccatccatccacccatccacccaacaagcactacctgaccacctactgaaggccaatcaccatgcttgatgatgggactaaaagtcaaagatgaccttattcccttccctgaaattacactaccaccttagtctgcagctaaggcaatggagttacaggtactgctcagatcccacagccattcaggggcaaagttttgcctaggagccaggtctttcaatacctgccccttgcaatcccacaacaccaaacctgtggctacagtgcctgccacaatcagatggaaagagatgggcagtaggaagattttaaacaaatgaggtgttatctctttttgcttgcctgactcttttatttttctcttctgaatctaaagatttttcaccaaagatctaaaatagtgagagctgtaaaccataggcaagacatgcaaatgtcaatatcggatacgccagtgtgatctcattggtagggttagccttgcacagcctgtaaaactgcctccttagaaatcaaaacccactgcccagatttccaggtcttggaccactctacgcttaagattaaagaacaaatgtttcagatacgttataagtggcaaacaatgcaatattacccttaacttttttttttttaacatttgttacctcactgtcttatttaaaggtagtttctcaacttttgtcactaggattccacagaacttctccgttactcaaactcttctcccccttgttttatttttccactctgggcagacatttttgtctgcattgtggaaattgatgaattatttatcaacaaatacctcatccaaatttggggatgtgcctctccaaaaaatcaaaaatagtacaaagaattgaaaaaaaaatcaaagcagcaccttaaacaatgagaatgaagcattcattggctgctcaataatctggtacattaaggttgcggtccagaagtccctttaattaacaatggttctgccaaaatgctaccctgagacacttgaccagactggctttccaaggcaagaagatctgaggcgaggagaaccgaaaacaaagcgggctcaaaaagagttaagctccttccttacttaatgccactgcttttctgagaggccaggtggcaggatgtgggacgactccagctgacaaagacagtctaaccgtggggtaggggctggagcaggggccagcgacccacgtctacatgcatacttctcttacactgctgctactggaaaagctgaaccccgcgccaggaccccagccccctgcaaggacccgtgagcgtctgggaagctgtctctgggactgaagccccccacctccgccgggctggcggccactgcggtaccctacgccccgtcgggctggtcctgcacaatttgggaaaaagccgcagcgcttctgcaaggtctacgtggccatgagcatgcaacgcttggctccaaaaaagacacgaaaggagcaaagcgccaacgaccacccgatcggagggcccgaggggcgcctcttcaccagtcagctgcagcttaagttccgtgcattatctgaaaggaacagctggctggaggtatccagggctgtcactccaacctctgcagcagtgacctcaactcccagcacttcaaaacccagacagaaacgtccaacaaactcccagtccaggagcgctgcaaaaccaacgccaggtagacggtgccagcccgggggtcgctgcccaacatgcacccgcagcccttgactgcggtgagcccgaggcagacggcacggggaggcgcggcggttacctctccgggaggcgcggcggttacctctccgggaggcgcggcggttacctctccgggccccgcgatcctttcgcaaagtcccaagtcctggtcaaggcaggagcgcgccgcaggcgggggtcggggcagggaccgggcggaggcgacgctccatggacgcctggggtcgggctcgctcgctggcagggtcggctgggggtgtgatctctcttggcggccgctctcaccgctccgcccccgcgggctccaagctcgcttggcccgccacgaagactgcagactgcgcagtctgctttgccccgtttcagttgtatgcgggttgtaggcccggggatttccacgggactttccaaagtcacgtgac

SEQ ID NO: 3762 - DNA, 6000 bp, Homo sapiens
taccttttatctagttactaaggcatcctacctactcagtatgtacaactttagttgtaatactaaagtatcatggatgctgttcaatataaattccagcttataaaagttattatagttggtccttgaccaacccaggttttagctgcatgggtccatttatatttggatttttttcaatcaaactcagattaaaaaatacagtactcggatcaaaaatacagcattcacgggatgcgaaacctgagtatgcaaagggcagacttttcatacaccagggttcaaattcctatgccaggattttggcaaggatcatcggtatgtggttctacaacctgatactttccctaggtttacttgcttactctcttcttaaagacaggtatccatattcttattccactaaaataaaattaacagtaagcttagcaaaaaatgagatgataatctgtttttaaagggcattaaaaggactgagaaacacatgaagaaagttctgataaccttggtattctgaaacaggttgtcaactttgcaaatacaaaagtagcaaaatctctgcacctcagtttccccatctcaaaaagaattaccacaaccagggcccaaatactgtgctatttctgaagacagacattaatctttagcatggtaactggcacaaaatgggcatttaattaatagtttcttctccccatcaaaaacacagactcagtgtttcttgaaaaacctgaagagataatccacaggttgaggataataatcatactgtcctcccgactgtttctaacacttactgcagaattctttggcatctccaatatttaggattctaaacagaagttacttaaattttctttttttcctctctttttttgagacagagtctcactctgtcgcccaggctggagtgcagtgactcgatcacagctcactgcagcctccatctcttgggctcaactgatcctcttgcctcagcctcctttgtagctgggatcacaggcatgaaccaccacgcccagctaatttgttttttttttcttggtagtagagatgaggtcttgctatgttgcccaggctggtcttgaactcctgggctcaggaatcctcctgcttgggcctccaaaagtgctgggactacagttgtgagccaccatgcccagcctgcaattattgaaatttcttttctttttttcttttttttgagacgtagtctctctctgttgcccaggctggagtgcacgggcatgatctgggctcactgcaacctccgcctcccgggttcaagcgattctactgcctcagcctcccaaggagctggaactacaggcacgcaccaccatgcccagctaatttttgtatttcttttttttttctagtagagacagcgtttcactatgttggccaggctggtctccaactcctgacattggcttatgttctttttaaaaagtttgatggtgagtagattttaattaaatggtgctttttattgaaattttctttaaaaataaaactctgtatttgtaatgtaagtcaggagtaaatacagattttggataaatgtctacacttcctaagtcaactctcagagtcacttttaagatcactctagctgtctggggtatccaacttgggaaattcagagcctcagtatttagaaagaaaatccttcctcaactttaatctgatgaaaagtaaatctttccttgaaagtcgatgatatgccacaaagttaaatgcgccatctggcaaaaggcaaattagaacaggttcaaaatttacaactgtctacaacattcaactatttggtcaaaatagaacctaattggcaattttgactttcacaccacacgaatgtaccgagaagtttggtattccccagggcaattttttttttagcgcaaatgacaaacacaataacctaaatttaaagtcaattctagattcataaaggcaatgaatattctaggttctcagaacaatctattctcgtatcagaaaaacagaatgaccataacatcatttggagtcaattaaagttgaatcctgaaggaaaataataaagaaaatatgttcagttcttatgaatcacacatttaataacagcacttttcaaagtcaaagttagttcccattttccaggatgaaaatgactgttagtcattaggtgatcagctattaggtgattaaaacagctattaattaataaattgggggtaagggtctcaaatttggtgcccctcaaaagggtggtaacatgattgactagttttaaaattacataaaagtttcagttatttatgtagataattcagagataatatatctcagaaaatcaggaccaccatctactcttgatgccttaacacagaaaaacagcttagtatggagttcagtctagactggttaggtgcctagcatcccagatcccagtaccttcctggctcttagcatcataaagttaggtaactcagttccctctgaacggaggcaagcgccagccaaaacaacttcagtaagaagacacggtaccttggcgaacaaatcatagctgaatgtaagacaccaatctgcagacactgtagtagcaaggtactgatgaggaactgaaaggccatcttttccttatcctctatctgccatgtgtgattccaagcaagtcttttaactcttgcagtttccaagtcagcaaaaagataattttgcctgtctcacaaagtgctgcaaatattaatgctttcagcacaataaaaatgctatagatttttcaaataaaatatgaacataatatgaacataaaaggcaacttcaatgtgcacttagaaaagattaaattctattaactacatcttcaaaggcagaaaatatttacagcaatatattttagtcagatggaacatcttgttatacacaatacacaatgaagtttactattgtggagatactgaaaagtttttctgtgttaagcttagtaactacaagaagcaaaatatttagaggcagaaaagttggagacaactaaaaaaattaaaaacaagaataaaaccaaaatactatcttcagtcttcttttgctgaaggacctactaactaacgtacaattttgaggagcaagaagcaaatacataatgatcaaaactgctaaacaatatattcaaggggattcaatactacatacaagaccataagagaccttgaacgctttaatgtactgtacaaattgtgacaatgctcatctccacatcacagggctttttacacattgtgtttcatctctaccagcttatttctgacaaacaatacacaaaaatattttcagcaaacatgactcaacgttgaattggaaaagctagacataaaagagccatgtaaaaataagcagtgcctgggacacactattattattacttttatcctttaggagttagcaattctggtagcttgtccaaattctgccaatgaaaaagtactaaaaatactgaacttttaaaccatgtgtctgcttaagataccttaacatataaaagcactgtaagaaacacacctacccaaacccttaaaatgtaacctcaaccttatcacaagccagctttgcggactgcaatctttccccgacttggctaatcagatgctacttgaatgaattaaaatgtatccatcttgaaaagatttttcgctcatagttttaaattacggttttaaatgtccacaacatgtttatctatcgtagaaaacttaatggtcaaaattttaaaatccaaaaaacgagaacttgcgatggatctatgacgtccacttatcttccgaagcaatggaattaactaaaactagataaaataggcacaaatacaacttccaattgtaacatactcatagaagtatttccctaccagactaaataatagtttttttgttttgttttgttttttttacataatcacagttatgctagtccttgataatgttaagctaatcctttgggatcaaacaaccaagtgactttcttatcaaaacaagaactcgggcttttccattacgtgtacacagacttatgaaaaacggtgaaaaaaaaatctagtaactgtctcacagggatccaaggtaagacttggatttcacaaaaatctgcaataattcagtttctttcctcagaatgcttatactcatttaaaaatggaagtctacaagagaacgtagtaacatcctactgcgtgacatgaaatgtagggaacgaatgtttctttttttccttgctgaactcgttagtgccgccaggtcctcaggagaggcccaagggaggtgaagggggcgaccccgaggcgaggaaaaaacgagcgccgccgctcagcccggggagggcatcctccggcctccgtgagtggccggtctctccggccgccagagcacccctctcaacccgggccttggggacggaggacagagataaaatggcctcgaagcggcggaagtgttccccgcaggcgggaaggtagagcggctcacgagagaccggtgccgcaccaggcccgtgtggcctttcgggccctgcccgccccttacccgccgggggcggctgcgcatcagccctcaggccccggaggtcccccgcgtccgctcccgccagccggcccgcgcctacctctccaggcagaagccgcgccggcgccaccggtcgcataggccgaggccgcgctgcttgccctgccgcccgggccccccgggccaccgcgcagccggacagctctgccgccggccccgccgcgctcctagtcccgccgcaacccctgcgctcccctttatttgtgggtctcgctgccacaaaatggcgctgagggaggaaaccaggccccgccgcccggccccgccccgccgcacggctccgctccgccctgccccgccccacagccggtccgaacgcgccgcaggccagcgccactgcctcccgcctcccgcctcccgcctcccgccagcctccccgctccgccatgttcgccttctggcccactcacaggagagtcgcctttcaggcgtggccgcagtcactcgcccgccgccgaaccccgccaggagaggaaaggtgaagggagggaggccgtcggcctagcccgatcggggcctcgaggcacaatggagcagctgctccccggtaacactccccgtcctttcccaggagcctggcgcgagctccgcgggccccggagctcagcaagctcagtaagggaagcggccgaggggaggggcgggccagcgaggtcggaggtcagccccagggcatcacgggaagggaaggtggaagtactcgccggggccacctgcggctgcggggctgcctcgtgcggagggatctgggcgaaggcggcgcgtgattggccgctctgtgttcgtgacgctcatccgtgatgcttccgcgtgtcggaggaccaggtgccacctcaagagagaggccgtgggcggcgagccgcgggcgtttactcttagcagaagctcacctgtaagttttgagaacttagaaaccgatgccttccctctcatcagtcgtgaggcgcagtctcctggccgctgggttcgttcctccttgacatctctggagacgcatcgaggagctattgttctctggcgtcggaggttgcgctgtgtccgcggcgttgagggccccttgctaactggaacacggggaaggcggccctgtgaggtttagtgaactcaatcaaagaggtcctgcaagtggagtagactccctgaagtaagactgccatctggaccgccgagtaatggcggtgttacctggagaacgtgaaacagtctctaaacacttactagaagagcacgtaattcttttgattggtctgtccttagccggctttatcaaacctgttcatccccaaaggagtgtcttgtagtaaggtgatttattaggataagattaaagtacattccagatggtcgtagtatatttccagtgaatcagatcggtctggagaaaatctttgcaactcgt

SEQ ID NO: 3763 - DNA, 6000 bp, Homo sapiens
ccattacctacaacaactagcccagtaaaccaaccacttatttaccataagtgtactctcagcctgaaagccaaacctgctatcaaccagacttgtaggaagtcagactgctatctctggtagcaatccaggaagctaaataataacttctatgacaatcagctcaaaatggccaggacttgattaaaacttgacagcttccctactttttgtcctcacttctagcttatgcccatccagagaaagccaaatatgctcctttaaccaagaccataggatgccaacttgtagttagcttccagcttccccatgccaacagcttccaatcaggcatacctgtgaaacctttccttttgtccactgtaaagctttcccactcctctgcatgcctttgaacctctgctaaaacataagggatggtggctgactcccttgctacagcaagttctcaatcgactttgcttttctcatttggtttgcaataaaatgcattctttacagtgacacaatttgatgaattttgacaaacgtatacattcccactaaccatgacacagaacatttccatcacccccaaaagttctcccattttcctttccagtcaattccttctctcttcccctcctaaccaaccactgatctgctatctaccactatggattagtgttgtttgttctcctaactacagttggcatagcctcattggtctaagcacttcctctgcattcaggcacaacgaaatacctggctcatcttgtacctttcccgtcccagagctggaatcagccagttctccaaaggagctctggatctttttagtgggaaatggaatttagaaaccaagatctcagtgtcagatgtgctcactgttactgtagggtgcccatgcctatacatcctggttcagccaggactgttccagttttaatctgaaagtccagcatccagagaaaacccctctgtttgtggcaaactagaacaactggtcaccctagtgcttctaggccctttcagtccacagaactaggacttttttttgcagttgaaacttttttttctttttgatagggtctgttgcccaagctgtagtgcactggtgagatcacagctcattgtaactttaaactcctgggctcatttgggcctctcgcctcagcctcccaagtagctaggactataggcacaggccaccacccctggctattttattattttgtattttgtagagacaagatctcactgtgttgcccaggctggtcttgaactcctaagccactttggcttcccaaagcactgggattacaggtgtgtgccactgcacccagccctccagtttaaactcaatactacagactttttttttctgaacttcttaaaattctttatattagtttccacccccacccccggatgaatgaacgtcttaaaaattgttttaaattttttaaaaaatggagacagggtcttgctatgttgcccaggctggtctcaaactcctggactctagtgatcctcccgctttggcctatcaaagtgctgggattacaggcatcagccacccggcccttttctgaacttctttgatcttgtgtttgtatctcattctctcacacactgcacatctttgtatatagtaacattaaaatacttatgttatcctaccatatacagtacagagttttaaaaccacagtaacaatgttaccattaatcataaatcagtgaagctgaaagctcctgtgcacttttttcatccttagaatacacagttgacccttgaacaacactggtttggactgccagggtccacctatatgtggatttttttcaccccaacacagatgaaaaatacagtggggcgagggacggtggctcacacctataatcccagcattttgggaggctaggtgggaggatcacttgagcccaggagttcaagaccagcctaggcaacacagctctctactgaaaatagaaaaaaattagctagatgtgctggcacatgcctgtggtcccagctactcgggaggctgagatgggaggattgcttgagcccaggaagtcaaggctgtagtgagccatgatcgtaccactgcactccagcctggacgacagagtcagaccctgttctcaaaaaagaaaaaaaaaaagaaaagcaagagaagggaaggaagggaggggggaagagagggagggagggaagaagggagggaagaagagagggagagaaagaaaaaaagaaaagaaaaagaaaggaaagggaaggaaggaagaaaacaaaacagaagtacagtgggatgcaaaacacacctacacaaagaaccaactttccctatgctcagctccgggactttagtatgcagatttctgtatatgctcgcagaaggtcctaaatccaatctcctgcatataaggaaagactacactatcacaacacagatacactactagagtactgtgttcaaaagctcagaggggccagtggtggtggttcattcctgtaatcccagcactttgggaggccaacctgcaggcggatcacctgaggtcaggagttccagaccagcctggccaacatggtgaaatcccatctctattaaaaatacaaaaatcagcaggggatggtggcgcatgcctgtaatcccagctattcaggaggctgagctgagagaatcgcttgaacccaggagacagaggttgcagtgagctgagattgcaccactgcactccagcctgggcaacacagtgagactgtctcaaaaaaaaaaaaaaaaacccaaagaataattattttttctgtgtatcttagttatattagttaacagttaagttcatttgtttcaatttgctttcaaccttaggatttactttgtttccttttttatttacttttttggctatgtaaaactaaaagttcaaagacagagaaatcttgtctccaccccccactctttataggcaactaaaaatgttaagtttccaggatatccttccaattcctccccgaaaataagcatatacacataaatattcatattaaatataaatatatatttttatgtatttaagtaaatacataaaagcatatatgcttatttttgcttttgaatacagtgaatacttactacacttaaatatttaagtgaatacttaatacaacctgagactcattccaaagcaacacacgattatttcctgaatctttttaatggttgcattgtgttctactgtatggatgcaccattcccaatcagttccctattaacggatatttgggttatccctaacttttgctatgacaaatagcactgcaataaccttgtatacctattgtttccatgtgtggagctgcaccttcagaataaggttagggttagaagtataactgcaaggtataagaataaacacaagtaattttgtactccgtggaacttgaaccatttttccactcccaccaggaaaggtaatttcaacgtgtatttccattgtaagtgaggtggagcgactttctatgtttaaagaccattacggtattttttctgagaatcatctgttcatgtccttccccattttctcctttggcttttgcactttttgttttcaatttttgagagctcttgtgatacgagttgcaaagattttctccagaccgatctgattcactggaaatatactacgaccatctggaatgtactttaatcttatcctaataaatcaccttactacaagacactcctttggggatgaacaggtttgataaagccggctaaggacagaccaatcaaaagaattacgtgctcttctagtaagtgtttagagactgtttcacgttctccaggtaacaccgccattactcggcggtccagatggcagtcttacttcagggagtctactccacttgcaggacctctttgattgagttcactaaacctcacagggccgccttccccgtgttccagttagcaaggggccctcaacgccgcggacacagcgcaacctccgacgccagagaacaatagctcctcgatgcgtctccagagatgtcaaggaggaacgaacccagcggccaggagactgcgcctcacgactgatgagagggaaggcatcggtttctaagttctcaaaacttacaggtgagcttctgctaagagtaaacgcccgcggctcgccgcccacggcctctctcttgaggtggcacctggtcctccgacacgcggaagcatcacggatgagcgtcacgaacacagagcggccaatcacgcgccgccttcgcccagatccctccgcacgaggcagccccgcagccgcaggtggccccggcgagtacttccaccttcccttcccgtgatgccctggggctgacctccgacctcgctggcccgcccctcccctcggccgcttcccttactgagcttgctgagctccggggcccgcggagctcgcgccaggctcctgggaaaggacggggagtgttaccggggagcagctgctccattgtgcctcgaggccccgatcgggctaggccgacggcctccctcccttcacctttcctctcctggcggggttcggcggcgggcgagtgactgcggccacgcctgaaaggcgactctcctgtgagtgggccagaaggcgaacatggcggagcggggaggctggcgggaggcgggaggcgggaggcgggaggcagtggcgctggcctgcggcgcgttcggaccggctgtggggcggggcagggcggagcggagccgtgcggcggggcggggccgggcggcggggcctggtttcctccctcagcgccattttgtggcagcgagacccacaaataaaggggagcgcaggggttgcggcgggactaggagcgcggcggggccggcggcagagctgtccggctgcgcggtggcccggggggcccgggcggcagggcaagcagcgcggcctcggcctatgcgaccggtggcgccggcgcggcttctgcctggagaggtaggcgcgggccggctggcgggagcggacgcgggggacctccggggcctgagggctgatgcgcagccgcccccggcgggtaaggggcgggcagggcccgaaaggccacacgggcctggtgcggcaccggtctctcgtgagccgctctaccttcccgcctgcggggaacacttccgccgcttcgaggccattttatctctgtcctccgtccccaaggcccgggttgagaggggtgctctggcggccggagagaccggccactcacggaggccggaggatgccctccccgggctgagcggcggcgctcgttttttcctcgcctcggggtcgcccccttcacctcccttgggcctctcctgaggacctggcggcactaacgagttcagcaaggaaaaaaagaaacattcgttccctacatttcatgtcacgcagtaggatgttactacgttctcttgtagacttccatttttaaatgagtataagcattctgaggaaagaaactgaattattgcagatttttgtgaaatccaagtcttaccttggatccctgtgagacagttactagatttttttttcaccgtttttcataagtctgtgtacacgtaatggaaaagcccgagttcttgttttgataagaaagtcacttggttgtttgatcccaaaggattagcttaacattatcaaggactagcataactgtgattatgtaaaaaaaacaaaacaaaacaaaaaaactattatttagtctggtagggaaatacttctatgagtatgttacaattggaagttgtatttgtgcctattttatctagttttagttaattccattgcttcggaagataagtggacgtcatagatccatcgcaagttctcgttttttggattttaaaattttgaccattaagttttctacgatagataaacatgttgtggacatttaaaaccgtaatttaaaactatgagcgaaaaatcttttcaagatggatacattttaattcattcaagtagcatctgatta

SEQ ID NO: 3764 - DNA, 6000 bp, Homo sapiens
aaggattggccctgagaaggagggtttcttaccctcttgagtgaaaaatagtggaaaggtttgtattaggtacctgtcctttaaaacagagctgctgcatttacccttggtgtttcaaattaagctaagcttagaaaaaataaaatatacatccttaggaatctatttgtgtagatcttttgtttgtccagcatactaactcatccatttgatcttttaataataatgctttatttctttgtctacatgcagtctttgccaagtacatcagtagtcaatttagttagttttgagcgtaaggcataaattagccacgtagttactatattcttaactatatactgtattcttaactatattttattttgttggtaagtaaaatctgtcatttttgttcacctcagtggtatttctgtttttcatttagtcttttgccaatcaactcaaaatagatttaggaataaaactaactttgaaaacactttactcagtgttctcttccctagaacatggaatttattctagtctgattcacctctcttttcatgaatgaaagtgttgactattgggtctttgtaaagctaaatagtaactgagtctcagtcagtgctgtagactgttttaatcagtcctgtcagtacatggagtgcactgtaagtcatggtttattctcgctctgttatcttagcagctggcttcacattgactatgcagttgtactagatttttgctcagtgaaacaaatatattcccaaaccacttagtatatttgttccttttactaaatttatattagaaaattttaactgtaatcctatttaagccttagtatggagttagatcttgggccagatctactttgagtatgaagaaaatgatgaatttaatgctaataactatatttcatattttagaaatgtatttttagtgtgctagtaaatagcacaactgaagtcgaaattgaaggtttcatatgtaagtagaagggttctggtatggtggaaaaagctctagactgggaatcagaaggccggagaactagaattgtagtcccgctatggcactgaactaaacagttgggttatttaatctcaaaataagcagtttggattaggtgagttactttccagctttacaattctatgattcggatctattcagaaggggaaaaatatgaattatactttattttggcttaaggtcctatagagttttgcttttataaagctgtaacagcaactcttgtagctataagtactgtatattttttcctttagaaattcaaatgtgtattttaagttataatcttgcacctgatgtatttttaggggactttacatagaataatttccacaggtaaaaaattaagcaaaccaaagacttcattaactcttaggtaattaatattttaaactttgcttttttccactgggttgtcagcatttttagtaaatataatgttgattttcgtttgttttttggtaatgtttggattgtaaagtaaaatgtatgtagccactttaagtcccagatttggagatgtaatcaaatggcctcaattcctaagtgagtaaccttaaatagttatttttttaattgacaaataagttttttacatattcaaggactactacatagtgatgtttcaatacatataatgtatagtgatcagatcggggtaattagcatattcatcaaatagtttttagtctgtactttttctagaaagttttaagatttttctagagaatttcaggatcaaagaggggaggagcttaatgaaagagttggtaaatcaagtgaatggagggagttttccccaccttcttatgtatgtttcctttgatttggtcgtaattgtttcttttgctttgcacagactcaaatccagtacctcaagcaagtccagcagccgagcgttgcccaactgagatcaacaatggtagacccagcgatcaacttgtttttcctaaaaatgaaaggtgaactggaacagactaaagacaaactggaacaagcccaaaatgaactgagtgcctggaagtttacgcctgataggtaaacaaatcatactccccagtcaagacttccctgacagtcccactacgagaaagctgtggtgggacagccaagtactcgtttccacaccaagactcagactttttgagccaaaaaaaagccacattcttacactgtccagcttgtaatggttaatgtaaaacttaccagatgaaccttgtgtttcagcttttttcttttccccttccccttgcttcagaggcctgatggcgtcggactattccgaagaagtggccacctccgaaaaattccccttctagaacatgtagacacttgagaaatgtttctgtttgaagaaaatagagggagaaacagaagtcttaagtctgtggcacactgtgtcttcagacagtttgaaggaatgaaaacctagagattttaaatcatgaattgaacatgtaaaattccagtaaaatgtaaaaacggaatatgcatcgctcttaaccttgagcatagtgacttagagacactgtgtatcagttttgccaataagactgtggacttcatgattgttgttgaacttctgggtcaaaactcaaatgaggtgaattttgcctttaaagggtttatttgctgagaaccaactttcaatagtcatgagagaatcaaataatagatgtccgtacaagtagcgcatatatttaaccatttagtttggggctctatattacttgcttgagccttaatcaatgtggttttattcaatggtttgttctttgaatggttgcaaaaactgtagataatcttactgaggactgtacaaacatgaaggtgtggtatcaaacttcaggttgaaactgtttgaagcattataaacattcatttcacaactagattgtataaggatattagctgtgatgagactcactgcattattttttttagtgaattttatgaaatccccgttccattcaacaggcacatgtttaaaagagctttgtcgttggtgttaatgggggaatgtgttccttcattgtatttgggccttttgtattgcactcttgatattaaattaaatgtgccttgaaatagttggtttttttttttttttaagttcaaagaatattatgatgattttgttgtactctttaacattttaatttggggcggggagggcctgttgagagcagattcattttggaaatactgttgctgtgctcttcaaagtgaaggaaaaggcgctgtgcctcatttttaaaagacctacataaaagacaaggagacttgacacttgttacttttatgacactttgtcccagggtattgcagtagaaagtaatgtgggacagcttcacagggtgtctgccagaagataatgtgttggaactgtgggctggcctaagtaagacattttgtgaattgaaaaaaggtatagtgatcatttctagcaaattcatttaatcatttagataaatgaggcattattttcttcatgcttccatccaatcctggaggtgaattttttccgtcagatcattctataagtcaccaattcaaattttcgcttggtgataatggagtctaagatgagtggaagataaatgttccagcttgtcccaacgtttaagtgcagttttaacaagggtgacttaagttctctcttaatcattcaaatcaattgtaagtatcatatgtttgtgctttagggaactgattgtggggcagagggtgggttgaagaagtggtttgtgtgacttttcagcaagaaatctgcttctaaaattctcactatttgtgagggttggagggtaagtaaccagatctgtttgaaattagcttatgtgcttgcattaaggcttttgtaaatattttatgccatttaagttcacagtagaaatggcctaagtatctttttagtagattttagtagaagagtaatccataaaatgtattattaacatgtactcaaattgagcaggcatctttctttgacacttagataacagtcatgagttctatggtttttttcttgtcattgttaaaattttctcttttaataagataatacatgcttatgtataaaattgaaatactgtagagaaagggggagatgaaaagtgagtgtcactcccggatgtgaccttgacatcctcattctcttctccaagagcagtaactgctattactttttcttgggtatcatcaagataatttctatgcatatacagttattttatgtatattgttttaaacaaatgtgatcataccataaacacagatgagttgcaccttgtttttttttacttggtctctttggcatttttccattttttaatgtatctagacaactacatttttaatgcttacatagtatatttccgttatattaaggaatcataatttatttgaatcacttataaatggatttttttctataaaattggctgtaagccagagtatatcaggtactataaatacatcactaatttgaaacaaataatggctcaggcaatcccgtctggaatatttccagtggtggaatgggttttgctttgggttgcgtgcacgcgcacgcacgtgtgtgtcttcgctttactgtttttctgttctaattttgaggaagaaagattcccagaaataacctgtccagttcagttaaaatatttcattcatgtgagaatgcacacattttagagtgtttagaggtatatctttcaaagtgctttctattatgtttgtgggttaatcgattttaggaatgggttgatttttttgtttgtaattttaaaaaattatttcaaaaacaactacttgtaattaaattattttttcaaaactgtgattttgttaaaatttattttactaatcactagttttaaacgtgatatgactatcttagcttagacatttatttattaaaaggtatgactttttaaacgaaaccttttttgcattagaatttgtgacatttttatatggggttaagtcaggtcacagattaatgtatcttacagttgtctttttctactctttaaaattcatatagtaagaaggttagttgtaaacaccaatgaaatatatatactttgcaagaagacagttttgagagcataggcagtaaagtggaaggaattccattgtttttgacaatcttgcatatctctcattttcccattgtttaatttctaagtggatgttcagtggaggctaacgcctgagagtgctgatgggaaatggtggaaatctggagctacagtagcagtgaacaagaacaccagctaataaagttatcatatcaaagaataaagcctttaccacatgctcactggtggctttcaccctcgggctcctctgagcagtagtaacccaggttgaactcttcaggtattttctggaagaaagcttaattacaaacttttccttgaattacattaggttagaaaacatgcagccaggcacggtggctcatgcctgtaatcccaacactttggaaggctgaggtaggcagatcacttgagcttaggagtttgagaccagcctgggcaacaaggcgaaaccccatctctactaaaaatccaaaattagctgggggtgctcgtgcacacctatagtccccaggtactccggaggctgaggtgggaggatcacctgagcctggggacgtcaaggctccagtgagctgagatcacgccactgcactccagcctggcaacacagtgagacccccatctcaaaaaaaaaaaaaaaatgctgtaggtgaaagaaccatgcaacacttcaaagattgataaaatatttacaaaatgctctcatttttaaacttataaggcatactgaagtagtgtatcaggcaagtgaaagcctcactagaagaaggaaagactagaatttaaaaaatgttttaacccataaggtcatcctggacttaccccaaggacaagaatgtcacactgtctttatccaagtctcaaaggtaaatat

SEQ ID NO: 3765 - DNA, 6000 bp, Homo sapiens
aaaaaaatatacacacacacacacacacacacacacacacacacacacacatacacacacacacacacacaacaaaaaaattaccatcttaactattttaaaatgtatagcttaggagcattaagtacattcacattattgtacaactaatctcccaaacttttccatcttgcaaacctgaaacagcaactctttactttcccctcttcatcgccccgtgggaaccaccattctactttttgtctctgtgaatttgactactctaggtaccttatataagttccttccttttaaggctgaataatattccattatatgtgtggaattcaccaataaacccatctaggctgggtgctttctgttttggaaggttactaattattgattcaatttattattgttattttatttatttatttttttttgagacggagtctcgctctgtcacccaggctggagtacagtagcacaatctcgactcactgcaagctctgcctcccgggctcatgccattcttctgcctcagcctcccgagtaactgggactacaggcatctgccaccactcaatttctttaatatatgtaggcctattcagattgtctgtttcttcttgtgtgagttttggcagtctgtgtctttcaaggaattgatcaatcacatttgtggatatgaatattcttctattatccttttaatgtctgtgggatctgtagcaatgtcttctctttcacttctgtattagtaatttgtgtcttctgtttaagttagcctggctagcggtgtatcgattttattgatcttttcaaagaaccggcttttggtttttttgattttctctattgatttcctgttttcaatttcattctttgcatggcgtatctagttttcctagcaccatttgttgaaatgactgtccttttcccccatcgaatggtcttggcatactatcaaaaattccttgacaggcccggtgcagtggctcacacctgtaatcccagcaggttgggaggcagaggtgggcagatcacctgaggtcaggagtttgagaccagcctggctgacatggcaaaacctcgtctctgctaaaaatacaaaaatgagccaggcgtggtggcacatgcctgtaatcccagttacttgggaggctgaggcacaaggatcacttgaacccaggaggcggaggttgcagtaagctgagattgcacaattgcactccagcctgggcaacagagtgagactcagtctcaaaaaaaaaaaaaattgcttgaccatataggtaagggtttatttctaggctaggctggctattctattccactagtctctttgtcttcatgtccataccatactgttttgattactgtagttttgttagactaaggtttgaaatcaggaagtgtgagacctacaactttgttcttcttaaatattttttatggggtcctttgagattccatatgaattttaggatggatttttctatttctacaaaaaatgttgttgggattttgatagggattgccttaaacctgtggattactttgagttgtattggcatcttaataatattaagctttccaacccatgaacacaggatgtcttttcatttgtttgtacctttaatttctttcagcactgttttggagttttcagtgtacaagtcttttgcctccttggttaaatattttattctttttgatgctactgtaaatggaattgttttcttaatttcctttttgaattgtttagtatatagacatgcaactaatttttgcatgttggttttgtatcctgcatccttgctgaatttattagctgtgtgtgtgtgttgtgtgtgtgtgtaatctttagggttttctacatatgaaatcatgtcatcttcaaaccagaggtaaggttacttcttcctatccattgtagatgccttttatttctttttcttgcctcattgttctggctaggacttctaggactatgttgaacagaagtgatgaaagcaagcacccttgccttgttcccgatcttagaggaaaaactttatctttcgccattgagtgtgatgttagctgtgggcttctcatatatggcctttatcaggttgacatcacttccttccttttttgtttttgagacagagtcttgctctgtcacccaggctggagtgcagtggtgcaatctcggctcactgcaacctccgcctcccaggttcaagcaattttcctgcctcagccacccaagtagctgggattacaggcatgtgccaccatacttggctaatttttgcatttttttagtagagacagggtttcgccacattggccaggctagtctcgaactcctgacctcaggtgatccacccgtctcggccccccaaagtgccaggattacaggcatgagccactgtgcctggccatttccttctgttcctagttttaggcaccactcttgcctttccctttttcgtttgtcctcaatccagatggagaccaggtgctcaccctccttcatgcagcaacacttcctgtactttaaggtggatgcctgaaggagggcagcttgaattttcttcttcagagaatttgcccacagttctcttcctctttccattaatttgtccagtcacaatgcaaacctttgttgagactgcactaggcttggcatagtgtttgccatccacaggtggtttcatgtatattgtcttaatcttcccagaagctgtttgaaataggaattatttctgtcaccagatttagaagcagaggggcttgcccaaggcagagtcagctcccatgactcccagcactgatgcattcatgccaggctgccctgtttctgcatccagcccttaagccgtgttgctggcactgtgcaagtgcctcctgtctctgaaagctgcctctgatccaagtggaaagggcccaggaccaatcgtgaagttcactttctctctttgtattcatagaggtcctgggcctatgtcaagaagtgcaaaaacaacatgtgtccaaatcggggattggtgagccagctgctggaatgggagaagactatccttggagattccatcacaaacatcatggatccgctctactgatcttctccgaggcccaccgaagggtactgaagagcctcacctgggggcattttgtgggtggagggccagagtgtgtatacccaggcttgtctggaaggagaaggcctttgctgcctgaaagtctcatgttagcctcctgtactgattcttcccaagtgcctgttcacgccacctagctgatgcgccctgctcaggttcaccaagaacccgcatccctgaggtgtcgcgggccatcccaactgcacccctgaggctgcctctggaagagcatctggctgctagagcagctgccctgcatccccctggtgacttagaccctttggaggctgcctgggggtacccagaggttgcctgtgttggttcacagaggatgtcacaatagccaccaataggcagtcccctagtcccagagataccaagcccagccttgtctagcccccaggctcctagaatgggatcacacccttgcctcatccccagcgcttcctgccatccaccccttgaaacagattttctttccctgctccccactcatttctgcctggctgtgttcaccaaggagagattctcaccccctcccccatctccctatccacgtttctagaaattcctaaggtcttaaaagttttccttttttttaccccctttccttttttttggaggcacggtcttgctgtgtctctcaggctggagtgcagtggcgcaatcatggctcactgcagcctcaacttccctgggctcaagcgatcctcccacctcaacctcctgagtgagtagctgggaatgcaggcatgcaccatcacacctggctaatttatttttatttttgtagaaacagggtcttgctctgttgcctaggctggtctcgaacttctgggctcaagtgatcctccagcctcggcctccccaaaatgctgggattacaggtgtgggccacggcacccagttggaagttgttttccaaatgcacttctccaaagctggcagcacccacagaacaaactgggcatcaggagacggcacagactaggggactggtaggggattaggatgtccatccatgcaggaccttccccaagtccattcggcaaccattccctgccaccgcgtgggtggggctgggaacagagagatgaatgccgtcccaccacttagcgcgctctgtggagggatgggggtgggagggggtgggggattcccctcaacagaagggcaggccttcaaggaggagtggggttttgccagagggggaacggctttacacacagccctggctttcctcagggtgtgagttgggacagagcccgggatggctgcagagctccgattagggacctcctggtaggcaggacacagccgctggaaagttttaagcatgaacatgatggggaatcagccttgtgttttgggaagggcagtccggtggccgcgagaagggacagtggaggtgaggcagggagaaaggaggccgctgtaaaaatccaagcgagagaagcagctctaactcccttccccaaagaggctcagcttcccaaggacgaaaatgttgcaagcaggtgtcacctccctgcaccttggtttgctctcagcatgacgggccagagccctgctggctgcaccacgcggctggcacagtcagtgcagtccaggcccgggggctgcagccgtcccagtcccggtccaggccgcgagtcccggggctagcaaccgcccttgcatacggccccgcccataccccgcccctgtcccggattggctggggtggggggcgtggcctttccccattggtgcccgtggcggcgcgagcccggaagcggacgggggcggtggcggaggagcctcgggtgggccggggttgctgcgccgtcctccactactggctactggcgctgcagccatgcagcccccgcccccgggcccgctgggcgactgcctgcgggactgggaggatctacagcaggacttccagaacatccaggttagcgccgctgcggacgccgggtcgcccccgagccgcgtctcgctggctcagggtcaagggtcgggcagccctgggtcaggcagtggggagctaagggtcaggggtcggggccctggcgtcactgccaaggggggcgaggcccctggtcctggtgtccactgccaccacctccagtgtccgggaaccccggcgggaccccatcgcgctgggcgacctcggcttccaatgagggccttggaaaggggcccagaccccgaccccgtcccttcccagaagagagcggccgcctgagtcacacacgggcgggcccagccttgggtcagccactcagcaaacgcgcagcgggcagcgcccgagaggcagcccaggtcgggggagcagcgtttaggggggtgtcctcggcctggatgggggacgccccaggcagagggataccgcgcgccgccgaggcctttggaaggaaagaggggacttgacaggcccatgtggctgcatcaaggagaaccaggggaggggtgggacgggtgggaggggtgggcggggctaggccctgcagggacgctctggcctggcagagatcagagtccctccgaggccagtggaaagctacgggaggaattgtctggactgagctccccagggccaccgtggctgttctgtccagaggccagggaggaggaggctgttggcctcatccaggcagggaagagggcggtggctgtgggtgggcagaagtggcacgtgctggggtccgagggggcgtggtgacccctcctgggcatgagaaacaagatccagacagagtagagccctggccagctgatggcttggttagcccttggcctctcctggactggttccaactgcttcctgtgggcattgaaacccagctgcccctggccctgccaaggcccctgccattgg

SEQ ID NO: 3766 - DNA, 6000 bp, Homo sapiens
cctgccccggcctcccaaagtgctgggattacaggtgtgagccaccgtgcccggccagaaacaaactttcaaggaagctcaccacgtgctggtggccaaatcttaacttttgcccctgagttaaatcttagtattctttgtgtctgtgtttgtaaaatgtaagatttggaatttcttttcatgtaattgatttttcattcctttatacaacactcaatattcatgaacatgtaccatgtgccaaatgcagcacaatttgtactagattaaaattcagaggactaaaattaaccacaacaataacaaattacttaaccttaaaggcctccatttaataacagagaggaaagatatggacaaggtgttctgctcagcatttttggtatgcatatcactcaatcttcacaacaaccatatgtaaaaggcataagtgtaacccattgtacagatgaagtaacttaataacttgccaaagagcacccagttagggaaaggcaggatcagaaatacagcccagcactgtttactctaaacctggttgttaatgaccttcctggtgctgcatctcacagggaagagaccgtgagctcagggggtggagggagctggtgttaccaaggaggtggtatttcaagtggttctctaaataacccgttatcaggcagttgacgcaggaaagaatgttggtcagggaagtggagcacagagaagtgtattacaggcaggttgtgtggagcaggtccaaaagtgtgaaagagaatagcatgtttgccaaaatgctggtgctattaaggtaggcagaagtgcccttgcagaaggcctgaataccatctagattccatcctttagttagacactgggataaaagtaggagtgcagtaggggtggggccttaaataattttatgcaaggaacgagttatcggatttgtgctttaaaaggtaactggtagagaagtgtggaaagtggatggaaggaggcagtggtggtgcttgccgtggtgcaaatagaggcagggagcccactgccttgttctctatgaatgatgatcaggctatcaccaaaggctgagagaagtggcggcctgagtcttgatgtacagtggaatatagagaggaaaggaggtacatgatgctcagatttctgaattagggaactggaaggatggtgcccattccttgatggaactctaaaaggaacagatgagggtgaagaggtaatgcattccattctgcatgtgatgagcttggtgattgtgtgccattccactgggtgattatcaagaggtagttaggcatatctggggtgtcattatttcattaacggtcccactcaagagccccccccttatccgtgctctgcctgtttttttttgtgtgtgtgtgtgaggcagaatctcactgctacacccaggctggagtgcaatggtgcaatatcggctcactgcaacctccacctcctaggttcaagcagttctcctaccccagcctcccgagtagctgggactacaggtgcgtgccaccatgcccggctgatttttgtatttttagtagagacagggtttcaccatattggccaggctggtctcaaactcctgacctcaagtgatctgcctgcctcagcctcccaaggagtgctgggattacaggcgtgagtcactgcgccaggcctgccctgcctgtcttatcagtcaccaaggcctgtcacttctgcctcccctcccttccttcctcccttccttctctccttccttcactccttccttccctttatttttctctctctgcctctttcttcccttcttccccttctccccgcctccctccctccttcccttccccctctccctctttctttctttcttccttccttttctctttcttctttctttctctccctttctttctttctttccccttcctttctctccccttcccctttttctcttcctccttctttcctttctttttcttctttctctctctccttccttctttcttctttcttcctttcttttctttctctatctttcctttctctcgctccccttcccttccccttttccttccttccttccttccttccttccttccttccttccttcctccctcctccctcctccctccctcccttccttcctctctctttctctctttctttcgacaaggtctcaccctggagtgactggcacaataacagctcactaaagcctcaaactctcaggctccagtgatcctccaacctcagcctcctgagtagctggtagtacaggcacacaccaccacacccagctaatttttaaaatctttttgtacagacaaggtctccttgtgttgcctgtgctgttctcaaactcctagactcaagtgattctcccacctcggcctcccaaagttttgggattacaggcgtgagccatctacttccttaatatttcttaaatctccacttaaataaatctctgagttggtcatttggattggtgtgtgcaatgccccataactatgaacaccttagcgtttctagtaggcccttcaaaatgactcaggcctgtatctttagctttgtctgtatccacaccactctgcagaggctgcactccagctatactgaagcagccacagtttgcaagagattatgcttactcacttctgttttgaagtgttttgaagcacaaaggcatgtgtacagtccccaccacatgccaggatgcacaccaggagaggcaatgatatagggctgacttcccaggagcgcctagtagaaaattagaagattgtgacttagcggagtcatattcatgtccattcattgaagttcattgacagcaaaaagccaggcctccggatgttcatttaaattaagtagtcaatatcctaattcagtgactcgcagagaatctggtgggttatttaatcatcacataaaataggtggttcatgtactcatgttgaggcaggagactaggttctggaggcagggaaactaaggacttccttgaactacattgaaaggaaaaccctaactttccacgcctaagtaacaaaaggaccagaggctacctttgaccttttctgcctagtagatgggaaattggctgtctgtaaccaatcagactgactgcgggtccaatcttcatttgcaactttgtaacttcactccagcctctgaatggttgttgtccacaactaatcagactgtgggcgagtcttcgtttgcatagaagcataacttcattaagtacatcccagcctctgattggttgttttttgcaaccaatcagatgtttgcacaggagtgttacctttgtatcttcatttcagcctctggttggctgctttctgcaaccagtcagactgattgcgggctaccacttcatttacgtgagatgagcatgagttgccaaagggaaacttcttgggggtatttggacccaagaagattctgtattcggcctttgagccgctgctccgcccgctcccacaatgtagagtgtactttcgttttcaataaatccctgctttcgttcttttgtcgcttctctgggtgttttgtccaattctttgttcaaaacgccaagaacctggacaacctgcagtcacgatcctttactggtgacaatattgttttattttactgagattccatgtatcagtgttagacacaaaaatcatttggtcatgtgctgccataaataactataaagaaagtctatgtgtgccaatttcacttattctggcctggatctcactgtagtagatcaaatgtgaggaagaaacagtagccgagagaggctggaattagtaaaaatttaagagtagttccatccattatgtatgccgtaataggccctatatgtgaaaagttaaaggagcttatttaattatgaaggaaactattatacaagtaagcaaaacaatttataataaaatattctttatgctcagaattttaaaaatagatgtagactggaaaacctgcaatttcctcattaccatctaatacatagaaagtcaaatcacttacggacagaaacagacttgaaaatttcagctgagaaaacattttagaataaaagaaacattttattcagcacagtcaaaacaaaacaaaaacaacaaaacaatgtttaaaatggactttctgttagaggtggccgtttcacagtcaaaattatcccagagaattgtttatattaaaaacaggctgagaatagtttgacctctgatcaccaaaaaacctggaggataaacattcatctgtcaagatttctctggaaaatccctgcgctgcttcaaagagacagaacaaaggtaaatagcatctgccacccaaatcttgctgaatagagtgatttatcttcaggcctactagccggcgacaggagcgcacctcctcccttctcctagctgtcccgggtttattcattccctgagcctgaatcctgataagggagcagagtagggtttaagacctcggaccccagaatacaccactgcaattgaattttggttccaccttaaggtaaactacgcagctgctgtgagcctcagtttccctacctatagaaagaggatcgtagtggggaattgttgcaggggttaaatgagattgtacggatcgtggagcagcgcctggcgtgtggtaaacgctcaacttatgcgggttgtaactgcctgaggcgtttccttcggcgcgccacttggccttctctttctaaatattagcataataaatataaatggacccagaacgcgagggggcaggggccacgtgatcgctccacgaaagccacttgtagggacctttagagagttagcaataaggctggagaaggaaaagccggcgcgcccgcggcccgcgcgatttcccgccgagcccgcgtccccggcggcgggcgggctccgggggcgcccgggccgcggcggcggcggcggcgcgagctgcgcctccgggccggtgaatcatcccggcagacaccaagagccgcggcagcagagaggagcgctgaaacatggctgaagcggccacgggctttctggagcagctcaagtcctgcatagtttggtcttggacgtatctgtggaccgtgtggttcttcatcgtgctattcctggtctacatcctgcgggtgcctttgaaaatcaacgacaacttgagcacaggtaaggcctgggagccgggcccgcggcgcccacccctcccccgccccggaaagttagtgcaactcgcgcggggccgcggccaggcgcgcgctcggggacgcgccggggcccgcgcaccggaggcccgcggctacccgccagcaacgcggcggcttaggcggcggggccgggcagctgggcgcgcgggggcggccggtggccttcacggccccgcggaggaagagctgcgccgcgcacagcccgcaaggcgggccgggccgggccggcagccgccctgctgcgtcgctggtggtcgggagacggagaagaacgggtgtcgcgggcgaaggagttcccaggacaccccctcgggtgtctgcgccggaactccgagggttccccggagttagaccgagtccttcctcacgccctcccggctgtgggtgccaagcggccgaagtgtggtcggggaggcgccctcccgcccggccgcggaggcccgagggcggctgccggagggtgctcggcggcgaagccccctgacccggccgggctgtccgggcggcgccctccgtggcccggagttgcgtcttgccgggcgtggggctgtctctctggttgggtagtggggagaggggttcccgaaggcactcttgggagtgtatggatgacgtgtcaggtcaccaaatggattgtcgaagggaccggagggaagaggggagagctggaatttctgagggtttcggttgcagttttcagtgatctttgctcgtctcccttccctgtaaagctacatatgctcagcaagtgccgcgtgcctcccatccttggtcggtggtaaatgcaggaggtaatt

SEQ ID NO: 3767 - DNA, 6000 bp, Homo sapiens
agcatttttggtatgcatatcactcaatcttcacaacaaccatatgtaaaaggcataagtgtaacccattgtacagatgaagtaacttaataacttgccaaagagcacccagttagggaaaggcaggatcagaaatacagcccagcactgtttactctaaacctggttgttaatgaccttcctggtgctgcatctcacagggaagagaccgtgagctcagggggtggagggagctggtgttaccaaggaggtggtatttcaagtggttctctaaataacccgttatcaggcagttgacgcaggaaagaatgttggtcagggaagtggagcacagagaagtgtattacaggcaggttgtgtggagcaggtccaaaagtgtgaaagagaatagcatgtttgccaaaatgctggtgctattaaggtaggcagaagtgcccttgcagaaggcctgaataccatctagattccatcctttagttagacactgggataaaagtaggagtgcagtaggggtggggccttaaataattttatgcaaggaacgagttatcggatttgtgctttaaaaggtaactggtagagaagtgtggaaagtggatggaaggaggcagtggtggtgcttgccgtggtgcaaatagaggcagggagcccactgccttgttctctatgaatgatgatcaggctatcaccaaaggctgagagaagtggcggcctgagtcttgatgtacagtggaatatagagaggaaaggaggtacatgatgctcagatttctgaattagggaactggaaggatggtgcccattccttgatggaactctaaaaggaacagatgagggtgaagaggtaatgcattccattctgcatgtgatgagcttggtgattgtgtgccattccactgggtgattatcaagaggtagttaggcatatctggggtgtcattatttcattaacggtcccactcaagagccccccccttatccgtgctctgcctgtttttttttgtgtgtgtgtgtgaggcagaatctcactgctacacccaggctggagtgcaatggtgcaatatcggctcactgcaacctccacctcctaggttcaagcagttctcctaccccagcctcccgagtagctgggactacaggtgcgtgccaccatgcccggctgatttttgtatttttagtagagacagggtttcaccatattggccaggctggtctcaaactcctgacctcaagtgatctgcctgcctcagcctcccaaggagtgctgggattacaggcgtgagtcactgcgccaggcctgccctgcctgtcttatcagtcaccaaggcctgtcacttctgcctcccctcccttccttcctcccttccttctctccttccttcactccttccttccctttatttttctctctctgcctctttcttcccttcttccccttctccccgcctccctccctccttcccttccccctctccctctttctttctttcttccttccttttctctttcttctttctttctctccctttctttctttctttccccttcctttctctccccttcccctttttctcttcctccttctttcctttctttttcttctttctctctctccttccttctttcttctttcttcctttcttttctttctctatctttcctttctctcgctccccttcccttccccttttccttccttccttccttccttccttccttccttccttccttcctccctcctccctcctccctccctcccttccttcctctctctttctctctttctttcgacaaggtctcaccctggagtgactggcacaataacagctcactaaagcctcaaactctcaggctccagtgatcctccaacctcagcctcctgagtagctggtagtacaggcacacaccaccacacccagctaatttttaaaatctttttgtacagacaaggtctccttgtgttgcctgtgctgttctcaaactcctagactcaagtgattctcccacctcggcctcccaaagttttgggattacaggcgtgagccatctacttccttaatatttcttaaatctccacttaaataaatctctgagttggtcatttggattggtgtgtgcaatgccccataactatgaacaccttagcgtttctagtaggcccttcaaaatgactcaggcctgtatctttagctttgtctgtatccacaccactctgcagaggctgcactccagctatactgaagcagccacagtttgcaagagattatgcttactcacttctgttttgaagtgttttgaagcacaaaggcatgtgtacagtccccaccacatgccaggatgcacaccaggagaggcaatgatatagggctgacttcccaggagcgcctagtagaaaattagaagattgtgacttagcggagtcatattcatgtccattcattgaagttcattgacagcaaaaagccaggcctccggatgttcatttaaattaagtagtcaatatcctaattcagtgactcgcagagaatctggtgggttatttaatcatcacataaaataggtggttcatgtactcatgttgaggcaggagactaggttctggaggcagggaaactaaggacttccttgaactacattgaaaggaaaaccctaactttccacgcctaagtaacaaaaggaccagaggctacctttgaccttttctgcctagtagatgggaaattggctgtctgtaaccaatcagactgactgcgggtccaatcttcatttgcaactttgtaacttcactccagcctctgaatggttgttgtccacaactaatcagactgtgggcgagtcttcgtttgcatagaagcataacttcattaagtacatcccagcctctgattggttgttttttgcaaccaatcagatgtttgcacaggagtgttacctttgtatcttcatttcagcctctggttggctgctttctgcaaccagtcagactgattgcgggctaccacttcatttacgtgagatgagcatgagttgccaaagggaaacttcttgggggtatttggacccaagaagattctgtattcggcctttgagccgctgctccgcccgctcccacaatgtagagtgtactttcgttttcaataaatccctgctttcgttcttttgtcgcttctctgggtgttttgtccaattctttgttcaaaacgccaagaacctggacaacctgcagtcacgatcctttactggtgacaatattgttttattttactgagattccatgtatcagtgttagacacaaaaatcatttggtcatgtgctgccataaataactataaagaaagtctatgtgtgccaatttcacttattctggcctggatctcactgtagtagatcaaatgtgaggaagaaacagtagccgagagaggctggaattagtaaaaatttaagagtagttccatccattatgtatgccgtaataggccctatatgtgaaaagttaaaggagcttatttaattatgaaggaaactattatacaagtaagcaaaacaatttataataaaatattctttatgctcagaattttaaaaatagatgtagactggaaaacctgcaatttcctcattaccatctaatacatagaaagtcaaatcacttacggacagaaacagacttgaaaatttcagctgagaaaacattttagaataaaagaaacattttattcagcacagtcaaaacaaaacaaaaacaacaaaacaatgtttaaaatggactttctgttagaggtggccgtttcacagtcaaaattatcccagagaattgtttatattaaaaacaggctgagaatagtttgacctctgatcaccaaaaaacctggaggataaacattcatctgtcaagatttctctggaaaatccctgcgctgcttcaaagagacagaacaaaggtaaatagcatctgccacccaaatcttgctgaatagagtgatttatcttcaggcctactagccggcgacaggagcgcacctcctcccttctcctagctgtcccgggtttattcattccctgagcctgaatcctgataagggagcagagtagggtttaagacctcggaccccagaatacaccactgcaattgaattttggttccaccttaaggtaaactacgcagctgctgtgagcctcagtttccctacctatagaaagaggatcgtagtggggaattgttgcaggggttaaatgagattgtacggatcgtggagcagcgcctggcgtgtggtaaacgctcaacttatgcgggttgtaactgcctgaggcgtttccttcggcgcgccacttggccttctctttctaaatattagcataataaatataaatggacccagaacgcgagggggcaggggccacgtgatcgctccacgaaagccacttgtagggacctttagagagttagcaataaggctggagaaggaaaagccggcgcgcccgcggcccgcgcgatttcccgccgagcccgcgtccccggcggcgggcgggctccgggggcgcccgggccgcggcggcggcggcggcgcgagctgcgcctccgggccggtgaatcatcccggcagacaccaagagccgcggcagcagagaggagcgctgaaacatggctgaagcggccacgggctttctggagcagctcaagtcctgcatagtttggtcttggacgtatctgtggaccgtgtggttcttcatcgtgctattcctggtctacatcctgcgggtgcctttgaaaatcaacgacaacttgagcacaggtaaggcctgggagccgggcccgcggcgcccacccctcccccgccccggaaagttagtgcaactcgcgcggggccgcggccaggcgcgcgctcggggacgcgccggggcccgcgcaccggaggcccgcggctacccgccagcaacgcggcggcttaggcggcggggccgggcagctgggcgcgcgggggcggccggtggccttcacggccccgcggaggaagagctgcgccgcgcacagcccgcaaggcgggccgggccgggccggcagccgccctgctgcgtcgctggtggtcgggagacggagaagaacgggtgtcgcgggcgaaggagttcccaggacaccccctcgggtgtctgcgccggaactccgagggttccccggagttagaccgagtccttcctcacgccctcccggctgtgggtgccaagcggccgaagtgtggtcggggaggcgccctcccgcccggccgcggaggcccgagggcggctgccggagggtgctcggcggcgaagccccctgacccggccgggctgtccgggcggcgccctccgtggcccggagttgcgtcttgccgggcgtggggctgtctctctggttgggtagtggggagaggggttcccgaaggcactcttgggagtgtatggatgacgtgtcaggtcaccaaatggattgtcgaagggaccggagggaagaggggagagctggaatttctgagggtttcggttgcagttttcagtgatctttgctcgtctcccttccctgtaaagctacatatgctcagcaagtgccgcgtgcctcccatccttggtcggtggtaaatgcaggaggtaattaacaggatcttcacaaacttggagccagcccactgagtcgttaaaaaaacacccgcaaagaaaacacacgagccttaacactccagagagttccgaaacacaaagtaaatttcgagctaagggttacagtcctttaaatctggaaatttcaaggtagagtgtttttgtttttgttttaaattttaatttcacagtactgggaaattcttacagtcctgaagatatatacatatgtacacatatatatcttcccttgttaatctccatactctgggagtgcaagtctggaaatgcattttcctcaggtgtttagctgcattaaaacgctttttaaaacgcttgagataatgtactcattttgttaggaaactt

SEQ ID NO: 3768 - DNA, 6000 bp, Homo sapiens
caccatccttttaaagcataacaacaaacaggtgttgtgtatccagaaagagcccttatctgaaggtttggagtttggttaagcagatcttttattatgttttactcatgcgtttggtcataattatgcttttgtgctcaataaggatgattgttatctgtgaaagtaactgacaatttctcagaaccattgccttggttctaggttctaggtagctagtaactagtctggttagtgccatggagaatgtggagcactggtctgggtcatgatattgagttgagtagctgaattctctcctcacttcatagggtagttcttttatctggttagtgctagatgctcatctgtcttagcttacttaaattttgaggtcttgggagtagagcccagtaatgggaggagctgggcatacgctctaggaatcttctgcatccagataatcctttttttagtggagtcttctcacattttgggataggccatgaggtagacttggggctcagtaagcaaagccaatgaggatgacaaaacatgaaaaggaaatgctgatgcagatgcaggctggagtgggtggtaagaggcctgggagagcagcaagatgagatatcttagataatgtttgttctgacttagtaataaggtgaaattgggatgtgacataaccttaaggcattttgacttagctctcacatgttggtgagaattgagactagagggaaaaccccctattttcatttctgaaatgcagaaaaatagagtgaacatttataatccaaccctggtattttaaaacatgtgtaataacaaagtcggttattgtataatttggaaatgcgatgtaagatattatgataaagctgtgattttctgatttaagagggaagagtgaagtggaagccatgctcgttctcctctgaggagggtagaggaccgtggactcgcgtggcaggcactagtccagggagggaagccatgaaagagaaagagaggagagctatgtctcagcccctgagctgtcctctatgaaaagcttcacactctgtgtccagctgtctcaatcaagtcctggaagaatggtctccttcagaagctttattgctggcacccaggccacattgtcctaagaggtgtgacccaccaggtcatgagccatgaaccctctagtaggcagatcctccaacagtttaagtattttgtgtgtgtgtgtgtgtgttaatgtgtgtgtgtgtatctgtctacttaccaccaggctgagttactgggggtctgcctagaaaggaacagtgtccctgtaaacaggaggaggctccccagaacatcagcatccaacataaacacgctgaattaggacaatacatcctggctcctttgaggaggggctgttcccaaagccctggcaggatagaagaggggacagtgggggctagaaaaggagtaggtatcagcaggagttacttgagttttctcctctgactgtaattggtttaaagtagagtccaagattattaaagttggactagatcttagggattttccagttccacctcctcattttaccagtgaaggaacagatacatacaggggttctagaatttatcttagatcagagaggtaatgagtggccgtgttggctagactccaggtctcttgattcagtaatgattctttctccaacctggatcacgaagggttaaattgtagcaggactctgggatgggattcaggggtgccaaatgctataagtacaacccactgctgtctcaggaaattgtggttaggatagtggtccctagaacaggtgacccgagaagaacttctgacttaggtgaacgttatacgttttggagaggactatgatgtgattgtttgggaagggggcatctaggcatatcagcaagtctcacttgctgagagtgagatggagatagagaaaattctttgagaggtgggtggagggatctagttgaaggctctcctgttgagctttgaatttatagtcagtgtttatagagtctaggcaagtagtatctactgtgacatttggagaactgaaaagtagagtgggatttagtggttactgagtgtgccttgggtaggacaggtccttttatggttgtagctttctgcacttgagtacttatttctgctttactggctaatgccactctcattttaagctatcacaatgactaaacattatccctttcattctgattctctgttcaattttttcatatgttggaattgatcatagaatatagaaagaatttttatgaattcggaactgaactgtttggcccactgtagatttggttttattggaaagaacctagttttttgaaattttttttttttttttggcttccgtatgatcacctactctacacaggcagtattgtgtactggttaagcacaaggattctgagctagaggctactccagttgaatcctggctctgatcttagataagttgtttatcctccatgcctcagttcttcatctctaaaatggggataatacctcctagggtcgttttaagggttaaataggttaatacatgaattagaacaatgcctggtacacacaaagtgctatttacatattagctgttaatacattccaagcattgatctaggccttttgtcaatttataagtaaaccaaggctcagagaggtttaaaaacttgcttaatgaagataatctatctagtaagtaagtaaaccaaggctcagagaggtttaaaaacttgcttaattaagataatctatctagtatgtaagtaaaccaaggctcagagaggtttaaaaacttgcttaattaggataatctatgtagtaagtggctgagatgggagttgaatcttctctgactaaacttggcttttctgtttgctaagcctggcttttaacccctctgctggatttctgaggtatggcaaatcacttaactataagtaggttgtaggttttatatctatctactcatctgtccatcggtcttatactttctaatttagatatttcattatgttttcattccattaataaaatgcatttccttaaaatatctgtctcttaagaattataaaatacacagcataaaaataaaaagtcttaaaataatgctactcagataattagataagtgctttaaaaatccatgctaactactaaattgtgaaaagcataaaatgttattccaggtgatatttgataatggcagtcagcgtttccacacacttgtaagttttgtgtaaatgtaggtagttattatcaggcattttgagcttactattttaaaacaatcataacattaatgttctaaccatttgcacatcttaattatcaggaagaaattatatcaaattgttacaacttgtggaaggcttcccaatctgtaccctaggttaagataaagagaattaaggcctaataaatgagataggctcacttagcaacagtgacaggtgaagttgatgagaattaacagcttttgactgtagcagattggtggtataatgagctctgcttatggtaaggaagcactgattagacgactgagtgaaatggtactttcttatttattttataaaattattggagatggctgggcgaggtggctcacgcctgtaatcccaacactttgagaggctgaggcgggcggataacctaaggttaggagttcgagatcagcctagccaatgtggcgaaaccccatttctactaaaaatacaaaaattagctgggtgtgatgttgcatgcctgtagtcccagctactctattcaggaggctgaggcaggagaattgcttgaacccaggaggcagaggctgcagtgaggcgagatcacgccactgcactccagcctgagcgacagagtgagactccgccaaaaataaataaaaataagtaaataagtaaataaaattattggagagatctgttaagtgataatagtaatcctagaatttgtagaatttgtattacgcacttttgatattgtattgaaaattcaaaatcacattttatagcattgtcaactttataatttcttttggagaaacctgttcagtggaaaggaaagtagcaaaagcaaaaccaaacaccccactactccagcaaaagcattctaaacagttagtacctcatcttcttcaaagtggtggtaatttggtagtggtggagggtgggggttggaaattgtccaaccattcaggttgcttacaaaaaaagataaaaaaagtaaaaatttatttatgtttcgtcttttggcaaggtaaataattgtatcaagatgaagtagccattgttaaagtttatttaaagtataagctaggatatgctcaagattggcaatggaggaaaaagatggctcagggtatgtggcaatgtgacattaaagattacatcagatatagtgtgtctcagtaatgaccatatgtcctttccagctgatgtctattttaggacttggataaatgagttggaggtcttagatatgctataaaggactgttcttgcatcacctttattaggtttgttttcacattagtcaaatgtatttcaaatggacaaatggataaaatatgcatatgtactatcaaatgaatgaatgtaatgacaaaattgagacaaaaatttggacgctgattcctttcaggttatgtggcttctttcatatcattgagtactaggaagaagtatggatatcttgtgtccttttcacttacaggaataaaataatttattttttctcttatttagagttttaacctaaaaccaaaatttagttttaacctaataattaatacaggagggaaatgggagtaaataacagttattttctgagagacatttctaaggacgactttaaaagaccaggcaaaggagagcagagcccagccgttgccgcttgagagagataagcagaagtgtgggtgtgcttcatgtcacatggcaggaggcttccccagaacggttcgtcagtccagggagccgtttcattttctggctgatagagttgtacttggaaaatactcagtttcctgcttactgcttcattatggattatacaggtaaaattaaatgttaaatattttccagttatgtagaattactttaaaaataatattttgaatttatattttaaaaactacattgattgtgtgagtactttaaaaatattgtgcatcagtttattcctgagtattgtatgaatttgttttatccaaattgtgattaatttaggataagtgcttaagggaatttctgagacatacctttgttgtttcttccatttcagttggatcatacttaaatggacttaaactccaacccatagttaatccacatttctcccctcttaggccagaggatttaaagtacaaacatctgagttcagattattccacacagggaataaaatatgtacacagtctacagagagtttctgttattgtggtggtggttttgtgcttgtgtattgctcttttagatggtgttaatgtaatgaagtgaattggagaatttcagtttttatcctaaattttctgagtataaatgtgcccagatttttctgaccttttctgacctttctaaccttttccttttttaaattgcatagacttgtttctcaatctctagtttcactgaatggtaaattggtacatgtttagaaataaggttagattaaccatgggtggtggttacttgatgagtaagtgggcgattcccttacatctggtagggtaaaggtgtgggtgggaggtgaagcagtgatcaggtagggacatgagtctttgcccaaaatttgtgcacccaattcagaattatattgccctaaatttgaacttttggggaatggcgacattgtttgctgacagattgcttttaaactaaagaacgaagaattggaaaattttttttctagggcagagagaggccacttttcatacccagtgtaatataaattccagtgtgcatccggattgaactctac

SEQ ID NO: 3769 - DNA, 6000 bp, Homo sapiens
gttttgtgcttgtgtattgctcttttagatggtgttaatgtaatgaagtgaattggagaatttcagtttttatcctaaattttctgagtataaatgtgcccagatttttctgaccttttctgacctttctaaccttttccttttttaaattgcatagacttgtttctcaatctctagtttcactgaatggtaaattggtacatgtttagaaataaggttagattaaccatgggtggtggttacttgatgagtaagtgggcgattcccttacatctggtagggtaaaggtgtgggtgggaggtgaagcagtgatcaggtagggacatgagtctttgcccaaaatttgtgcacccaattcagaattatattgccctaaatttgaacttttggggaatggcgacattgtttgctgacagattgcttttaaactaaagaacgaagaattggaaaattttttttctagggcagagagaggccacttttcatacccagtgtaatataaattccagtgtgcatccggattgaactctacttacacagtatctataaattataactgtaggtggatctttggcaagacagttaattacagtgtgcaaataaaagttttgtgaaattgctcatttaaaatatagcttttaggagcttgctatttaaaggacttctgtggtagatactttttgaagataaaacattttaaagcaattaattgccccaaaagatttgttttataaatctttagtattctatgttagggtttctttaaagcaagtatacctgtatctgtgtcttgtgtgtgcattttgattttcttttcctcataagattagcatgccagaatttttgttccagggctctgaaataaaatgcacccacctttttagaaggttcgctttatgtgtggtactacattgaagcaggaaggaacacattttagccatatgcagagaaatcaaatttgtaaaatcctaccacagagctttactatgagtatgcttttagttataaatttgtacctcctcccacaaagaacaccatcattgaagaattctttcattttctatagtttgtatattgccattaaaacatttgttgttcttaagtaatactttatatatgtataattgatagtttaagatgtacagccttaacattctaaatagacatcaagagaatcctaagaaactaagaactttagtgtgaacaaaggaggtgactttaaggaaattcacatgacactttcaaatttagttgtgtgtgctgtagagaaaaaaatatggtttaagttcttaccacattaataaatacattaattaaattacctgtctgatgtggtgagaagcccttttgaatgttgtctttcatagtgatttttataaacatttacacattcattgcaaagatagctatatttaatctattaaactttgaagagaacaactcatgttttcagttcatggcagagtgatttttttgtattagaaaagagcatttattttgctttcagcacaatcacttttgtactaatggcatcattatagcactgaaggggatatctttcaaaactgatatttgatgattcaagaacagatttattattaaaataatttaaggggcccaaaacacttctattaaggcctttgcatgaaacactcttccttccacgtggttttcaggctaaccatgtggttttttcaggtcttgttgaaatgtcacctttttagagtggcctttcctgataattttacctaaaataaccttctcatgcaattactccttatcctctaattcctctttatctttgttcatcacatataccatcacttgacacgtcacgtgtttgtttctctgtctcactcactaagatacaagcttcataggggagggactctgttcatggctgatgcctagagtgtagaacagtaagctcccagaaaatagttgttgagtgaatgcttgataggctttcctttaaaagtgactgttgactgactttaagattttcgctataattgttctttgtcaatagcattctcatttaatgattattattttgaccactaaactactttgaatgttttccttcctttcgttgctaactttatctagaaattaacagcactgtctttactgtgaaggaagggcaaggttgcaggcaggggtattcagacagagtggttaagccaaagatcactttgggtttggattgtattatatgactttttttttggaggggggttagtaagggatatcagatcagttttattcatccttcatttttcttcattacattttctttagacaacatattaaactttgtgttccttctctgagctgactagaggagagaactggaatgaactaaacttttggaatcattttggtcaaagatgggtcttcaacaatgtggatccaaacgttctaaagtggttagaaatgcctcaggcctccacataacagaaatcttcataggagtcagagggtgtgatttgtgtccggttttcctggcaagtgagatgcctgatgtttttagcatactgatcctgttacagttgtctaaaaagtagacttaaaaaaatcacagcctttaactcttagaagcctgtgccaagaagtaaatataggccctcagaaaaatgcattttcatacacatatacacaccctctcatgtatgagccaacaaaaggagcaacataaatgagtcggcaaagcagttattacatgtagaccatggcctctgtttgaaaatatctctaacccaggggccattttctcattctcttttccctcttgcctttctgacggccacatccatccactatttgagtgactatttatgtgacaacatctcatatgcaatttaaaatagatcttatgtaagataatattctggctttaaggttccacccttttgaactgtattatcctttcccacttcctacagttacatttcaacatcattattgatattcccccttggttgtcgatgtgactgtttttgaaggtatacatttttattaattcctgcaattttctgtgattttttttctttctctgatgacctttctcttttaacgattttttttcttcatgttttgagttggtttctattttcccttcatttcagttaaatccttaaatataattttgctgattatttattcattgttcaagaaagaggcattatcgtagtgtgcttaagagcattgctttggatccagactcctgagtttgaagcccagtatatcattcaccacctgtgtgacctcgacaaagtatttaaccatctgtcaaatgtggataaaagtggtatataccttgtagggttattatgaagattaaatgggtttatacatgtaaaggacccaggatagtgcctggcacatagtaaacactcagtaaatattagctattgttattctttcccgcaacagatgatttgttctttatcttatttagcatcatcaaatgttcttcttaatggctcagcatttttagtaagctaaagatcaagttaccctgaataaactgtggtacattcatacagtggaatcttatgcagtctttaaaaggatgaggtagatcctacatatactgaccagaaaaagtactaatgatatttttagatgttaaagtaatatgtggttccactttcatagcagaatttaatatttaaaaactgtattgagatcaagacatgtctttgtgaacacaagaaattaattagaaaaggcatataccttggatgaatgggtggagaggagacttgaactattgaactttctactatatatgattttaaaagttacgtatatatgtatatatatttactttttgtgcatttcagtattttaaaaacataacaaaactctttttttggcttgtgttggatagctaatgaaagttcatatgcttctagtactttttctttaaaaacagatttataagaatatggtaacacaggaagacattttttgttccagtgagtcaagagataaaatattttcaattatttctttgtgtgggtagatcaaaaagaaatgggttggtcacaaatgcttactcatacagaggtatacacaggtgtgtgcacacagccttaaaatgactgagttgctctggaaaatgacagaaattcatgtaaggcacgatgaagaaataggagaaatacatgtatgtaaatatattcctagagcagcgtttttcacatttgaacaatagttgcaaaatagctagtaatggaattgcctgcatttgagtactcactgtgtgccaagcagtgttctaagtacttaagattactattttactgttacatttgtatgtatttatgtgcctagaatatatgtgtaatagtatacatattttcacatacttgtgattgagtgtacaatccttgatctgtcaatctaccataagctttgagaagataacaatgaactcttctgtaattacttctaaagacagataatgtttctcatttctgatattcttaattcccttgaaaagttctttctatatgctgcgcaaaaccaagaagactgatatgcatgatgtctttgtggttaattgctataaagccaatatttaaatttctttgagtcctcttttactgcctggtatcatgggatgaagagctgcgcaggaggggagtgtatacgtggctctcggtcttgtgcattttgtgacaaaggaattcccctttcaatcacgctgctctcctggagcccctggagcctctggctcaagcagcgcagtcggtctgtgcagtgtccctgacgtcatccagcgtatgcataagccctgctattgtcttactgctacagcagggctggggattgcagtatccgctgttgctgctgctcccagtcctgcccctgctgctacctagtccagcctcaccgcatcccagaagaggcacgtcggccttcatttgcctagtggattttcaaaagcagctcttcggtttttggtgctgttaagagaccttgcatttcaatcacaccgggagaaaactgaagctcgtaacaggagaatctggcagctggacacagcttggactgcattgtctggcttcatgacccctgctgtgtagccggctcatctcttcactctcacatgtacactctcctcgcttttctttcttttttttttcccttttctttcttctaatttttaaaaagcagcctctggagccagccatgtttggcactgaatcttcatgtaagtaaatggatcccacttctctgctatttagaaatctgcttgctgtcatggtttcattggcttagagttcatatcactttgccttaggtcattaacaacctttgtattttggctctaattacaaaggaattggtctcagggaaggaactccccttaactgggttattcatccttaaggccagggatgtcaatgtgtcaaaaccaggcctgtaagagggaggtaggaaaaccagaatccatacagccaccctagaatgtgttaattgatgggatcaggcctgtcactgatctattgttgtaggctccgtaatggtgcttaaaccttaaaatagatactgggaggatctgagatgatagtgtttattagaaaggaaagaaaggcttacattttttcatctaaagagataaatagttatcattatatactcttccatattttcacaaaaacatagacattataggtagattcagaatgagtaagaaatcgctttatttttgaggatggatttttttttttcccacagtggcttcaattttgatatgctggctagcatcacagtccagcaggatcatatctttttaaaaacttatacaatgaaattgctttggtgcagagaaggccctgcacaatgggctaggcaggacagcagttgtagacagctacaatggatattttaaaaattacaaccaaactatgtgaggattatttaatgttgatatagaaatataacgtcaatgcagttgtacaggctctgcagaatattttgtcattg

SEQ ID NO: 3770 - DNA, 6000 bp, Homo sapiens
ttgaactcccaagtggcacatctttttgagattcttgtatatcaatcccttttatttcttcagtgaaatttttccctttggttggaaggggacctcggattggctttttgaaggtggggcaaaaagacctcatactgcctgggatcaacagtaacaaaaatttaaggagaatcctgtatgtctattgttttctttacatcatatcataaacaagtaaattgagaaattaatcacataatgggacagtaagaacacatcacaatccacaaacaggttacgaaggagaaatggactgctttttaaatttcttttccatttttgtttgtttgtttgggtcatgcttccaagagcatctgtgaaggccaaatatgctggattataggagcttcaagtgtatctggtagaaatgatatcatttgttgcctgatataatttgttgcctgaccaagaaaagggattcttggtacttcataattttaaaggataacagagagtaaataggttaatttttttcaaattatttcagcaaggatctgttgagtccttattatgttgaagtacgaacttttaggtgctttagattcagagataaatataacctattctctgtcaccaagatggtttcagtctagtagagaaagatgttaaaaaacaaaaatacaaaaaaacaggcgaagcgagatgaatcagtgctcagtgagtctgtttgaaacaagctgtggggagtgcagagaaagaaagcccttgagagcaaactcatgcccccctactttcatctcaacctctgtgtactagggtagtcattgggaatatctgtggtctgtgagtgaattgatacataagatcccactacgacacagtgttctcatttgtgagatggtttgggatttatatatctacttgctgccacctttgaaaaaattttagattcatagatatgagaattgaccctcagttgacctatcatgcataagaatagtaatgatccttttaaaactacgtcttgattgttattactgggagatgaacaaaaggatattaggtcaaaaaggttatcatggaaaactgttctatcctgtctaaagttttgcaccataagttttccaagacccatctaattgacagttttactcataattacagacatttcttccaagattattgaattaaagtttggctattatgaaccacttatgacttttgaaaattcaagagtcattctccctaagatgaccttttgtttcagcagcagcattccaataacgggtccttaaggagccagaagaggtgtggttttctttgttttttctacttttcttcaaccttgtttcagtttttactttattgtttttcttcatcctgccccataatttcattccactgctgtttcaaatagacatcgagattagagcaccaacacaatttcaaactctgctggaactgtaagcaaagataaatgcagtacacatgttgagaaataacaagtttctgattccctattagaacgtacaacactgatcaattttggcttctaggagctaaattggatgtaaatgtttgcaaaatgaaggaagctaatatcaagatatttgagatgttagtacattaatttaggattttattcagcaaacactgagcgccaactatatttcagacattgttttttgttgtgggtgcaaggtgatgaagaagcacagcttttactcctaaatcacaccatgtacgcaggacagggaagtaagagaacaggcaattgctgttaagtataaagattgtgatacactttagcccaggatggaaggggcactgcatgcagcaaggaggagtgacgggagtcttccccttggaggtggtgtctgaactggacagcaaaggtgcttgaggcaaggaaagcatatggaaatgtgcagaggcacaattggcatggcttatttggagaattgtctgtatcccttagagcagagggatgaggagggatgcagtgaagggcagaagatgccttgggtgagttagctgggggtgtgggggggtagggggactggattaaaatccaagcttggattttattttatgggccctggagaggcctggggcaatttcaggtagggcttcagtcgagcccagagtgaagggggtggcacaatacattcacaccatgcccccttttgagtggaggtacttgagaaatcacagtgggaaagcactcagatgtggaagagtggagtgccactgcagtgggctggcgaggtgacctctgacactatagtggagcacattctgtcctggagggagacatttgtgaggttttctgaacattggtgtaaaagagttagaatttggtttttctttcttaagcaacaaatgggaatcctagtgcagaaacttttgtctcctgggtgggaaaacttcttattttaaactataaccactttatttcatttgcttccgggtaatctcttaactacaagaaactgaaccctatgtagacccaccataacccacagataatctttcaagggagcataactaagggagaagagcctgtcaggacctatgtagcccatcagtgcctacctacttctgctgagtcgttaacaatgacatgaggagaaaaaatgtggaagaggggaacaggtggtgtgtacagctgtactttctataaaggctgtgaatttgaagatagtagaggacatgatgcgaatgcctgtataaatctcacttgctaaaatcaaaccatctgaaaaattcctgccttgttgatacttcagttactactaaagtagacaaagcatgagaataataccatggatttaattcttaccgaaaaggaagaagcttaagagaaagagaccatgttatcctgtagctatagttaaaaaaataaataaataaataaaaggaatattaggcacaggtgtaccttgaatctgaaacaaacaaaagtaacaaaaagtgaaagccatgctcttttttgttgtttttgttttgagacagggtatagctctgtcgcctagactggagtacagtgacatgatcacagctcactgcagtctcaacttcccatgctcaagtgatcctcccacctcagcctcccaagtagctgggactacaggtgtgaaccactatgcctggccaattttttctattttttgtagagatgaggtctcactttgtcacctaggttgtttcttgaattcctgggctcaagtgatcctcttgccttggcctcccaaagtgctgggattacaggtgtgagccaccatgcccagccttttatttgtttattttaattcagaggaaagataaatatgaaaccacaaatggaatttcaattaatataacttactttatgctgagactatttggcataggagatacagagagtttttttaaaactggaaaatggttcgtgaaggatgaaagactaaaagttgaaattgcaattagtcccaatagataaaagtgtaaggaaatataaatgattaaagtgtacaaaaagatcagaatgacagatagctaaataagtacgtacaagtcaggtataaacttagaagcaggttttcagggtggctaaacaccagaggaagctaaagtctcccacattacaggatttaatgtatgactctattgtccaaaaaaacagtgaagaatgatgatagggaaagtaaaagcaggtatcacactaacattatgggatagtgacaaggacatggtattgcaggttcagttctgccactcatttgttaggtggctcttaagaaaatcgtttaactttgctgggcccatatttctcacctataaaagaaaaagattttgggaggttgaccttggcagtcctgtactgttgttcagtttttcgtctgtatcttgtggtagtactgttttgagcagaaaatattgtattaatacgttgctgaggtataattattcattcctattttatatttccctttagtattttttactttttaaaagaatgtatcaagtcaatcccaagcaaatcctggaaataattatgtggtttttgaccacaggaaaaaagatggtgattggggatctaacaatagatttattaagaaaaaattgtgtcaaataaacacagatgagatagtggatatgaaaatactgtttgtctatacaatagtatttaaatgtttatcttattagtgtaaatggcccttttcctttgtctttctgaaataggagaataccataaatgtgtttacatctttatttaaacaaagcatttggtaatattttaaatgctgtcctttcaggtaccatggaggaatatggatataatacctaattaataagtggttgcagacatatcattgcagactgttgcaaattgagggtgatctctagaatcctattcccagattctctcattggtattgccatggtcagtatttctaaaaatcagatcttggaaacacatagcacagtttaaaatcatgtgctcagatttgttctagatttgtgatattggcatatttcttaaccattctgtgcttcattttccccatctataaaacagggctaacagtcctacctcataggactgctctgaggattaaataggataatgtatataactgattaacaccagtgcctggaagttagcctttagtaagtgttggcagtcattttgatgatgataatggtcatttagggaagaagatatggagggagcaaagctgtgcatggtagcttgaatcagaaaaatgactaataagctggaatgacgtactgaaactattaagatttaatggctcagatttaattttaagatttgaaatttaatggaatcagatgtgaaatcctgcctgtatgtttttatttttattttttaatgttcatggcttacataaaagggagaaaagacctgactttagctgaagtctatttgaatagaattggaggtggggggtattgttgaccacacaatcataggaacaaacagagtcccagctgctcaacaccagggccgttctagctggtattcagagacgtagagtggcacagctcctcagactgcacgttttccctgagctctctactggtcagtttgggggatttagaggattgttttcatttctaattctcatattttgaaatcacatgtggccaggtaataaaaatagatgagaagttctgaagaatatgtcagttgaggaactggaggtatttatcctacagaagattgctatagaagagatatgttaaccatcttaattcttgaaagattgacgaacaataatcagattctgttttcttatggaaggtgtaagtgatttttagataaggatttgtggagagaatggagtggggcagaatgataaaaggcaagtaaaatgttatggaggtcagattggtaagataagacatcttcaggtgaccacaagattttaggtttttttgtttgtttgtttgtttgtttgtttgttttaattttttattggctaggtgcggtggctcatgcctgtaatcccagcattttgggaggccaaggtgggcagaacagttgaggacatgagttcgagactaccttggccaacgtggtgaaaccctgtctctactaaaaatacaaaaattatccaggcgtggtggtgtgcacctatagtcccagctacttgggaggctgaggcacaagaattgcttgaacccgggaggtggaggttgtagtgagggagattgtgctactgcactccagcctgggtgatagagcaaaactctgtctaaaaaaaaaaaaattatatatatataattgaggcatcaattacatatagttacaggtacaactcttaagtgcagagggatgatttttcacttatgtatatacccatgtgactgctacccagaatgaaacagaacttcctgaaatcttagaaggttgcctcatactcccttctagccaataactgccctccagcccagcagtaaccactttccttaccttgaacacaatatattagttttgcaaacttcatgcaacca

SEQ ID NO: 3771 - DNA, 6000 bp, Homo sapiens
aaggagccaggggactgcaggggatggagcagctgcactgaggtggtgaccgtgccagtctgcaggacatctgcttcttactccctgtcctgtccttgctgtgtcccccgagcctggagctccacaggcatagagtgggggtcacagggttcattgatgagtgaataaggctgcacagtctccatcgtatgctcctaacagaagtcagtgagcccttgcttgtaacagcaggagttttaaatttactctgaaattgttattacattgaacatatttcaaagttcgtagggcagcttccaaaaagtaggattccaagtcgatgcacaaagggcttttgtattggacacacgcacacaatcagttcatatcaatccatcagttttgatgtgatattgagtaggcaggaaatctgtatatacatttattgttcattgctcgtaagcactgaaagtccttccctcgaacataagatgagactatccagtttcctgcagtgttttatttttaatgatttgatttttaacatacagcaatataatctaaacagaattgaattttcgattcaatataagctgagaaactccctgaattattctgagtctctgtttccttcttccaagcccatttagcaaccaattcttcctttttcccttgcctttgcccttttgccacctcctttgctacatgtcaaatgtttacttttttctctcttcctcttcactcttttttaaaaaaacaaacaaacaaaaaaaaactagatcttatccttgaaaatgtcaaatgtttatatgggcagagatctcttccacctagactgtttctgtttcttccttgcatctgtaccactttctttttaaataaagagaagagattttaaaaggaaacaaatgaacaatgccaatacttcctccatgcttattaatgactttgaagatttttttttttgagacaggatcttgctctatcacctgggctggagtgcagtggcaccatcttggctcattgcaacccctgcctcctgggctcatgtcatcctctcacctcagcttcctgagtagctggaactataggcatgtgccaccgtgcccagctaagttttgtattttttgtagagacgaggtttggtcatgttgcctaggctggtctcgaactcctgaactcaggcaatccaccctccttggcctcccaaaatgctgggattacaagcatgagccaccatgcctggcctgatcattttttgaaagcaggtcacccatagccacacatccaccagagtatgaaaaaacttgatcataccaagagccttctttactctttcccagccttttggcccttcttatttcaggtaactacagtggataatttcttgtgattctttgctaaactctttatgcatataccatctaggtacataaatgcatatgtatttatgtggtattgacatgaaaaggattatatcatgtacaacaccaaacaaaactgtctaatatgttttaatatcttagacagcaaatatgttttcaaaattatttttacacatcttataatttagaattagataaaatttagaattataagattttctctagtacccctcccgcccacatagtcactagactttacaaatattaatttaaattaatacatggttctaggaatgattgacatcctttcaacattcaattttattatcaaagaagataatatttcaagtcaagtgttctattatgactcaatcgagatttgggagtttatttcagataaatttttcctattcctcatcaaagctgtttctttgcattttgggtcttcttgtaagtccattttctaatttattatgtctgctgctacttttcttttctttctttctgagatgggtctcactcttgtcacccaggctggagtgcagtggtacaatcatggctcactgcagccttgaccttctaaggccaagtaagctcggacttaccggcttctgagtagctcggacgacagttttgtgccactacacccagcttattttattttattttattttatttttagaaacaggatctcgctatgtcgcctaggctggtctcaaactcctgggctcaagcagtcttcacacctcagcctcccagagtgctgggattacaggtgtgagccaccatgcctggcctctgctatgtggtttaacattcatcagggctaggtgcagtggctcacgcctgtaatcccagcactttgggaggccgaggcggatggatcatctgaggtaaggagtttgagactagcctggccaacatggtgaaaccctgtctctactaaaaatataaaaatacgataaaataattagctgggcatggtggtgcacacctgtaatcccagctacttgggaggctgaggcaggagaatctcttgaacccagaggtggaggttgcagtgagccaagatcgcactattgcactccagcctgggagacggagtgagactctgtctcgaaaaaaaaaaaaatcatcaagacatattcacttttgagtattacaaattaaaccttggggttttaaaaatatacactcctaatctaaaatattgactgctgtatcggcctccttccgagagtcttgcccctttgtctcctgtcttgttgccagacctttcagaacaatgttctggaagtgacgtgctgcaggtctcagagctggctggtggtcggggtcagtactggactgtaggactcctggctctgaccaggacattccccactatgtgttacaggaaccggcagaagctgaaaggtctcagaggaggaggctgctggttccagcaaatgaaggtgatcccactgagagtaagtgttttgctcctggagatgcagcaggaatggagggaatagggacagggtcctaactgctgtccccagaggtcagagggctcttccagagtattccatgctggaagccgtgggtcctgtgctatagaccatctggaccctaaactgtcttctcccatctcttctccccactctacctcatcctctctgcaccctatcattgaccctaatgactctgtccgtcccctcatcctctctcctcctttgttcagggcctgatgtagcccccgcctgcccctgaggacctcctgaggggctggcctgtcctgcacagcaccactaaccccagtgggctaaggagctcttgacctgtgcctcagcccaatttgcagagctgttgtgtaaactacatacgaatgccaaagacttaatgcaaaaaagagtggaaaatatttcactcataatttttgtatattgattgtatattaaattatattttaaatatattcagtaccatacattaaaatgaatgtcacttgtttctgatgttctttaaaataaggctgttggaaaacatagcctcgtgttcctgaccctgtctatctctgaggacggcgaggtgcatcatgttgcacacacgtctcatttaatccctcatcgtcccgagatctgggcagcattgctcggtctttgggttcacttcttgctcagagtctgtttgcctccacctagctctgccccagccccaggaagtgaggccgagctgggtgaaaacagaggtcccctgtcccaggccctgtgctttccacagatgcagaagtggccgccctgggacctgctcccatgacaagcgcagcccaggcagcctcctccctcctctaagctcccgctgcagccactgtctctccctccctcggactctcacgcactttactttctgcctctgtaacgtccatccatactcccctggtgggttctcagccctgtatgagggctgattctctgacgactttgactccccgcagtgccttgcgtgtgggggaggccaggcagtgtgggcgcgctctctgtggatgggaagcgggtgggcactggagcggcaggtttgcccgcacacggggctctccaggttccccgccttgggttctgggcctgatgtggaatcctctgccctttctgagtcccaactcacctggctgtctctgtggctttctccaccagctctgagacagtgcttcgatgactttgcagacttggtgccctttgactcctgggagccgctcatgaggaagttgggcctcatggacaatgagataaaggtggctaaagctgaggcagcgggccacagggacaccttgtacacgatgctgataaagtgggtcaacaaaaccgggcgagatgcctctgtccacaccctgctggatgccttggagacgctgggagagagacttgccaagcagaagattgaggaccacttgttgagctctggaaagttcatgtatctagaaggtaatgcagactctgccatgtcctaagtgtgattctcttcaggaagtcagaccttccctggtttaccttttttctggaaaaagcccaactggactccagtcagtaggaaagtgccacaattgtcacatgaccggtactggaagaaactctcccatccaacatcacccagtggatggaacatcctgtaacttttcactgcacttggcattatttttataagctgaatgtgataataaggacactatggaaatgtctggatcattccgtttgtgcgtactttgagatttggtttgggatgtcattgttttcacagcacttttttatcctaatgtaaatgctttatttatttatttgggctacattgtaagatccatctacacagtcgttgtccgacttcacttgatactatatgatatgaaccttttttgggtggggggtgcggggcagttcactctgtctcccaggctggagtgcaatggtgcaatcttggctcactatagccttgacctctcaggctcaagcgattctcccacctcagccatccaaatagctgggaccacaggtgtgcaccaccacgcccggctaattttttgtattttgtctagatataggggctctctatgttgctcagggtggtctcgaattcctggactcaagcagtctgcccacctcagactcccaaagcggtggaattagaggcgtgagcccccatgcttggccttacctttctacttttataattctgtatgttattattttatgaacatgaagaaactttagtaaatgtacttgtttacatagttatgtgaatagattagataaacataaaaggaggagacatacaatgggggaagaagaagaagtcccctgtaagatgtcactgtctgggttccagccctccctcagatgtactttggcttcaatgattggcaacttctacaggggccagtcttttgaactggacaaccttacaagtatatgagtattatttataggtagttgtttacatatgagtcgggaccaaagagaactggatccacgtgaagtcctgtgtgtggctggtccctacctgggcagtctcatttgcacccatagcccccatctatggacaggctgggacagaggcagatgggttagatcacacataacaatagggtctatgtcatatcccaagtgaacttgagccctgtttgggctcaggagatagaagacaaaatctgtctcccacgtctgccatggcatcaagggggaagagtagatggtgcttgagaatggtgtgaaatggttgccatctcaggagtagatggcccggctcacttctggttatctgtcaccctgagcccatgagctgccttttagggtacagattgcctacttgaggaccttggccgctctgtaagcatctgactcatctcagaaatgtcaattcttaaacactgtggcaacaggacctagaatggctgacgcattaaggttttcttcttgtgtcctgttctattattgttttaagacctcagtaaccatttcagcctctttccagcaaacccttctccatagtatttcagtcatggaaggatcatttatgcaggtagtcattccaggagtttttggtcttttctgtctcaaggcattgtgtgttttgttccgggactggtttgggtgggacaaagttagaa

SEQ ID NO: 3772 - DNA, 6000 bp, Homo sapiens
cccggcctccagtgttctttatctcttcgtatgcctttgagctattatctaatgtcattacattacctcctaaaggattccttttagcatttcacagggcagatctactagtaatgtgctccattacctttcatttatctaagaaggtcttaatttcttcttcattcttgaatgataatgttcctggatatcaaattcttggttgcaggattttgtatgcttgtgtttttgtttcttggcactttaaatatgttacccactcccttctgggctctatggttcctggtgagaaattagctaataaccttattgaggttcccttgtacatactgagtgggccacttgctactttcaggattttctgttggtgttgggcttttgtccatttgactataatgtgtctcagtgtagttctcttttaacttatcctgcttggagatcattgagtttcttggatgtgcagacaaatgttttttaaaagtcttgcacctccttgttaaatatcattcctaaatgttttattcatttttatgtcattgtcaatgaaattgttttcttaatttcctttttggattgttctttgctactgcaaaacttttacgctgaaaactatcaaacattgctgtaagaaattttaaaaaagcaaaataaacaggaagatattccatgttcatagatcaaaatggtgttaaattacccaaagcaatatacagattcaatgaaatccctaccaaaatctcagtggtgttattttaaaaatggaagaacttatattcaaagtcgtatggaattaaaaagacttattgaccaaaaacaatctggtaaaagaaaagcagagttggcgggactcacactttccaattttgaaacatatcctcattccagggcagctttagtccccttttctttggatcattctttgactctatagagattcctcccgttttcttcccatggctgatggtgtgagctttaattttgaaggcttttcccattgttgtatgacttctgctcctggtgtatcttccactggctaggagctcattcagaacaggtattaggacattcttctgtgcattttaaaggtctaagatggcactgtctaatatagtagtccctaggcccatgtgattgccaatcacttgaaatatgtgaggcaggtggatcacgaggtctggagttcgagaacagcctggccaagatggtgaaaccccgtctctactaaaaacacaaaaattagccgggtgcggtggtgggtgcctgtaatcccagttactcgggaggctgaggcaggagaatcacttgaacccaggaggcagaggttgcagtgagccgagatcgctgcactctagcctgggcaacagagcaagactccgtctcaaaaaaaaaaaaaaaaatgctactgcaaattgagatgtgccatgagttaaaatatacgcaggatttgaagacgtactgtgaaaaaaatgctgtaaaatatctcaatgttttatgtggattacatatttaagtgatattatctggggtacattaaattaaaatgcattattaacattaatttcaccccttctcaccttttttaatgtgctgagtgtggatttaaatttcatatgtgggctgggcacagtggctgacacctgtattcctagcaccttgggagtccaaggagagtgaatcacttgagcccaggagtttgagaccagcctaggcaacatggtgaaacctcgtctctacaaaaaaaaagtacactaaaaattaacccggtgtggtggtgtgcacctgtagtcccagctatttgtgggtcggggggagagggagggtccgggaggtcgagggtgcagtgagctgagatcacaccactgcactccagcctgggctatagagcaagaccctgtctaaataaataaataaataaataaataaataaataaataggccgggtgcagtggctcacgcctgtaatcccagcactttgggaggcctaggcaggcagatcatgaggtcaggagatcgagactagcctggccaatacggtgaaaccctgtctctactaaaaaaatacaaaaattagccaggtgtggtagtgtgtgcctgtaatcccagctactcaggaggctgagccaggagaatctcttgaacccaggaggcggaggttgcagtgagccgagatcacgccactgcactccagcctgggtgacagagtgagactacgtctcaaaaataaaaaataaaataaataaatgtgtggcttatatttcttttggcagtgctggtttaaggtgtgtaaatgcagaattgatgaactgaccaagctaggtagaggagatttccctcttttggttccacacatccctgaaagaggagtcccccagccaccactgccagcttctgggaatcctgtggcatttcattcaccggcttttctctcccctcccaggacaccatatctcagaagacggtagagattgcatctcctgcaaatatggacaggactatagcactcactggaatgacctccttttctgcttgcgctgcaccaggtgtgattcaggtacagaacatatggaccccatgcctaaaggtggaatgcggggtgatgacataaaagttgtagctaaaatgggatcaggagacctagattctggtccaccttggtcttcatcataccatgttccatgattttgtctttgagctttttaataaataaaacaggcccggcacagtggctcatgcctgtaatctcaacactttgggaggcatcacttgagcccaggagtttgaaaccatcctgggcaacatgagaaaccccgtctctacaaaaatataaacattagccgggcatggtggcgcgtgcctgtatttccagctacttaggaagctgaggcagaaggatctcttgagcccaggaggccgaggttgcagggagccgagattgtgccactgcattccagcccaggcaacagagcaaaaccctgtctcaataattaattaaaataataataatacagaaattatttgtataatgtatgctacatggtaaggaaatcttttaaactgtcagctgcaagggggtggggccatgagccaggccaagtggacagggctggatctcagcagtggcacaggtctgctttggggccaggctctctcccctgggctctgtgctcctggcaggtgctcggcctcactcacccttcaggttctcaggcctctccctcctccccagcaggctgggccttggggaagtcccccaagggctcctctccttgcagtctctcaggtgatcccttgcacttcccttgctactggccatgcaatctaaacgatgcttgtcccctaaacggtgctttcccctaatctaatgtaataaataatgaactgtggtccttttgtatgactcaacgagtgttagtgacagctgaagggtgggtatcctgaatgagccatgagtgtgctggtgcagaaactggccctcagaactccttggcaaactgagttgagctgagtagcagggtcttggggtggggaggaagggtcaagggacacatcaggaaaacacattcccaaaaccttatgctctgtcgtcaggtgaagtggagctaagtccctgcaccacgaccagaaacacagtgtgtcagtgcgaagaaggcaccttccgggaagaagattctcctgagatgtgccggaagtgccgcacagggtgagacaggagccgggggctcccagtagctccatggaaccccaaaagacccaagtctccttgtacccctgtctctcccctgacagcacccgcaaggggcatccttgaggctgtggctgcccctcctggtccctctgcgtgtcaccacccctgccccctgcagcagcctctttccacccctccccagcacgagtccccttgaccaggctgacttgttcactgaccacagaaggccatgacttggggcccatgataattttaggggcccatgaaatgatttaatttctcttgaaataagaagaatgagtagaatgcagccaggcatatattcatctttataccaattcagcaataaaatgtattttttaatatttttatgcatgcaggggcccataaagacaaaagtgcccatggcccacaaaaggcataataaggccatgggtggagctccttcaagttcccatgaggacctgagcccacccagccggcctcacccctggcccctgatccctcagtaagacctgtcttttccctatttgggttttaggggccaagagtaatttgctcttctctggcccccctagtatttgctgtgattgggggaaatgggcagacagctggggacaagagctcacttttgtggttgactggaagaccggactcatcttgtggccacacgggcttgtgaccttcccctggagtgtgattgctcctaacgcaggcctcccctgcagcccagggaagctcagtgtgtgcccagcacagaaggctcctggaactgcagctctgaccccagagcagggaggccgaggggctgaagtgcgcatgctcagacccttccccagcctcaagaagggagcacagggggacccactgctgacacgaggagactgtccttcccctgacaccttctcagggacactggggagggagggtggctcctctttcatcccacctggccagctttccatcaagagtcccccctctccctctgtgtgtgtacccaggtgtcccagagggatggtcaaggtcggtgattgtacaccctggagtgacatcgaatgtgtccacaaagaatcaggtacaaagcacagtggggaagtcccagctgtggaggagacggtgacctccagcccagggactcctgcctctccctgttctctctcaggcatcatcataggagtcacagttgcagccgtagtcttgattgtggctgtgtttgtttgcaagtctttactgtggaagaaagtccttccttacctgaaaggcatctgctcaggtaggtgctggctgagggcgggggcacagggcactctctgccctgccccctcccaccctattcccacagacagaaacgcctgcccctgccccaagtctaagtgcctccagcctggctctatcctcctcctcgtggtcacccccatccccacatcccgtgcaccccccaggaccctggtctcttcagtccctctcccaggtctgggggtccccatatctcccagccaagtccaggagggcagggccagttcctcccatcttcaggcccagccaggcagggggcagtcggctcctcaactgggtgacaagggtgaggatgagaagtggtcgtgggattttttcagccttggtcagagcagaaccagagattttccaagtgtttgtttttactctagttccccttctcatcccccttcctcagggtgtctctgagttgtaaggccccattctgtccccagccccagggctccttgtccagtgtcccagcccccagcccagccctgcgccccactgtcctctgggaggggggtgcttcatgggcccctcccttcctgctaaggagactgcttcttttttaggtggtggtggggaccctgagcgtgtggacagagtgagttgatttctccaggagctgggggctcaggggttcaggaactgcttcctgggacagcagaacctgggtgggtgggtccccattgtcctcatggctgccctgactctctgaagtggcctgggtgctctgggctgactgtgggggacacatggccattttgagcaccacataggctggtgagccctgctgcagcccaggtgacatcctcaccccacagcctgcaccctagggatggggtgtctgcctgagcacagcactgggggcctggccccagcagcgggtcctggatgtgctgagtctgggctgcctgcggtgacctcactgagagggggtggggatgtcaggtgcagctgcatactgaggaccctgcagcgagccctaggtgtggactcctgagtcggctttttgc

SEQ ID NO: 3773 - DNA, 6000 bp, Homo sapiens
tcccagctgttcaggaggctgaggcaggagaatcgcttgaacccaggaggcagaggttgcagtgagccgagattgcgccattgcactccagcctgggcagcaacagtgaaactgtctcaaaaaaaaaaaaaaaaatccatgtttccatttcatttcatctctattcagattgaaatcttttagcattttgtgtactgcaggtctatgagcaatgacgtgcccatactgtctccaatagcacattcaggttcctaattcttaaagccatttatgcccatttactctttcttatttggtaatgacctcacccaagtctcagattagaaacactagaatccaccacaaacctctttcctcttcttaccaaacccattgcatcaccggcctgcgttatcatcatttccctcagatctgcctcagctgccacttgcctccttcacgataatgcaacctgaccctcaccctaaccactaggacccatcccgaatgctgtccaggccacacctgagtgcacccacctagtccactctccactgggtgaacaatgatctttaatgggtggatctgatgagggatgtccccggggaaaacttgacaatggccttggtgactctggacttgggtgatcctccgtactctattcagatcctctgttctgtcctcagcctgcctgccacactccccacctctcacgtttaacacactctatgagcaggctgaggacacaacgtctgggttagtgcagcttcctagaatccacgttactcattcattcattcatggaaggcatgtaggcgcctggcgaccgcatatgcaaggagccgtggagtatcgggaacatggcacggcccttcctttccttagcacagtttccattcacaggagctgaggcacagccatcattaaccccaaagtccatgaacttgcaaagagtctggaggggctgcccaggcagaggtgacaaatgccatcggtggcagggacagtagtggacatagaggaaagagtgcacacagacagaatcccagacagacaggaatccagtgtaatgggggaggggagtaaaaacaagagaggtactgctgaattaatattgtaatatgattacaaaatgtaggagagttgaaataatatagatccattcatcaccattcactctttctgctgtgcaggacgaggctgtgccgtccgtgggcctctctgattgagggagaatgggcgtgtggccagagatgcacagctgtgttgggccacagaaatgggctcatgggggtgtccatgggcatggttaagagagagaaggaaaacaagaagaagggaggtcaggggtttggcttatttcagttcttgtcccattgaattctagggaccctgcctcctcccggacatgagccattggcggggtttccctgtcttgtgactcacccacctgtgattcaggctccttgctttacaccaagtttgagcataaaacctgctaatatttctcgtcaaaaattaacccgagtaacctcttctttcctctctgagtcacccacatccttaaaactgcccaggataatcacagttcctgcataggttgttgtgtgaactgaaagtgttaatatgtatggaaagtgcttaaaacacagaactttaaacacatgctctgattagtacgatcattaccctcaatgttgattttaagcaaaccatattatcctggccaaactaccatgacctggagccttgggactgcacagcctccctctgtcagtcaaatatggagggatgacatctctggagccagcacagccactctggaggtgggggaggtgacagtggtgggacctcatgcttcctgatagttatttaggtccctgctgtcacctgctccaccagactgtgggctccagggagtagtcagtattcacacagggctcatttgtccttccccaacccaggcacagattttcccagagtaaagggttcctcctctacctgatgaatgaatcactcctgtccccgccgccaagcacatgcagtgagactagctgtggcctcagctcactgcgtaaggacagcctccagctacagcaggggcagaggaccctgtagagctctgtagtctctgttgagaaccacaggcaggaactcccagaggccaagtgcagggcagagactgggagaagcagctgcctggaggactctggatccttgcagaagacatgtccagtgtctgctgagactgactctaggtgcctgagaagaagccacccagggaaggagagactagattgtggaccactcagggctgggagatctgcatgttccccttcccacagtggacagaacgcatgccagggtgctggcgagttaccatcagaagtcaaccactataactttagtagttaactaaatgagcccctgaataaggcaactgaacacaaggtatatagttatatgtagataaaagctagtatcagaggagcaaactgatcctcagttttctgtgaccagaataatgcccaatagactttgaaagaacacagtgatgttcggtacccaagaaagcaaaattcacaatgtcaagcaataagaaattactatgcatgaaaaaaaaagtccctatgggcaggaaaaaaaatgtaatcaacagaaacagtggccgtaataacagatataatggtgttgatagattaaataacttaaaacaggtcatctaaagcttacaaatatactcaagaatatttaaaaaacagaaaaacaaaaaacaccaccaccaaaatcataggttgcgcacggtggctcaggcctgtaatcccaatactttgggaggacaaggtgggaggattccttgagcgcaggagtttgagaccagcctgggcaacatggtgaaaccccgtctctactaaaaatacaaaaattagccaggtgtggttgcaagtgcctgtggtcccagctacttgggaggccgaggtgggaggatcacttgagcccaagaggttgaggctgcagtgaactctgactgtgccactgcactccagcctgggtgacagagtaagaccctgtctcaaaaaagaaaaacacaaagatgaccaggaaatagatggaagatattaaaaatgccaaaagagaacttctaaagttcaaaaaatatatatctgatatacagtagatgagattaacagcaggttagattctgcagaagcagatcaatgaacttgaagagccctcacagggaaatgtccaaagtgaaacatagaaaatgatgggggaaaaaaaagaacagatactaagttagctctgatacaaaatctaacattctaacgtaaatataataagatctcagtcaccagaagagacagagtatttgaagaaataatggctgaaaatcttccaagtagaacataaactcggctgggcgtggtggctcacccctgtaatcccagcattttgggaggctgaggcgggcagatcacgagccagaccatcctggctaacacggtgaaaccccgtctctactaaaaatacaaaaagttcgctgggcgtggtggtgcatgcctgtagtcccagctacacgggatgctgaggcaggagaatggcgtgaacccaggaggcagaggttgcagtgagctgagatcccaccactgcactccagcctaggcgacagaggcaagactccatctcaaaacaaacaaacaaacaaacaaaaacataaactctaaaaccccaaatccaagaaattcaacataactctgttgtggctttctttctttcttttttttgagttggagtcttgctcttgtctcccaggctggagtgcagtggcgccatctctgctcactgcaacttctgcctcccaggttcaagtgattctcctgcctcaacctcccaagtagctgggattgcaggtgcccaccaccacacccagctaattttgtatttttagtagagacggggtttcaccatgttggtcaggctggtctcgaatccctgacctcatgtgatctgcccgcctcggcctcccaaagtgctgggattacaggcatgagctaccagacccggctgttgtggctttctttacagaaaagtctccaaggagaacataaactctaaaaccccaaatccaagaaattcaacacaacccagttgtggctttctttacagaaaaatcttccaagtagaaagaacatgaaagtctaaagccaaaaatccaaaaaattctttatagagataaaaaaaaaaccccacaacagagcaaacaaaccaaatcactgcaaaccagtgctaagaaaaatctttaaaagcagccagagaccaaagatccaccacccaaagagaggcaagatgccctggggacctaggcccacagaaaccacagcaggagggggaggcagaggcccctgtacactctcctcactaggacagttaggtcctccctccactcagaggtgagaccaaggacatactgtggtgtggggcggaaacagtgaaaacatgaggtgtgtaacaatatcccatgaaactccaatgcttcacactgacattcttctaggtcaacaccagcattctcttgaccttcctttcactgttcctcctctcccttccagcccctctgtacagtcttgagttaggtctaggcccacacacttccccactctgagctgcggtctcttcctctgtaaaatgtgatgattcagaacctctcctggccccaagcgcagttccaggcgctgagcacaccatgctgttccctacaaagccgactctttgtcccttccccattatcacggatacttgccaagaggtggcaagaaaggctcttcccaggccaaaatgcagctgctattatcaagcaggtcaggccccaagtgccacaactcccttctcctaaatctcgttttcccaaggaaccccaaacaatggcattggcgatgagcggccccgcacgcgtaggggcgcagccgctaaggaggggaaggggcctctccagctgcgcccgcgacgactcccgcgcacggaacggaaccactgggccgcagcgaccacaggggagttcttcgccggccgcaggttcaaagcgatctgcaatgagcgcctttaggaattcattcgaaggcgcaaaagaaaaagaaattaaggcaggaactgagcgaggaaggaagggagggaaagaaaggaagaaagagaaaaagagaaagaaacagaaagtaaggaaagaaaacaaaatcaaagtccgacgacctctccgtggcttcacgcagcttactcgggaattccctccttgtcgccctcccccactggattcgggaatttacaccaagtggagcgcgcgctctgttccctggcggcccaggtcgctcctgcccaacccggggacccatctcttcccccgactccgacgactggtgcgtcttgcccggacatgcccggccgcaggcgacccgggccacgcacccccgccgtgtccccctctctccctgccctctccaggcgccaggcacgctcttccccagccagggaccgcggcggggactcaccaacagcaggaccgcggcgacaacgagcacaagggtcttggggacccggggcccaggcctggctccccgcgcctccctgggtcctgggccgtgccttttccgggcccccgaagcggccggggcgttctgtccccgttgttccatggcggtagggaacgctcttatagtctctcaggcccgtgggtttcagcccttaaagtagatcgggcatcgtcggtgtattttgtgggcgcagagattgcggggttctccggccgcgtgctgatttatgtgtccaggctgacttggggcggcgcggctgtactttcactgcctccgggcaggcgtcattcggggcggggcgaatcagatccaatgtgcaactgcaaattccaccacaggttggtgacaataaataagagtctcgtcaacgcaatcctccgcaagcgcgtccaagtggggaggggaggggaagggaccggaactaaccttcgccctg

SEQ ID NO: 3774 - DNA, 6000 bp, Homo sapiens
ttgttgttattgtttgtagagatgggttttgctatgtttcccaggctggtcttgaactcctgggctcaagtgatctgcccgccttggcaggactacaggtgtgagccattgcaccctgcctaccctggcccattgactattatgaattaaaggctattgaaaaacagcaggtgcatcgctggcaaaagtatacttgtgtaacgaacttgcacattctgcgcatgtatttcagaacttaaagtaaaaataaaataataaagtaggccgggcgtggtggctcacgcctgtaatcccagcactttgggaggccgaggcaggtggatcacaaggtcaggagatagagaccagcctggctaacatggtgaaaccctgtctctactaaaaatacaaaatttagccgggtgtggtggcgggcacctgtagtcccagctacttgggaggctgaggcaggagaatggcgtgaacccaggaggcggagcttgcagtgagctaagatcatgccactgcactccagactgggcgacacagcaagactctgtctccaaaaaattaaaaaaaaaataataaagtattcagggataaagagagaaaaataaatttagattgtatacatatgtaaaatatattttaaaaggtaagcttgtcttttttattccttaaaggagcagatattaaaaaaaaaagaatagaataactcatctttttagcctccacatatttacttgcttcttcccaagttacttggtctaattcagtatataagtaactgactctcactgctttttctgtgccatgtaaaacttgcattgtattaatttgtgtgcttttctcctgtggacctgtcttatgtcaacttaattctcaggcccagccaaaaaaaaaatacccttaaagggagcttagcttgcctccatgaccctcaatggtggctgtaatcaaaccacatcttccaggcaaacaataccacatcctatggccttgcaatggcatggcctccctccagcacagcctctctggaggagggggaggcaagggtggtgagatctcaggcctccctcatgctacctcctattagttatatgacccctggtgtcacctctcccaccacactgtaggctccagggagtaggattcacatggggttcatttgtcctccctgccttcagcagactccaggcacaggtgttcccagagtaaagggctcactgtctgcttcctgggtgaatcattctccccgcaaacccatgaggtgagtgcagtcgtggcttcagctcaccgcctgacaggctccaggctgtagcacagggagggccctgtggactctgctgaggaaccatacgagctcccagaggccaagtgcaggacagagaatagagaagcagctgctcagagaactctagccctgtagaggtgcaaatatggctgctattatacagaaggtgaggccaaaaatgctggagacactgctcctgaatctcagttttgccacttgtaaaacagggaaaacaacctactctcatgtccccaggttgttaggaaaatccactacatgaagatgtgcagtctctggctgggagcaggacaccagctgcccaacagcacaggctcagggcatggcactgtctccactgtccccatccccaacctggaagctagagcctcgctgccctgccacttctggatgcaggacagagaaccggaactgggactgtggtctctcagtagaggctgtgaacagccatctgtggccacacggattgagacctttcctgctcactcttcaaactggggcaccggctgggtgcccaacagaaagacaattggaagagtggcaggtaaaccaggctgtggccctgcagtgccatcaccgtcctcatttgaattctggctcgtctgttcctctacggcccctccgcatggcgctccaccccagtcttcagaaatttctgcctcaagctcagggagctggtactgaggtacaggtaggagaaggtgcagcctctgctgagtggaggacatgtgccctggggatccagagtctagagtgactgacaccagccctgcaatttgtcctcctagacctgttaacagagcctgcagaagtttacacagggctgctgaagatttttatcccctcattttacaggaaggagctggggccataccagagtcagagctggaccgggagcacggcagggcccagccatccacagcctccaatttcagtactctctaacaacctgagagcctgagccttcggatcttcttgattcctactttgataaagagagggatggggttggaaggacctggcatagagattggaccagtccggcattgacagagccaggacctggggtccggaactgagctcagctccaggctcatctgaagtcaccctgacagcctgaggatggagaccttatttccattaacaggcatggcggttggcagggactggccccagctgagcacggttttccaagtacacagctgggaattaagtcttctctgccgccctcccctgtagtcttgcctggatccccccagtcatctactcccagtaccaaaaactcctgtattcttgaaaatccgtagtactgagaggtgacagcttgctggcagtcctcaacagccctcgctcgctctcggcgcctcctctgcctgggctcccactttggcggcacttgaggagcccttcagcccaccgctgcactgtgggagcccttttctgggctggccaaggctggagcccgctccctcagcttgcacggaggtgtggagggagaggcgcgagcgggaaccggggctgcgcgcgcggcacttgcgggccagctggagttccgggtgggcgtgggctcggcgggccctgcactcggagcagccggccggccctgccggccccgggcaatgaggggtttagcacccgggccagcggctgcggagggtgtactgggtcccccagcagtgccggcccactggcgctgcgcttgatttctcgccgggccttagctgccttcccgacgggcagggctcgggaccgccatgcctgagcctctcaccccctccgtgggctcctgtgcagccggagcctccccgacgagcacctccccctgctccagggcgcccagtcccatcgaccacccaagggctgaggagtgcgggcgcacggcgcgggagcacggcgcgggactggcaggcagctccacctgcaaccccggtgcgggatccactgggtgacgacacctgggctcctgagtctggtggggacgtggagaacctttatgtttagctaagggattgtaaatacaccaattggcactgtgtatctagctcaagttttgtaaacacaccaatcagcaccgtgtgtctagctcagggtttgtgaatgcaccaattgacactctgtatctagctagtctggtggggccttggagaacctttgtgtccacactctgtatctagctaatctggtggggaagtggagaacatttgtgtctagctcagggattgtaaaccaccaatcagcgccctgtcaaaacagaccactccgctctaccaatcagcagggtgtgggtggggccagataagagaataaaagcaggctgccagagccagcagtggtaacactgtggaagcttccttctttccctctgcaataaatcttgctactgctcactctttgggtccacactgcctttatgagctgtaacactcaccttgaaggtctgcagcttcactcttgaagccagcgagaccacgagcccaccaggaggaaagaacaactccagacccactgccttaagagctgtaacactcactgggaaggtctgcagcttcactcctgagccagtgagaccacgaacccaccagaaggaagaaactccgaacacatccgaacatcagaaggaacaaactccagacacgccgcctttaagaactgtaacactcaccgcgagggtccgaggcttcattcttgaaggcagtgagaccaagaacccaccaattccggacacagtaccatgaaggaatgaaaatacataacaatgtgatgtatcatgttttatttcctagactagtgacaaatgaaagctaagtgtagcaagggtgcagggacacaggcacatttgtggactaggtgtgagtgtaagctgggttcgatggtcttttggccaacatagtgaacccctgtgtctactaaaaatacaaaaattagccaggcgtggtggtgcaggcctgtagtcccagctacatgggaggctgaggtgggagtatcgcttgaacctgggagacggaagttgcagtgagccgggatcacaccaccgctcaccaatctgagccacagagagactgtctcaaaaaataaaccacaaggaagggaggtagggggagggggagggagggaggaaagagaaagagagaaaggaaggaaagagaaagcaggaaggacggaaagaagacgaaagaacgaaagaaaacgaaagaaaaaaggaaagaagagagaaggagagaacagaaggggcaggtgcccctgggaaggggagaagatcaagacgcgcctggaaagcggactctgaacctcaagaccctgttcacagccaagcgcgcgaccccgggaggcgtcaactccccaagtgcctccctcaactcatttcccccaagtttcggtgcctgtcctggcgcggacaggacccagaaacaaaccacagcccggggcgcagccgccagggcgaaggttagttccggtcccttcccctcccctccccacttggacgcgcttgcggaggattgcgttgacgagactcttatttattgtcaccaacctgtggtggaatttgcagttgcacattggatctgattcgccccgccccgaatgacgcctgcccggaggcagtgaaagtacagccgcgccgccccaagtcagcctggacacataaatcagcacgcggccggagaaccccgcaatctctgcgcccacaaaatacaccgacgatgcccgatctactttaagggctgaaacccacgggcctgagagactataagagcgttccctaccgccatggaacaacggggacagaacgccccggccgcttcgggggcccggaaaaggcacggcccaggacccagggaggcgcggggagccaggcctgggccccgggtccccaagacccttgtgctcgttgtcgccgcggtcctgctgttggtgagtccccgccgcggtccctggctggggaagagcgtgcctggcgcctggagagggcagggagagagggggacacggcgggggtgcgtggcccgggtcgcctgcggccgggcatgtccgggcaagacgcaccagtcgtcggagtcgggggaagagatgggtccccgggttgggcaggagcgacctgggccgccagggaacagagcgcgcgctccacttggtgtaaattcccgaatccagtgggggagggcgacaaggagggaattcccgagtaagctgcgtgaagccacggagaggtcgtcggactttgattttgttttctttccttactttctgtttctttctctttttctctttcttcctttctttccctcccttccttcctcgctcagttcctgccttaatttctttttcttttgcgccttcgaatgaattcctaaaggcgctcattgcagatcgctttgaacctgcggccggcgaagaactcccctgtggtcgctgcggcccagtggttccgttccgtgcgcgggagtcgtcgcgggcgcagctggagaggccccttcccctccttagcggctgcgcccctacgcgtgcggggccgctcatcgccaatgccattgtttggggttccttgggaaaacgagatttaggagaagggagttgtggcacttggggcctgacctgcttgataatagcagctgcattttggcctgggaagagcctttcttgccacctcttggcaagtatccgtgataatggggaagggacaaagagtcggctttgtagggaacagcatg

SEQ ID NO: 3775 - DNA, 6000 bp, Homo sapiens
gagcaaacacctcttccgtactttttcaaaatttattattttacccagataaagcttataattgtaagatttcttccattctccccttccaaagaaaatcagtggcatttttatcaatttatcttaaaactaaaaattaatctagaaatacttaatatcttatcaatattcagtatttccttatccattttgaagtcaagtattttattataactgagttgtgatttgttttcctcttcagataaatttattcctatttcttttcatggctgtttggtattttgtaatcgttataagttgcatagccttgtaattctgtttgctaatttattgcatctactatgtttttaacattccttcagacatacatttatatttccatatcatagtttcattcttagggttgtttgtttctgtttgtttgtttttgacagagtctggctgtgtcgcccaggctggagtgcagtggtgcaatctcggctcactgcaacctccgcctcctgagttcaagcgattctcctgcctcagcctcccgagtaactgggactacaggcatgtgccaccatgcctggctagttttttttttttttttttgtatttttagtagagacggggtttcaccgtgttagcaaggatggtctcaatctcctgacctcgtgatccacctgcttcggcctcccaaagtgctgggattacaggcgtgagccactgtgcctggtcggccccattcttagggtttttaagtgacattgaatataatgattattgtgtctgcccacttccaagaatcttgcctcatttttgttttccatcttgttgcacaggccagaaatttcagaaccatgttcagctgcgcttagggaaggcaggtgtttgggtcctgatttgatttccggggaaggcctctaacatgccacctttaggaatggtgttcacttttggtttcatatagaaagaaattcacatcatcaagaatgcagcctcctattctaaaggggttccaaaaattcagaattggtgtttaatttcaccaaatgtcttttcagcctccatagagactgatgctttatttccttatttagattgttgatatggtacagtattgatgatcaaagaacttttggagtcttggaataaattcttttgttagatgtttcctgagcgctctcatacatagtcctctgttgagacttctgttggtaaaaattctgtaatgaagtgattctctcctgtgagggtgggtggaaattgatgagatggggaagaaagggactttctggggtgtggcaatgttctatgtcttgatcataggattattacacaggtgtatacagtagtcaaagttgggcagaacacttatgaagtgagcatttactccctgtcacttttgtttcaatgagtcaccagcacacagagcccaagagctatgcaggaccagaggtttgtctccatctccacagagacctgagaggggaagctctgtaggtctcttgctggctggtgatcggggtcagtactagactgcaggattcctgactctgaccagagcattccccactgtgtgttacaggaacaggcaaaagctgaaagggtcatgggaggaggctgctggttccagtgaatggcgctgaccccactgagagtaagtgttttgtgcctggagatgtagaaggaatggaggcaatagggacgatgtcctaactgctagccccatagctgagagtgctcttctggagcattccctgctggaagtagggggtcctatgccgatcctgtgctgatgatctttggagcatgaagaccctaaatccctctctttcctcttcttctcagtcaacaccttgctggaggcctcaaacactgaaagaaagacatgcaaaggaaataattcaggaccaactggtgggctccaaaaatctcttctatgaggaaggtgaatgcaggctctgctacgtcctgcctgtgaaagaatcccttcaggaaaccagagcttccctcgtttaccttttctcctacaaagggaagcagcctggaagaaagagtccagtacttgacccatgcctcaacaaactctgctatcaatatggtgcagcttaccaaaggtcctagaactttgtcaacgcacttggagtaatttttatgaaatattgtgtgtgataagcaaactgtggaaatttatataagatgttggtggcatagagttatacgattgtgtattaagggtagttttaggatgtcatttttttttcagttcatcatgacagaagtccttttcatgagagaagtcacatgagaaaaaactttcttatattgtaagctccttctatagtggtatgtgcatttaatgacatccaactaaagatggtgtaataccacggtggtttgacttagagttttttaactttatatctggtttatctgggtattacatgcgttttaaatgtggatcttttcaacttacgatgagattatcaagacatagccccatgctaagtcatgagcatgtggacttataatggttcaatttagatttttcggctttaagataggattattggggcttacccccatcttaagtagagaaacatctgtattgtgtaatactatatgatgtacatttttctgttttcctattttcgtgcatgttgatgtaagcatggaaaaattttaggaaatgtatttattaggctgtttacatgggctgcctggtgcaaatcagcagtcaaaaatgactacatacacaactagcaatgggaggagaaatcctccctctgtgggaggcactgactacattccagttctccctcctacgcccagagactggaccagggtttgatgactggcaacttctcaaggggccggtctgtcttagttgatgattttagaggtatatagaggtatttatttacaaataaacaaatatttatttataagtagatgtttacatatgcccaggattttgaagagcctggtatctttgggaagccatgtgtctggtctgtcctgctgggacagtcatgggactgcatcttcgtccttgtccacagcagatgaggacagtgagaattaggttagatctgggactacaaatagcttctctttcaagtgccattacagctgaacattagtgaatcttgggccttctttgggctcagggcagagcaggtgtttatctgccccggcatctgctatggcatcaagagggaagagtggacggtgcctgggaatggtgtgaaatgattgctgactcaggagtggatgggcccctctcgcttctggtggtctgtgaccctgagcccctgagctgcattttacggtaaagattcctgagctgcagcatctgactcatctcagaaatatcaattcttaaacactgtgacaacaggacctagaatggctgacacattaaggctttgtccttgtgtcacgctctattattttatttaaaaacttcagtaatcattttagcctctttccagcaaactcttctccatagcagtccagtagtggtaggataaattatggatgtagtcgttcaagggattttggtcttttccatctcaagccatgtgttttgtcttgttccgggactggtttggctgggacaaagttagaattgcctgaagatttaggcacattcagtgttgtgtccatggagttttaggagggggtagcctttctggtctttgcacttccatcctctcccacttccatctggcgtcccatgcgttgtcccctgcacatctggaagacacaaggtgctgctgccacctggtctttgcttttgcagggccttctgtgcaggacacttggcctcaaagcccagagggagccagtccagccccagctcccttgtgccttccgtagaggccttccttgaagatgcatctagagtgtcagccttatcagtgtttgttaagcttattcttttaaagtaagcttcctgacaacatgaaattgttggggttttctggagttgtttggtttgtatgggatttgctttatccccaagccaaacagcacatgacacacgacagccacttaagacagtgtgtcactcgtggttagagtcctttgatgtttctgccctatggaccctatttgaagactatgttgtaatatcaaacaatacaaggaagcacgttatacagaaaatgctcatatgtttatgaattttgaccaaaataaatatgaaatcttatattaaaagaggtgtgtttttttttccccctgttccccctcctcctgtgaatcagctctgagtgacaggaggccaggctgtgttcctgctaggactccttcctgccttcctcccctccctgccttcaggcttggcctgctgggggtgtttcctgcatccgagtccccggagtttaaagtgctaggttcctggggactggaattcatacctccttcccccctctctcttctgcctgcccctccgtctggggacagggacaccagtgctggcctggcttacccacagcctctcaggagggttctctgggcagccgggttcctgcatccagctctgatagctgtcgggcaagagtcagtgggtccctgagaggtggccggccgtggtcgctgggggagtcccgtggacactttcctgcggcttcctccagccctgggccgaccttcactttctctgtcccggcctttcctgcatccccataagtgtacccaggttgctcagccctgcaggcacctgagagacccatatcccgctccccttgccctggagagcccgctctccctctcgcccaggcgtgcccccatgctatccaccttccccagagcggcggtgggggtgctctggggcttccccctgccctgcccatgggtttctgggcctcacttggagccctgggctgggctgggctgagcagcagggaggctgagcagcctgtagagggcagcacacgcgcggcttcccagccagccgccctggaggacgtggaggggaggcagccacagtcctggagaggcctgagcctgaacaacatggcttcccccagcgtgagactcgcttgtcctcccaccgcctgctctctcctgatgaccaggttccaggagttatcaaagaacagcctctgagctgcgtggagaaagccatggagacagccaggtgagttgggagtcagttcagaaagggcagagggtcccacaacaggcccagaacccagcgggggaacctggagagccccctgcgtgggccaacttactgttccatcgctcacccacctcgcgtccacagagagccctcccacactgcctggcctccctggcacccaaggcgctgccagaagacaaggtcaccagataatctgtcctcagagagggctgagaacccacccggggagtatggaggaaccctacagagggagaaagcaaaatgggtgagagtccaagggagggagggagagagagtggctgcagcgggagctcagaggagggaggaggctgcctgggctgcacttgtcatgggagcaggtcccagggcggccacttctgcatctgtggaaagcacagggcctggggcaggggacctctgtttacacccagttcagcctcgttccctgagactggaacagacgtaggtgggggcaaacagactctgagcaagaagcgaacccgaagacagagcaaccctgcccagatctggggcctatgagggtatgaacccaaaatacctgagacaggtctcaatcaagttagaaagtttattttgccaaggttaagcaagcggccatgacacaaccttaagccatcctgacaacatgtgcccaaggtggttggcgtcagcttccttttgtatattttagggtgacatgagacattcatcaatatgtgtaagatgtacattcacttggtccagaagggcgggacaactagaagtggaggcttccaggtcataggtagataagagacaaaaggttgcattcttttgggtctttgatcagcctttcactgaatacacaacatatatgtaagagg

SEQ ID NO: 3776 - DNA, 6000 bp, Homo sapiens
ggcctccgttccctctgtcaggtcctaaaagcaggacaggtctcagcaaacatggagcttccccctcccagatatctggaataattgagctaagagacaatgtcatctccttctcagtattactgtaatataagatttccctcattacataaaccatgtattcattcctttactctcagcaactcctcctcctcgttttcatttctactcaaacttttctactttggaaataactgtgatgggctggcagcaatactagtgtaacaagtgtgtcccttcagtgcacatccattcatacagggcagggttacacaggtgtagaactagtgggctattttaccaataggcaacaaattagtccattgtgtgttgctataaaggaatatctgaggctgggtcatttataaagaaaagaagtttatttggcttacggtcctgcaggctgcatgagcatggcatctgcatctgctcagcttctggtgagggcctcagggagcttccaatcatggaagaaggcaaaggaggagccagcacatcacatggtgagagggagcaagagatagaggtgagaggtcccagactcctttaaacaaccagctctctagtgaactaacagagtgagaactcactcattactgtggaaagggcagtgagccattcatgagggttcttcccccatgacgctaacaccttcaccaggcccataccaacctcagggatcacatttcaatatgacatttggaggggacacacatgcaaactgtatcaggctatgtagctgcatttactgttagccccagttttgcaagactggggtcccatcaggtccataagaaaattgacagaaaagtctaaacacgtagtctgttcctggcttaggggtcgtcgctgcttccagcgtttatagttgtagccctggccctgtggccaaggtaccaggtggtgggtggggagaaggggagaggtgaggtaatacagggaagacagacaaaaatgacggtcactggccgggcgctgtggctcatgcctataatctcagcacttatgggatgccaaggcaggtagattacccgaggtcaggagtttgagacctgcctgaccaacacagtgaaaccccgtctctgctaaaaatataaaaattagctgggcgtggtggcgggaggctaaggcaggggaatcacttgaacccaggaggtggagtttgtagtgagccaagatcatgccattgcactccagcctgggcaacagagcgagactgtgtctcaaaaaaaaaaaaaaaaccactaccaccaccaccaccaccaccaacaaaatgacagtcatcacactagcatcctccctacctcctcatccccagatccactggaaaaatggaggaaagtctggtggggacactcctttagcccactcgtgtggagtaggggcacacaccagtgaaggtgtggaagccagcccttcatgcctgtgtctccccccattttagacaatcaatgtttcagttgactgttctgcttccctgtcaaattattactctaaggagggtatctctctgcccattgctaaacattatgcactgaacggcatgtttcttggtccaaggaagtgcgacttagtggtccaaactagaataataccttatttcagttcttttatattaatagcactctgggcatttgcagcctccaccaggtaagcaaaagacaatccacagtcagtttctgttcctgtcaagactcacctgtaccccccagggcactgccctcagtctcactttccaagtatgttgagggcctccccatcagggaatctgcctcatagctataggcagtctgtgtctctcccgctgctagacagaacagctcttattggcattatgtgcctgagagagagcaagaggaatgtgtttcgattcagcccatctctgcatcactgtggttcccccataaccactccttttatttaatggcctctggtgaccacctcaagggagtacatggtgggtggtatctcttgctgatgtcaatcactttccaaacctgaggcaggttctactgagcagtatggatgtgtcctactttaatgcgctcctcaagtccccctagagattgccatggggtcaggcctcatatggacatcccttcaataggccagttttccattattcttggaaacaatggggaatgtagagacgaatatccaaatttaatacactttatttgaaaagcaagaattgcaatgcttggcatatacaaagaccaacttgtctttgatatgtccaaagaccaaaaagagaagtttagaggcttttttaaaaggagaaattctggccaggtgcagtggctcatgcctgtaatcctggcactttgggaggccaaggcgggcggatcacgaggtcacgagatcgtgaccatcctggctaacacgatgaaaccccatctgtactaaaaacacaaaaaaattagctgggcgtggtggcaggcacctgtagtcccagctacttggggggctgaggcaggagaatggcgtgaacccaggaggcagagcttgcagtgagccgatatcgcaccactgcactccagtctgggtgacacagcgagactccatctcaaaaaaaaaaaaaaaaaaaaggagaaatactaattatttttttttctaggaagctcattggcactgtcaaatttgaagaagaggcgtgctctgactggtgagtgactgcagtgggtcaggctggtcttagagcagtagcaggttatgtccatagatattagataggactattaatagtttcaggttacagctgccaggcttacagagaattgcagtttgggggtaatacagtgatttttcttccccatggcctcttgactctgttttagttgggtgtgacaagaatgacccaatttgtgcaatcaactttcacattctgcttcccaactctatgaccaagacgttgaggactgttcatgagccagaaaacaactcaagtacaggggcttttgctgctgtcaaatcttccatcacgctaggaaaacagcatgcaatccaacccacctagccaatttgcctttgccttcttccatcagaggggtggccttccaaataggatgttgaccattcacctaggaatgactgtctacaaactaagtagctcttggttggtcagtaaagagctgcgtatagggcagtgtccaagtgaccacagaatccagcagctcctcactcagttccagactcagtctgtggggaacagaggctccctgctcatgagtgtctcctctttgccttcctcaggcaccaggatcccgtatcaaccatttccattttgtaatagaactcttcggggactgccctccccgttagagcttttccaagatctctgaagacatcatgagtttttcaggtttcaagattattttatgtccttcagtcacagggggagcttcagctagtgttccatcgtaagctagtaagtgcctctcaaatggaaactttatagtctaaaggcccagttccctggaggtgctcacagccttttgccattagccctaggcagtgctccacacagggcacagagaatgtgtgttacctgcagtctggtttctagtctacactgtgtagtccaccctccagggccaaggggcctggagtgctctaaagactttcctgcaggccctcgtggctctgtgttaatgctgtcagtcttcctgaagtcctgtcctctcacctcctgcctagatctgcccccagcacacattcctgactccacacatttctcagtgcctgcgacctggcacacatttctgatccgaactcagtgcctggggcctggcaggtgcccagggcactccattgctcaaatccaagcctgtggagaggatgacatatcattcccaggtttctgatgagcagaaaaaaaaatctttgtttctatagtgctatcctcttttatccaccatgtgagaggtcaggagccgactcaccccaagggtctaggagttgtgccattgaccttactgcctagggtcacaggctggcacccttcagtaccacacattggatctctccacacagcagcagtgtgcttaactcaatggggaggtgagtagcccaaggtcagatagttggacctggatagacacttgactgggggacaggctttggaagccactcccctgggcctcctctgtccatggggcctcaatactagagcccacaaggtcggccagagagtgtctgtgcctcgaccatgcaaagggtgccaggttgtggctagggatgcccccggggttcctctccctcctacctactcctcagcctctgcatgtgcccgtcatggcccctgtgtccttcattctgtccactcatgtgttcactgggcccctccttggtgccaggcacccgctactgagggataccaagcccctgccagagaagcttggagctgggtcacagcagcaaggaggctggagacatcagtggcatcagtgcactggtcagtgaggccgctgtgggaggagggagtgggagcagaagctaagagtggactgaagtccttaggccaggaggtagttcagggtttaagaagaggagagacaggcgtcccggggagggagcaggctcaggatgggcctccagtgcctcctctggagctcactacccagactacagcagcgcagtgggcagcgcctcagctccttccccttctgctgcctacagcctggacaggacccggaatcaaaccgcaggccctgggtcaccgctgccggaaagagccagttcctgtccgtccatgcacccaccaccaaaacccaggccttcctggaggtgctaggggaggccatgccccttttctgagtgcttggaagtgactgctgcaagtgacaagtgaccacgccttttcccccgcgggtataaattcagaggcgctgcgctccgattctggcagtgcagctgtgggaacctctccacgcgcacgaactcagccaacgatttctgatagatttttgggagtttgaccagagatgcaaggggtgaaggagcgcttcctaccgttagggaactctggggacagagcgccccggccgcctgatggccgaggcagggtgcgacccaggacccaggacggcgtcgggaaccataccatggcccggatccccaagaccctaaagttcgtcgtcgtcatcgtcgcggtcctgctgccagtgagtcccggccgcggtccctggctggggaagagcgcacctggcgccgggagggggcagggagacggggacacggcagggatgcctggccctggtcacctgcggccgggcatgtccgggcaggacgaactcgccgtcggagtcaggggaagaactgggtccccgggctgggcaggagggacccggccgcgagggagcagagaggcggtccccctggctgccccgagcccgcgaagggagggaagttccagaatcgagagagggagggagtcaaggtggaacccatagagtgagcctcctgaagacacagagcggttgcctctctcattaattaattaattagttaataaaattaaccccatgtttacattcttaaacgtgttccttggagatcggtttaaccaacagccagtgaaaaaacttttcagcgctgtctttagcaactttcacctcctctgtcctgaaagtggcaggaagccggaatgtggcaggaagcggttaaccaaggtgctgccttggttaatgtcttccactaccacccgtgtgtcccctctgtatcccataggcaggaccggggctggccccttccttcagcataaacggtgtaaagttgttgtgagttggctttggaaactgagattggtagtagtgtgagtgcaaggacatattatgtataaaatatgcagacttctaggtctctttcagattgattgaggtttttgctaacagccctttttaagattctttatgtaatacaaaaaaaagaaaaaagaaaaagaaaaggccaaagcaaggttac

SEQ ID NO: 3777 - DNA, 6000 bp, Homo sapiens
gcttaggagtcgtcgctgcttccagcacttgtagttgtagccccggtcctgtggccactgcaccaggtggtgggtggggaggaggggagagttgaggtaatgcggggaagaaagacaaaaatgacagtcattggccgggcgcggtggctcatgcctgtaatctcagcacttatgggaggccaaggtgggtagatcacctgaggtcaggagtttgagaccagcctgacgaacatagtgaaaccctgtctctgctaaaaatacaaaaattagctgggcatggtggcgggggcctgtagtcccaggtactcaggaggcatcacttgaacctgggaggcggaggttgcagtgagccgagatcatgccattgcactacagcctgggtgacagagtgagactgtgtctcaaaaaaacccaacaacaacaacaaaatgacagtcattatactagcatcctccccaccccctcatccccagatccactggaaaaatggaggaaagtctggtggggacactcctttagcccactcgtgtggagtaggggcacacaccagtgaaggtgtggaagccagcccttcatgcctgtgtctccccccattttagacaatcaatgtttcagttgactgttccgcttccctatcaaattattactctaaggaggatatctctctgcccattgctaaacattatgcactgaacagcctgtttctcggtccaaggaagttcggtttagtggtccaaactagaataataccttctttcagttcttttatattaatagcactctgggcatttgcagcctccaccaggtaaggaaaagacaatccacagtcagtttctgttgctgtcgagactcacctgtaccccccagggcactgccctcagtctcactttccaagtatgttgagggcctcctcatcagggaatctgcctcatagctataggcagtctctgtctctcccgctgctagacagaacagctcttattggtgtcatgtgcctgagagagagcaagaggaatgtgtttcgattcagcccatctctgcgtcactgtggttcccccatatccacttcttttgcttcgtggcctctggtgaccacctcaagggagtacacgggggtatctcttgctgattacagtcactttctaaacctgagggtgggttctactgaccagcatgggcgtgtcttactttaatgcactcctcaagctcccctagagatttccatagggtcgggcctcatatggacatccctacactaggtcagtttccccttactcttggaaacaatggaaaatgtagagacgaatatccaaatttaataccctttatttggaaagtaagaattgcaattcttggcatacacaaagaccaagttgtctttggtacgtccaaagaacaaagagaagtttggaagtttttttttttttttgagacggagtctggctccgttgcccaggctggagtgcagtggcgtgatctccgctcactgcaagctccgccccctgggttcatgccatgctcctgcctcagcctcccgagtagctgggactacaggtgcccgccaccacgcccggctaattattttgtatttttagtagagaccgggtttcacagtgtttgccaggatggtctcgatctcctgacctcgtgatccgcctgcctcggcctcccaaagtgctgggattacaggtgtgagccaccgcacacggccagatgtttttttttaaatgagaaatactaagtatttttttttgcagaaagttcattggcgctgtaaaatttgaagaagtggcatgctctgactggtgagtgactgcagtgggtcaggctggtcttagagcagcagctggttgtgtcaatagatataagacagaactattaatagtttcacgttacagctgccagacttacagagaattgcagtttgggggtaatacagtgatttttcttccccatggcctcttgactctgttttagttgggtgtgacaagaatgacccaatttgtgcgatcaactttcacattctccttcccaactctatgaccgggacattgacgactgtccatgagccagaaaaaaactcaagtacaggggcttttgctgctgttcaaatcttccataaggctaggaaaatagcatgcaatccaacccacctagccaatttgcctttgccttcttccatcagaggggtggccttccaagtaggatgttgtccattcatctaggaatgactgtctacaaactaagtagctcttggtcagtaagtaaagagctgtgtatagggcaatgtccaagtgaccacagaatccagcagctcctcacccagttccagactcagtctgaggggaacagaggctccctgctcatgagtgtctcctctttgccttcctcaggcaccaggatcccatatcaaccatttccattttttaggctgagtgaggtggctcacgcctgtaatcccagcactttgggaggctgaggcgggtggatcacgaggtcaagagatcgagaccatccgggccaacatgaagatccctcgtctctactgaaaattcaaaaattagccaggcgtggtggcatgtgcctgtaatcccacctactcgggaggctgaggcaggagaatcgcttgaacccaggaggcagaggttgcagtgagcctggatcgtgctgcactccaacctggcaacagagtgagactccatctcaaaaaaaaaaaatccattttgtaatagaactcttctgggactggcctccccgttagagcttttccaagattcctgaagacatcatcagtttttcaggtttcaagattattttatgtccttcagtgacaggggagacttcagttagtgttccatctcaagctagtaagtgcctcttaagtggaaacttgactctaaaggcccagttccttggaggtgctcacagccttttgccattagccctagtcagtgctccacacagggcacagagaatgcgttgttacctgcagtctggtttctggtctatactgtgtggtccaccctccagggccaagggagctaaggtgctctaaggactttcctgcaggccctggtggctctgtgttaatgctgtcagtcttcctgaagtccctgacctttcacctcctgcctggatctgcaccccgcacacattcctgaccccacacatttctcattgcctgggtcctggcacacatttctgaccctagctcagtgtctggggcctggcacacatttccgaccctagctcagtgcctggggcctgacacacatttctgaccctagctcagtgcctggggcctgacacacatttctgagtctagctcagtgcctggaacctggcacacatttctgaccctagctcagtgcctggaacctggcgcacatttctgaccctagctcagtgcctggggcctgacacacatttctgaccctagctcagtgcctggggcctgacacacatttctgagtctagctcagtgcctgaaacctggcgcacatttctgaccctagctcagtgcctgggacctggcacacatttttttttcttttttttttttttcacagagtctcgctctgtcacccagactggagtgcagtggcacgaatctcggctcactgcaacctccatttcctgggttcaagcaattctcctgcctcagcttcctgagtagctgggattacaagtgcccgccaccacgcccagctaatttttgtatttttagtagagatggggtttaactatgttggccaggctggtctcgaactcctgacctcttgattcgcccacctcagcctctcaaagtgctgggactacaagcgtgagcaaccgcgcccggccctggctcacatttctgaccctaggtcattgtctgggccctggaaggtgctcagggtgatccatcgctcaaatccaagcctgtggagaggatgacatttcattcccaggtttctcatgagccaaaaaaccttcatttctatagcgctatcctcttctatctaccatgtgaggggtcaggagccgactcatcccaagggtctaggagtcctgccattgaccttactgcttagggtcacaagctggcacccttcaaaaccacacattgggtctgccctcacagcggcagtgtgttcaactggatggggaggtaagtagcccaaggtcagacagttggacctgggtagacaatagacttggggacagactttggaaggcactcccctgattcccctgtctccatggggcctcaatactagagccctcaaggttggtcagggagtgtttgtgctttgaccatgcaaagggtgccaggttgtggctagggatgcccccggcgttcctctccctcctacctactcctcagcctctgcaggtgcctgtcatggcctctgtgtccttcattctgtccactcatgtgttcactgggcccctccttggtgccaggcacccgctactgagggataccaagcccctgccagagaagcttggagctgggtcacagcagcaaggaggctggagacatcagtggcatcagtgcactggtcagtgaggccgctgtgggaggagggagtgggagcagaagctaagagtggactgaagtcctgaggccaggaagtagttcagggtttaagaagaggagagacaggcggcccggggagggagcaggctcaggatgggcctccagtgcctcctctggagctcactacccagactacagcagcgcagcgggcagcgcctcagctccttccccttctgctgcctacagcctggacaggacccggaatcaaaccgcaggccctgggtcaccgctgccggaaagagccagttcctgtccgtccatgcacccacccacacaacctgggccctcctggaggtgctgggggagacccagcctgagtgcctggaagtgactgcgggaagggagtacaactgaccacgccttttttccggggtataaaagcggaggagcacgttctattctggcagtgtagctgcgagaacctttgcacgcgcacaaactacggggacgatttctgattgatttttggcgctttcgatccaccctcctcccttctcatgggactttggggacaaagcgtcccgaccgcctcgagcgctcgagcagggcgctatccaggagccaggacagcgtcgggaaccagaccatggctcctggaccccaagatccttaagttcgtcgtcttcatcgtcgcggttctgctgccggtgagtctccgccgcggtccctggctggggaagagcgcacctggcgccgggagtgggcagggagagagggggacacggtggggatgcttggcccgggtcgcctgcggccgggcatgtctgggcaggacgaacccgccgtcggagtcaggggaagagtggggtgcccgggctgggcaggagcgaccgggccgcgagggagcagagcgcgcgctccccctggctgtcccgtgcggcgaggaccgcactgagctgccccagaggaagttccagaatcagcggagggagggagtcaagatggaaaccccggagtgaacctcaggaagccacagagcggttgcctctttcgttcgttcgttcgttcgttcgttcataacgttaacccaggccggtcgcggtggctcacgcctgtaatcccagcacgttgggaggccgaggcgggcggatcacctgaggtcaggagttggagaccagcctagccaccatggtgaaaccccgtctctactaaaaatacaaaaattagccggacgtgatggcggtcgcctgtaatcccagctactcgggaggctgaggcagaaggagaatcacttgaatccgggaggcggaggttgcagtgagccgagatcgcgccatcgcactccagcctggtcaacaagagcgagactccgtctcaaaaaaaaaaaaaaaaaaaaaaaaaaagttagccaggcgtggcagcctgcgcctgtagtcccagctactcaggaggctgaggcaggagaactgcttgaaccc

SEQ ID NO: 3778 - DNA, 6000 bp, Homo sapiens
atcaatgaagtcacagacaatctgaaaaaattatcaaccaccttgacctaataaacattcatagaatactatacccaacaactgtagaatgttcattctttttgagtgcacatagtatgtttactaaggtagaccctattctgggcctacgaagagtcttaataaatttaaaaggattgaaatcatacagaacactttctttagttgcagtgaaattgaattagaagtcaataagaaatacaaaaaagactttcatatttgcagtttaaaccaccatgggtcagaggagaaagcctgtagaaatcagaaaatatttcaaactaaatgatgatgcaaaatatcaaaatttgtaggacataactacagaaggacatagagagtatgagtgctcgtattagtaaacaaaaaaggatagaaatcaatgatctaggtttccacttaaaagctaaagaaagaagagcaggctgggaacaatggctcactcctgtaatcccagcactttgggaggctgaggcgggcggatcataaggtcgggagattgagaccatcttggctaacgtggtgaaaccctgtctctactaaaaataccaaaaaaaaaaaaaaaaaaaaaaattagccaggcgtggtggcaggcgcctgtagtcctagctactcgggaggctgaggcaggagaatcgcttgaacctgggaggcagaggttgcagtgagccaagatcacgccactgcactccagcctgggcgacagagtgagactctgtctcaaaaaaactagaaaaaaaaaaagagcaatataaacccagaataagtataagaaaggcaataatgagagaaaatctatagaatagaaaacagaaaaaccctgaaagtaataaagttaacacagacattatggctatttgaaaagaataataaatcattagcgaaactcatcaaagagagagagacaaaactaagttatcaaaataaaagagaggacatcactatgattgctaaggataataagggaatattgtgagcaactttatgccaatatatttaagaactcagataaaagagacaaatgacttgaaaatttttacttgccaaaagagacatataaaataatagaaaatctgaaaaactcatatctattataggatttgaatttattatcaaaaaccttcagacacatacataccccaaaagaaaaacaacaaaaattatcaccaagtccagatggtgttactggtgaatggtatcaaacattgaaagaagaaataatgctaatcttataagactctcaggaaactgagtttattttataaagccagaataatgagtatacccaaacttagaaagacattacagaaaaagacaatgataaatcaatatctctcatgaatacagacacaaaaatatgcttaagaaagtattagcaaatcaaacctagcaatatgtaaaaaagataatacatcatgacaagtgaaatttgacccaggaattcaagttagatgcaacatttgaaagtcaatttgattaaacatttgaatagcataaaagagaaaaacaatataatcatctcaatagacgccaaaaaataacatttgatacgtttcaaagtgtcaaacgttattgtttattgttatatttcacattctattaatggtaaaaacagcaaagtagaaatgaaagggaatttgatctggtaaagggcattgtctcactccatttcctgctgctataaccaaataccacagactgggcaacttataaagaaatttatttcttacagttcttgaggctgggaagtccaagagcatgaagctgtcctctggtgagggtcaccacacaacagaagagcagaaggccgaagcaggcctaggtgagagagagggaggaaatcatgccaaactcattattttttatcaggaacccactcacatgaaaattaacccagtcctgagacaatagcgttaatccattcatgaagatggagccctcataagctaaatcacctcttaaaggccccacctccctggtcaacatggtgaaatcccgtctctactacaaatacaaaaattagctgggtgtggtggtggtgcgtgcctgtactgacagctactggggaggctgaggcaggaaaatcgcttgaacccagagacagaggttgcagtgagccgagatcgcaccactgcagtctagcttgggcaacacagcgagactcatctaaaaaaaaaaaattggcgggcatggtgtctcaagcctataatcccagcaccttgggacgccaaggcaggcaggttgcctgagctcaggagtttgtgaccagcctgggcaacacggtgaaaccccgtttctactgaaaatacaaaaattagccaggcacggcagcatgtgcctgtagtcccagctactggggaggctggggcagaagaattgcttgaacccaggaggtggaggttgcaatgagccgagatcaggccactgcactccagcctgggcgaaagagtgagactctgtctcaaaaaaaaaaaaaaaaaaaaaaaaattcaacatgagttttggagaggacattcaaactacagcaggcatctatgaggaaactataactaacatcatatctaatggtgattaattagatgtgttctaagatatggaataagataagcatgtctgctttaactatttctatttaacattgtactggaaatcctatccagggcaattcagcaacaaagatgaatagaaggtataaagattggaaaggaagaactgagacagtttttggttactgacaataggattgcttacatagaaaatcctaaataatctataaaataacaactagaaatatatcaatttagcagtaccatagcatacaaggccgatggacaaaaatcaactgtatttctgtatagttgcaacaaacaatttgaaaataagggaagctaaatcaattccattagcaatagtaacaaaaatagttagaaatatgtttacaaaagatatgaaagatttgtacatggaaagtttgcaaaatattgtcaagcttaagtaacaaatatctaaataaataaatttcatggattgaaagactcaaaattgttaaaatgtcaattattctcattcatctctacattcaatgcaatcccaattaaaattccagtaggcttttttaactgaaaaaaattattctatatttaatatatacggaaatgcaaaccatttgggaggtgggtagtagggggaggacttgaactgcctgatttcaagactgactatacagctcataattaggacaatgtggtaattagcatgagaatagccaaataaataaacggaacagaatagagtccggaaatggacacatacatatatatggtcaatttaatttcaacaaaagtgataaggctattggataaggaaaaaaagtcttttttttttttttttttgagacggagtttccctcttgtggcccaggctggagcgcaatggctccatctcggctccccgcagcctctgcctcccgggttcaagcgattctcctgcctcagtctcccgagtggctgggattacaggcatccgccaccacgccccgctaattttgtatttttagtagaggctgcgtttctccatgtcggtcaggctggtctcgaactcctgacctcaggtgatccgcccgcctcggcctcccaaagtgctgggattacaggcgtgagccaccgcgcccggtcgaaaagagtcttttcaacaaatggtaccggaacaccattaaaatatggagaaaaatgaacatcaatcagcgccccctttctcttacccactcctcagccccaaggtcgccctgggagttcttcgcaggcaggaccgtgactcgcgtggctttcgggaggctgattacccacgccccatgcccgtgcagcgctgggtgcagaggaaccgctggaaggacctgtcccccgtgggacccccaccaagtctcatcccgtgtcatgtgccagatagtctcccgtggtttaaggactttcaagactcttaacaggttaggaaaatccagaagaaaggcagaattgggtccctcgggcttgcctgacaccagggacggtggagttgaggtgacatttcactggcatggagacctgaaaccaaaagcaggatgagccgggcacggtggctcacgcttgtaatcccagcactttgtaaggccgaagcgggcggatcacgagatcaggagctcgagaccagcctggccaaaacagtgaaacccccgtctctactaaaaatagaaaaaaaattagccggacgtggtggcgggcacctgtaatcccagttactcaggaggctgaggcaggaaaatcgcttgaacctgggaggcggaggttgcagtgagccgagatcgtgccactgcactccagcctgggcgacagagcttgactccatctcaaaaaaaaaaaaaaaaaaaaaaggcaggctgaatcactcgcccggtagtgacggaggaggccgtaaaagcctcttagaggccagaccccgcagtggcctctgtgtccttcattccgccacccatccgtccaccgagcgcctgctgggtgccaggaactgggtcacagaaaggctgaggtcaactcccgaccgagaagcctggcgctgggaccaagtggcaaaacgactccgaatgcagcggcatccacgcggcggccgtggttgaggaacagaagctgagagcggcaagggcggtcacagaggaaggaagttcagggttagccaacaggagccgcaggtgccccgaaaagggggcggggtcaggggtgccctgaactccgaatgcgaagttctgtcttgtcatagccaagcacgctgcttcttggattgacctggcaggatggcgccaccaccagctagagtacatctaggtgcgttcctggcagtgactccgaatcccgggagcgcagcgagtgggacagaggcagccgcggccacacccagcaaagtgtggggctcttccgcggggaggattgaaccacgaggcgggggccgaggagcgctccctacctccatgggacagcacggacccagtgcccgggcccgggcagggcgcgccccaggacccaggccggcgcgggaagccagccctcggctccgggtccacaagaccttcaagtttgtcgtcgtcggggtcctgctgcaggtgagtccccaccgcggtcctgcctggggaaaagcgcgcctggcaccgggagggggcagagagagagggggacgcggcgggggtgcctggcccgggtcacttgtggcggggcatgtccgggcaggaggagcccgtcgtcggagtcggaggaagaacggggtccccggggccaggcaggagcgacccgggcctggaggcagcagagccccctcccgcaggaggctgggcccggggactccaccccgttggctgctgcctggcgcgtctccctcctgcccacacctcacgatgtatcgggaagtttcggaatcgatagagctcaagtgtgtaaacttccaagccaactcccagccacaccagctgcgtgaaggggagcgccattctccccactccctgattccctccccacccccgtccttcttttcttctcttctttttttttttttttttttttttgaaacggagtctctctctgtcgcccaggctggagtgtagtggcgcgatctcggctcactgcaagctccgccttcctggttcaagcgattctcctgcctcagcctcccgagtagctgggagtacaggctcctgccaccacgcccggctaattttttgtatttttagtagtcacggggtttcactgtgttagccaaatccgcccgcctcggcctcccaaagtgctgggattacaggcgtgagccaccgcgcccggccctccatccttcttttcttagacaaattggttaaacacgcagcccggcaggaaaaagtaactttctctcctctgctcgttgtcttccgtttcgagtccactgagcacaccggcagcagtttcc

SEQ ID NO: 3779 - DNA, 6000 bp, Homo sapiens
ctcattttctccccagacaaaatgagagcaacaatccccacatccctgggttaggaaaataccctgaatgaagatgtgcagtctctggctgggctggcccaatctctatgccaggtccttccacctcacctctctctttagcaaagtagaaattgagaaattctgaaggctctgaagcttagacactcaggctatcaaagagcccagagattggaggctgaagactgccagggttggccgtgctcctcttcagctgtgactctgctgtggccccagctccttcctataaactaggcagatataaaatctgcagcggccctttataaaccacagtggtctgtgttggcagatgtgtgctgccgtgtaggaggacaaatcacatgctcagggctggtgtcagtcactcatgactctggatccccagggcacctgtcctaatgaacttgaaagagaactgaaggcactggcatttttccagactaagtgacaccaactgcccaacagcacaggctcagggcatggcactgtccccatctccgacctggaagctaaagccttgctgccctgtcactcctggatacaggacagaggaccagaactgggactgttgcctctcagtaggggctgggtgagcagccatctgcagccacatggatggagacctttcctgctcactcttcaaactgcaaccagtgccgggtgcccaccagaaggacaactggaaggaaacgtggcaggtaagccaggctgtggccctgcagtgacatctttgtcctaacttgaagtctggctcctctgttcctccacggcccctccccatggcgctccaccccattccttagaaccttctgccccaagctcagagagccagtatggaggtgcaggtgggagcaggtgcagcctctgctgggtagaggacaggtgctctggggatccagagtcctgagtgactgacaccagccctgagcatgtgatttgtcctcccacacgacagcacacatctgccaacacagaccactgtggtttacacagggccgctgcagacttttatatccacctagtttataggaaggagctggggccacagcagagtcacagagctgaagaggagcacggccaaccctggctgtcttcagcctccaatctctgggctctgatagcctgagtgtctaagcttcagagccatcagaatttctcatttcctactttgataaagagagagacgagacgaggtggaaggacctggcacagagattgggccagtccagcattgacagagccaggacctggggtgagaaactgagctcagctccaggctcatctgatgtcatcctgacagtctgaggacagagacattatctccattcacaggcatggcgggtggcaggaactggccccagccgaccacagtttcctaagtgcagaggtgcgactgcagtcttccctgctccctccccaacggtctaatctggagtctctaggtcatctactcccagtctcaaaaaattcctggatccttgaaaatctctaataacactgaaacaaaaaatacaacattgaggtctatcattttttacctcttagagtagcaaagaatgaaagttccatgtagtaagggtgcagggacacgggcacgcttgtgtattcttttttttttttcttgaaacggagtctcgctcagtcgcccaggctggagtgcagtggcgagatctcggctcactgcaagctctgcctcccgggttcacgccattctcctgcctcagcctcccgagtagctgggactacaggcgcccgccaccgtgcctggctaatttttttcaatttttagtagagacggggtttcaccgtgttagccaggatggtctggatctcctgacctcgtgatccacctgtctcggcctcccaaagtgctgggattacaggcgttagccaccgcacccggccacacttttgtattcttggtgtgagagtaaaactggcacaatcttctcccgaagtacaatttagcaatatccaaacaaaattctacattgatgagctcatgtacctaaaaattcctcttctaaagggctgcccgatacttcagggaacattgacatatggacatatgacacatacaagggttctcactacaatgctgctggaattagaaaaaacaaaagcaggacataatgttaacaattgcccatgggatggaagattaaaattaactgtggttcacgccatgtgtttcacccatgcactaaatattatgatgctgttaaaaagaatgagatacttgcatgtactgatagaaaacatccaatgcgatttgttcttcagtcagaattttaaaagttaaggtgcctataaatgcacaggaagaaggctgagggatggtgggatgagagggtcctgtgggatggcagaaggccttggtgtctgctacgggtcctttgtccctgccagggctcacgttgaaatctgaaccgtaatgtagctggtggggcctgttggggtttggggtggatccctcatgaaaggcttggtgccataaccgccccctcccacattcccccaggagttgtcaatcttagttccccatgacacctggttgttagaatgaacctggcccctccccgtctcccttccggatctcatccccctcctcctgccatcctccccaccccttcccctgatgggcagaatccagctgtccttccccttcaccaccagtggaagtttcctgaggcctcaccagaggcagatgctggtggcatgcttcttgtacagcctgcagaaccatgtgccaaataagcctcttttaaaattatccagcgtcaagttttcttttttattttttttcttttccgaaacggagtctccctctgtcgcccaggctggagtgcagtggcgtggtctcggctcactggaagctccgcctcccaggttcacgccattctcccgcctcagcctcccgagtagctgggactacaggcggccaccaccacgcctggctaattttttgtatttttaatagagacggggtttcaccgtgttggccaggatcgtctcgatctcctgacctcgtgatccgcccgcctcggcctcccagagtgctgggattacaggcgtgagccaccgcgcctggcctcaagtattcttttatagccacaccaacggactgtgacatttccaaaaccaccaaattcagatgtttcaccttgtctatacaggtgagccctacatccacctggaatcgcactagcctgtcaaaaagaaagccatttaataagcgtattaaaaataagagtcaaacgtgggttccacctaacataaactgacgtttaaaacataaattctgtaattatttggagatttcaaaatgctattggattcctggattttgtttagtttgttaaacaaaaacacgtaaaatttcctgacacttgtaagactggtttatccttcaggtacttagctttcgttttgtttttccttaacatagaaggaatctggatgagaacaattggtagagccttaatgaacttgaaagagaactgaaggcattggcatttttccagactgagtgattgctttcacaggaaacgctgcctcctgaaggaagggcgtgccccgctcctggctgcctgcctcgtggtggtcaattcgctgccctgtacctgttgatgcgcaagaaagtggctggaaggaaactgctgccggtgtgctcagtggactcgaaacggaagacaacgagcagaggagagaaagttactttttcctgccgggctgcgtgtttaaccaatttgtctaagaaaagaaggatggagggccgggcgcggtggctcacgcctgtaatcccagcactttgggaggccgaggcgggcggatttggctaacacagtgaaaccccgtgactactaaaaatacaaaaaattagccgggcgtggtggcaggagcctgtactcccagctactcgggaggctgaggcaggagaatcgcttgaaccaggaaggcggagcttgcagtgagccgagatcgcgccactacactccagcctgggcgacagagagagactccgtttcaaaaaaaaaaaaaaaaaaaaaaagaagagaagaaaagaaggacgggggtggggagggaatcagggagtggggagaatggcgctccccttcacgcagctggtgtggctgggagttggcttggaagtttacacacttgagctctatcgattccgaaacttcccgatacatcgtgaggtgtgggcaggagggagacgcgccaggcagcagccaacggggtggagtccccgggcccagcctcctgcgggagggggctctgctgcctccaggcccgggtcgctcctgcctggccccggggaccccgttcttcctccgactccgacgacgggctcctcctgcccggacatgccccgccacaagtgacccgggccaggcacccccgccgcgtccccctctctctctgccccctcccggtgccaggcgcgcttttccccaggcaggaccgcggtggggactcacctgcagcaggaccccgacgacgacaaacttgaaggtcttgtggacccggagccgagggctggcttcccgcgccggcctgggtcctggggcgcgccctgcccgggcccgggcactgggtccgtgctgtcccatggaggtagggagcgctcctcggcccccgcctcgtggttcaatcctccccgcggaagagccccacactttgctgggtgtggccgcggctgcctctgtcccactcgctgcgctcccgggattcggagtcactgccaggaacgcacctagatgtactctagctggtggtggcgccatcctgccaggtcaatccaagaagcagcgtgcttggctatgacaagacagaacttcgcattcggagttcagggcacccctgaccccgcccccttttcggggcacctgcggctcctgttggctaaccctgaacttccttcctctgtgaccgcccttgccgctctcagcttctgttcctcaaccacggccgccgcgtggatgccgctgcattcggagtcgttttgccacttggtcccagcgccaggcttctcggtcgggagttgacctcagcctttctgtgacccagttcctggcacccagcaggcgctcggtggacggatgggtggcggaatgaaggacacagaggccactgcggggtctggcctctaagaggcttttacggcctcctccgtcactaccgggcgagtgattcagcctgccttttttttttttttttttttttgagatggagtcaagctctgtcgcccaggctggagtgcagtggcacgatctcggctcactgcaacctccgcctcccaggttcaagcgattttcctgcctcagcctcctgagtaactgggattacaggtgcccgccaccacgtccggctaattttttttctatttttagtagagacgggggtttcactgttttggccaggctggtctcgagctcctgatctcgtgatccgcccgcttcggccttacaaagtgctgggattacaagcgtgagccaccgtgcccggctcatcctgcttttggtttcaggtctccatgccagtgaaatgtcacctcaactccaccgtccctggtgtcaggcaagcccgagggacccaattctgcctttcttctggattttcctaacctgttaagagtcttgaaagtccttaaaccacgggagactatctggcacatgacacgggatgagacttggtgggggtcccacgggggacaggtccttccagcggttcctctgcacccagcgctgcacgggcatggggcgtgggtaatcagcctcccgaaagccacgcgagtcacggtcctgcctgcgaagaactcccagggcgaccttggggctgaggagtgggtaagagaaagggggcgctgattgatgttcatttttctccatattttaatggtgttccggtaccatttgttgaaaagactcttttcgaccgggcgcggtggctcacgcc

SEQ ID NO: 3780 - DNA, 6000 bp, Homo sapiens
tgaataatccttgtgttattaaaattaatacagataaatataattttatagtaggaaatgtagttgtcaggatgtgaaacaatagtaatcaatttgaataaatatttgctatttgttttcataaaagttttaatcctcaaaagagaactctgaccaaaataggaatatagcaggatcaatgaaacaggtggcatgagtcatctcactggcttttaattaaaaaggatgctgtggttgttggcgtggactggactgcgcataggcagttttagaatttcttaagctgaaatccagctggagagttcttaatcagaatggacttattttgataatttataatctgtgtattcagagcattgatgttatagttttgatacctaaatcaccgttttaaaaattcaaagagatatatgaatcctgagtctcggacagttattcctgagccaaaggatttctgtgcaatgctaatatgtataatagagaatcagtctttcactgtacagttttgtcatcatgtttcaataactgaatgaatattctgaattaataagcataacgtttgtataagctaaagactaatctaagctctgcattcattgatgggaaccttaagcaaatgtttcttttcatcagcttgttcaaaaggcataaacataattacagttctgaggcgataacatatcgactggttaaatagtaagtgggtctggacaaggtaacttaaagttatgggctgcacgttgttttgagtacttggaagcatctggaaaaaataatttttttaaaaagatatttttactgtttatcttatagaaaaacagtatgagcattaaacccccactagaattttggaggttttctttttctaaagcgttggttaaaattcagataagttgatacttacagcttgagagaaaagatggggaagtggtagaaatatcaaatcatgagttagttttaaatttctcagaatgctcagggggcagtgagggaaagagggacttgctggccatgtccccacacctccgctttgcaccttttgctgaagttagttcccgaaaacagtgctgggtgtttgggttacatctggttcagccttcttttcctccttccttctttatccgtcacatggcctgccctctatctcttaaatcttaggtctgttgtgagactggggaaggagtgatgtgaacatgtgctcctgggcctggaaatgcccctctgccccgactccttctgtctcagcagtgcttgtcattaattctcccaacaaatacctgagcccttctctgtgcaggatgggtctcagtgctttgaatgtgctgtctcgtttaattctctcaaaagccctttattgacaatgctcttataatattttatacagaaagaatggaaagctaatccaatctttttctaatgtggttaatcaaatttatttatttttaattaatggtggcttagaaagctttctttcagcattactatcctttatgagattgtcataaatgtttactatttttcattgttcatggcaaggcggcaatagatcttattcagaattgataatcagtgtgatttatctggtagccaaaccaaaaatcaaactattatgctgtttagatataatggtagccactagaagatttacatcaaatgttagaccagaagccctttccatcagtgaccaggtttggtatctgctaggagggaaaagcctggtaactgatcaccagtgtttctgttctttttactttatagtttgtaatttaccaaggcatgattaattttgctgatgtttaagttacttacaatcatattaagagttagagaggagtgatatcagcaagatggctgactaaaagtgcccaacacccatttcctggactacccccacaaaaaatgaataaacaatgaataaacaactacattttgaccacagtggctgaagaagagtgcgggagtacagcaggagtggcagaaatccagtggagcacaaacactaagtatgggctcatacagaagaggaggaatcatgccacacccttgccaccccacctgtgccaccccattctcttattcagctcagaaccaggaaggactccttcctggggggaaaaggtaagcaggaggtacccagcagcccctattaccattgtggacaccagcagtcttcaccactggagaattctacagtcctcaaggtccctgagctcagcttggggagctgcctggagttcacatagctgcactgctccaaagaaggagcccacattgtgcctcaactcttgtaggccaagctgctactgcactgtgccatctggaaaccagagccactgctagagtgtgtcctgcttgggggtccagtagccactgtatctgtttatccctgaggcctggccaccattgcaccatgctttcaaacatggtagtgcaacattccccaactgagctgcagcaactccataccccctgggaacaagctacctagaagccaccccatttcccccatccaagttgctactgtgccccagccccagctacttggacccaaggcccagtggagcaggcatgcacttcagtgcctgaaccagcccaatgtcccacccccaggaagttggaactttggtctaggggagcagttacatccctggtatccaagcccttatggcagtgtgctcttcaggttcctggatcccagcccagcagagcagccacaccccatagtgctgagctgatgtggtatactggcccccagagaaacagccttggctgagctgtgctgccccacccctgggctgaacagctgccgtgccccaccttcctgggtctgggccagccctctggagtctgaattgactccagaagtggcacctgcttcccagagcccaagcagtaactgtgctccactgttcttgggtccttgctgccactgcacctggcgtcacagagactgacctactgctgtatcccactgctctgggaccatagtcatcactatgcagtacccccacttctgatgcctgagttgccactgtgccctattggttctaagacctgaattgcagctgtcgcctgctctctggggactgagcgtctagaacaccccttcttccctggagccatgtcaatgctgtgccctgatctccaggattagagtcacagctacatccttgaaccctgggcccaagctactgggaaatgccttagagtcacagtccttggcttggtgggagacctgcatccacctgtgcctcagagaatggacctgtgcccacatcacaggtgccacagtagttcaacaagacactgagcccaggaccccagttctacagccattccaatcacatgtgcccttgaacacagtgatgctatggctgcctgtggcccatgtcacacctgataataacagggatcccctcagctaagtgtgcccactgtggggaaaatgacaacaggagaacccctaatgcccttgctgccaagaaccctaacaaactaccatgccaccaccactgccacaaactcctacagccgaagacactgaggtacttgcagtcattgctgatattaatcacagctgaagaagctgcacagagactacattactgcacccactcagaagcagagccaagtactctgctgacctgacactctaggactcatctacaggcgaaagtctttccctatgaaagccctctataaaattagaagaggcaactgttccactggatgcacaggcatcaacatagggacataagaaatatgaaaaagcaaggaaacatgacaccacaaaaggaagaccataattccctagtaactggccacaaagaaattgaaattgcttaaaaaggaattaaacctaataattttaaggaaacaagagaatacagatagacaatgcaacaaaattaggaaaacaattcatgatctgaatgagaaagtccacaaagagatagctatcataaaaactaaccaaacagaaatcttatagctgaataactccatgaataaaattttaaaattgacagcttcaacagcagactagatcaagcagaagaaagaatctctgaacttgaaaagaagtcttttgaaataacctagtcaggaggaaaaaagagtgaggaaagcctatgggatttataagacactcattaagtgacaaaatatttaaatatggggttgttagagggagaagaaggggaaaggcatggaaaacttatttaacaaatgagttgctgaaaaattctcaagtcttgggagaaaatggacatgcagatttatgaagcttaatgatctccaaacaggttcaacccaaagagggccccaccaagtcatattacaataaaaatgtcagaaatcaaagacacagagagaatttaaaaagcagcaagagaaaaatgtcaaatgacatatcaggaaatctccattagactgtcagcagatttatcagcagaaaccttgcaagccagaagagaagggagaaatatacttaaaagtgctgaaagaaaaaaaacctgtcagccaagaatattacacttagtagtgctgactttcaaaaataaaggagaaataaagtctttgccagagaagcaaaagctaagaaaatttatcactactagacctgccttataagaaatatttaggggaattgtttaaccagaaacaaaaggatgatgattactatcatgaaaacatatgacaatataaaactcgccagtagaggtacatttattgtcaaattcagaatatgtaattactgtagtggtggcgtgtaaatctttcaactctctagtatgaaggttaaacatcaaaatggtcaaaaataactgtggctacattaagttgctaagaaatatgcgatataaaaatatgtaaattgtgacaacaaaaacataaattgtggatgacaggggagaggttaaaagtctagagtatttttatgtgatcaaagttaagtagttatcatcttataataatcaattataactataagatgttttatgtaagccccatggtacacaaagcaaaaaactataacaaatacacaaataaggaagaaaagggaatcaaagcttagcactacagaaaatcaacaaatcacaaaggcagacaacaaaagaggaagaaaggaaaaagaatctacaaaacaaccgaaaacaattaacaaaatggcaagagttaagtcaatacctatcaatagtaactattatcaataataactgaatgtaaatggattaaactttccaatcaaaaggcagagggtgtctaaatgaataaaaacccaacatccaactttatgctgcctacaagagacccattgtagctttagggacatacacaggctgaaagtgaagggagtgaaaaaagatattccatgcaaatagtaactgaaagagcagagatggctgtttatagcagataaatagacttcaagttaaaaactgttgtaagagcaaagaaggtcattatgtaatggtaaaagggctaacctattaagaagacaaaacaattggaaatatatatgcacccagcattggaatacctaagtatataaagcaaatattgatggacatgaatgaagaactagatagcaatacaataatagctggggacttcaacacccccctttcatcaatggatagatcaatcagacataaaattaataaggaaacactggatttgagcttcactttaggccaaatggacctaacagacatatatggaactttcaatctaatagcagcagaataaacattcttttctagtgcacatagaacattcttcaggaaagcccctatgtcagtcccatagaagattgaaattatatgtaccatttttttccaaccacaacagtatgaaactagaagtcgacaacaggaggaatcttgaaaaattcgcaaatatgtggagattaaacatgttcctgagcaacaaatgggttaaagaagaagtcaaaaggaaatttaaaaatatctggagaaaaatgacaatggaaacata

SEQ ID NO: 3781 - DNA, 6000 bp, Homo sapiens
ggataagtgcgtcaatgtgcaccgcccccctccccccagctttgggaacacccagctccgagcctggccgacccgctttcctctcgcctcattgcctacctggcacgtgtgctgcaggcagagtctccaaactccacgctgcgctaatgtttcctaagttgactgcctttgctgggacttccttaggaaagggctgcttttatgtcttctggatgcgtagaggggatccccttccctaagccgagtttcgggctcacctgaaagtgggaagtaaagaggcttcttaatggcatcatattgaacaacaatgataaagcgacaagccttttataacactggagagcagcatcaactctttttttttctaatccgatgctgctttttaaaaatgtttgttgtgtgcattgaacaactggttgcatgctgagcggcagcccgtaggcttattgctgtaaatagacaggcctggggtggctggtctcggcctcggttcctcggtgctggcggcctatagggggcgcggcggaggcagcagggcccgggagcggagcgcaggggccgcgccatctgggtccgcgaggacgcgcttgcagaggcgcgcctggctctgcactccactccaataccatcttcttcccttttacagcttcccacttcccatctgtgcccacccacgggtttctcaaagaactaaaaaaaaattggcatggttcacgggaaaagaatcaggaatatgtgggctccctcgtcctaggttcacagtgctggagacacgtggccgctgcggcccggccagcttctgacacctattctgtagctctgatccggcgtgacctgccgaggctgtgcattttgccgcgcggtggagatgggagtgctagttgtactttgtaagttgccagcaaaacgttttctttttcttttcatctttgccagtgctgtctgcagactccaaaaggcttcttcagaaagctgataattaaagctatggaatccgagcatgagtaatcattacctattttgcttgggtgcagttctttacagaaaatgatgtcctctccaataattattaggttatcatcttgtcatattaactcctccaggagccacaatttgaggataaatgttaggtcaacctttggtgttcattctctgattccaataaatctagtattccaggggaaaaaagcccaaaacaaaataaacaacaaaccccaaatcctaggcagcagtcatttctgaatagaagacaactatatgactgtttcaatgatatttaaaaaaatgagtacttaataaaatggccgttttagcgagtgataaacacttcgaagcagccagaaattcagtatctcacagcacattttgtggaacgctgtctagattctgccatcttcctggaatgttccgccattgctcatagtaatagcttcttattgactgatgagtatttgtgtatagacggattactgcaaattcaacttctccaaaggctatagccctaaacaataggtacctgtagataaaatgctttgttgacgtgctttgggaagtccagagataattgatggacaaataagtaggatttgtatttgggcagaccaaaggatctctattttggctttttttttttttaaaggaggagagagatggggaagtagaaagaatgagctgagtcaagaggctttcctcaggaggaagaccccgtagttttgtctcccaaggcagtgcccctggcgtgaccccagtggaaattcctggctttctttgtcaactttacagagtcctgggcctcaacatcagctctcaggagaaaagactgcattacagccccaggagggaggtggtgtgaatggggctccttgatgaatggatgaaaggttttcagtaacaaagggcatcaatagtttgtatttcattggctgaaccaaatcacatgccccaaaggtctgtgttttaatgtcagcatgtttgacaacacctactctttctccacacatacccattctcatcttcaggaagggactctgcttagctattctggaattttcttaacctacaattgttttgttcttgattcatattttatcagataagaaccccatcttttcaaatatgccccccaattacttcatgttcacttagcaagtgaaaaaaataattcaaaattatatataagaaaaattttcccatctgaaaatttggagcactagaagttgaattttgcaagtttgttttgggtaatcagcaagcatatttcccttggttggttcagcaacaacatttctgtcccgtcatctagttagggatgaatggcatattgtggtttccaaaactgagactacatatgctgcacccaaacttgctcagtttgggaagctcacaagtaggcttgcctttaatttttttcattcccctgagtttctcttttggccaaagagaaatcgcttctgtgccattcaaaatacttgaacttatctgcaacccagagtagagaagtagctagtgaagcacttcttggaaattctttggcatgtgggatggggtggggtgtaaaaggaatgggaaggttacaaaaggtcctggtgtctttttttctttttctggaaaaaagatcaatgttgatccacaaagggaaactcacaagaaaaaatgctgatgaattttgcggtgtgccttgagcttctctagtaagcttgctaaggtgctctttgattaatcttcttttgatgaccaatcattaaaggttgcataagactcagcttgtgccttctatatgaggtataatgttatagatatataaggttctctgaaagacataagggcagagagagattgcctttggagaagtacataaagaaaaactaatgtagtattcagcatgttttaggaggcaatcaagaagttagagagaaaatatattgatctagatttctctagaaagacaggcatggcttaaaataaaacaatcaaataagaacaggcaggacagctagctggctaccatgggccaggtacttgactctagggaaacctcaaggaacataaattgtagggtctctgttttcttgcagcttctagtctagcagaagagtttatcatgtatagctcaagtaattgatacgttaaaaaaacacaacacaacagagccaaaatacaacataattttgttcctgttgttcttgtaaactttattcagtgggaccaatgtccatgacccctggatgaaaactctggcaggccccatggctcttctgctcgttctcagataattcaaaaagtcttctggtcaactggaatcacatacacagtttcatttcagcacttacagtgtctggttccatgcaataatcaaaaactgaccttagcctagctacaccccctccacatggcctgcctgcatgcctgcagtggggaggggaggctgaggaggcttgctgtctcccggctcctgctcccaggccagctcaccgcaactgctatggttgtagcagggcatgtgttgggtgcatgcaggaagaagaggtagaaacttccgccccttctaacctggctggctggtgtcctgttttccggtctggcagatggtttgggtcaactctctatgatggactcgctggcgcagtgaggctttggaagcccccggtagctcccttattcttgcagctccctcattcctggtgggtgcatctcccttccttcaggtcgtcagtggaccctaccttcctcagccctggctgtccagtggataacctccatccccttcttgccctggtctcctcccacctctaaggatccctttgcacatgttggacaggatttctcctgctgacccaggacatacaactggtcctgggaactcttgttcccctccgtcctccaaccccacctgcgctcagcaggtgcagtctgtgctgcatgtatccgtccatactctctggctctgcccccagagctgtttgccaactcctctgccatcttaggcagattctgggacagactctgctgcatggtctgcttgtgtctgtgtggctggctcccatctcccaactgcgggaacaagccttgaagctctcattccacaggccttgaggacgtgggacaggaggccaaggaggtcccttcacgacctcctctttctaatttaagctttttccatatccgtgatctggctgagggatccagagtcgttaaagaagtctttgggctgttttctctgcactccgtggcgcaggggaagggtaagtttcctactgggatctgagtaggacggacagagaaagagtctgtcctaaaatctggttactcctcaaatccagtgagccaggtacaatcaccataacacagagaaactgatttccaggtggtttaaataacctacccacccgcagcaacccagtgattagctcggcctcaaatccaggcccactgagaagattctgtatttgtcactgcaggggcatcatgcacgttcaggatgaaggggccttgaggggagagggctgcctcttgacagatactcggggcaagcaagcaaagaaactcggggtgagaaagtggaagatcccccgcccctccccctttcttgactcccaccggcctgcgcggtccacgcggcgtggacaacagacccttgtgggccactgtggaggccgtgccactcggcgccagccccacggccatcaccggaccgctggagatgtgactgggctcgggacatgagcccgcttgttcgctcactctcagtgaaaagagttttgaaatgagttctgaatagacagcattttctttgtgcggttggtaaataacacagagcaaagttagcaagttgcagcgcctctgcgttctgattctatggaacctttttgtagggagaagggcaggatgtttttaactgaatgtgacctcaggggaatactagaggtaaggagagaaaaataattgaggtaactgtgggtgttttacatctcggaaaccatggcttttaataaggccacatgaagagagaagctggcatcatcccacgcaaaaaccagtgcctggcagagttgtggaaggtgctatcacattggcttggcatttgtgtagctttgattgaaaatcaatggttttcttatgataattttcacatcatattttttttcttctttagaaaataataaaatttctgaatggggcagcgtggagaaatcctaagagaaatagcataagagcattttggaacacatccaggaaaagataactttcgacacacctgtagacgttcgccaggtaaaggtaagaaaaaatattgtaaaatgcatttaagttattttattacatcgcactgggttgaactttgagagaaaacataccactggcgcaagatgcgcaaggaggagttaggagggctcaccttttgcccctccctctcgtgggcatgggcatggcagccctgtgtccaccatgaccatcagcggccacctgagttgtttctaatgccggctgtggagcagtcgaagacatgttcaccaggtcgaggggatctgactgagtatgatactcggcagacagttctgcgaaaaagtcaatgtatttaatactgcaaatgttacttgtacagtaaggaatttcttttagatttatatttgcacggggactgactcactttctatttaggatttttaaaaacatcactttttctgtgctcagatgagaagtacatctgttgctttcacataataagcatcaaatatgaagacacgttgaatgcttgaaccatttgtcgctataggagacctgcaacatatgcatgctatatgtctgtttactggaatacaggcactgaggaatcaaacttcatggttctttctttgagccataagattttttaaaatctctagctaatttaggtcactgaaaatgaacattattttggacttttgaatgggtattttgaaggaggctcagaaggacaaatactgcattggtcactacgcagtacttgggattgtagatgag

SEQ ID NO: 3782 - DNA, 6000 bp, Homo sapiens
ttatagacccataaaagtagattcttaaaaatctgcctacttagacacatttcaatggaatgtttacatctcagtaattatattgaacagaatgaaatataacaaatccaaggagaaaggaatggtgaggggtgggggaaggggtggtcatcatgcttttatgactggatccagatgacatatcattaattgttgaagctctctagactttgagttcgacgtggagttgatagggagacttctgcagaagccctgtactcagacagcaatctgctcccacttacagagctccatgagtgggatttgcaggctgtccatattatattgccttatttgccatcattttagtcactagtaaattagctgtgaagacaagagtcaaaataaaggggaaaaaaggtgatggtctaactgcactgtctgcctagatgaggtgaaatcttttcttttaaacgcaacacagaatgtaattaatgtaaagcagaggaacctttcacaaacaacaggatcagagattccaattactccctcctctgttcttcaggaacttcttgggaggtaattataaaactcttcctgtaagtaaaatgcaacaagactccaaccattgcttcccagtgggttatgtgagaaacaagaagcacagaatgattctcacaggtcagcgtgtgtgtgagtcagctggagtcctgaggcatctctcagagatttgggggcagtcactccctggcgggccagcgatctggccttgaaggagtccttggggccacctagggtaagagtttggggccctaggaactgtgaggaagagttaaacagaaccccgaacacatgatgtgggttgtggccttccccctaaatgcaaatgagagcttgacaaagggaacccgcaggcagccagctgaggtcttaacatccaagtggatccttttgtgaaatccattcctctcttcaccaaatcattcacattagccattacatgaagtctttggtgtttttccttttgctacacacattactcatacagggaagggaagtgagctgagagttcaagggcacttttgactagaaccagatgaattgttgcagttgcctgggaaacctttgaaaacaaccatacttgatatgtcaaagatctgaagttaacaggagccaaagtcatctagaaggtaaatccaagaaagctaatggcataagagggacactcggcttgtaaaagtagttccaatttgttatgcgttcgtgaacttttgaaaagaggaaaggattttatcatcctaattagcctataagaatgatcatcttaaatgccaactttccgattacagaataaaatttagtgaagatatttagatcccctaaacatttatgcatagacgatgaaactagagttttataataaccctaaaacaaaatataaatgtctccatagatttgtcccctcacgttctttggaattctgttccagtctagtaggtttttctttccagatttcaagtgtaaaatgtatgtccaatgtagagtatcacgtgttttattataaaacaaaaaatattttctgtggtaattctgagaagaaaaaaattaacaagtaaaacaatgtgatatcattttgcatcaaggaaatatggatttaatgggaaacttccttaagctgcattttgcttcaaacgctgtgttgcgtagggaatcttccacgaatctgaatttgtgattttttcaatatttttatcaaaaaaatcaccccaaaaagctgcataatgaatatttgtgcacatgactaatactagacttcacatagtcttttataataaaataaatcaaaaggataatcgaagtgaaaacatctctgacagggaagtaaaattttgtcccttgcaactcaatccttccatgttgagggacccatttcgagattagcatgtttggggagttttattattattttagagatatatggttttggtggaggacgctgtccaaaaacggctactttcatgcagagattttcactttaagtttcaagacatctgtttggaaactcctcggagagttcattgctctgcgctgccctcttctggtgagcctgtgtaaatggtttctggaaaacagtccagtgccgccatcgtttccatcctcctccatttccaccccaattcatcaatacattgctcaagggcctggatttcctatgtggtgatgtacaaagctgaattttaattcaaatagtttaaaggtataatcaaagcaaaggtttttttaatttggaattttttatttttacttttatttcgtgttggaaatacaggttttcccagataacttgcaaagccacaaactaaggacgctgtctcacctaaaaagtttggttacaaagtcagtaagaaaaatgatgttatttttgaataacatcaaactaatttaatgtaggactatgaataatttaatgtaggaccatgttgctaggaatgtcatttttatcttgaccacctgaacatagcttacaagagaatcactactttggcataaattatttaggtttatctgaagggaccattcctgctaatttgacagcaatttatctgaaatagttagaaagatcaaggctccaagttgtgtgcaataaatgtattcaccaactgccggaaaatcagaagctcttcctgactggaacaccactgtgagcctcgctgtctgctctcccccagttacaagtgctttccttaacccacagtcacgagacagaaaactgtacaaccctgagaatcaacagctaatttctatgtgaactggaagaacaatcttgtcatagtgctaacgttatgtgtatatattgtaccaacaaataaaagtggttattatgctttgctcaagaaactcatctacaatcccaagtactgcgtagtgaccaatgcagtatttgtccttctgagcctccttcaaaatacccattcaaaagtccaaaataatgttcattttcagtgacctaaattagctagagattttaaaaaatcttatggctcaaagaaagaaccatgaagtttgattcctcagtgcctgtattccagtaaacagacatatagcatgcatatgttgcaggtctcctatagcgacaaatggttcaagcattcaacgtgtcttcatatttgatgcttattatgtgaaagcaacagatgtacttctcatctgagcacagaaaaagtgatgtttttaaaaatcctaaatagaaagtgagtcagtccccgtgcaaatataaatctaaaagaaattccttactgtacaagtaacatttgcagtattaaatacattgactttttcgcagaactgtctgccgagtatcatactcagtcagatcccctcgacctggtgaacatgtcttcgactgctccacagccggcattagaaacaactcaggtggccgctgatggtcatggtggacacagggctgccatgcccatgcccacgagagggaggggcaaaaggtgagccctcctaactcctccttgcgcatcttgcgccagtggtatgttttctctcaaagttcaacccagtgcgatgtaataaaataacttaaatgcattttacaatattttttcttacctttacctggcgaacgtctacaggtgtgtcgaaagttatcttttcctggatgtgttccaaaatgctcttatgctatttctcttaggatttctccacgctgccccattcagaaattttattattttctaaagaagaaaaaaaatatgatgtgaaaattatcataagaaaaccattgattttcaatcaaagctacacaaatgccaagccaatgtgatagcaccttccacaactctgccaggcactggtttttgcgtgggatgatgccagcttctctcttcatgtggccttattaaaagccatggtttccgagatgtaaaacacccacagttacctcaattatttttctctccttacctctagtattcccctgaggtcacattcagttaaaaacatcctgcccttctccctacaaaaaggttccatagaatcagaacgcagaggcgctgcaacttgctaactttgctctgtgttatttaccaaccgcacaaagaaaatgctgtctattcagaactcatttcaaaactcttttcactgagagtgagcgaacaagcgggctcatgtcccgagcccagtcacatctccagcggtccggtgatggccgtggggctggcgccgagtggcacggcctccacagtggcccacaagggtctgttgtccacgccgcgtggaccgcgcaggccggtgggagtcaagaaagggggaggggcgggggatcttccactttctcaccccgagtttctttgcttgcttgccccgagtatctgtcaagaggcagccctctcccctcaaggccccttcatcctgaacgtgcatgatgcccctgcagtgacaaatacagaatcttctcagtgggcctggatttgaggccgagctaatcactgggttgctgcgggtgggtaggttatttaaaccacctggaaatcagtttctctgtgttatggtgattgtacctggctcactggatttgaggagtaaccagattttaggacagactctttctctgtccgtcctactcagatcccagtaggaaacttacccttcccctgcgccacggagtgcagagaaaacagcccaaagacttctttaacgactctggatccctcagccagatcacggatatggaaaaagcttaaattagaaagaggaggtcgtgaagggacctccttggcctcctgtcccacgtcctcaaggcctgtggaatgagagcttcaaggcttgttcccgcagttgggagatgggagccagccacacagacacaagcagaccatgcagcagagtctgtcccagaatctgcctaagatggcagaggagttggcaaacagctctgggggcagagccagagagtatggacggatacatgcagcacagactgcacctgctgagcgcaggtggggttggaggacggaggggaacaagagttcccaggaccagttgtatgtcctgggtcagcaggagaaatcctgtccaacatgtgcaaagggatccttagaggtgggaggagaccagggcaagaaggggatggaggttatccactggacagccagggctgaggaaggtagggtccactgacgacctgaaggaagggagatgcacccaccaggaatgagggagctgcaagaataagggagctaccgggggcttccaaagcctcactgcgccagcgagtccatcatagagagttgacccaaaccatctgccagaccggaaaacaggacaccagccagccaggttagaaggggcggaagtttctacctcttcttcctgcatgcacccaacacatgccctgctacaaccatagcagttgcggtgagctggcctgggagcaggagccgggagacagcaagcctcctcagcctcccctccccactgcaggcatgcaggcaggccatgtggagggggtgtagctaggctaaggtcagtttttgattattgcatggaaccagacactgtaagtgctgaaatgaaactgtgtatgtgattccagttgaccagaagactttttgaattatctgagaacgagcagaagagccatggggcctgccagagttttcatccaggggtcatggacattggtcccactgaataaagtttacaagaacaacaggaacaaaattatgttgtattttggctctgttgtgttgtgtttttttaacgtatcaattacttgagctatacatgataaactcttctgctagactagaagctgcaagaaaacagagaccctacaatttatgttccttgaggtttccctagagtcaagtacctggcccatggtagccagctagctgtcctgcctgttcttatttgattgttttattttaagccatgcctgtctttctagagaaatctagatcaatatattttctctctaacttcttgattgcctcctaaaacatgctg

SEQ ID NO: 3783 - DNA, 6000 bp, Homo sapiens
tccaagtaaatattgtgtttcatagcttttaaatcagactgtcctttatatgtctttcaagtttgtggagaatttacactgacatatttgagtgatgagttaacaggcagacagaaacttaattttctttatagtcatttgtacctactaccatttccgtttgcaatgacatgagtcgtctccggttattaccctgcagtacatacgcactttactggctgcacctagttgacttctgaactgcccttgggctccctctgctggcatagtggtgcgtgagcacttttctggggtcatggaatggatttctctttctgcccattttctttcttttggtttgtggttttctctctcataaattattacacaaacatggaccatacaatacaaccttctttcaaacctgatttgtttgctaactgtatcagtacctttccatataaaattcataaatatttttatataattatgtcagtgtttccatatttttctattacctgaatgttctttttagcatttaaataatccatttttagtaggcatttgtattgcttttttccatttcaggtagcatctaaagtgaatgtcccttgcatgtatactattcatatgtgacttaataagtagagcttgctaaatgggtaggaacttacaggaaaaggggaaactctagtttgagaaaattgtctgggctaagtttaggatgtgttcaacaaacaggaaagtcaagtttggctaaagcatggttgagtaatagtgggaaatatggtcagaaagtaggtatgttaggactctttctactgaaatgatgaaattcaactccagccacaagtggagcagaacaaaattgtgtttgtttaataactgggaagcccagggtagctggaggcaggggcttagatgctgctgcgccatcccttacctgtctgtttctgtttctccttctgtcccttcccagtctcagcactgagtctcttgcccattggcctggtgagggaaggagctgccagccccacccaacagctcaggttacagagagagtcactttcttccattactcacagagtaaacatcaaggaaggccactgattgattgacagtgtctgggtcagatgtctatccttaggccagtccctgtgaacaaggggatggggtgtctgcgtggaccagatctgaagcacaggcccatgcctggggccagggggtgggaactatggacctctctccccactgagaaccccagggagcaggtgaggtgaaattcctctaggggaagaggggcaaaattgacaagatagcagatgtctaccatactgctgtggggcctggtccctcccagaaggaaaaacatagtaacaatagagtgggtctcaccctccacctgggtctcaagtagggtgtggatgaggacaatggaaatgaaggaaaggttagaaggcctgtggtaccggttggtagatagctcttcgtgctttctccatatggagtgagagtgcttggatgtgattccttcaaagtcaggtctaggagactcaggatgcctaatctagaggtaagaacattgtgaggaaagccagtgaattcagtcttgtgcatgctgactttgaagtacttttggaagagccaagtggaattatccacaggacaggaccaaatcttacctggttcttccccaggccgactagtccacaacaggaaataaaaagagttgccccgataccaaggtgtactagtccattctcacactgctatggggaaatacctgagactgggtaatttataaagggaaaaggtttaattgactcacagttctagatggctggggaggcttcaggaaacttacaatcatggcagaaggcaccacttcacagggtggcgggagagagaatgagtgcccagcgaagggagaagctccttataaaaccatctgttctccttataaagatctcttaataaaaccgtcagagaactatctcattcactatcaggagaagagcatgggggaaccgcccccatgattcagtttactccacctggtcccgcccttgacatgtgggtgttattacaatttaaggtgagatttgggtggggacacagagccaaaccatatcacaaggctttctcctccttgctgggattgtacccatagcctctttctgagtcctctctcttttagcctctttatgcctgcagtgcatccttataccatttctagagtcatctttataaaacttatactctccgtatgactcataaatcctgtttttttttttgcacagtatattaagtataaaatttgttaaagtctttaatggtctgcccccaagctacatttccattttgtatgtctttcagttcctttctactttgtatttggctgttgagttaactgaatttttgccattccattaacccatcccatgcttttcccacttctagatttcacttttcttgtaggctagaatgtcttgactgggatctgactggagataatgagaacaaaaactggttcaaagagccaggatgttgcataaaagtcctaagattgtatctaagcaggtaaaataaaaattttaggcaattacttaaatttgaaatgctcacatttattaataaggcatgtaacatctacatgagccatcatttgcttttttaattccacattgattaggagccaaaccttcagggcaggtatccggtagagcgccctggagaggccctggataggcacaggcgcctgtcagggggctcttcacatgctgtgtgctgctgctgggagaagagggggccagagactagggggcttctaagaagaggtggcatttctgcctcagtgttgaaggatgaataactttgacaggctggaaaaaggtgacatttcaggtagagcgtgtcacatggatgtaaataccaaaggtcaaggacatgggcttgagagatggtgagaaggatggaggtgactgtggcttgcattctatccgtatcactattaattaccttctaatgcctttggctctaggtggtggaacaagtaaagtaatggacaaatactttttctaccaatatttagtgaccaaatgcagagttatggagagggccagggacctcatgaaccatactctttctagtctagggacataactccaatgcctttcctgtcccagtaagaggccatggatttcaagaagccagacaatccattctttcagataatgataaaaaagaaaccatttattttatttctaagtatagaatgaaacatttatagttgcccaaattttggtaccttttaggagaaaaatacagatttttttgttgttaaaaataaacttaaaaaaaaaaaaaaaagacttaccatagtccgggcacggtggctcacacctgtaatccgagaactttgggaggccgaggcaggcggatcacctgaggtcaggagtttgagaccagcctggccaacatggcgaaaccccatctctactaaaaatacaaaaattagccgggcatagtgggtggtgggtgcctgtaatcccagctacttgggaggctgaggcaggagaatcacttgaacccagaaggtggaggttgcagtgagctgagattgtgccattgtactccagcctggtcacaagagcgaagctctgtatcgaaaacaaaacaaaaaaagacctactgtaaatagagtacaacatgagactaacaaaaataacaaataaaatcatccagcatatattctgtatttaaaaaaaaaaaatcacaagatgaatacagaccatcttggtgcatatgtattttatacactagacacatgctgatgtttttaatgcttaaaatatattaggtttcatacttgcttccaatccaaggagagtatatctgagctctttttttttagatttgaaaaccgccttttagattagattagaacactgcctttttttttgttatgcagtaacagatcattgcccacctgaaagcgagtcgcctttatttttacctccttagtagaaccagcaggagctgcaattgctgttgcttgagccaaggccacagtcagcatagaaaggttctgctaagagactgtgttaaaggaaataaatttggtgacttagttttgttttacaagctagctgtggcccagtccttctgcagggtgggtacgcaggtttattgcagctctgcagagccatggccttagacaaacaaagaaggtgtgggaatacccgggagctttccattcaaagtagattcttctcctttgagtgcatgtaactgaagcaccagctttctaaaaaaaaaaaaaaaaaaaaaaagagagagaaaagaaaagtcagtctgaagtttttgtgacactcagccagactccacattagataaagtaatcatggaaatacagctttatttttataccaagttgtgcttagaaagctgattgctaaaccaggaagcttggctttcagaattttactgtaatccagggtggaaaaaaagtatcactcagatggcatttgtgggagattactgactggtaatccctccttgtcctagaagattaagtctgccctggtgtagtcatggtcagctgatttttttatttatttattttaaataaattgtagtttcttgttgtaagtcagccagtgtctgatgtttgcctgaactgtttgtacctctgggccatattgcagaaccctgcccttctttgttgactgaggaaagctcgctccctgcccaggtttttcattgttgatcgaaattaacaccaggtggtgaatagagcccctcctaaggttgctcaggataaatcatttattaaataggtctgcttatcaggaggggcgtgaaggctcccaaaaggaaatgctggcacctgggcccagaagccagggcctctaactcctggggttgatttcttcagtgaagttgcaccctacaaagggaatatggccaaagcggcactcaactgaaggctgatatcaggcgattagacagccatgcattctgcgtttgtctggaatggattgtagagagatggacttatatgaggactaccagtccccgtttgattttgatgcaggagtgaacaaaagctatctctacttgtctcctagtggaaattcatctccacccggatcacctactcttcagaaatttggtaactactaattttgtaaagttaagtttgcttggaataaaacctagacataacttggggtttgcctggctttaaaattgttagtgtaaagatgtaccagggtggtgttgggttgtaactagctaataagctattctagattcaaagtacagagatagatggctcattaaatatttagaatatgtgtatacttagaagttagattttaaagttagtactatttatgcgatcactagacttctccattgatagatattccaagctcactttgagtttgttgagctggtaaataacaaaaaaggaggaatctgaagtccttggtttctagttgcttaggtaatttacgacaactttcccgatttttctctttagtaaaatgatggttaagcactgactcagttcaaggtcttgctaatgactgtcctgggttttgttatggaatattgagagcaacttacagaaattgctaggcaagagatttttttttttttaaagaaaaactagaaattgctgtacctttagaagcagttattccttcatacttaccagtatgagattgctttgaaggccaggagcaccatcagggaggcccttcctttattggcacaaggcagcagaaagccagaagcagcttagccatcctcccggctgggtccctcatctcatagccaatgctgggaactggttaaatgaccttctctgtaatttgccaaataagcaatcaggtttttccagaagttaattttttccttattaatgaagaacaggtcacattttgttcattttaagctgaaaaaatgggtaacctagaaaaaaacatggtaaaggtgacagcatgaaacttagtt

SEQ ID NO: 3784 - DNA, 6000 bp, Homo sapiens
ttagaaatattgttaatcatttaattgttaaatatacatatctctaatgcattttataccctggagtaatcttagagagagatgaaaagattagaacggtgatggtggagactccaggagaaaagggacaatggctctcccagcactcccttccctacccagttcccatatgtaatttgataaatacacagaatccagagtggcttaaaaacatacaagaaagattaagtgtctatggcttttcttaatgtagccaaaatcaatagtgtgagatcgtttcctgttaatgtttaggtatttatgtgtccaacctccattagtgttaagtactctttcctgccaatacctgtttctacacatttttaaaagttgtttatttcatattcacagtcagtctcttacatggatggctaagagaatacaataagatggctattcaattatcttaagcaaaaaaatgttcattacctgacattaaatcaatttttctccaaaacttgttcttgatctcttgggcctcctaaccttcatccctttgtttactaccatgattcaagcaggaagagtctatctttctcctggatgatgatataattttcaaaattgtggtatcatatgccttcatttgtttgaacaatcagagagccagaactaccctttgacataggtagggtagtcagatttagcaaatagaaatataagacaacttgctaagaatttaagataaataataaattttagtataagtatgttgcaaatattgtagggtatacttttttgggttttttctgagatgaagtcttgctctgtcactcaggctggagtacggtggtgcaatcttggctcactgcaacctccacctcccgagttcaagtgattcacctgcctcagcctcctgaggagctgggattataagcatgtgccaccacacccaactaattttttgtatttttagtagagacaggggttgatcacgctggccaggctggtctcgaactcctgacctcaagtgatccacccaccttggcctcctaaagtgctgggattacaggggtgagccaccactcctggccagggatatacttacactaaaaaattacttgtcatttatctgaaattcaaattgaactgggtgtccttttatcttatctggcagcaaccctagacccaggctacctgaagcccctccactgggcgccctgggtcccatagagacttcccacttttgttctccttgatgagcagtccctagcatcaaatatctaccccctctttatcaacggtgcatctgatacctataactacagaatctcttgcctaaactggccaacatctgttgtcaaggccttcagcttttctcccaggacagtccttttgagtgcaaccctagaatggaggtatggccaaggctcggctgatgggaaagggtggatagagatgggatatgtcctaaggcatccacgcacaagggagtgggccagcctggtgcaggacagagtcaaagtgaaaggacagagccagaagagaaagccaggggctccatttgtatcctcgccccaggccccacaaatatgaggggtaagactacagaaagcatcccacttgccacacattctgtgtgatttctgctggctatcggtcaaggaagatacatacaacaagggcagagtatagagtttttccacttacataagtcggtttctatctatccttttcaataccttcatttgcttcaatgcatttgtttcaggggaagtttacaatttcttgtaaaaatttcaccaacaaatgagtattctgaaaaaagaaacttaaaaaaagaaacttaaaaaaaatccacgttcccatcaacaataacaccacaaagtaaatctagtgtttctttcctgtactgagccttttaaatgtggttcaactcaatgcacccaggtgctctgtttaagtgctagccattctccagagattcctcagagtgctaaaacataagacctgttcatttcagaagtaacacagcataaattgtaagcacagattctgtcagaagaaaacaaatgaagtagtacgaagacacaagagaaaagcaggcttttgtagaaatacatgtagtaggaagatgtaagagaaaagcaggcttttgtggaaatatcatgtactaggatatttatagtatgaacagtgctcatttaacctcaaagagaaaattaagttaatctatctctaaggctcaggattgcatgtatccacctacgtgggtgcatgccagagtgcattttctatatggcgcattctatcagttgggattgcatttggctccatctaacagaaagccaactacagtggccttacaaagtcaggcatttatttttttccagtaagaagcaggtctctgatgccatggattcttgggttctttctgccgtccttggcttgtgaatttcttcctcgtgtttgcaaaatggctattgcccctctaagcaggaatgggaagggtgaagggccaagtaatgctgccaagtctgtcttctttttaaatgctttcttggagattccaattagtacagtttgctcacatctcattggacattaatgagagagacccacctccagctgcaaggcagtttgaagtgcccagtgtttcagctgggcacattgccactccaaacaatatttaggttatcttaggaaggaaaacaggaaggctgtttatcaggtaggctatttgccatctctgctgcatgtgaactactctataagctcttcaaaagataagactttttttcctttcagcatacataacaagttcatcactatatagtaagttaaacagatacaaacaataaatatttgtaacggacactcacgttcaagtgctatttatttgtccacaaattagtacattgagagattgtctctccagatgtttatttctatacaatagatctcagcatcagctagtcaaaaattctttaccacatacagaattttctgctgatgccaaaatttacctttatgttacattaaaaattttttaaaaaatattgcacctttttgggctcaagcaatcctcttgccttagcctcctgagtagctgggtttacaggcaaacaccaccatgcctggtttaaaattacaatatttattaattgcatggtagaattaaaggatgcagagatgaccaaaataatctttgcccacctggaacttttttttttttttttgagatggagtctcactctgttgcccatgctggagtgcagtggcgtgatctcagttcactgcaacctctgcctcccgggttcatgccattctcctgcctcagcctgccgagtagctgggactacaggcgcccgccaccacacctggctaatttttggtatttttagtagagatggggtttcaccgtgttagccaggatggtctcgatctcctgacctcgtgatccgcccgcctcggcctcccaaagtgctgggattacaggcgtgagccaccgcgcccgacaatttttgtatttttagtagacacaaggtttcaccatgttggccaggctggtctcaaactcctgacctcaagtgatccacccgccttggcctcccggagtgctgggattacaggcgtgagccaccgtgccaggcctgttttttgatttttttaataggccattttaaggactttaccacctggagcttgtaacctaataggactgtgaaacatacactggtagcatcctggcaccagtgctggggtgagtgccacaggagaggagccaagtgcagtcagagtagaaggactcaaatagaagagatcacatctggttgagtcaaacagtaaacgtccccagaagacactggaagatgcaggctggagagagctacactttacatacagcacgacagtatagagatattaatagcatacagtcacttcaggtaactacaagtaattttaaaacatctgaataagtgcttctttgttgtctgtggagtgctacacaatgcttcggcctaaacgtcaagcaacacagaaaagaagccccacttcatttgcagcctcagatagcttacgaaattgagacaccacctgaagaccatgacccatacaatcaaagtgacttcatggaagacgagtaactgcaaaaccctgtgaaaacagattgttaacgctactaatgaaaagaactggattgttacgggaacctcaaactgtcctttgatcaacggacatgacgcctcaacacgcattttccaaagatctctgctgataattctgaccttcggttaatttaattaatttcatttgatttaattcattttagtgttgtcctcagtcccgcactcaaaacagatttttattatatgaaaatcttcctagtcacctaaaaaatccgcattctatggaaaagactatataatttttcaagagattctttgcaattttcacctatgctggtttatgacctagttagagaagacatcatagggcattatttaggtaataaaatacagagagaaaagagccactggcatttctaaataacgttcctgtgtttcctactgtaagtataggaaagtaggtgttcgcagatgcagagaaagggcatctccaaggcctcggaggaaacttttgattttataaataacttgatggtggaaggcaaacgccatcccggttcccaagcaggctccacgcagcctccatggccgagtccatctcctcgccgtcctcttccctcctcccggccgacttccagccggtgcgggagtcggggtgcgcccggccctcctagcgctgcgccgcccgcgccgacgtggcggagcgcacaggtcgaccgggtcaggtggttgggtgacgccccaggaaagcgctccaggccgagggcgggcggcgccgccgcgcccgacgcctctgggggtggggacttcgcgggagtcgccggcggaggcgaggaggagctctgcgcggcgcggcgggcgatccgagccgggacgggctgcaggcgggggtgctgcagaggacacgaggcggcgggctggagacatggaccgcggcgagcaaggtgagggcgcggacccagcgggcttgggctcgggcttggactcgggcttggactcgggctttggctcggcgcggggctgagcgcggcccggcggctcgagcaggtgccgagcctcctgggccggcgccgcaagttgcatctcccggatccggatctggcatcctggggccctggaaggagcggctctggcgggggcagatgggactgcatgtgtgagtgtgagtgtgcgtgtgtgggggagagggagagaaggttctgggaggtggcgaaggggctagcgtcaggggctggcggccgtgatgcgctttgggtggaaagccgcgtgaagggagcacggcgcagccagctcctgtaagtgactggaaccaggaacagaggacagtgagtcgctctcgtccctccaggtgggaaacccctctctccctcataaattaagactttctgccttcttctaagttcaggtggttaggatttttggtggcgtatgacccatggggggtttgggaggcagatatttatcatactagaaacccccagattgtggagtggtgtctgtgggtttgagggaagagagcttttcgtaggaagggtgaaatcccacaacacaaaaccttcagtctaatttaccatagcgttgggtgcacttgcttctgaaaacagctcaagtgaaattacccccaaatagagcaatagtaggccatggttttcagatttaaatagtttcatcctagagatctctgctgatcataagcctgtgactgtacgcagatgtgtgtggcacgcttttaaaaagatacataaatgctgaaaaaagaaaacaaggtaggtaatcttgggaagtgaggataggaatcactcctgttttgagccctgacacaagttttcatgtattgcttattttcctccagtatgtgccgtcatgtgtgcatttttatgtaaatcaaacc

SEQ ID NO: 3785 - DNA, 6000 bp, Homo sapiens
cttgttgcccaggctagagtgcaatggcgcgatctcatctcactgcaacctctgcctcccaggctcaagcgattcttctgcctcagcctcccgagtagctgggattacaggcatgtgccaccactcccagccaattttgtaattttagtagagacagggtttctccatgttggtcaggctggtctcgaattcccaacctcaggtgatctgcccgcctcggcctcccaaagggctgggattacaggcgtgagccactgtgcccggccacaactatcacattcttactgtcattcttggtttctatttctgtctcccgcactagataacacactcttaatgacggaaattgggtcttttttgagggatgcttgagggcctcccctttccttgttcctgatctctatcaaccctccccaagacaagattcctccaccccgtcagccaggatttgccaaccatgtccctaacctcaagtctcctccgcacaaggaaacatttttagaagcaccattaaccctcttgtttttatatccccagcattggaaataatgcctagcagctaacactgcagtcagtgaaagttggctgcgggatgaatgaatgagacaattgaattatcatatctgtcttcaagaatgctctcttcctgccaatcaaggcctcctctgtgtaaatctctgaaatctgaccgtttgacaattttggtttgattattcaaggaggtccataacttgtattaacttgtgattttgctgaagaaagaatgtgaatgaacacagggccaggcctggggtcaggatccgggccctcttagctgtgttagcctccccaacctccagctcctccatgtggctttgtcatcactgacccttcgtcacatgctcagtgaagccaggaatccagaccttttgactctgaagttcaagttcgttttttccccctctcttatttaattaattttttttttttttttttttttttgagacagagtctcgttctgttgaccaggctggagtgcagtggtgtgatcttggctcaccgcaacctctgcctcccaggttcaagtgattctcctgcctcagcctcccaagtagctgggattataggcatgcgccaccacaccaggctaattttgtatttttagtagagacggggggttctccatgttggtcaggctggtctcgaagtcctgacctcaggtgatccaccagccttggccccccaaagtgctgagattataggtgtgagccactgcgcccagccaattattttttttttttgagacggggtctcactatgtcacccaggatggtcttgaactccttcctaggctcaagcaatcctcctggttcagccttccaaagtgttgggattacaggcatgagccagtacgcccggcccctttcttacagggtctcactttgtcgccaggctagagtgcagtagtgtgatcttggctcatgcagcctcagcctcccaggctcaagtgagcctcctacctcagcctcttgagtagctgggactacaggtgagtgccaccacgcctggctaatttttttttttttttgagatggagtcttgttctgtcagccaggctggagtacagtggcgtgatttcagctcactgcaacctctgcctcccaggttcaagcaattctcctgcctcaccctcccgagtagctgggactacagatgtgtgccaccacgcccggctaatttttgtatttttagtagagacggggtttcaccatattggccaggctggtcttgaactcctgacctcgtgatccacccacctcagcctcccaaagtgctgggattacaggcgtgagccaccgcgcctggcctgtttttgtattttttgtagagacagggttttgccatgttgcccaggctggtctcaaactcctgggctcaagcaatttgcccacttcggcttctcaaagtgctgggattaaaggtgtgagccaccatgcccagccccaagttctttcttttatagctctcaaaaagattagaatgttctctcttcttttttaagatggagtctcactatgttgcccaggctggtcttgaactcctgggctcaagcgatcctctcatcttgaccttcaaattgctgggattacaggtttgagctgctgtgcctggccaaggttagaattttcaaagcattttgttatctcatttgatttccacaacaactcaatgtggatacaattattatttgtcctttacagatttgcaaagaggctcagagagtttaactcacttgctgaaggtcacttagctgataagcaacaaagaggaccctagaagtcaagatccctgagtctacataaacgctgtcttccttcttatcataatacaatcattttggacaagaaaccacccaatacatttattaaatatataaaggaaaataaaagatagcattcttttcagaaaagaagacatttaaaaaaaaagaaggccggattcagtagctcacacctgtaatccaagcactttggcaggctgaggtgggaggatcacttgagcgcaggagttcaaagccagcctgggcaacatagtgagaccctgtctctccagataaattaaaacaataataatactaaagaaaaaaaagttcccagaaggaggggcaaagggggcattggggtcaattatgtgtgtaaaatttggtctacactgaaactttttagagatgtagtaaatattagttgatgatagtactttttgatgatagcagctattgtatatatattgtgtatgttcttatggagtctaacatacggtttccacagtagggttcagtaaatttggctgtaccaggaggagaccattggctaaatttatcagattatattcctgccatgacaggtagttgagaattgggtgtattagtaaaggcatgatgagggctgggcatggtggcacatggctgtaatcccagccctttgggaaaccaaggcaggaggatcacttgaggccaggattttgagaccagtcagagcaacataacgagaccctgtatctacaaaaaaaaaaaaaaaaaaagttttaattagctgggcatggtggtacacacctgtagtcctagctattctggaggctgaggctggaggattgcttgagcagaggagttcaagactgcagtgggctgtgatcacccctctgcactccagcctggacaacagagctggatcctgtctctaaaaagaaatttttaaaaaaatgttagggatatgatttggtaagtgatgcagagaggcaaaagaatgggatgcaattccctggaagcacaattgctacctgtaggaatcatcctggggactcccctagctgcagatgccaaagggtggcagtgtccaaactgaggaagtacccaagtgcagggaggcagcatgggcgaatggcaaacacttgagcctccaaggctagggccctggctctgctcctgtgctttctaagatctcttacatagctgggcatggaggcatgcctataatcccagctactcaggaggctaaagaagggggttcacttgagtccaggacttcaagaccagcctgaacaacatatgtattatatacatatatatgttgatttttgtagagacagggtctcaacatattgcccaggctgttctcaaatttctggccttcagcaatcctcccacctcagccttccaaagtgttgggattacaggcatgagccaccacatctggcctgagccaccaggcccagcctaattttttctttaaatttactaaaagaaaaacaagatcctttaccacaccacttaacagaaaaatattaacataaaataatacagatagtgtgcaaaaaagtcacttgctgggttgatttagcattttggtaaagtatacaagctctggacacagactgagtatgtatcttagctcagctagttactatgtgtatgatttggggcaaattacataccttctctggagctcagattcctcttctgtaaaatgaggataagaattcctccttcatgaaattgttggaacaattaaataacttaatactatatatatacatacatatatatatttttgagacggagtttcactcttgttgcccaggctggagtgcattggcacgatctcggctcaccgcaacctctgcctcccggattcaagcaattctcctgcctcagcctcccaagtacttgggattacaggcatgcgccaccatgcccgactaattttttttttttttttttttgagacggagtctcactctgttgctcaggctggagtgcagcggtgcgatctcggctcactgcaacctctgcctcctgggttcaagcgattctcctgccttggcctcccaaacaggtgggattacaggcgactgccaccatgcctggctagtttttgcatttttagtagagatggggtttcaccatgttggccaggcaggtctcaaactcctgacctcaggcgatccgcccgcctcctcttccgaaagtgctgggattacaggcatgagccaccgcacctggcctaattttgtatttttagtagagacgggatttcaccatgttggccagactggtctcgaaatcctgacctcaggtgatccacctacctcagcctcccaaagtgctgggattacaggcatgagccacagggcccggcctttaatactactatttttttttttttttttttttttgagacagagtcttgctttgtcgcccaggctggagtgcagtggcgcgatataggctcactgcaagctccgcctcgccgattcacgccattctcctgcctcagcctcctgagtagctgggactacaggcgcccgccacgacgcccggctaattttttgccttaatactatttttaagtgacaatacatgtcatagaaatattagctattgttactagtaccagtgcctgtggcactttccttatctgttaacgattagaacaataaaaagatgtgctttcccaggcggctgccgaagatggcggaggtgcaggtcccagtcctccatggtcgaggccatctcctgggccgcctggcggccatcgtggctaagcaggtaatgttgggctggaaggtggtggtcgtacgctgtgagggcatcaacatttctggcaatttctacagaaataagttgaagtacctggctttcctctgcaagcagatgaacaccaacccttcgcgaggctcctaacacttccggacccccagctgcagcttccggacccccagctgcatcttccggtggaccgtgcgaggcatgctgccccacaagaccaagcggggccaggccgtcctagaccacctccaggtgtttgacggcatctcaccgctctacgacaagaaagcggatggtggttcctgctgccctcaaggtcgtgcgtctgaagccgacaagaaagtttgcctatctggggcgcctggcgcacgaggttggctggaagtaccaggcagtgacagctaccctggagaagaggaaggaaaaggcctagatccactaccggaagaagaaacagctcatgaggctacggaaacaggctgagaagaacgtggagaagaaaactgacaaatacacagaggtcctcaagacccacagactcctggtctgagcccagtaaagactgttaattccaaaagaaaagaaaagaaaaagatgtggctgggctcaaagcctccaacccctgggctcaagtgatccaccccagcctctgaaagtattgggattacaggtgtgagtcaccatgcccagccattataaaacttttaaacctagtttttaaaatgttttaatttttaagtttttttgagactaggtttaagttttgtaagtggcatgatcacagcttactgaagccttgacctcctaggctcaagagatcctctaacttcagcctcctgagtagctggtaccacaggcatgcaccaccacacacagctactttttacattttttttgtagagatggctttcactaag

SEQ ID NO: 3786 - DNA, 6000 bp, Homo sapiens
acaaattacatgggcatcagggaagtggggagcatttctgaatattagagatgatcaagttacatcaataatttttgaggagaaaacctgagtaggtgtagagtattctttagtactctgttgatataaacatttatttgttcagaagccatctgatgagtagttatttgaaatatgcatcagttaactaagaatctgatttcttgggactgagtaggcactagatgactatctgagtttctggaaactccagttgaagtgactagagtgactggaaaaagtttataagcaagaggttgtatctcttccttgagctgatcagaacaacagatccctgttatggactgctgaggtcatttttccttatttcccaacttccctacccagaggtgtcatcaatttgactgtgatttgcagtttaagagagttttctcttacatgtctttatttgtatttatggccatgagcagggtgaagttcagagaattacacccttcaacagcttaaatgatcatgtcattttgttatggactgaatgttgtgttcctcaaaaattcagatgttgaaatcctaaccctcaaggtgatgctattaggaaagggggcctttggatggtgattaggtcatgcaggtggagtcttaacaaatacgattagtacccttataaaagagaccccagagaactctctaaccctttctgccacgtaaggttgcaaggtaaagttggcagtctgcaaaccagaagaaggccctcatcagaactcaaccatgctggtttctggacctccaacttctagcctccaaaactgtgagaaataaatttttgttgcttaaatttgacacccagtttatgatagtttgttgtaatagtccaaagtgattaagacacactcccatgcttaaaactctctagtgctttgtatggttctttgaagaaagactggaatcacttccacctgcaacctagccactgtctactcacctcttcagtccctcctggtccacacaatgccttgctctccatgcagcaaccgtactggaatatttctagttccttgaaatcccaccttgcttcctcccactgggagacctactaacaccctgtcctccttgcccaaaggctctccctccccacctcttcaccatgtgttcatcatttgtcaatatacgcagttttcagagttcttgttaaaaggtacatggagtcaggtccttctattgccacttatttcttttcatgtgatacacagtcttgtttatatatttgtgtgattaaggccaattttcaaagaaagggctatggtaatgaatggctagcaatgccagaatcacattataggtgagtagtgaaccataagtagcaactacttacccctagtccaacacgttcaggcaaacccttaaacaactggtgacctcatcagaaagtgatgtcatcagaaagtgacatctttcttcatcagaaagtgagtcagctagataactttacctttacctttctgtacattattttttaaaagacatacccacatatacattttaaaacatagtctagatgacctataaaggcaaatagtttgtgtctcaaatattaatatggttaaaattgtgttttttaaggaagaaattataaacattaataaaataagtcaatgggctatctgctgtttttctcctcctttttctctgttccttttataaaatcagaataaaacttctttttaataaccatgaaataacaaggaatttgttcttgttcttcaagttaatatccttttctctgcataaccagaaccggtatttccaattttcaggtgaggaagtgtaggcacaagatgttttagacacttttcagttaacttagagctgcatgccttgtctcccaaatcacctaagtcaattgctttcctgagtctcaggtatttccattatgatgatgattataaatgaccatctggatcagaggctgtgctactgtgctaaagagataaagtgtcttccctgtaggaactcctaatattcaggcaccatttctctaagctttagaagtggctgaaatggggttttggggcagtagacagtcactgggggtcaatccaaaatctattcaatgtgggacctaattcagaagagtttaggaaagaagagatgaggaatatctgatgaggtgtcccctagaaagttagcgtcacatatatctggtgcctagaaacagaaggttaaagttacggaacattctgcttaatgtcaccgatggcctctgccaatgagggatctgtcacaggaagatgaatgtagtcttccagttactgttcaaatgtccccttttgggttcagtctggaatccctgggtccattccaattaaatcttaaaatgaacttcagctcagagtgttcaaagcctgcagcccacagtagtggattacttagaaataccctaggggattggccagattgctccaagaatataacagatgaaatgactgataattcatggtctctgtcagttttctgtcagtgagtgatgaataaagggcccacagttaggccctgagatgcacaatcaatacacagtctattttgtgattctagataaatggtgccccaacctgtctccagcttacagctaattaccaatcccctgaatccccaaattaccaccatcgctcctttgcagggagagccagaatttgagctaaaagcttcagcgaataccatagaaaaataagtagttcctgccctcaggagcttacaatctagatttgccttgtgctcatacaaacgtccccatgagaacctcagatgataatgacacttaatgagcactatgtgccggacactatttttagtgttttacatcttttatctaattcaatctttataataaccgttatgatactttgaggtagatgtgattattatcctcattataggaataacaaaaaatggaaacaaaaataggttaggcaactagtctgaggtcacagagctaggaaaaattggagttggggctcaaatctaggttacaaaggccagtatcttaggtattcccctagaataatcataactataggaaatatttcctatgggccaggcattgtgctgagttattttacatgcattactttatttaatgctcataattagtgattaccatcatttatataattgttttttaaacgctcccatttgctttctcttacgtttctgcaatatcagtgtgtttttatcttatagatgaggctcagggagacgtaaacctttcccagggttaacactgaaggactcagttattgattagttttctccaaggtctgacacccacatattggcatcattttatgttctgagaaaaacaccttcaaataatatcctagacaaacattactctaacaaaaacaataatactgctatttatattgtgtttcactactaacacttggattgacttgagtcccatggcaagtctaagtgttgatatctcaggttgcagatgtcaaaactacgattcaaaatacaaggagtgatttggagtcatacaattttgtccacactcactgagctacatttattcactagttcacttaagaaaccagcatgctgttacattctggcccttgagggacaaagctgaatgacaccccgtcttctgtaatttgcaggatggaacagtctgtggatccactttgaactcgtggtggaaggatgtcccttggaaggggcagatgctctgatcctggtaagccatccttgctccccaggggtcccctctcctgattcttcaccttccttcccttgaatctggtgaaaggcagtatttgcccttctctggagacatataacttgaacacttggccctgatggggaagcagctctgcagggactttttcagccatctgtaaacaatttcagtggcaacccgcgaactgtaatccatgaatgggaccacactttacaagtcatcaagtctaacttctagaccagggaattaatgggggagacagcgaaccctagagcaaagtgccaaacttctgtcgatagcttgaggctagtggaaagacctcgaggaggctactccagaagttcagcgcgtaggaagctccgataccaatagccctttgatgatggtggggttggtgaagggaacagtgctccgcaaggttatccctgccccaggcagtccaattttcactctgcagattctctctggctctaactaccccagataacaaggagtgaatgcagaatagcacgggctttagggccaatcagacattagttagaaaaattcctactacatggtttatgtaaacttgaagatgaatgattgcgaactccccgaaaagggctcagacaatgccatgcataaagaggggccctgtaatttgaggtttcagaacccgaagtgaaggggtcaggcagccgggtacggcggaaactcacagctttcgcccagcgagaggacaaaggtctgggacacactccaactgcgtccggatcttggctggatcggactctcagggtggaggagacacaagcacagcagctgcccagcgtgtgcccagccctcccaccgctggtcccggctgccaggaggctggccgctggcgggaaggggccgggaaacctcagagccccgcggagacagcagccgccttgttcctcagcccggtggcttttttttcccctgctctcccaggggccagacaccaccgccccacccctcacgccccacctccctgggggatcctttccgccccagccctgaaagcgttaaccctggagctttctgcacaccccccgaccgctcccgcccaagcttcctaaaaaagaaaggtgcaaagtttggtccaggatagaaaaatgactgatcaaaggcaggcgatacttcctgttgccgggacgctatatataacgtgatgagcgcacgggctgcggagacgcaccggagcgctcgcccagccgccgcctccaagcccctgaggtttccggggaccacaatgaacaacttgctgtgctgcgcgctcgtggtaagtccctgggccagccgacgggtgcccggcgcctggggaggctgctgccacctggtctcccaacctcccagcggaccggcggggagaaggctccactcgctccctcccaggagaggcttggggttaggctggagcaggaaaccgctttcaagttatgccatgcttcccctagggtgtccttttacgctgcaaagttcctgctgactttatggaagacagcaagagagagacagacagcgagagagagggagagagagagagagagagaaacttgtttgaaagttttagtcattaaccttctgtcttcatctcagaatattaacgccctcatgtagtccatactatctttgcttaatgaacttgaacttttattattagtggcaaagaagtggtcccttagattcagagtaagttggaagaagacgttagtcttcttaaaaccattataattagaatatgacatgatagatttttctaatgtaaatattatgtgaaattttgaataattaggagaaaagatctctcacacacacacttcttaactgtgtaatgttttaataaaattttattgttaaaattatttcacttctcaacttcaatatactgtggagaatattggcagtatgttatgttctaaaacatatctaaagaattgaagttcactaaatagggctaaaaattgtgtttaaaatgttatttggaaaagaaaggaatctctgtgacttagctttttttttaagcttaggttttgatcaagttaataagatttgcatgtaggtttttctatgaccaatgacttattttctctatgacactagagtgtagagtacatcaagatatgaatcagacatttatgcaaggctaggaaaagccatatttaagccacatatgtgttttggatgtgtttgagtaaatgtttgaacttcaacctccaacccacaaataatgaatagaaggctaggtagtc

SEQ ID NO: 3787 - DNA, 6000 bp, Homo sapiens
aaaagagcaaaagaacatgagagaacagagagagagagtcaaactcatccatttatcagcaacccactcccagaataattaacctattccagtgataactgcattcattcattcatgagggcagagctctcatgacctaaccatctcttaaagatcccatctctaaacactgttgcactgaggattaactttccaacacataggttttaggggacactttcaaaccatagcaacaatctatgcttttgctgtaactgcatgtaattcaaggagagtgttggttgggctgaagtgggtgaaggagagtgagaagcaagtggcagtcttatcctttttccatcccctactccattttaaggcatcccccaaatttctagatcatcactagagaaacatacctagatccaccagtgtttccgcaagcactccagtctctggaaaaaaatacagtgtttacagattccttgctactctacataggtctttatatacaaagcttttatgtttcaacaagaagaaccctcattttttaatctagggaagttcctacatcatttgatcatttttctttcccttctttccatccctcattctccttatgattcctcttctacctctaagacctgaggaaaaaaaaaaaaaaacttcctccttgaaagccccttcctcccttacgtattaacccatgtaaatgggcatgacagaggaggggaatacagttcttcagacacaactggactctgaatcttaatttgattcccccagtacccctaccaccattatataccaccaaagagggtgaataacagcaataagctctaatgttgatttaatacaccgatagtatattttgatgtcagacaggaaaatcctaacctatagtacacctaagtatttttaagctaattagtccaaataggagagctgctgaaagaaaatatcatcctcatcctaaatgaagatcaacttaaccactgaaatatgaagactgatagcagtaatgcttgctgttgtaaactgcagtcaatattcctgttcatgctggagaatatggagaggtgactacatatattattgatggagctgggctatgatgtgagatagtagtgaaaataacttgcaaattgaaatcaaatataatattctggctttccacaagaaaagcccaactaccaattttctcttactcttaaaacattctgactggagtagggtttcagctatgtgccttattttcaggcttaattagatatttaagtatttttccttgcattcagctagaattatagtagttgaacaccagaaaaaaaactgtttaaatattagaaataaagccttagagaactcactaggttaaatctagcagtgcaaatgaccagactgcaaggtgagttgtcagttctttagaagcaatctgaatcatcaatgtaatcagaaagctctatattgatcatttataacaaaataagtcaaatggttaaaactgccggcactgatacaagttcctaatcatttccaaacttgagtatcactcactacgatctaacttcttctattcccaaataacccagacctgctggaggatatggctttgttttcatattcaagctttaggaatttatttatagaacataatatatacaggcttctacatataaagagaaaaaatcattttattataccacttacctttactttacaaaagatcagtgtaatccatcacccttactagagacataactcagttctttctttatcaaaaatgggtcagtggtgtcctccttggaaacaaaggatatcaaaccactgtaggattacaaataatctcaagctttttctttatagttcctgaatcaaatactttggctatttttagtatttaaataaatagcatcaaaaagctttcagttttatatgaaaagttttatgagcctttctgtgtaatatagaggattccattgtctcatctagagatgtgaaattttacaattatggggtgagtgtttggtattttacaccttaaaaggatagcttatacaaacaattggttactatcactataaattaaataaaatttcatttgatagatctatgttttcaaaacataaatattgtttcgtatgtgcttatgcataagcctaataaaatggattgttccattgtattacttctttagccaggtttactcaggagatcagaacactgccaataaggagcatcctttccagaggctattgtctttttttttttctacttttattttagattcagaggtacatgtgcaggcttgttacttgggtatattgtgtgatgccaaagtttgggttatgaatgatttaatcacccagatactgagcagaatacccagtggttagtttttcaacccttcccccacccacccacttccccctctagtagttcccagtgtctattgttgtcatctttatgaccatgagtatccaatgtttagctcccatttataagtgagcacatgtggtatttggttttctgttcctgcattaattcacctaggataatggcctccaactgcatccatgttcctggaaatgacatgatttcattcttttttattcctgtgtagtatttcatgctgtatatataccacatttcctttatccaatccactattgatgggcacctaagttgattccatgtctttgctattgtgaacagtgctgtgatgaacatatgagtgcatgtgtcttttcaataggatgatttgttttcttttgcatatacacctagtaatgggattgctggattaatggtagttctgttttaagttacttgagaaatctataaactgttttccacagtagctgaatttacattcccaccacaagtgtataagtgtataagcatttccttttctccatagccttcttaacatctgttgttttttgactttttaagaatagccattctgacaggtgtgagatgttatctcattacagttttgatttgaatttctctgatgattagtgatgtggaacattttctcatatgttttttcatatgtttgttggccacttgtatgtcttcttctgaaaagtgtctgttcatgtcttttgtctatttttttttttttttttttttttttttttttttttttttgagacggagtctcgctctgtcgcccaggctggagtgcagtggcgggatctcggctcactgcaagctccgtctcccgggttcacgccattctcctgcctcagcctcccaagtagctgggactacaggcgcccgccactacgcccggctaattttttgtatttttagtagagacggggtttcaccgttttagccgggatggtctcgatctcctgacctcgtgatccgcccgcctcagcctcccaaagtgctgggattacaggtgtgagccaccgcgcccggccacattattgatatatagaaatgatactgaatttatatcctgaaactttactgaagtcatttatcagttccaggagccttttggtggagcctttcgggttttctggatatggaatcatatcatctgaaaaagaaataatttgacttcttattttcctatttgaatgacagggtatgtcttgatgtgggatctggcaactaagtgtctgaaaagctcagttttgctatgagaaaaaaaaccattctctgtcaaaaggaatcaaggcttaataaaagatttcatagtatacactgaaggatgaggaagcttataaagaaaataggcatcaaggttggtggttgaaataatacagagaagtaaaatcaagtgcaagttcagatttggtgatttggagtctcaactttgaagagacaatgtgtgttctatattatgtagcataattcagggatttctttaccctttagtctcaggtttgaaagaggagttctgattcagagtctgggagtgttcctgaaaccactagtgtttctacaggcaatagaggaaaagtctaccctctggaacaaattggtttttagggagtccttgctgcccttttcaggcctttaaacacatagccaaatcctccatcagccttcatgtttacaagaacaattctcactttttaacttagggaaacacaccactcaggacaaggcaataataaacactactaaattatgtgaaagggttatagaacataaactcaaaggagggctgaagttggtttgaatgcacagctggatgcttcattgtagccacataggcatgagtagggcaaactgctgaaatttgctgaggatcaaattatgttccacaagatcatgctcgcaagaattacaagaatatccaacaaaatcactagagtctaagacttgctcaagaatattctctgagaataggcagccatagaatgagctaagtgaagctcgaccacaagacctcactggattaacgtcctgatttttccattgcataagtttactctcggcagaattacggttggggggaggttggggtggcaggttggcaggggagagtggatccacactctgatagatcctatttaactagttttactttactgtgcagactacctcccacaacaggtaaccttgaatgtaggcagacatgcttccagaaatgtgagtggaggtagggcggaataaagaaaatgcaactgcaaaactgaaaattcatactagcacaatgatgtttaaatgattttcaagtgttggagctggtgtggtggaaaacagttgcctgacgctttggtttgaaggccagggcttgtcatttaccatgtcaggagaaattcctctcttttcgacaataatctctgcactgcctacctcaggaggtcctcgcaatgccaaaatgccgccagtgtgggttgcgcctcagctgagcactgattctacagcctcgcggtttgggcgggaagtcccacctccgcaaccctgaccagcccggctccccacccccaccacccggaagtgaacaccacgagctagcgtgtctacttcacaggccaggtcgtcaactcaactgtcaaggtgtccattgtaccagctgggccatggatccctcccgcctgaaatctgactccacctgccaagagtctgagcctgcaggcctagatttcgactctgctggccaagattatttctctgcagcccaataattcgactctttctaccaagaattggacctggactctcttaacgaagatcttctttcccagtccatgccacatgccaggacagagacctctgtgggcacatatgaatcccactcgacttctgaactggaggatctgacagagcccgagcaaagagagctcaaaaccaaactcactaaattggaggctgaaattgtaaccctacgccacgtactagcagccaaagagagacgctgtggggaactcaagaggaagttaggcctcaccgccttggtagggctgagacagaatctgtccaagagctggcttgatgttcaggtctccaacacctatgtgaaacagaagacatcagctgctctgtccaccatgggcactctcatctgcaggaagcttggaggcgtgaagaagtcggccacattcagatcttttgaaggtctgatggggacaatcaagtccaaagtctcagggggcaaaagagcttggccctgactgtctttcttctgcggagggtggggttgatctgctctcagttttggggtgtggggaagacccactccagattccggggagtgggaatgagccactcccagttctggagagtgaggatgaccatctccactttctggaaccagaatgagcccccttggtaaccttgcctggtactaaaccagtgcaaggacccccttcccttattacatttgcaactctgcccaacaaaaacaagcaagcaaaccacaatggtaaagtggttaattcaggaaattgacagaatccagttttgagaaaagaacacagatatttgctgcttttaagatagagaacccaaagttttgtacctggttatttttcacttaagtttgtagac

SEQ ID NO: 3788 - DNA, 6000 bp, Homo sapiens
gacagtgagttagccactgaaaatttctatttcatcaaatagctcttttcccaagagaaccagatggggggaggtcttgccaaccatcgatgccagtccaggaaagtagggctatgcccaaataagcacccttgcagaaaggctgtggatattgctcaagtccaaaacctatctagaagtaattgctgaaaaatgaactttttttactaactcaagcaacagagaaaacatctgctgacccaactcagctgcccttgctaatccctcatttgcacatcatgaggaaattgctatgggacattctgaaaaatgtatttattagcaaacaaggatgtaagcaaagatgtgcagagatgggtggaaggaacaaccaacaagcagagagaagacacagggaatcacgagaccctgaaaacgttaatggtagaagcatccttagcaatcacaaagctccctgtccccatttaacacatgaagagaagaaggcctgaaaagtagaaaaaatgtagagtcatcttgtctcagtaggagcaaaagctataaaagacatcaactccaatcatttctccaataatcaaatttcctctaaaatattctcaatcagtggccattcaggtcctgtccttatcgttgaaacagagagcccccacctctggaagcaacatgatttatctttggacagtattgacaaagtcttcaaattgagccaaagtttgcctttcagtaacttctacttattgcctagttcaaccccctgaatgccatacagaatggtaacaataataacagcaacagtgataataataccagtccgtaaacaaaatccaaaaatatctaaaaactgaaagcatttggcagcaaaagctgacctgaaagggcatgtgttgttgggaattgttacctatcacattcagtatgagtatgttgggctgcagaattctttctgtatttgattattaggtgttgtttcagaccccaccaaaagtgttatgaaatataaggtatgtgtaataggttactcaggacaaccatataaaactattattattgcaggtcaaaaatgaccagatatatgcaatttcagatggttcaacttaatgctttttgaaacctggctccaaggacttgagatacaggatttgacggcctgtaatcttatggagaccctccactttgagtattaactgtgtggtaggtgccgtgtcaagcatgactctcaaattagtatctccatgcaagcctctgcctggaagccccaaataaccgttcatctacctattaattgcctccgcttggtcatctaaaagtccccttactttatttatctcaatctccgctctcaagcatctagccaaagcctgccctgcctccattaaagatgtctttacgcaccccacgctcaaacaaaaagcccttgactcagacttttctcttctctttctctctcactccacatctagcataataagaaattatgtctgctctagtttaaaatattaatatatccaggatccactatttcttgtgaccctcattgtcatcacctcatccaagccaccatcctgcctctcctggatgattgcagtggtctccaaatgggtctcccagacttcaggctgttctcaacacagcaaacaggatgatcttttcaaagtaaaatcagagcctgccacctctccgcccatcaccttccaaagaacccctactccactcaccaccacctctcttcccatcaaactcagtgaagaagaagccaagtcctacctggacccaggaggacacacacggtcagcctcctccatcactctgaccttgtggtccccccactccccctcacccactgccccagctgacctggccaccttgctgctctgtaaatacaccatgtacactggcttcaatgccaggctctcttcctccagacacctccacgtcctcccccaccctcttcaagtcttcattcatatgtctcctctcaatgaggtctattctgacaactctattttcaattgcaattaagatcatttatctcttttttttttctaaatcacttaaggccatctaatgtactataaattaacttatttgttttaattactggccgtctccccccaccagaatataagcttcatgaaagcaggaggttttgtctgttcttttcactgttttatccccagtacctagaacactatcttgcacatactcaagtgcgataactcatcatttatctgttaagtgatttactttttgcctttgaatccactgagattcaagaaggaaaaaagaagtacctcctggcagccaaaatagatctctgtattatcaaagaagttatacagatggcaaataagtatgtgaaaagatgttcaacatgattagccattaggggaatgcaaattaaaaccacagtgagatacgaccacacacttatcagaacggcaaaagcaaaatatagtaaaggcaccaaatgctggagagaggatacagagaggatgctggacctttcacacattacttgtgggaagtaaaatgatacaaccactctggttgtaggtaactgccatacagttacctacagaattaattgtagataactgctatatttaggcaactgcttaaattttataggtaactgccatggtaaaaacataccatggtaaaaaacatggtatgtttttaccatggcagttaattttaccatgggaaattaaacatttgtttaccatacagccaacaatttcactttgggcatttataccagaaaaagtgaaaacatgttcacacaaaataatctgtacacaaatattcacaacagcattattcataataactcaaaactggaaataacccaaatgtccttcagtgggcgaatgattaaacaaactgttgtatatccgtaccatagaatgctactcagtcatcaaaagaaaggttaagttacaatagcaaagatttaggttaatctcaaagatgtttcttaatagatttgttcaatccagaatgagtaaccatgggacatcaaaatcatcctttgctagaattctttgaaaatacgttagatgcttattttagtagatggtaatgagtctattgaataacagttaggagcaatagtcatggggaagggttatgacttagtacctgctctcccagacctgatggtctaattggggagacagaaggaatggtcaaacatagtctagtaggaggtattcaatgatagggaagaaagggaagctataggaacatagaatatgatcatcttacccaatcttggaggcaggcggatacaaaaatggtttctacacacaattaaggaacaggagcatagaaaagaaaggttaagttacaatagcagagatttaggttagtctcaaagacattttttaatagatttgttaaaccaagaatgagtagccatgggacatgaaaatcatcctttgctagaatgagcataggagcatagtgatatgaaggaagaggactggacacttccattttgcaacagtacagctagtcaatagtgtatccagggaactgcagcttgggaaagtagtaaaagttgaggctggacactggggacgggtgacagtgagcagggaccaagccatgaaaggcctttccaagtagcctgaagagtccaggctgtgacataaccagaagtagcaactggatggaggcgctagtaaaactggtttctgccgtacatcacaggccattccttaaactttcctattatttctagaacccatcttttcccagggtcctttactttcctctgagatcaaccctccctgagctctaaggccgagttccaacaccacctctttctccaggaagccccctcaaccccctcactgcagggtcttacccactcctgggtaaagacagtgcaggtatttatgaacatgcatgatccagcagtacctatggtgaagtgtgatggtgaagaagccagcagccagcctgcctgagtcccaatcctggctctaccacttgccgtctgtgctttattttcttatgtgtaaaatgagaatgatagctttattgtcacaaaatttatctcaggattgaataattttattgatgtatttaacttagagcagtgattggcacaaagtaagcacttaataaatataatcttttattacatgttgtggcccccacacccaactgcaggcaaagcacatcacatgatcaattaactttagactaatcagggagtagtggttaatgttctaccctcacagacagtcacctcgatctgtggcctcatactctgattaaacaatggtcaatgcagactggaaatactttcctttcatgggcagtcatgtgctagaggttacaactccaagccgtgatttagaactaggtcatcttcctagctcctctgtcttcatccttggatgacctaggacaagtgccttcaccttttagaactttgctattcccatctgtacactgagaatgaatttctatgaggttcaaaatgacagagggctaggcagcactttgcaaagagctgatgcaaatgtgatttccgtttcccaatctgcaaaccacacacctctcatccctcactttcacttccagaagcacactccccagactggcacagctggtaagcctccagtgcagggaacaggtatattttaatttgccccacccactgacttgatgaattctttctctcctccttcagggactttcctaacttccttctgtaaacgaaggaaggagcacatgagcatactgtatataaatatgcttgggaaagctttcttcttctccttcttcttcttttttttttttttttttttttcctcaaaccaaacttggtttctgttgtaggcggtgcattctctagcagggtagggccacagtgtgctcttgaagaggggaggggagaggaaaagggaaggaggagactgagtgattaagtcacccactgtgagagctggtcttctatttaatgggggctctctctgcccaggagtcagaggtgcctccaggagcagcaggagcatggccgaggatctgggactgagctttggggaaacagccagtgtggaaatgctgccagagcacggcagctgcaggcccaaggccaggagcagcagcgcacgctgggctctcacctgctgcctggtgttgctccccttccttgcaggactcaccacatacctgcttgtcagccagctccgggcccagggagaggcctgtgtgcagttccaggtaagccacatggcactctgaccttggggaggagcagtggactctctgcagtgagtggcaactatttcagctctggacagaggatagagtttcttgatgtatcacatttcttgtttctacatgcagaggaaatgtagagtgggaggggtggagaggttcaatttggtgtttattctcaatatttctagggaatgaacagtcccttcttttactgtggggataaccttcagcctcatattttttagataattataatcatagtatactggtaatttgggaagattctttttatttaagaaaaaaacttaaaattacataactaacacggtcattgaaaaaagttagaaaatacagataaggagaggaagaaagtcatcattacccataactcttatagctgaccactgttaacagtttgggatatataattctgtacagaattatatgccagatataaaacggattttttaatgagacgagattattctgagtctgctaatatattatgattttatttatatgctaatgaattcacaacaacatgatgctatagatacacattcctatatgtggatgctataatttctttacccactctttttcttgggtttagaactttttctctttttagagcttaagaaagaacctcctgcctggttgtctatctctaaggtcttgctgaggcctgggagaagcctagtcagaaaaagaatatgaagtctagggagaacaatggtaggggcagcgataggtgtcaagaag

SEQ ID NO: 3789 - DNA, 6000 bp, Homo sapiens
caacttcaattacaaaaataggtgcctgccagatttggcctatggttcagtttgctagccctgttccaaatcttcctcccactgcccctgtcctcactgggccctctcaatgaagtgtcactgtggctcgactccaacatccaatctcttcaagttagccccagcaagacaaagagctctaaagttaaagggacaggaccctccctcctcaaaaggccatttagttacatgtgttattgcttgaatataccctgggtgagtctgtccttgtctcacatatacccatagtttaaaaatatatattcctaccatgtacagtgatcatcaaaagataatcttaaatggataaaattattaagttacttttaatggcaaaaaccgcaatcacttttgcaccaatctaatgatttttaaatggagtaaaatgtctccattctattccaaatatatctgcattccagaaaggttctgaaggtatttctagagcctgcagccgtagtcaaggttagaaagagggctcaataaagggagcagaaaaactagtctgtaaaccaacatgacccagctacatggccccagacaataacttttattatgcctcagtttccctacctacacaatggaggtggtagtttacctgtccaaaggctaaattttggaccagatgatctcttggagattgtttccctaaatcagtgtttttcaaatggtctcaggcatctgcattccctggggtgctttgttaaaacagactaccagaccccagcctgagtttctgaattagagtaggtctagagggtcttaaagtggcaccaagttcccaggtgctactgctgccactgctggtgtgggcttacacctgaaggcctctagtctctacaacagagatctcccagtcccttatacaggaaagcaatgttggaggaatggctactgctggcttccctttacttttcaaaatggctttccttcttgaagggatgagacgttagttctatttgcccactgagtctcaggcactgcagccacatctcagcagccaattccaggctgaaaggaggctgggtggtcactctcatgaggccattctctggagaaagatagagacacggagtacagttgagaagagagaggcaagaatgccaccacacaattcctttacataagccactcttctagaactttctctttccataaacatgaagcatagattgaaggtcaaccctgcatatatgaccagcagcaagaaacgcaaggtgggatgcaaggacttagaagactaggaaagtgcagaccgccctcagggactctcatcttatgagcaaggcaacatttacatgtgtttacacacttgggttccacatcaagagaagtagataattagacaattaggttatgtggcatgaaaatagaggcattccagagagggtgttggtggacttgagagatctgggcaagcattcctggagatggtgaggcgggttggcaaaggctggaagggagaggaagaacaggagcagtggaaagccaagtaaaacacgagaggaagcctggatgcacctggaatattagcagagccgacatgagaatgagcagagagggccgggcaagcagagggggttgggtgcggtagctcatgcctgtaatcccagcactttgggaggccgagacaggcagattacgaggtcaggagttcaagaccagcctggccaacatggtgaaaccctatctctacaaaagattaaaaaaaaaaaaaaatagccaggcctaggggtgtgtgcctgtaatcccagcaactcaggaggctgaggcaggagaatcacttgaacctaggaggcagaggttgcagtgagccgagattgcgccattacactccaacctgggtgacagggcgagactcagtcaaaaaaaaaaaaaaaaaaaaaaaaggagagagaatgagcagaagggactcttacacctgtctctctccctgatggtatgtacttcctttagttgttcccatttctgtgtcccagtttcctccttttgtggaatgaaggattcaagccaaattttctgaagtttctaaattttattcaccttggagagaccccatgccagaaaagggcaaatgagcaggtgaagcttagcccttctctttgtcccacctgtgcttcagccaaagcagccctgttttcttatgtttttatattccttatacagctttgcttccagaaaggatttaaaacttactcaacaagaaattctataaaggctccttccatctgcacatcgtacagcttgagtagaagacagaaagaagccagttagcacaggtcatggatttctatgttggccaggctagattctagaacagctggaaagcagagaggggcttagagcaatgggggtgggaaatagggagccactgaaggtttgtgagtagaggagtgtcacagcaaaagaatgaattgagcccacaaactactgtactaggaactgatccgaaaatctcaactgctcagaaagttgagtaaaaacaaagggtgatttttcccccttgtcagccttccctcccaggacattgtattgtatgcaaaacgggtaactgtaagacaaacatttttttccactgcccttctcagccccacaggccttcaggaagacccgaacttcaagcaaagcctttttatttttcaacacccacagcttccattcaacaatcagaagttttccactttgatcaaagaggctgaacaagagggccaagggagcagctggttctcagcaactctgggcagaccacagagcccttgctacccactcactgtccgtgcccaccagaggacacagccttctccccaaatcagccaggtacatgccccagaaaacactggcttgcctcgttcccaccttaattaccggaccaaacgaacgtgaacacactgttttcaaaaccaaactcaattgggatcacgggggcctcggtttccttgattgtaaaatgggtatatcgccccccactctatttagcccaagaaaacaatttatctcttgatgtctctttcgtctccaggatctatgcttttacagactcactgggaggaaatatccagaccaaatcctaaagcctgatctaatttgggagatgctcagaagttttggttctatgcaagaacagcagtggtaataatccaagcttggctttagacacaggacgtttccttaggggcatctgggatctctgctggctcaaagtgatgcgctgcagacaaaaagtgagcagaaaggaaaggaggtgctatgcagaatgagcttcttccacggtgataccaaatggagctttcaaaggcccacatctggaggcagcagctatgcagtgattaacattttaaacggtattttgaaatggagatcattagtaaccacagatgtgatctgactctgtcccccaggtaatctgtctattgtatctaaattccagacttagcccagtagacagcttgggatgtttaacaggaattgtccaacaccatccccaaatctatttttattcatggagtactctgacatcatctcgcttggtcttcctgatgactgtaatgcagattgggaacagagaaagccataaagacttgtatgatggcccaaggctaagaagggaaagggctgagaccacacttcaggttttagctttcaggtgcagtgaagattgaatgacttagcacgagctttcagccaggcaggctgcaaagtgcacccaagttctttcagtgatcgacacttgcgacttaggttgagatagttttcatcctccctgagcctcagttttcccatctgtaaaaaataaacattgcctgcctcggagggtggaggtggaagtggaatgaagccacatgtaactcctagcgctgtgcctgagacagtagaggttcaattatagtagtcacatacacacacaacacatacatacacaagacacaacacaccacacacaacacatacatacacaccacacacaacacttacatacgcaccacactcggcatgcattgcagatcacaaatgcacaccacacacacactgcatacatataccatagagaacacacaacacctacacatacccccataccacaaatacacacacactacatagtacaccacgcagaacacacacagcccccatattccacaccacaccatctcactgccaattccttcccctcttcatgagttttacggcaggtccaggttcatctgccagtttaacagatcccaaaacttctgcaggagtgtttgttcaaaagattgatatttccagattcctgctttctgacagtatctttgaaccccaaatttcatactgccatgagccagtccccctttggagaaatatctccatttgtgtgccctttttcccccagggaacctgcagcatgtccctttttcagcagtagcctatcaaaccgaaccctttggagttattacactgcagtccgagggatccggcctccctgagacccagcaaggactcattatctggggaggtcttctgagccacaggcctcgctgaaagaaggtgcagcttcttgaacaggaaggcgttttgtggcagagtctaaacgaaacagaagttgctttgtgtgtgcgcacgcatgcacacacacacacacacacacacacatacacacacacagtcggggaaccgtcattttcctacgcgccctctgacatcagccaccttctctgtagctagtttctctgcacacaacttaatccctggcaatgaaaaatgaacctctcccccacccttgctgccgcctctcgcctcacgcccccagagaagagtttctccaccaggcagcaggtgaaggtttttttccaagtcacatgattcaggattcagggggagaatccttcttggaacagagatgggcccagaactgaatcagatgaagagagataaggtgtgatgtggggaagactatataaagaatggacccagggctgcagcaagcactcaacggaatggcccctcctggagacacagccatgcatgtgccggcgggctccgtggccagccacctggggaccacgagccgcagctatttctatttgaccacagccactctggctctgtgccttgtcttcacggtggccactattatggtgttggtcgttcagaggacggtaagtggactcctcttcctccctttccttttcttgttgttttcccgagagaaagagccctgggaacaaatgatattcgtttgttggttaagagcacaaaataaaattaaataaataaactctctctctctatatatatatatatactatagtatatactgtataacgtaatacacttatgttacataatatatattatattatacagtatatattatatatatatatatatatgagaaagggagaaaagaaagaggaacttaactctctaaaataatttggcttgttgagaaaaatattgttagaccatcatcttaaaactttgcagatctgtctgagcaaaacagtggaggggagctattggccttttaaagttaagatttaaatcttaatgagccagagacccatatcaaggaaggaagcaatagagaaacctgataacacatttgcacaagttgttatcatgtcttcaaggacttcagactggattctgaggttctatatcctaagtctgagtgtcctggaggtttctgaggcctcacccattgccaagagttttgtttttgcttttgttttatacaaggagctaagtttcagaggccaaggtctagaaggaaaggaggcgaaagagaagaccatggcttcttagagctttggacattttggtgttaaagccagcaagacaaatcgaaagcttcctcttaagccacaactttgaagaagttagggcgtcacaaaaaaaaaaaaaaaagaaacagcacatagaagcagaaagttgaaaggtttttagcacctgttctctctgatgttcctcacaatactaagc

SEQ ID NO: 3790 - DNA, 6000 bp, Homo sapiens
aagcaggaggaagttccacagccccacctctcacccaccggccccacctgcctctccaccttggggtctacctgcccttcaccccagccctctcagccctctggcaaaccccacgtctccctccaggtgggttcaaacacccctcactgccggaagctctcctacttccccagagactacatcccaaaaaatgccacctgcaaattgatcaagagcacctaagaaggggttgtgacagcctctgtccccaccaggtggtgagaggccaatgggtggggccattagagggtcttcgtgtgggctcccagcacaatgcctgacccaggacttccatccggacatacgtcatgaaagaatgagataacgtgccacacaccagccagcacaagcatctctggttagcagaagggagtccacttagcccataggacaatggacggtctgtgtttttgcatcaaaacttttcacccgcagtccaggcccaggtgtcacaaccagagccttgacctgaaagctgggacagtgatctgatttaggctacagagcagcaggctgcatgtgggacctgaggctggtcatgatgtctctctgggcctcagtgtcgccatctgtaaaaggagaggtatttttttttttaaagcaagacaaacttgtctttttttttttgagacggagtctcactctattgcccaagctggagtgcagtggcgccatctcggctcactgcaacctccgcctcctgggttcaagtgattctcctgcctcagcctcctgagtagctgggattacaggcacacgccaccacgcccagctaatttttgtatttttagtagagatggggtttcaccatattggtcaggctggtctcaaactcctgagctcgtgatccgcctgcctcggcctcccaaagtgctgggattacaggcgtgagccaccgtgcctggccaaaacttttatgtttaacatttttctcagatatatttaaccactttaaagcaaaccgctggatgggatgtattacaatcacaatgttgtgcaaccaccaccttcatccggttccaaaacgtctgcgtcaccccaataaaaacccatgtcccttaatcagtcgctccccagtctcccctccccaaaggccctggaaaccaccaatctgctttaggtctatgtggatttatctattctggctacttcatgtatcttaaaatgactcctatgcaaaacctccttatgtaaaacaggcaacaggcaggtggctttgcccccttcgcctccccggagctcacgttcctcatccttagtggcctttcagggaaagctctgatgccaggtgccattctttgcagaactctttttttttttttttttttttttttgatacagagtctcgctctgttgcctaggctggagtgcagtggcacaatctcagctcactgcagcctctgtctcccaggttcaagtgattctcacgcctcaggctcctcaggctcccgagtagctgggattaaaggtgtccaccaccacgcccagctaatttttcgtatttttagtagcgatggggttttgccatgttggctgggctggtctcaaactcctgacctcaagtgatctgcccgcctcggcctctcaaagtgctgggattataggcatgagcctgtcctggtctttgtgatttttacactaccttttttgtcacatggtacctcttagcagaattctaatcctaaagttgaatttctaaggcagatcacccccaagggtgcctgaggatcacggggctggtgcctggtgttactggcccgttttccggatgagggagtagaggctgggcccctgtgaagccctccttgcatgaggtgactacagaggagtggacctccagagcctggtgacaccctctcccaccacacagactacagctgggtctagggtgtgacgagctggcagagaagccgccccagagcgatagccacttccggaggacaaggatctctccaccggctcaggaaaacaagccagtttaagggaaacccaaatggctttggggggcgggggcataaaatgtgcaggactccctcaggccttgccatgcagaccttttcaggaggactgccaggggaagacggctgctcacttctgccccacggccaggcctgtgacagccgctcctgtcagcgcagtcctctgcggggccgacgctgtgtaaataattaacaaaacatctgccttgcttcataacacaccgtggctgacacagctctcagggccttcagagaccctccaatgccacgccgaggacttatggcctcgctttgtggggacaggtgggaacgagagcagatactgacaggcaaacattttcctgaggcgccacagggccaccctggtgcttaaatcctgcctctttgcaaactgcgctgtctccttcccttccgttttgggagccatgatcctaggaaggtgctctggtggaatccagaggggtccccggcacctgcttctggccttgtttagggcctcaatgcaggggcactggagacactctgggccacggaccaagggtcccggctgagtgaccctgggtgggtccttggtcattaaagattttccatgtctctcatgtaatcttggggaatgagcatcaagcacttaaaaggcgctgagcatctgaaatgcattatttcacttacttcctcccccgaagcttctgaggtcataatattatccctgttttccagatgatgacgctgaggctcagtgggcgacgtgctcatgagaggcaggtctgggactccagcctcattcactccatcgggtgcccaggctcaggctctcaatgcggctgtgggggagcgccttgctccctctgagcctcaggttctgttccgtgaaacagatgggtggcaagagtccttcagactccaaaagtccacaataaataaacccagtgctcgtctcaaccccagtgggtgtgtgcgaagctctctggattgggagcccagtgaattcctcatcagcagcttgattcattagagctgaaggtcatgtgcatccatccttttgcaggtgtcttcccaacaagcccaagtttcaaagacgttgaggacaaggaacaagagagggcaggcattcgagaaggggcctgtggactaattcccatactgccactcacctgcagtaagaacgcgcctctggaacatggagaagttcttcttaaagggatctctgttcacccaggtcaacatgacccaccccgcaagcctcagcctaattctgaagcatgagggttaaacaattcggggaaaatgcaggcactgcaggctctgaatggcaacttccctcccccttcccctgtccaaattccttcacactctatggaattcctacataaagccccttttttcttagaattctatgaggtcaccaccatgcagatgtctaagagaaagaaagaacggctccgtgcagatccaggccactgcaactgaatgcatttcagatctcggccaccccatctttcaattcccatggcccccccactcgcccagccacagctacagcggtggtggccagtcaggtctggtggggtgctgtgatcctgcccttgctggaggccaagaaggcctggctagaagacctgtgcctttaccaccagatcacccgagaagtcatctgtggaaaaatccagaattggagacaatggcgcagccatgtatgtgggggtctgtttccacacaagcaagtcctgttagagggacacatgtcaaaatgctagctcccactccaagttcaagttcccaaagttaacatcacaggaaattacaccaccaactgatttgccccaatgtcggctcctctgtctggaagtcgagtctgagaaggccattggtttagttcagctttggccaaaggaagggaccagctcagacaggaatgagtgaaagtgctggcctgattttttttctttttaaactaacattttccccaaaagttatcttgccattacccaagagtcataagtgaaaagacagccaaataccaaaaagccactgaggccctcaacagtgcctgctcatttcaaagccatttcacggacagccagggggtgcctgggccaccgcagaccacccctcactccaagagcactcctgctccccagagctccatgttccatgtaaagttccacggcatgtgcacaccacttcctaagaatgatgtcagcaaaaaaaaaaaaagataaaaatgtggaaaaaaggactatttttacctccccaaatcacaggccagacgggagaaaaatccatcaatgccagaaatgtggctgagccttcgcacaagatctattatttcacaccttaaattaacgcatctcaaagcaatttgcaaatgttcgtcaatttgcagaacatacatggaagggagagaaataccttttcctttcaacaccgaaggacactggcaggggggcacaacatggcccaaaccacacaggtcctcacacacaacattcatttcaagcacatgtagtagaagccgtgatcgaaatggaaatgagcagggaaaaaaggcaggcaggggacttaaatgacaagtgacaagaagcctacctacaagcgatctcgctgtcagatatttaggactgtgagtcaggcccgtgaaggtgacatcagggggccagaacaccggactcttcctgcgaacagtgtcccagcctcatctccacacaagcctggcagtgcctgcccgtatttaatcttggatgattcaccaggtccctccactctccaccctccaactcccttgcttggtctagcctgagaagaggaaggaaatattcttctccttttgacaattgttttgacacttcccttatgaaaagtatctggggcacttaaagaaaagaaaaaatgtgaacagcagccctttctctccagtagctctggccctgggcgaggaaggccagcagtgccttctggaagacctctcccaggtctcgggcaacccagccctgcaggaacctagcctgtcttaacctacttggctttgcagcatgcaacaggagcaaagcacgacaaaggcagccagatgtggtttaaggtgaggaactctggaatcagagacatgggttcgaatcccgactctgccatttgtgggtttatgaccctgcccaagttacttaacctccctctctgtaagatcaggaaaacgacactgaacctcagcacaggccaggcatccagcccacagtgcctgctaccttcctagtacagtggggagaccatgggctctgctcagacaagcctgggttcaaatccagctctgctgcgtattagcacatggtctttggcgcattctctcatctctctgtgccccagtttcctcatctgtaaatgggcatcgtgacagcttccatcttagtgttggtgagtggactgggtaaaatacagcaccagacctagcacacagtatatcctcagtaaatggggacatggccgggcatggtggctcatgcctgtaattccagcactttgggaggccaaggcgggcggatcacctgaggtcaggagttcgagaccagcctggctggccaacacagtgaaaccccatctctactaaaaatacaaaaattatctgggcgtggtggcacctgcctataatcccagctactcaggaggaggctgaggcaggaggctcacttgaacccaggaggcagagggtgcagggagctgagattgcgccactgtactccagcctgggcaacagagtgagactctgtctcaaaaataaataaataaataaataaaaataaatggggaccatctatcgtggtgctactttaatgaaattatgcaagtcatgtctctgaacctcagttttatcatttgtgaaatggggataataaaccctatctacgatgagcagaaaatgaacggatgtgtgctaaagtactcagcactaggtctgtgcaccttagccagtcaaataccatatcccaagtgcaat

SEQ ID NO: 3791 - DNA, 6000 bp, Homo sapiens
acaatccatttcctccccattggtttgtgatgtctgcattttcatccacaagagctgggaccaggcccgctcctgtgggccagctgctgcctcgtctgccctcttgttccagaagcccagggctatgctgttcctgaggcagggctgcctagtgattggccacacaggcactggaattagacaatctgccgtgcactttccagctcaaccacttaccatctgggtgactttgaacaaaagaatttgctttttattgttgttgtccaggttggagtgcagtggtgcgatcatagctcactgcagctgctaactcctatgctcaagagaccctcccgcctcagcgtcccgagtagctgggactgcaggcaggcactaccacacccagctaattcttacatttttctgtagacatggggttttgctatattgcccaggctggcctcaaactcccagcctcaaggcatcctcccacctcagcctcccatagtactgggattacaggtgtgagccaccgcacccagcctgaaatttcatttctaagcctcaaagcccatctgtaaaatgggcacaagggtaacgttggcacacgtggtggacgctccgttggtgtcattattacagatcacggccagttgaagcacttccactcatttggcaaacagaagccagacgggcattcaccctgtgcccagtacagtgctgcgcccaagcaggcagtcagtgtccctggctccagccctcctggggtgcagcacagttttgaatgtggaggggaggcagcaggggtggaaacagcccagccaggagcggccgctctcggtgcggggaggaggtgaagtgagaactgagctgcttgggtctcagggaggctctgacttctagagggggcgttcaacattctttagtggggacttttactacttccagaaacctctgcacattggctcttgctggtcccccgggggccacaggaagtgggagctccagatgaagagtcgctggcactttgagggcagggggcagggccttcccctcatcggaatactcttggagcctacttcagtgcctgcattcagctggtgcacaataagtgcttgttactgtgccaatttcagtatgactagggctgtggtaggagcaatgctaggcgatggggaatccgaagacgcacaggagtccaagggttggctgactgcagaccctcatcataagtctagagccggagaagatggggagacgccggcctgcgccctgtgagtctgggcctcagtcttcccatctctgaaatggggaaggggttcctcggccgagcggatcggccgcagaactcggcggagtcgaggggtccaggcccaggaaggacgccgccggggcgccccccgcccctcaagcttgcgtggcggcagcgcgcacgagcgctgggggcggcgcggccccgcggcggggaggggcgggcgcgcgggcgcgcgggcccgcgcaggcggtggcggcggcggcggaaccgagctgacgggcgtgcggccgctgcgccgcaaactcgtgtgggacgcaccgctccagccgcccgcgggccagcgcaccggtcccccagcggcagccgagcccgcccgcgcgccggtgagtcgcctggggctggggccgggccggtggggccccgcggcccggagaagggcgggggccgggcggcggggccgtcacccccagccgggccgagggcgggcgcgcgcccacggctccgcgggggagagcgggaggcgggcgcgagtgtggccgcgcggggctgagcgtgtcggcggccgggcgggcgggggcggcgtgtccgcgtgtcccggggtgtgcgcgtccccggcgggtgtgcgtgtgcaccccggagcgtctggtggcgttgttggggtgagtgcgtgcggggacgcgggcatggctccccgctacccacttcccgagtggggacgacgggcggaggagtgtgccgggcgccgcagggagtacgtgcgggtctcagggagtgtgtgtgtgcacgtgtgtgcattccaaagtgatttgtgtgcaagcacatgcgtgagcctagaagggcgaaagtatgcctgtgtgggtgtgagtataacgagtgtgcagggccgtgcgagcgtgtttattactgaggttgaggggccggccccctttgcgcccaccaggcctttgcacagtgatggcccccgagccagggagcccgtggagagagaagcggcctggcatgggctgggggtcggggctgggcctgatccggtgaaccaggggccaggagggcagactcagagcctggctgggcctgacagaggcaaaggtcttagagccaggctgcggcagggccactggcaggaccctctctgcatacacaggctgggcgagcggaggctgtggtgggcccctcggccgggcacccgaggacgtgtgttttcctaaatatcctccaggctctcctgtctttgttcttgtctctctccagccaggcctggggggctgaccctagacttgcctgtgtatgtgggggcctctctgcctgccctgctaagtagacggatcttttgatttatttatacctctcctaggctccaagtgtgaatcccaggacagtaacaaattgatcacagcgggcttgggacaccagcttccgaggtctgtccttgcagttttgactgacaggcttttgtgtgtgtgcgtgctctctaactgttgaaaatctttgcagctgaaagtcttaattgctttaaggcaaactttagaaattccagagctccctagttggtctgacttttccaaattcagcttgccttttttgggggaaaatgtcgccttagtttggtgtacagtacgtgcaggcaggtcttggaggcacgtttaaaaaccctgtcgttaatggaagaagaatttcattgaaagggacgcagagccgtctggaagcgcctgccccggactcagcgagtttggactcagcgagtttgagcttaccgaatgaactttggacgtcttcttttagcaaacaaaacctggaaggaagcaaaaaagacccacattctttttcttttttctcctgaaaatgaaaaaaagaaaacaccttctgggtttgctggaaatgccccctctccttcccccatcaaggccaagccctcgctgcgtcccccacccccaaataaaatatgcctgtggggagccgtggaatgagtcactccctggcagagagcctgacgggcaaacatttgggaaggttcttgcctaacttcccagaagaaaaggcccaggatttaaaatggtccctgtggtttgtcagcctctgctgtcccgtctgcttcggaaatgactaaaaagtagtttgtatctccacaaaataaagtctcagactgaaggccttagacccaggttggtctggatttagagctgtttgggtttccagaaatggagcgcctggctttaactggtggcatttctggtgggtttgaacaagggcagaggagggaaatggggaggaagttcccttttgcggagcagaaggggctgtgtgctgggagccgttctagggggtgtgaatctcccgttggtcttctgtgacagaaaatgcttttggttttgtgcacaaggaaactgaggcacacgggggtcaagcctgtgtcctggggcagctgagaggaggtgggggcagaatccgaagtcacctgcccagcctcacagcctttcctctttccattgcacttgggatatggtatttgactggctaaggtgcacagacctagtgctgagtactttagcacacatccgttcattttctgctcatcgtagatagggtttattatccccatttcacaaatgataaaactgaggttcagagacatgacttgcataatttcattaaagtagcaccacgatagatggtccccatttatttttatttatttatttatttatttttgagacagagtctcactctgttgcccaggctggagtacagtggcgcaatctcagctccctgcaccctctgcctcctgggttcaagtgagcctcctgcctcagcctcctcctgagtagctgggattataggcaggtgccaccacgcccagataatttttgtatttttagtagagatggggtttcactgtgttggccagccaggctggtctcgaactcctgacctcaggtgatccgcccgccttggcctcccaaagtgctggaattacaggcatgagccaccatgcccggccatgtccccatttactgaggatatactgtgtgctaggtctggtgctgtattttacccagtccactcaccaacactaagatggaagctgtcacgatgcccatttacagatgaggaaactggggcacagagagatgagagaatgcgccaaagaccatgtgctaatacgcagcagagctggatttgaacccaggcttgtctgagcagagcccatggtctccccactgtactaggaaggtagcaggcactgtgggctggatgcctggcctgtgctgaggttcagtgtcgttttcctgatcttacagagagggaggttaagtaacttgggcagggtcataaacccacaaatggcagagtcgggattcgaacccatgtctctgattccagagttcctcaccttaaaccacatctggctgcctttgtcgtgctttgctcctgttgcatgctgcaaagccaagtaggttaagacaggctaggttcctgcagggctgggttgcccgagacctgggagaggtcttccagaaggcactgctggccttcctcgcccagggccagagctactggagagaaagggctgctgttcacattttttcttttctttaagtgccccagatacttttcataagggaagtgtcaaaacaattgtcaaaaggagaagaatatttccttcctcttctcaggctagaccaagcaagggagttggagggtggagagtggagggacctggtgaatcatccaagattaaatacgggcaggcactgccaggcttgtgtggagatgaggctgggacactgttcgcaggaagagtccggtgttctggccccctgatgtcaccttcacgggcctgactcacagtcctaaatatctgacagcgagatcgcttgtaggtaggcttcttgtcacttgtcatttaagtcccctgcctgccttttttccctgctcatttccatttcgatcacggcttctactacatgtgcttgaaatgaatgttgtgtgtgaggacctgtgtggtttgggccatgttgtgcccccctgccagtgtccttcggtgttgaaaggaaaaggtatttctctcccttccatgtatgttctgcaaattgacgaacatttgcaaattgctttgagatgcgttaatttaaggtgtgaaataatagatcttgtgcgaaggctcagccacatttctggcattgatggatttttctcccgtctggcctgtgatttggggaggtaaaaatagtccttttttccacatttttatctttttttttttttgctgacatcattcttaggaagtggtgtgcacatgccgtggaactttacatggaacatggagctctggggagcaggagtgctcttggagtgaggggtggtctgcggtggcccaggcaccccctggctgtccgtgaaatggctttgaaatgagcaggcactgttgagggcctcagtggctttttggtatttggctgtcttttcacttatgactcttgggtaatggcaagataacttttggggaaaatgttagtttaaaaagaaaaaaaatcaggccagcactttcactcattcctgtctgagctggtcccttcctttggccaaagctgaactaaaccaatggccttctcagactcgacttccagacagaggagccgacattggggcaaatcagttggtggtgtaatttcctgtgatgttaactttgggaacttgaacttggagtgggagctagcattttgacatgtgtccctctaacaggacttgcttgtgtggaaacagac

SEQ ID NO: 3792 - DNA, 6000 bp, Homo sapiens
accgtgcctggccggctattttttttttttttttttttttttggtagtggatataaagtgctgttttattgtggttttcattttcattccctttgttgctgataacaccgaccatcttttcatgtgtttatgggccatttgtaagtcttagagtgatatctattcaaattctctactcatttttaaattatctatctttttttgagttgcaagagttttctatatatttagatacaagtctcttatcagatatgtgatatgaaaatttttgtgtcctattatgtggattgtcttttcactttcttgatggtgtcctttgaagcacaaacatttttaatttttaaattttgttgacatgtcattgttctgtttttctctcttgttgcttgtgcttttgttgttatatctaagcaactacttcctaatccagtgtcacaaaaatttacacctatattttcttataagaaaaacattaattacagaattattatgttttcttgtaagaaaacttttataagagttttatagttttaactcttacatttggggatttagtctattgtgagttaattttgtatatgatatgaggtaggggtccgatttgattcttttgcatgtggatatccagtttccccaacacccttctttgaaaagattttttttctcattgaattttcttggcattctttaaaaaatccattgaccatagtatagcaactcaatttataatggcctcaaattaaaagcagtccaatgtttgccaagaaaaatatataaattgtggtatatccatacaataggatactacacaacaatagtaattaacaaatgttgctacacaaaacataatggataactatcacagacattatagttatcaagagaaaccagaaacagaagagcgcatcttgtatgattcaaatttatgtgaatttcaaggacaggtataactaattgtagtgatagaagccagtgctgtaattatctggggaggagtcgatattgactgggaaggggcgtgagggagcctgctggggtaatagaaaagttctgtgtatttatttgggtggtgtttacatgggcatgtacacagtaaaaatttattaatttatttaatctttatgctccttactatgtatatgttgtactgcaatcagaaacagacaaaaaatcccagcatgttacccacatgaatttttagagcacttccacattacctcatctgtgtaacttctgagttacacagatcagatattctctgggcaagttgggaagttggaggaagtatttcagggtgtagctgacaaacagtacaactgagtgggtgatgcgctttagcagaatcagaacctcatcatgtgttatactccatgggattgagacaagaggcatctgccacttcccttcctctccccaaccctcagtaatgtaaagagaacacaaccccatgtcagagttggggtgaaaaaaatgttcttgagcagccataaccttaggttgtggaggtgagagggactgttctgtggaaaatcatgtgctatttcataaagtccataataacatcctcacttatttgcaaatctgattttatttctttttcacttccatttcaaaggcaattgtctcggaaaagtttccaaacgtttgttgaccaagttaatcctatacagaaatgccttgatgaaaaaaatccagcaaacacttagaacaatgtttcttttagccaaggtggcttaggcactgagggtatcttggagaatcttttccttaagcatcaggtcactggtggttgcgattaatgaggaggaaactgctatagtggcatccatcttaaacatggccttcatgctccagctgaaatggtcaatgaagaagcttgggtgcctttcctttttcttccccacacatcccaaaaatgacaaatgtgcactccttttactataaacctcactcttctgaagaggaaagaagaaagggaacctgctaattaccaaacgtctcatatgtatcaagccctatacttggtcccttaatatgtattattgcatttaattttctaaattactgtgcagtatattatttaaacatccattttgcagatgaaaaaactgatgctgacaaaggtaaaactatttgtttgaggatgcagaattaaaattaaaactcaagtctacatgtccctaactaagagctttgctctttttttgatggatgtgaggttactactattgtttggaaagtcattatcttaaagagaaatgatctatgttgctagattcatatgcatagttaaccatagtccagggaatgtagcatgttgataagctaacaaatagtaagcactgttgaggtacacactctgtgccaggtgcagggctaggcactgggcatgcagtggtctctactcttgggaactttataggtctgtatatattgccaacttagccagaagtttagaggattcagccacatcctttgtgatactttggaagagtgtctagctgcagtatggaatacctcagagtaactataattttctgaaaacataattattctttcttattttttcttttaaaaggcggttacatatgctacaggaaactgttgattacagggaaaaattcatataaggtctgactttctccctaggtaatgacatttaacccttattaggtagttttacacatacgccctgacctcttcaaaagagtccagaatctataattttgttctctttaataaagtcaatttgttaagcgtcgaatgaaagataatttaatttgtatgctttgaataaatagtatgagaaaaaaagagggaaggctgggcaaggtgcctcacgcctttaatcccagcactttgggaggccgaggcgggtggatcacctgaggtcaggagttcgagaccagcctgaccaatatgatgaaaccctgtctatactaaaaatacaaaaatttgctgggcatggtggcatgctcctgtaatcccagctactcgggaggctgaggcaggaaaatcacttgaacccaggaggcagaggttgcagtgagccaagactgtaccattgcactgcaacaagagcaaaactccatcaaggaaggaaggaaggagagagagagagaaagaaaggaggaaaggaaggaaggaaagaaggaaggaaggaagggagggagggagggaaaaaagaggggagagaaagtccctctgctcaatttggcaccaagcctgccttgcctagacagaggtttcaaagccatggttagagagacatgttggggtttaggacacatgatgtttattaggggggtggagctctagaaaccaaatgaaataggatgtctcagaccctcaaatgccagcagcagttgtcatggagattttaaacgcctatgttgggaacttagctcaaaaagagggctacttcttggttcctgccaatgtttttctgttttgtgggcaaaaagggatatgagaaagttgtccagagcagtttcctggccctgttactgtggtgcttaacttcctggtcatgaaggctatgagaatactgaagttttctgttctcaaggagaagagtgcatggcaaggggagggaagcatgcctactgaggccaacaccatgggccagcaatcaaatcagcacagaagacagtatgtttatcttatgcaagcatggatcttgtagcccactttcctttgaatgaaggaatgggaaagaatggcccagttgatgatgaaaaaaaggtgcacttatggaatgccatttagaatgacttaacctgtcgcttttggggaactttgagtggaggagtggtggcctctcaaggtacacatgtacactctcgtctcttctgactaagagtacacatttaggactttggcacttttagaaaccacttgaaattcaccctagtatgaagtcatgagtaagtaaagaacctcatgctacctttctctttgagtaggataagccccatttatgaattactttagccccttcattaaaattcctctttgtagaagacaacctttctgcatacttaactctgtcttattttgtatagctctttagaatggtttgatggaccttagctcctttaaccctcccaagagctatatacaataggtgaagaacattctatccctttttcttagattaagtaaccgaggccagaaaagataaagtgatccatcccagattgtagattgaaagggtaagagccaggcttggtgaacagccatcccacttcaatgctagctctactgctatatgcatctgtattccaagaactattatctgagtaatgtttccctatctgtgcacctttgtgcaccaaaatatgtctacattctgggttattctcccctcccattctgcctaagacagaagctatggcaggtattggtcctcagaggtactgaggccactgttggcaaagagaaacaatgtttcagctttttcagttataaaataaagatgacaatctctataatgcttacctcacatggatgttgtgtagatcaaataataatagatgtgaaagtactttctaaattgttatgatctgttcacacatgagggattgtgattattctttaccccctgggcagaagccaactccttgtcttattactctctttacaaattcagctcctggtatagccactgactgtgaatttgagcaaattgcttggtctctttgcctcagtttcttcatctgtaaaatgttgctaacaataattcttaatatgattgtcttgagaatggaatgagttactacatgcaaagcatttacaagaactcatggcacatggtcagagctacataagcattaactcttttgtgttggcttcctcgtccctactatctcagatctagagaatagattaaggggacccagaagccaagtggcatggaagccactacttatagtcccttcccactagcttgctagttcttgtgttctctacccacagccttcccaccatggattgccaagaaaatgagtactgggaccaatggggacggtgtgtcacctgccaacggtgtggtcctggacaggagctatccaaggtaagttatcctattcagtacacttatttctgttgcatcttaggaaccagcccggcaactgaaagaggccaagattaggggagtcagccctacttatgactgatccagttcagcgggtaaaacctgggatccacagagtatgcaatagcagtcatgattccagcatgaagtcagcctagcaggatcaaggtcaagggaagtttccatgagataacagagtatttcaagaatagatgtgtaatgcagagacccatgaggactgttcagcattagggtaatctgtcatctaaagcaaggcccaaccacatggtgttcaagagccagatatcaggtcttaggaatgagaaagagagaagagccaagaagacctctgttctagagggtctgcgctactgaggaagctgtgcaatggagaatatagggatagggaaccacggagggtctaaaatcccaattaaagataaggatcagaataaaatgaccagcaaggcagagactttatgtaacttacttgtttcaagcctggatctgcttaattgttctttcctcaggtcccttgtaggtccctgaacttgggggtggtattaaattttggctgcagctggggctacagaggccagaagcaagcagctagcagatggtttctgcatattcacactctattttatgcaatttttgtttattcagcagttgcttattgaacacttgcagagtggcaggcatggttgtagacaccatggatatggcagaacaaacaaaaatatttgccttcatggaccttaccttctattattagtgaaaaaataataattgagacacatacagagataaatgaagaatctggatatgaagatatgagaagaatcaaattagggtgactgggtggctacttcagattatgaaacaaggaaaggtctccctaagga

SEQ ID NO: 3793 - DNA, 6000 bp, Homo sapiens
taggattattgtgatgattaaatgagctattgcatacagaacatttggcatagggcctgacatatagagttcatcaagcattgatcaagtgttggctattattattattttgggtgtgggtttcaattcctttttagccatcttatttttattgtggcacacctgaggcctgggagctcattatagaaggatacattcaaatgtgaacatttttctccttgggcttattcaacagatatattgatatatataatatgtaaaaatgtattgagcgcttaaaatactctaggtacagttttgcatgtggaaatttgtgaaatggtatataaggtccctgccacataggttcacactccagtgagagaagttagaatcaggccagagggacaatggagggtgggaggaactctgtaaaatccctgcacttgaggggcaagtggagaatgagaatccataaaatgctgtagagaaataagtgaaactagaagacattagttccatgaaagtcaagggaagagagtcagaaagaaaagaatccagacaatgttggatgttttagataattcaaataagaaaacagaagaatccatgggtttgatagtatgaaaatcatgggtgaccttgagaagagcaaaatgtagtgagtttggaaatgaagaggtggaggtgaggatatgaaaagaattaatcttagttcagaatggaaagacaatttaggagaaagagccagaggaagaaagaccatgaagatacaaataaagcaaaatggaatagacaggagtaaacacagatggagacaggagggacaggaggaaactctgaggtaagaaacaggatgaacttgaatgtggagatgtcagaagttgtttagacttcaagtttcgtgcccttttacattctcggtgaaactggaggtgaagtcatctgctaggggtttgggagctgtgttgagcacttgacttaagaagagtgagttttaaaagccatcttgggcaagtggaatagaagattatttaaaatgagagataacactattggactgtgctagaatctagctgaagtttgaaaattcccatggctagaagtaactcttataccccagctttctaattcagaagacctaagcctgtatacaccactgcagcaaacatttatggccaagtttatctacacacatctcacaggctaaagagaacaagaagctgatattgtgttcagggacatccttagcaatgtttgagtttacaggggttgccccacaggcctcagcatccccttagtctttcagcttcttttcctgccccctggtcccagtcttgagaggagctataagggccccattctgcctggataaccatgaagctccttcatgaaaggtggtcctgccattgttggacactagaattagaggctacccaggattctctgagacacagccaaggccagtattcccctgagtgaccctaagtaacctctgagagagagctgaggggtggcatcagagagccctgaatctcactgagccccagaatctgtctggtcccagagataagcagagtggaggctggtcctgcctatcctgctgtcaggttaggctggttccagcagtagaatgtaggtagagaaactctgtactgatagttctcagtttgggttcacaaagtgactcctgtttatcataaaaggaggggctgtggaaagcccccaagaaattagctgatccaaacttagttctgctgcacaagcacatggagctagagtggctcccccacagagagcagagttgagagccttaaccctactcaccaccacactgcaccgggggtcctggggctatgttgagaaaaagctcacctacccagtggatttcaaaaggcctaggcaatcccattagcttgtactagctagggtattcaagaaagtccactttgataaagtgacatttaagcagggatatggaggaagtgagaaaaggagccatgctgatatctgggggaagaattggctaggctgaaggagcagcaagtgcaaagaccagagtcttgagcatgctttgagtgttggaaaaaatatcaaggccgccagttggggttgggtatggtggtcaaggcgagtggtaagaggtgagatcagagatagaggggcaggttagtgaggatgggatggcgtgggatagattgtagactattatagaccatagttaaggattttgggttttctgctgaataagaagccaaccagtagaattgcttggacagacttagactgatgtacttttaaaaggatcattctggttgctctgctgagaattgactggagtggggtaagcatgagagcaaggagagctattggaggatatggcaataattcaggtgaaaagtaatcgtggcttgcaccagagtggttgcagtgaaggtgctaagaagttggtgaaattcagagtttatctctgaggcaggaggcagagctgataggatgtgctgatgggttgaatgtgaggtgtgagcaaaaggagaggggaggataattctaatgattgtggcttcatagattatgaagataaaatgaattaattcatgaaaaaaatttgagcagtgcctggcaagtgcttagtgagggccagctaactgttatagtattattggacaagttatggtggaggacagtggtttcatatttgctgcttataatcactttccacaatagcttgtggactctgacatatccctggtacctctatctcaagtttcctcctgtacttccaggcagaatcacagagtacaaggagcctcttcatctacaaaatgaggatggtaacctcaacctcatagaatggttgtaaggtataaagggacacatatgcatgatttataggtgctcagtaaatgttattcttgtccaccttctaaacctttgctactaaaactatggtctgtggcccagcaccatcaatatcacctggaagcagttagaaaatcagagtcttagtcccacaccacagctgctaactcagaatctgtgttttaacaagatccttaggtgatttgtgtgcacattaatatgagagaagcacggctctagcgtttcaaggtcatccagtccaacagtctcttcaggatacagatgcagaaaggaaaactaagagagaggaagagatttacatgatgttacacttagttttgtcaagacatctaaattccaagctagggttctttacactaaagtttcaaaactgtctgtaattcagcttctctgggtaggaaaggatggagaaaaagaagaggtcctgttttctaggaaaggacagaacagaattaggaggtacccagggtagctattttcatttgaatctcacagatgatttcagaggtccctaaattgcattcatgtatttatttatatttaataaacacttctataccactacgtcccagaaatcattctaagctccttacgcatatgaacactattttgtatattaactcatataatacctaaaacaatcctatgagtaagggattgttattttccccactttacagaagagaatcctgagccacagagtggttaagtaacttgccttaggtcacaaagctagtaaggggcagacctaggattccaattctggcagttttcccttctactaggcctgagcccacagtagcctattctggtcttaactctagctaggggacagatatgaagttcatttaggactttttctacttcagcttagggcctattcagccctttcccaccaaaggcttttcagctgctttactgagactccaccctgagctggcatatagcctctgcccagtacaggaggggtccctcagagactgataatggctcatttcttggtcctctcccccataccttggctcaagcttttcttttcctctacccattaggctatttcctctttgacctcttttaaaagctcctaatctattgaaaagcatttgctttccttgtcagactcttttttactccttcttcctactggcccccaaacccttccagtctgcacctcatagtttggcccttaattctctgtctctgtccggtctactttatcttcccagctctgcaaactcttcaaggtcagggactagtaacgtttcgggatttatccaccgctgcctctgagatcatggattaataaactcccaaagtgtcattgtttgaagtgcccttagagactacgtagctcaaccccctccttgtacagacactcaggggcccagagaagatggatgatcaaagctgagtgccgaatccaattttcctttatttttagtggtcttttccctgcttcatgtctgctctcttcctcctgtcacaatcctatctacccttctgaatggaggagtatttttttgaggcagatgcagagctggaaagcggcttctccatgtgtctgaaaattttggcttttccaacaataattttccctgtcaaactccaagcctgctaagtcatgaataaactttgatgagctgagctgcattcagctgtgaaagagacaacttgatgctttctctggaccccactccctggccctctactctctggcccccgcttcagtcccaggagatttgcagctcctgccataccagtggctgggtcactgttcttcagcctcacattgttcctctcaaaggcagtttcttttcgtagccacgcctaggcactcaaacagtccaatagctgctctaggaacttcacgggggcggaagaggtaagcttaccgtgaaaggagggtttgggctgttgttgctacacgtggatgtgaaatgagtcaagcggaactttgattacaaggaatttcatatactgtgagtgtgtatgcaggctgggggctgaggggcgggggctgaggggcggggctgatgggcgggtctgaggggcgggggctgaggggcgcggggtgaagggcggggggtgacgggagggggctgggtgagatgtgtgctctgcgctgaggtggatttgtaccggagtcccatttgggagcaagagccatctactcgtccgttaccgggtgagtgtgggaacaccccctggtgtggcaaggcggctgggacctgcggcatctaggtgcagaagtacagaatcaggtcaggatgatcctgctagggtaccgcaaaatcagaacaattgggaaggcgccctgtggctggctgtcagtccatccatttgtgtccggagagcgctttctgaggtatcagggatctgggctgacatctctaggatcttggcgagccatttcctgtaggctcttactggacctgcattgcctctgagaacatgcctggacgtgtccaacaaccttgagcatctagggttgggagataaagaagagaaggaggctgggtgttagtgaaggcggggacagtggatcagacttgtggagcatcctgaggaaagcagaactgctaacccgcgtggcttgagggcaagtcagggcttgtgtaaagagcatgctggctctgtttgggggctttcaatccaccccctcacccgccgagcttggtttcacttgatctctcattcctggaagctgagccccgggcagtgttattttgatcctgcctcactccaaacactggccaagacccagcaagctgcaagaactgggggacaagaagggacccgccagag[333 bp omitted]

SEQ ID NO: 3794 - DNA, 6000 bp, Homo sapiens
cctggaaatctcatcaaccagggaagattaaacccgtattacaagagaggagactggaggttgacatcatgcccagataagctttatcacagggtgtcacctattcttctgaggtcccatttatctttccccaaaatcatttattcctcctagaggcctacttcccccctcccctcttccctatgaaaagggtctataagcttctagatctcactgggttgggcattcacttttttttcatgtgatgtccccatgcatgtaaaaaaaatgtgtatgcctgctatagtttggatgtggtttgttgtccctaccaaatctcatgttgaaatttgatccccaacattggaggtggtgcctaatgggaagtgtgttagttatgagagcagattccttgcgaatagattaatgccctccctggggatgaatgcatttttgctctgttagttccccccagaactggtttttaaaaagagcctgcccccaccccatctctcttgcttcctctctccccatgtgatctctgcacatgctagctctccttcaccttctgccatgagcgaaagcagcctgaggtcctcatcaaatgttcagtcctaaacttttcccagacatcagaatcatgagccaaataacgtttttttctttataaattacccagcctcaggtattcctttatagcaacacaaaatagactaagataatatattttctcctattaatctgtctgctgtcaatttatttcacagactcagttaccaaaccatctgaggatagaggaaagccttccctctcctacacatcctgtttaagtacagctgtcttgcaaaatatatactgtcatctccgttttgcagataagaaaactgaggctctgtaagagaagcaaaaatcacttgtcctaagtcacatagcttataagtgaataaggtgggattcaaaccaggatctaagtccaaagttcgtgttccttccaactatctgattatcgctaagtaggccagagagtcacctgatctctatgtcaattatttattctgtggattaaccagagctaagaggtatttaaaaccagtccctgcctaactccttagcatattccactcaattggtgggtattcaggggttgacaacatattttggatctttattatttgggggttgtcaactaatattgttttattttattttattttattttattttattttattttattttattttattttattttattttattttattttattttattttttgagatagagtttcgcttttgtcacccatgctggagtgcaatggcacaatctcagctcactgcaacctccgcctctctggttcaagcgattttcctgcctcagcctcctgagtagttgggattacaggtgcccgccaccatatccaactaatttttgtatttttagtagagatgggttttcaccatgttggccaggctgatctggaactcctgacctcaggtgatctgcccatctcagcctcccaaagtgttgagattacaggcatgagccaccacgcccagctatattattttttagggccagacaaacaaaagtaggaagggaaacttgatgagacagacaggtcagtgaaatattacaaaccaactatattttaatttctggattatttatttttctggattactcacaacttccatagcagcacaagtaagaggataatttcacaattttcatttggttctatttcctttgtaactttccataatgtatcatgtagctcttcacccaggaaatgtttcataagtggtacggacaggcatcccttggacaagttccctttttggaattctaggtagtctaagttaccgtgagtgacttcatgtcttattcatttgacaaacaatattggtgcctactatgtggtaggtgccatgctaggtattagaaatatcaaaataaaacaatattggtgcctactatgtggtaggtgctatgctagagattagaaatagcaaaatagaaaggacacaattcttaccatcaaggagctcatagtttagtggtaagaaatccatgtgaaacattcaaaatgcagtgtggtaagtgatatcatcaaagtatgctcagggtgcaatgaaagcacaaaggaagtctggttggagtgagttgtggggccataccagacagaacatgtgaattgattcttgaagaatttatcaggtttctaaggtaggggcaatcttgacaaagaaactagtttgttcaaaggcacggtggtgtgagaagtgtcagcaaatttagtagtgtgcaagcatgacttccttgtaaaatggtggaagataatgttggagagacagactagagggcatgttaaggagcttatatcttgtctcccgtagtacctgggatcaaagaggtaaggtgaatgagtgacaaggacagtaatgaaggatagaagaaagaggtggtgatggctgtggaacttgattgttcatgcttatttcaaggagacagttctagctgagtgtagccacatgggaatgtgaatccagagttatagggtcttctggttttttaacagaaaagcaggaaatctggattttttaaaaatgtgaaatctccagagttccaatagctgacaattgcttttttttttttttaattcaaaggtttagttgatactgcaccgaacacaacacatctgtttgctggatgtggcctgcaggctgtcattgagacctgtgctttaggggacaggatacgtatggaagcatagaagctaactgaaacaaaactttaaaacacttaaaaaataaccacatacattcctctctggattgccccattccaacatttctactgcatatgatgacacatgttctttctctggggaagcaaagagaggtcccaggtcaaatgcaaccctcagggcttctgagggcaatggtgtaatccagagtctcagtcaagcctggtagaacatggtaaggtgagaccagtgtggcccctgagcatcaccatcaccaccaggagatggctgtcatttgtttccttttcattttagaggaagaaagggcagcctgtttaaactgtgtatgcaagaaagtcaacatggccagtgacaacacagacaaaacacagtgtaaaggctgttaaagttcaaactcctcattttactgccggagaaactaaggccctgaaaaagcacagtgacttgctcagagggacccagcaacctagtggcaggatgaagtctcctgactcctggtctagcattctttccaataatcccgggctgtgataattaaagtaaatcagcctggcagttttcctagcatctagaattcctggactggacaagcaggacttgagagcagctgttaaacaccttttttccccttagctctaggatgatgatattctttgtgaactttatatttcatgggtaggggttaaagagacgacacaaagatgtttttgaagcactgagaccattcacaaagtgtacagagaaaagttgtctgtggctaatatatttaaggcttatgacctctgtgctctctggactgacctgccagcagatgcttttggttttgtgttttatttctcttattttgtcttcttttctatttctatctatgtttttcttctcttccaccagcctaggtcttaggcctacacataagtgcccccggcattgctgagcctccatgatgacactcaagatgcctgctgcaagtcaataaaattgttaattattcattactcaataacacggaatgagagtgcgtagtgactatgaagcatacatggttcccctgctatggtcatttcgctttctataatctcagactagtaactcttgtcaattgtgactcttgatttaatcctttccatccttcatttcagggtctattgttctgccttttgccacttttttttttttatctgaacccgtttctgattggtgcagctgttgaagatgctgcagttgcagcagtgtacatctggaacatttggctgacttgttgaacttcccccagggagtactccaggagaaggatgggaggggtggagaggccagaacagttgcctgtaaataaagatgccagtagtgtctggccattctgtggaccacacttgtacaaatccacttcattctggccctcggtttccctgtctactcactgaagacatacgttctccaatcaaaactgctgcagtggaagaaatctattctggctgtggatgctctcatacagcattttttgcattgtacagggatcgatagatatttgttgaattaattaatatatcaagaaatcctaggagactgttttacccttcaagggacaacatcatttcagttccgcttggcatggggcggcttctctgttacttagattgagccttcagagtcactccaggagtgaggctgcttgagtcccacccattcccatagttcccaggctcctgggtctccttttcttcgggcgagccattgaattgcaaacacagcaggcatggtttcattccaaacccagagctgttttaattagtttaacgtctgttaaacgctttgaagattggaagcaacagataagtactggatgatgttattaacaactgcagttaattgcaaacatttctattaatgctagtttctgcctccttttctttgctctactttctttccaaggttcccaaattcttagcctccccctcctttcctccccgtactggcgctatagggttaaactggggcggagcccagggatgaacgacagcgccagtcaccaactggtacggggcaagcgggaagagctgggtggggcggccaggcagaggcgaaccctcacgcccccaggccccgccccgcggctggaggcccggctggaacggcacggggcggggcgccaaggcttggcggccccgtggttgggcgtcccggcagccgcttgagggatggggcggggtcggccgggacctcctccttcattccctcggcgggccgagcctcccctctctcccgcccctcctcctccctttcccacccctcggagtagagctgcacatgcggctgctccctgctccgtcccgcccagccactgtcgcgcaggaacgggtccctgcagcccccagccgatggcaggacagtagccgcctgtcagaggtcgtgaacggctgaggcagacgcagcggctcccgggcctcaagagagtgggtgtctccggaggccatgggctacccggaggtggagcgcagggaactcctgcctgcagcagcgccgcgggagcgagggagccagggctgcgggtgtggcggggcccctgcccgggcgggcgaagggaacagctgcctgctcttcctgggtttctttggcctctcgctggccctccacctgctgacgttgtgctgctacctagagttgcgctcggagttgcggcgggaacgtggagccgagtcccgccttggcggctcgggcacccctggcacctctggcaccctaagcagcctcggtggcctcgaccctgacagccccatcaccagtcaccttgggcagccgtcacctaagcagcagccattggaaccgggagaagccgcactccactctgactcccaggacgggcaccaggtgagtcacctagtaggggcggcggcggccccctcccctcgcgggtagggcgagggccctccgccacaggggcctgggagcactcagcaacctcgagccaatttagagggcaggaccagggagggaccaggcgagcaagggagaagttgcccagggcaggttgtcttcggtccctggcccagctaatccagactccctggggaccccttgacttggaaagtctcgcgcgcgcccgcggcccctggctgcgggctgcctcgagaaaagttggcgacgctcccgtcgaggaggtgcctgcgctgccccccggccgactaacggcttggcccttctgctcgtgatgaggttctctgcccgcggtgcttgttttttcgtgtctagag

SEQ ID NO: 3795 - DNA, 6000 bp, Homo sapiens
ggccctctccctctctctcctttcccccagtggaccatttgttagcagcagcatttggccttggccctcagtctaaagttacctagagagggctctaggaagggtgctgagacctccacaacagataggaggacaaaaccaaaaggaaaaccaatattagtcaagagtgaaaccttctacaaggctccacccccagagaaaagccctccttacttcatcagttgtgggggtccctggtcttcctgcctctccacccacataacctaaagggaagcctgactgttgacatttcctacccacttaaacagaacccacagtcagccctcccattccggagagaggtttgtggggaaaacagatagatcaacacaattgcagaggaaactcatgccatctacccataataaccaacacgggttttcattcataaataaataaatggccaagcatttgagaaaaactagcaacataatgaaaaggaccaaaataaacaaatggaactgacccagaggaaagagggagaattaagggaattgaagaaaatgtaaatatattctgacatgtattgctagaaaagctagccaagcgctattctcccaggttagaatattttacaacttccccttctatctctttaaaataatatttagtaatttggcaaacatttactaactccttacaatgtgtcaggaaccaaaatttctgggtttttttgtttgtttgtttgttttaattatctttttcctctaatagctaatggtagaaaaatcagacaagtccattatgatatgatgtggcaaatgctatgatagattaagcacagaagaggtagggcacagtggctcacgcctgtgtaatcccagcactttgggaggccaaggcatgtggatcacctgaggtcaggagttcaagaccagcctggccaacttggtgaaaccccgtctctactaaatttacaaatattagccaggcagagtggtgcacgcctgtaatcccagctactcaagaggctgaggctggagaatcacttgaacccgggaggtggaggttgtagtgagccaagattatgacactgcactccagcctgggtgacaaagccagactccttctcaacaacaacaacaacaaaaagattaagtacagaagagagcaccttgtcagctggaacagaatatttcacttaaacattaatagatagccgggcgctgtggttcacatctgtaatcccagcactttgggacaccgaggctggcagatcatgaggtcaggagtttgagaccagcctagccaatatggtgaaaccccgtctctactaaaaaaattttgtaaaaattatccaggcgcggttgcgcaagcctgtagtcccagctacttgggaggctgaggcaggagaatcgtttgaacctgggagatggaggtttcagtgagctgagatcgtgccattgcactccagtctgggcgacagagtgagactttgtctcaaacaaacaaacaaacaaacaaaaaacattaatagataagacaggagagaattagccttggcacacaaataacatgaataagcacagcacatttcaggaaataaaactagcttaaaatgtttgagacctaatgagtcgtagacgatgaggagagaaatgtgggcaggggtcaactcatctgccatgttaagaatcgagaccctttcctctagtctagagcttttcaggtatattcagggaaaagaacccttaggaggcccttcatacaacaaacaaaatactgttatatttaactctttcatatgtactggaaatgattttccaagcagaaattatgactgtgttctgggttatcaatataaaatcacaaccacaggcatattcacatcaaaaacaaactgttgaagtatgatccattgtttttcttatttttcccttgatatttgctacaaatcaatcactagctagcagaaaagtagtagtagaaaagggtgaccaatatttaagaaaattctgtgtaaaaataactgaaaaatgagacttcaatccattaacttaattctttctgtaaacttagaaaaagatggtcaatatttgattttggctatagacacttgcatgcactcctatacatgtatacatttcttggaaactaagtttgataatcatttttggacgtgttaggcagctgaagatattaaaacggagccaactccctgttagggagagacaggcatgagaggttctgagacaaagaacttctgatgcagaatcagaaatcaaaaaaacagcccaaatgaggaagctggaaaggtagccaattgtggcattatggtagaggaccaggcagaaggatgagagaaagagaaggcttcaacaattgaggtacaagcagggcattctggagtcagttgctgtcagtgtgaaagatggatggggtgggacagaaagagaaacagggagataagttaggatggtacaattcagtaatctacaaaggagaggatatatgggcctggaataggatgatggcaggggccatggagagaagtggtggcaaccaaggtttttggaggaagaagccactgggattggggcaatctggggcaagagagagtgaaaaatcatgaatggatcccagatctctgacttgggcaattaagtgggtggtgggaccattcacagagatacggagaatcttaagggagaacaggtctggattggaattagagtggtgagataaattaattttagagcataccaaatgtaagatggctttgggatatccaagtagagattttcagaggtagctgtgcttacaactctgaagttcaggacttcagttatagatttgagatttatcacaatgaaggtgagattgaaacccatgaaagttcatgaaacccatgaatcacccaatgaaaccatggagaacaagaagagaggggaggagaggagaagggagaaggaaaggaaatagagagaaggaataccaaagttttaagggatacaaagaggaaagaagataacatgaagaaggattctgagaggcagaagcccttaagaatagggtgatatagaattcaagtggggagagcattcaggaagatgacaacaggataataggtcaacagagtaatagagaggtcgctaaaaataaactctaagaagtattcagccaaaactattattgagctaataatggtgggatcaatttcaggggaatattgtgggcagaagtcagactgtaggaggctggggatcaagaagttgaggcaaggaggttggacaacaactgttttttcaagttggtcacgtgaacaaatctgtgaccttcagcctcccctccctcgggtcttggctgagctgattgcagggcccctgcagctctggcactctcaagttgtataaaactgacagtgcagaagtccttgagcccattttggctctcatgataattttccttcagtggaactaaggttacttgtctaagaaccaaagcctctgacttgactgatcaaagttcatcacgtgcatcgaagccacctacttggcagatgtagtgaaaagctacatagatctgggcccaggacaggatgctggggcgtgggaggggaagaaagcaggtgctaactatatagatagcatgcctatcagagcagtttttacgtttcctatttgtctctcaaaacaattttataggaatcatcaaagcaattttatcatggtttctagaccaggtttggatgtgaggtagggatttccacagctgcttttagtttgaaggaaatctgataagatgatgcaaaagcccttcagaaatgtgtaatcctacacacttcagtgattcaattcattgtcaaaacttaaggtgtttttaatattgttattgttcatttggtttttaccaacatgtaaggagttggcaattatttgttaaactcatgtcttaggctaaataaattccaaaaaattcaggatgagaattgtttattgcttaacgtgtttcaaatttcttccatgcacatctttattagatcttcacagcaacctacaggataagcaagacaggtgcaagtgcctcctttgggtatgaggaaactgaggtctaaagagatgaagtgatttgcccaaggctcatagcaatttattggtagagcaaagactagaattcagatctcttaactgcagcctattttccctattctgaactgttacatcagcatcaacaattatctaatggattggaacagtgtacacaggcagcttagctacgtcaagtcacgatttttactttaacttcaattccagagtcttggcctgatttccctcaagaccctacttatctttgcctttgcaaaatttatttttcttgcattatctttccagctaaattttatttaataaccatcagcatgctttttttgctttatgccatgtagacttgacctgaaaacctgccaggctttcattgagtttagtgattaaagaagtaaagttctgagaagcaattagttgatgggacaccagtcataaaatcaatccaaacttttgttgacatgtgtttctttctccatataccaggttcccgcttcgtattagtaagattgaaattgaaataagtctattgctggtggatgaatttgtcactttccttgaaactggtgaacccaaaaagttagacagtgataggaaaatactgccattgtctgttaagaagtctatgacatttcaaggcaagaatgaatatatggaagaagaaacttgtttcttctttacttacaaaaaggaaagcctggaagtgaatgatatgggtataattaaaaaaaaaaaaaaaaacaaaaaacctttacgtaacgtttttgctgggagagaagactacgaagcacattttccaggaagtgtgggctgcaacgattgtgcgctcttaactaatcctgagtaaggtggccactttgacagtcttctcatgctgcctctgccaccttctctgccagaagataccatttcaactttaacacagcatgatcgaaacatacaaccaaacttctccccgatctgcggccactggactgcccatcagcatgaaaatttttatgtatttacttactgtttttcttatcacccagatgattgggtcagcactttttgctgtgtatcttcatagaaggttggacaaggtaagatgaaccacaagcctttattaactaaatttggggtccttactaattcataggttggttctacccaaatgatggatgatggtagaaaccaaatagaagaatggtcttgtggcataatgtttgttgcctagtcaatgaagtctcatattcttgtctctggttaggatcttgggatctggagtcagactgcctgggttcaaatcttggctctgcccataccatctctgttatcctggggcaagtgcctcagtttccacatctgagaaatggggatggtattggtgtccatttcatagattaagtgagtttagccttgtaaaaagcttaggagggggtctgatacatagtaagcactatgtacgcactagctataattatttgctaaagttctgctttaaaagtaagctatttttttatggagacagcttttttcttttaaatttccagctaggcaagaagagcgtcaatttgatctaaaatttcataatgcttcagattaacatagacatggataagtcccagaatttgcagtcttttagtaaaagtagcattttctgtgtaattcttcacaagcactgattgtagttgcaggatgctcagtctccctctgagatgttttacatttttaaatggttagacttgcaggaacaaaagagcagagtaacttagtaggctgttttgcattcttaggaaaagaaaaccatcaggacttattttgttttcatgtattttttcacttccactgaggagtataattggctggtgttgacaaaataccaatcatagatgtaaaggagaaagttgattagttttctggctgttcctaaaattctgga

SEQ ID NO: 3796 - DNA, 6000 bp, Homo sapiens
tgggttcaagcaattctcctgcctcagcctcccgagtagctgggattacagcccggttgtatttttagtagagacgaggtttcaccatgttggccaggatggtctcgatctcttgaccttgtgatctgcccgcctcggcctcccaaagtgctgggattacaggcgtgagccaccgcgcccggccttttttcctcaaatattttcaatccacagttgaatctgtggatgaggagccagcagatacagagggccaagccaactataccttttttctccagcaaaatgagtttctgagaacattttgagagtttatttccggagtagctatttgtggttgtgggggaggcaggaaattggatccctactaaattacaacaaagttagttccaggcagctgaaaggtgtaaatataagaaaatataaccataagagcactagaagaaatatggggtttaaaatatgtgaggggacttcgggaggccgaggcgggcggatcacctgaggtcgggagttcaagaccagcctaaccaacatggagaaactctgtctctactaaaaatacaaaaaattagcctggtgtggtggcgcatgcctttaatcccagctactcgggaggctgaggcaggagaatcacttgaacctaggaagcggaggttgcagtgagccaagatcgtgccattgcactccagcctgggcaacaagagcgaaattccatctcaaaaaaaaaaaaaaaaaaaatgtgagtgggtaggaaactccatacaaagtttgcactgcaaaaacacaagggagagaagatgttgcaacaacattaagttaatttccttaaagaacttttagggtggacaagatggtgcatgcctatagtcccagctactaaggaggctaaggtgggagaatcacttgagccccagagtttgaggctgcaattgagctatgtttgcactactgcactccggcctgcatgatgcagcaagaccctgtcttaacaacaacaacataatacttttagaacttgacgattaagaagaggcctgtagaaaaataggcaaaggatttaaaaagctccagaggagcaaaaattgactaaaacatgaagagatgcttaaccttattcaaagggaaatgtaagcataatttggtaaacacttgcaatgtgctcctaagcatgtggtttgagtgtcaattggtaaacctcatataaagggcagtttgagctgacgattccactccttggtacgtatcctgctgaatttggttattaatatgaaatgctgagatctcagtatttctccttggttgagtccatttcagacagggatattctttccagcattgtttgtcacagcaaaatattactacatcaacaaggttctggttaaatagatccatggaacatacccctgcaaggagaatgagataactccaagtgcattgataacagaacattcctcaatatatgagttaaaaatgcaaattggggccaggtgtggtggctcacgcctgtaatcccagcactttgggaggccgaggtgggtggatcatttgagctcaggaattcgagaccaacttaggcaacatggcaaaaccccatctctactaaaaatacaaagattagccgggtttggaagtgcacgcctgtaatcccagctacttgggtggctgaggcagaatagcatgagcccaggaggtggaggttgcagtgagccaagatctcaccactgcactccagcctgggtgtgacagcgtctcaaaaaaacaaaaaaaaactgaagaacagtgtttgggtaccactgtgtattatttatatgtaatttctgtatatttgtattcttaagtataggatatctttagaaggatacataagaaactggtagtgggccaggagcggtggctcatgcgtgtaatcccagcactttgggaggccgaggtgggcggattacctgaggtcaggagttcgagaccagcctggccaacatggtgaaaccccatctctactataaaatacaaaaattagccagatgtggtggcacatgcctataatcccagctacttgggaggttgaggcagaattccttgagcccaggaggtggaggttgcagtgagccaagatcgtgccactgcactccagcctggccaacagagcaagcaagcaaacaaaacaaacaaactggtagtgatggttgtcttgggagggaccagtttgctggtgaataggaatgatgccctttggtacttttttttttctttttttttttttgtgacaagatctccatgacgcaggatttttctcagccactttgccagccggggacctctgcagccggcaatgcctcctgcccaggcctcgcgccccgggcctgctgccggaggtaccctgcccacttagcccacctggccacgcctggcttgcacactggctcagcccttggctgggctggggcatgccccaggctgcctgtgtttcagcttgtacccacgttcagcagttcccgagttcttgtcatgcatccaagaagaatgaggttatgctgacagttcaaagggtgaagagggtcggaaagaatttcattgagtgacgaaacaactcttaatggagaagggacaggagagtggtctcccaagttaggtggtttctctccccttgtggctgggtccggggctttgatgggctcaaaatgggtgtgtgtgtgcagattggtttgagtgtatgcaaaagaaaaaaaaaaaaagctaaaacaaaggcaccactcagctgggcgcggtggctcacgcctgtaatcccagcactttgggaggctgagatgggcggatcacgaggtcaggagatggagaccatcctggctaatacggtgaaaccttgtctctactaaaaatacgaaaaaattagccaggcgtggtggcgggtgcctgtagtcccagctactcaggaggctgaggcaggagaatggctgaacccaggaggtagagcttgcagtgagccgagatcacgccactgcactccagcctgggccacagagcgagactccatctcaaaaaataaataaataaataaataaataaataaaggcacctctcaaagatgggcatgacagtgtaaccaattagggaagggtgggtatatgtaaaataggtgacgcgtggggatcaatcagaggaaagtgcaacaaacgggaagagtggttctcaatcccacctgtgcatttaccgaggacttgtagcttggctttcaactgttttcggcttgaaggtggggtttcatcaggaacctgcccctgtctgcctaggatttgtctgtttgtctgcctcctgttgctatcctcactttgttgcccaggctggagtgcagtggtgcaatgggaggatcaagggatcctctcatttcagcctccggagaagctgggaccacaagcatgcaccaccatgcccggctaatttttgtattattttgtagagatggggtcaggctatgttgcccaagctggtcctgaactccaggactcaagacatccttccacctcagcctcccaaagtgccaggattacaggcatgagataccacactgagccctttggtaccttttggattttgtaccatgttcatttattagtcaaaataagattaaagtaggccaggtgcagtggctcgtgcctgtaatcccagcactttgggaggccaaggcgggcagatcacttgaggtcaggagttttgagaccagccgagaccatgccattgcactccagcctgggtgacagacctagaccacatctcgaaaaaacaaacaaacaaatacaaacaaaccaaaaaacgtaatatttattgaacacttcgttattcgggttctggtccaagaagagttcacaattttattgtggagaaaagataggatatgagaaaataggatatgggggcaatacaagtacttgtcaaaagagggaggtgatatctggtgggatgcactttttttttaattttttttattctttgagatggagtcttgcactgttttgtcgggctggagtgcagtggcgcaatctcggctcactgcaacctccacctcccaggttcaagcgattctcctgcctcagcctcccgagtagctgggactacaggcgtgcaccacctcagccggctaatttttgtatttttagtagagatggggtttcaccatgttggccaggatggtctcaatctcctgacctcctgatcttcctacctcggcctcccaaagtgctgggattacaggcgtgggccaccacagcttttttgagatgcagttttttttcaccacagttttttttttttttttttttttttttttgagatggagtttcactcttgttgcccaggctggagtgcaatggctccatctcagctcactgcaacctccaactcccgggttcaggcgattctcctgcctcagactccctagtagctgggattacaggcgcctgccaccatgcctggctaattttttgtttgtttataagatggagtctcgctctgtcacccaggctggagtgcagtggcgtgatcttggctcactgcaacctctgcctcccaggttcaagcaattctcctgcctcagtctcccgagtagctgggattacaggcatgcgccaccatgcccggctaatttttttgtatttttagtgaagacaggttttcaccatgttggccaggctggtctggaaccccgacttcaggtgatccacgttggcctcccaaagtgttgggattacaggtgtgaaccactgcgcctggccatgaagtgtccaataaatattagattgacataaagaaccctcaggtgtgctatctcatggaataccctcaaattcctctctggatcttcctatcacagttgtattattggggtcccatttggatctctcccactataggtagctcttcagtgggacgggctaggtaagagaggctgggagtaagtctgtctgatctaggatgtcttgcttaccacccaggtagggggttatatactcccagcctttctgattccattgtaactcttgccgaaatccgggtgaacggaagtagtctctttaagaactggtatgggcaggcccaagttgtcaaggcttcggaggtaatgccctggagagcggggaacggggtgggtttagaggcccaggcgggcacccaggaggcaggcccagaagagtactgccaggaagagttgggcgccgaggaggagatggcagccagagcagcatggcctgtgctgcgctctgtgaactcacgcgagctctcccggatcatcatctgcaatcacagcccacgaatcgtgctgcctgtgtggctcaactactatggcaagctgctgccctacctgacgctgctgcccggcagggacttccgcatccacaacttccgaagccacccttggctcttcagagatgcaaggacacatgataagcttctggttaaccaaactgaattgtttgtgccatcttccaatgttaatggacagcctgtttttgccaacatcacactgcagtgtataccctgaaagagcaatgcctccaggttgtcggaagcctagtcaagcccaagaattacaggagactggacatcgtcagatcactctatgacgatctggaagatcatccaaatgtgattgaaagacctggagcggctgacgcaggagcacagtgaatatctgtggatggctgggcacggtggctgacgcctgtaatcccagcactttgggaggccgcagcaggcagatcacttgaggtcgggagttcgagaccagcctggccaacatagtgaaacccgtctccacttaaaaaatacaaaaattagctgggcgtggtggcacatgtctgtaatcccagctactcagcaggctgaagcaggagaattgcttgaacccgggaggtggaggttgcagtgagctgagattgcaccactgtactccagcctgggcgacagatcaagactccatctcaaaaataaataaataaaaagagagagaga

SEQ ID NO: 3797 - DNA, 6000 bp, Homo sapiens
ttttttttttttttttttttttttgagacggagtctcgctttgtcacccaggctggagtgcagtggcgcgatctcggctcactgcaagctccacctcccaggttcaagtgattctcctgcctcagcctcccaagtagctgggactacaggcatgtgccaccacacccgcctaattttttgtatttttttagtagatacggagtttcaccgtgttagccaggatggtctcaatctcctgacctcatgatccgtccgcctcggcctcccaaagtgctgggattacaggcgtgagccaccgtgcccagctgagaccctgtctttaaaaaaaaaaaaaaaaaaaaaaaaagaatggtctccttcatgagatgtgacatttagactgagacctaaaagagaagaagctgaggttgagtggggtggcccgctgtggagaaggagagggaacagcacaggcagcgtctgaaacagtagcaagcttgtcagggaactgaaagatttgagtggccccagcatcgtggtcagtagttcaaagagctttggtcatggggggaagtacttttccctctcccattctttctctttttttttttcttttttgagacggagtctcgctctgttgcccaggctggagtgcagtggcacaatcttggctcactgcaacctccgcctcccggattcaagcgattctcctgcctcagcctcccaagaagctgggactataggtgcatgccaccatgcccagctaattttttgtatttttagtagagatggggtttcaccgtgttagccaggatggtcttgatttcctgacatcgtgatccactcgactcggcctcccaaagttctgggattacaggcgtgagccattgtacccagcccctctccccattcttatcactcctccctgccctgtcagcccccctttctgctttgctcatgtcctcttactcctgctttcctccttctgccccctgttccccaggcaagccaggaagcagacaatgttctgatcctgcaggacaggaagctggtaaccgggccagggaaacggtatctgcaggtgtccaagaaccgctttgatggagatgtaggtgtcttcccgcttgagttcaacaagaactccctcaccttctccattccaccaaagaacaaggcccggctcaagaagatcaaggatgacactggaccagtggccaaaaagccctcttctggcaaaaagggggctacgacacagaactctgagatttgctcaggccaggcccccactcccgaccagccagacacctccaagcgttcaaagtgaaggccgtgcagagctggtcactgaaatgagcctgataggataggctggagcataaaactctgcaagggctcctctatcctgtggtcctgagctgtgtgcccttctcagtctgaggggcctaacctagagcaggtttccatagtgagaaaattcaatgtagcagactactgagaaactactgtgttgctcaggctttgtttgaggtcctgtatatacagcactgaaaagagagataaagtccctgcctgcatgcattctggcggaagagacaagcaagcaatgaacaaattagcagaaaacctagttttagtgaaaaatgctgtaaagaaaatagaaatgcgatagagtgctggcaggctagtgtagataagtggtctgaaaaggtgtctctgagccgagggcatgtgagctggggcctaaacaactagaaggagagagccacgtgaacatccggcgaaggggacccaggcagagagaaaaggaaatccaagccctgaggtaggaatgagcaggtcagattcaaggcagtgaggtcaggccgcatgaacctggaggggaatcggggacttcatgcgaaactccagcctaggctttcaaagtcaaagggtgatacagtgggtaccaagctcctctgctccccactttgtagagcctagcatgaggtggcatgtactagaattggatcctaggtgcttagccctgcaatatcagggcctcactggtgggagctgcctcgggctgggttgcttggtcatagagccatagaaggaagctgtcagcccggagtgcctgccacctagacactgatgccattgtgtgctgcctcaagactgctggagtcaggacattttatagagccttttccagttttactaaaaaatttttccattgcctttgtttctgtgctttttcttattcatccaccaggtgtctccccagtccgtagctgaatttccctttcgggattgggaatggacgggtcccctcccactgcttgcagcctttgagcggtgggcttccaaggaagcagggacattaaagggccttcacaccccaccttccatttacatctcttcttggcctagggaagacaagatgatctgtcctcatacctaacttccctgaggatctcgagtgattcctggcacaggtactcatcactgggccacatgagcccagtgccctgcctgactggccattcctctgtgatgtgagccactcacctctcaagtggacttagactcaacatattctgtccacccccatccatctccctcctgtaccctctccgtgtttctcatatgctaatgcgtgccagaactcctggggacttgtgaaaaatgcagaaactaggccccattctccccccatcctccaccacgtacatttctcattctggatttgaggacgggtacagtaatcctcatttttaacaagccgtggaggagactgtaaaataggtgacccagagggactgtcagaagtattcctaaatgatgacaccttctcatctctcgtcctctgatatcccaaagtcccagtttccctttggatttgcctgaaagagtcgtgagaatgcaatatgttctgagggggctggggagaatccttttgtaagggttgggggaaggtttcctgctccgtttggaagcagggctgccttgtcaggctcttcctttcaacctatgaaggggcttctggggccgatggaggggtctgtggtctctggagtgtgagaactctggtcacaaatgtctcctgaaacatccggagcaaggctgctggaaagctgctctctgtgaggaagaacctgggggggtggggagagctcctccagggcctcccttcttgggggtctctcccagactggctggagccaggcctccctaatcccgcagtaatcattcccagccgttggctggtctaggcctcatccagagtctgtaacgctgaacggcagccatgccttccagaggcacaataccatatcagtcatacctgtaaggatgtgggttccacattcctgtctccctagaatgcctggtgggttctcaggagatcttttaggggtttccagtaggggacctttgtgaggtctctgtgaactggggatagagggatagatacagacttggctgtttgtcttgccccacccttctagcagacacccccacacagcacaaaccagaatgatgagggggaggggaagctaatactccccccagccctacccgctgcacaaacacgttctattccatacctgccttaaataccccatatcatgattccacccagtctgttcagatccctggattctagaaagcagtggggggtccctagggcctgtgcggattccctgggataggactggtctgtctacacccaactggatgttaagaatctccctgactcacaggttcggtggattgggaggaaaaaaaaaaaatttccctgagatctcaggaaaggcctggctaagccaggtccagttggatctacagccttgtcctctaattgataatgtatgtcacacttggccatgaggggacagctttggtcctctggcagcttcctctctgctgtggatgggtttaagaagaaacaactcggccgggtgcggtggcttacgcctgtaatcccagcacttttggaggccgaggcgggtggatcacgaggtcaggagtttgagaccagcctggccaatatggtgaaaccccgtctctactaaaaatacaaaaattagccgggcgtggtggtgcgcgcctctagtcccagctgctctggaggctgaggcaggagaatcgcttgaacctgggaagcggaagttgcaatgagccaagatcgtgccgctgcattctgggcgacagagcgagactccgtctcaaaaaacaactcaccgaggtctcctgtagcccatatgggccagatacctgtagaccttcctacatgctgccttgagtgccatggtgggagggagcccttggggcctccctgcaatacaggccaacttcctgtttgtgcctgtgggtgggactttatgagtcttcgagaagcccagccatgccccgtgggggtcagaacccgcaggcctgctcacctgggcagatacctactctagggagggggctgtgctggttctgcctgggcagccccacgctgaggtgtgtgcgtggtaggggtaggtgggagctgctctggtgaaacttgagccttctttgtctgcttcccaggggttgtccctgtatttggggattgggccaagagtggaccgggttgggctcccatcggagcagggagggtggcagagtcaagctcttagtttaagcttagtttaaggcagccaggtagccgaattctcggtcacgtgatgctcgcccccttccccaggtcaaaaaccaaatccagtaagctgtgaagtcagaggccagaggggcagcctcggccaccgtcgagtcactcttaggctgggcactgggtcggctgctggtggagtgcggggcagaccactcccctccctgggtggggggcgcggcctgagccgccccgccccgccccgctccaccaggtcgggccaggcgggcgccgggagctgggagccgggagcccagagttcggaacctagagttcggagccggctagggagccggcgttgtcgcggcgaggaggtgggcgcgctggagcaggagcggggccggaactggagccgaggcgcaggtggcgctgggtgagtggtggggcggcggaggtgcaggaactcccgcctcccgctcatccccgctcctgaacgaactttccgcttctagggaagctaggggttggggtgaggaggggggtccgcacttggtggggtccccgcgaagagtccgaacagggaagtgacacgaaaacgcacgccgacgggccccacacacgcgtgcacagacccacgcccgcacttgggacacgcgaacacacatgcactcggaaaggacgcgcccagttggccacccttgcactcccagggacagcgccagccggcccgcgcggacccacagcgggcagggcactctgcggtcgcgtattgggtgcgggaaaggggcagccctgtgactaccgacgggggcgggccgggtgggacgcacccggaggttcctgcttcctggcctcccgcaggtgaagaccaagacgtaaacagacgccgagcacgtgacagctccgcagaccagtggcctgtgcccccaacccaaccacggggcggaaatccaccctagtccggggcgcgtttgcttggtcccaggccggacggcgttccattctccgcctggagcggggataagccctctcccgggaaccggagcacagcgccccctggagccggggcggagcaggagggcccggctgctgggcagggctggggttaactcgggctcctggacgtccttctccccagcacattcttggtgtctgcatccctgaaggtttcggagacaggcccttgatggcagtggacagctgcccccgcctgttaccgccagcccagagagcagctgcctgagcgcctgcgggtccccttcctaccctcacctccactccttgcgggagtcggagtctcctccccccagaaaatgcatgagtgtaaacgctccctcaataccagagtgggcctgcccccctagaaaaaggaggacgagcccctccccccagggaatgagggagtg

SEQ ID NO: 3798 - DNA, 6000 bp, Homo sapiens
gaggacgggtacagtaatcctcatttttaacaagccgtggaggagactgtaaaataggtgacccagagggactgtcagaagtattcctaaatgatgacaccttctcatctctcgtcctctgatatcccaaagtcccagtttccctttggatttgcctgaaagagtcgtgagaatgcaatatgttctgagggggctggggagaatccttttgtaagggttgggggaaggtttcctgctccgtttggaagcagggctgccttgtcaggctcttcctttcaacctatgaaggggcttctggggccgatggaggggtctgtggtctctggagtgtgagaactctggtcacaaatgtctcctgaaacatccggagcaaggctgctggaaagctgctctctgtgaggaagaacctgggggggtggggagagctcctccagggcctcccttcttgggggtctctcccagactggctggagccaggcctccctaatcccgcagtaatcattcccagccgttggctggtctaggcctcatccagagtctgtaacgctgaacggcagccatgccttccagaggcacaataccatatcagtcatacctgtaaggatgtgggttccacattcctgtctccctagaatgcctggtgggttctcaggagatcttttaggggtttccagtaggggacctttgtgaggtctctgtgaactggggatagagggatagatacagacttggctgtttgtcttgccccacccttctagcagacacccccacacagcacaaaccagaatgatgagggggaggggaagctaatactccccccagccctacccgctgcacaaacacgttctattccatacctgccttaaataccccatatcatgattccacccagtctgttcagatccctggattctagaaagcagtggggggtccctagggcctgtgcggattccctgggataggactggtctgtctacacccaactggatgttaagaatctccctgactcacaggttcggtggattgggaggaaaaaaaaaaaatttccctgagatctcaggaaaggcctggctaagccaggtccagttggatctacagccttgtcctctaattgataatgtatgtcacacttggccatgaggggacagctttggtcctctggcagcttcctctctgctgtggatgggtttaagaagaaacaactcggccgggtgcggtggcttacgcctgtaatcccagcacttttggaggccgaggcgggtggatcacgaggtcaggagtttgagaccagcctggccaatatggtgaaaccccgtctctactaaaaatacaaaaattagccgggcgtggtggtgcgcgcctctagtcccagctgctctggaggctgaggcaggagaatcgcttgaacctgggaagcggaagttgcaatgagccaagatcgtgccgctgcattctgggcgacagagcgagactccgtctcaaaaaacaactcaccgaggtctcctgtagcccatatgggccagatacctgtagaccttcctacatgctgccttgagtgccatggtgggagggagcccttggggcctccctgcaatacaggccaacttcctgtttgtgcctgtgggtgggactttatgagtcttcgagaagcccagccatgccccgtgggggtcagaacccgcaggcctgctcacctgggcagatacctactctagggagggggctgtgctggttctgcctgggcagccccacgctgaggtgtgtgcgtggtaggggtaggtgggagctgctctggtgaaacttgagccttctttgtctgcttcccaggggttgtccctgtatttggggattgggccaagagtggaccgggttgggctcccatcggagcagggagggtggcagagtcaagctcttagtttaagcttagtttaaggcagccaggtagccgaattctcggtcacgtgatgctcgcccccttccccaggtcaaaaaccaaatccagtaagctgtgaagtcagaggccagaggggcagcctcggccaccgtcgagtcactcttaggctgggcactgggtcggctgctggtggagtgcggggcagaccactcccctccctgggtggggggcgcggcctgagccgccccgccccgccccgctccaccaggtcgggccaggcgggcgccgggagctgggagccgggagcccagagttcggaacctagagttcggagccggctagggagccggcgttgtcgcggcgaggaggtgggcgcgctggagcaggagcggggccggaactggagccgaggcgcaggtggcgctgggtgagtggtggggcggcggaggtgcaggaactcccgcctcccgctcatccccgctcctgaacgaactttccgcttctagggaagctaggggttggggtgaggaggggggtccgcacttggtggggtccccgcgaagagtccgaacagggaagtgacacgaaaacgcacgccgacgggccccacacacgcgtgcacagacccacgcccgcacttgggacacgcgaacacacatgcactcggaaaggacgcgcccagttggccacccttgcactcccagggacagcgccagccggcccgcgcggacccacagcgggcagggcactctgcggtcgcgtattgggtgcgggaaaggggcagccctgtgactaccgacgggggcgggccgggtgggacgcacccggaggttcctgcttcctggcctcccgcaggtgaagaccaagacgtaaacagacgccgagcacgtgacagctccgcagaccagtggcctgtgcccccaacccaaccacggggcggaaatccaccctagtccggggcgcgtttgcttggtcccaggccggacggcgttccattctccgcctggagcggggataagccctctcccgggaaccggagcacagcgccccctggagccggggcggagcaggagggcccggctgctgggcagggctggggttaactcgggctcctggacgtccttctccccagcacattcttggtgtctgcatccctgaaggtttcggagacaggcccttgatggcagtggacagctgcccccgcctgttaccgccagcccagagagcagctgcctgagcgcctgcgggtccccttcctaccctcacctccactccttgcgggagtcggagtctcctccccccagaaaatgcatgagtgtaaacgctccctcaataccagagtgggcctgcccccctagaaaaaggaggacgagcccctccccccagggaatgagggagtgggcagtagcccgatgcctcctcctcgccccaccccctacccctacacacacgctgagcccagctgccgcctgagctgggcaggctgccagaaagaggaggaggctctcggtgccccaggaggcagggatcagggcaaggccagaggagggggctctgctggggagaggggctcagtctgttcttgtgaggctgagggtctggggtgagtcagggtggctgggctgtgtttccctttccagggaaaaagaaagaaaaacaaccctgtccatggagctaaaaatagagctgagagccggccagggctgtggcctggaagggggggatgctccttcctggggcccgggcgagctccggcaggccttggccctgcgggggagggggtggttaggggagaaaggctgcctttgcccagggatgcaggcatcagctgacctgaccgggtcaccgagacccctaggggaaaggctgtgcggtagaatatttgtgaagcacggcgtgtaagaagttgtctgtgtgagtgactgtgaatagaggctgtcaatgcgtgaaagatggttaggagactaagtgcacttgagactgtgactgggtgcgaaggactgcggattgttgtggaagcctgtgcccaacaggcctgtgacaccgtgtctgtgtgtgaggtggactggaagattatggaaagaaggaacgcggacccacgtgacggctgagactgcggctgcatgtgggaaaggtcttgtgggtgttagggagactgtattgtgtgcgagaaggtgagactacttgaccctgaggaagtggaatattgtctgccgtgaggctggtgtaggtttgggctgtaggcttgcaccggttcgccccagtgattgttggggagccaggggccgctcctctccgataaatgacctctctcttagcaagtgatcccgaggggaggctggggagcacgcggtcgcgccagaggccggcctgggttcgcggggaaaagggcaccgtgccggggagtggggcagggcccgcgtgttgggggcggctgggtgtgttctccgagccggccgccaggtggcgtcgcctccgcgaagcccaggttgccgcctccaacccgccgtggggcaggcgcggatcgagcctcggcctcctactcgggctagggcgcggggtcccggcaccggagagtgggggacggccggccatcggcctctcgcttgggactctgaggctgagagcgtgtcagggaagcttcgcctggagaagcggagggggaggggcggccgccgccgcgccgtggccctttgtgctggaacaatgaccagctgccgctggccccggggccccggctggggttgagggtgaccaccgccgccgccgcgtcgagccgaaccgagcccccagacacgcagtcacagggcgtcggagggagggctcccgactgccgccgagcagcccctacgtgcgccccggcggattcgcgtgacgcgggtgcttgcgcgtgtccgcgccccggggcggagacgcccctcggaccctcccctgcgcggtgccgcccactcgcaccgggcgggggctggccagggccgggggcgccgcggaggcggaggcggggctgggccgggcagctccgagtggcggcgcgcgggccagggccggggccggggccggggccggagccggagccggggccgggcggcgcgcctgtggagcgctgggggcggcctggggctgagcatggagcagcgcggcggaggtgaggggggccgggtctgggaggcggcctggggagcccccaacttatgcgcggtggaatccagccggggggacggcgttccccagtcgcccccactttctggaaggggggctggactctggagaatgggtcaggggctcctggcttcccgccgcagaatgggaactcgtgatcgcagacttgaccccgcttgactggtccttggagtttgggtgggagggagactttccccaactcttcagatccgtctccggccctgaaccagctccagccctctgctctcctcagcccactaaaaggggggtgctcctgggccagagtgattgctcagggagtgctggggagaatgaggggttcccatctcccacagccacaaacgcatttctcaaaatggagcctccacttgcccctccttctctttcgggctccaagagcgggagccggcctggctgggcctggctttccagactcctggctctggctccctggatgtgtggctctcagggcccggctctgtggcactttggacttatgggccctcggctccgtggggttggggggccctggctcactgggtcccgctggctgtccccttgtcggcctgaccctcgggcctctccgagtctttgtctcttttgggtccctgtctttctctgagcctgtctccttccttcaattttcactttctccgtgctcgctgaagtggggaaatgcaacagaggtgccagcccccttggccccctaagaagtcccttccccactgttcactccacaccctggagtgggcccagagaggggaggggagggggttctctatctgctctgctgggggctggggtgtgtggggtggtctgagccccagccctacagaggggcctgtggtcactccctgctcctggcctacccctcccccagctccccgcagctcctgccccagcgtggacacctcttcctggttcgc

SEQ ID NO: 3799 - DNA, 6000 bp, Homo sapiens
cgactctaaaacaaatgaaacaagtcgatgttccgttttcttctcggttgtctgggtcttgcatgatctgatcctattctatttttatgctactgcccatagagaacattcttctgtagttaggcagattttattttattttattttgagatagagtctggctctgtcgcccaggctggagtgcagtggcgccatttcggctcactgcaacctccacttcctgggctcaagcgattctcgtgcctcagtctcctgagtagctgggattacaggcatgtacccccatgcctggttaatttttgtatttttagtagagaaagggttccgctacgttggccaggctggtctagaactcctggcttcaagggatccgcccgcctcggcctcccaaagtgctgggattacaggtgtgagccaccgtacccagccatagttgatattctataggagccttagggagagaacccctacactatcctggcttcacaactgcagaggcctcacaagcaagtggattctctgtgtctgctaggcctggaatcgttctctgctttggttgaggctggagacacaagtctctgagttcccctcttcctcactccacaaagtccattcccctttcagaggaagtataagggagtaatttgttttcagtttccttacttatgagtatgttgtaatcatgtgcctttttttttactttttttttgagatgaagtcttgctctgttgtccaggctagagtgcagtggcttggtctccactcactgcaacctccaccttctgggttcaagcaattctcctacctcagcctcccgagtagctgggattacaggtgcctgccaccacgcccagctaatttttgtatttttagtagagacagggtttcaccattttggccaggctagtcccgaactcctgacctcatgatccaccagcctcagcttcccaaagtgctgggattacaggcgtgagccaccatgcccagcctcatgacttcttgagattatctagagagggcattataattcagtgtttccaatctctggagttagatctatgaaggtctgaatctctgctctttgatcttggacaagttacttgagccgtctgcatttcaggatccttttttataaaatgggttgaataacatggtcgttttgagaattaaatgatataatatacaaatttagagcaatacttggtatagaataaggacacacacatacacatatgtatatactatgtcagttaatttatacactccaattttgttactactgtccgctctatgctcagctggtcttgtgttgtctctttttctcctcttctcagctagatacattatgtagatgtgcttatttaactgattaactttaaaacattttctggaccaggcatggtggctgaagcctgtaatcccagcactttgggaggccaaggcaggcagatcacctgaggtcaggatttcgagaccagcctggccaacatggtgaaaccccatctctactaaaaatacaaaaattagccgtgcatggtggagcatgcctataatctcagctactccagaggatgaggcaggagaattgcttgaacccgggagatggaggttgcaaggttgcagtgagctgatatctcaccattgcattccagcctgggcgacagagcaagactccatctcaaaaaaaaaaaaagaaaaagaaaaaaagaaaaaaaattatgttaactatcctactatagaagtatcaggaagtataagacaaaaccattcagaatcactacactacatccagagactaccacttttaacatttggctgtgtaattttctgggctttaaaaatagtttaaaaaatatacatgtgtacatagtttattgtatatacatataaaataaacttatattgttgctgtttttcctttcttttttttgtttttagtagagatgggatcttactctgttggctaggctggtctcgaactcctggcctcaagtgatccacccatctcagcttcccaaagtgctgggattacaggcatgagccaccatgcccagcatgtgtttttcttgaacacctctacctctaccacactataaaccccatcaggggataaatcttatggttttgcttaccatgttatcccaagtatgatttattttagcacatggctcatagcaggtaccaataacaaaacaaaacagaaacaaaacaaaacaaaaacccaaacatgggttttttaattttagcacatggttcatagcaggtaccgataacaaaacagaaaacaaaacaaaaacccaaacatacaacaacaaacaaaaatgagaaggaatgaatgactgcatgttaataaacacaaatcgttaatcacaacattcttccatgtgagcgtgtcagctttcccaaccaagcccctatcttggaaacttgtttccaatttgtctgtattcatatatatatataaaatttaaaatttttaatgttttttaaaaaaggcacaaagaatagtatagcacacattattgaacccaacctcccagaaccaacaacttttaagattttgagttttatttccgttttttaaataaaagaaagcattgtaaagttgaagtcttcattttttttctctgctcaatttccctccttccctctaatataaacaacagctgtcatgaatttggtgtgtgtgatattgcattctatgtctatacttatataaagtatgtgatcattttaggttctgtgggattttgattatttataaatatggtatcacagtgtatatatatagttctgcaacttgctttttttcactccacagtgcttttgaattctttctaccatcatttatcctttacaactacagagctagttcattaacttagctactgtgtatattccatcatttggatatctacctttcattttcctaccccttgactggacatttggggtttttctcaatttttcactactgcaaacaatgctgaaatgatcattgtaactgcaacatttttattaggtattttatgcacaaattttaaggtccattaaatctattttataatatttttcattccacaagtgttttaaaaattatttttacatctttgaaggcagagcaggagcaggatctttaaacacacaacaaaaaaagattagcagccatgtggcttggggttggggtggagaaagtatagtcagcttaagagtgaaaagaaggccaagcatggtggtgtgcgcctgtgttcccagctaccctagaggctgaggcaggaggatggcttgagctcaggagttcaaggctgatgtgggctgcagtaagttatgattgtgccactgcactccagcgtgggcaatggagtgagactctgtctctaagaaaaaaaggaaaaaatgtggaaaagtacataggtaatgccagtagggctcaattgcagaatattggctggagacttattttgctcccagtactgtgcaagatatctgggtagcatacaggatactatcgaaaaattaaattgaattctaagctgcacgatgatggtttcttttttttttttttgcacacttctgctggcaggaagggattacggtttgattatcagagcccaaagaagagagaaaacagagatctgagaagattccctggaagagctgaggccttaagagattgaaagagagggaggggaggaggatgaaccagggactgaaggctgggtgagactgtcaaaatagtgcacagataatgacctttactactgtttcccatgagagtaaaatttaaaaatttcacaagagtttgtcaattaaagaggaaatcgagttgactttaaacactatattgaccctcagcatcacttgccacagatataggtggtaggaagtatgatgttaggagagccagaagtagactgaggatttggcttccagtctattatttctactgtgaatctttgcaccatccctgcttctgtccctgtaccagatccacagtcctcaaatggatagtgaagctgttcaaaacccacgacctcacttgctggtatatacggtactatactattccctacaccataaaatacttctcagaaagaaaatatacatggggaggggaggttgattaaattaaatcaggttaaatttgggtgtgcatcagacgttcttttttttttttttttgagacggagttttgctcttcttgcctaggctggagtgcaatgatgcgatctcaggtcaccgcaacctccgcctcccgggttccagtgattctcttgcctcagcctcccgaagagctgggattacaggcatgagccaccacgcctggctaattttgtatttttaatagagacgggggtttctccaagttggtcaggctggtctcgaactcccgacctcaggtgatccacccgcctagacctctcaaagtgctgggattacaggcgtgagccaccgcttctggcaaacgtccttcttaattgtttgattccactgtcccaatagccgtctgtccttttctgcccctatttttagtgtccagccactagttggtaacttggtggctccttcaggcctgctaacttttttttttctttcaccaagactggtatgagatacttaagaatagtggctttaacgacagttaccaacttttaatacaaatgcagtcgagagggcaaatactcaagtttgggggcagatagcagccagtcaaataggtccgagaggccctggcgagctaccgcaggccagcagggaggccgtgggcaggtggcggtcgaggccggaggcaggaagcacggccgggcggggctgggcggagcggccgcggaggagcaggggccgcaggcgccccgcccggactggtatgcggccgagagtgacgcgggaggcggggtcacgtgacgcccgtggaatgccaacaatgtagcgaatgtcccacttgggtctgcgctttggaaccgcggcgtgagcgccccgggaagatggagcagtcgccgtccacgccaccgccgccgcccggggctcccccgtccctgcggggccagcagcagctccagccaccagtgcccggtctcccggcgcgagaggcccgggagccgccggccaggacgcccccgagggtgtagaccgcgcccctggaggtgagggggctgggagctggggtcggggcggcagctcggagggtggcgagagtttccgcgaagcggtcgagccctgcggctccgcgcacctactgtggtgccgaggctccgggaagggcgcccggcggggcggccgaggaagtttgtccggacggagccctgcgccctgcccccacggtccgcgcccgcccggagccgcccccgcccggcggctcgtagtccaggccgtacggagcccgcggagccggttccagaggagccggggaagttggaggccggcgtcgggcgggggcagcggggctgcgccgctttgttgtgcggcgaccggggcggccgggatcccggcggggcaggggcggcgcgggccgggggcggtgtcctagacccgaaaggccgtagcgccgggcgcgcctctgcttccgctgtctccgggggatcggcttttcactagacgcccggccgggcgcccctgacagcctcgggacccccggtccggcggcgcagcggtcccacggatccggggccatcctcccggccgcgccatcgtcccacgggccaatcagtccttcagagcccgccctgttggcccccgccggccgccccgtcgtcccgcgagccgacggacccacggcggtgccgcagtcgaggccgcgccgcccctcagcccccggtggctgcgccgcctcacccactgccgcgcggttcccaccccgttccccgcggccgcgccgccggctcacgggccagtcagcccctcagaggccaccggaccctgggggcgccgttcctcccgggctgcgggcggccaggccctgctcggcgtctcccggccggctgccgcgccaactctgcgagt

SEQ ID NO: 3800 - DNA, 6000 bp, Homo sapiens
tcttaccaatagcagtttaacaaaagcatatttttctttttagaattcaataagaaaaaatatttatttctgccttccagattttgggggtgaaatagctagctctctgaagctaatttttgggttgctattttaaaattatgtttccaagcccaggaaccatgcaaactgtccaccagagctgcccctgagttcctcgtttgtgatttctgtacagctggccccatttgaactttagattccaatggagcgctggatttctatatgatatcctctgagcacttaagcccttgctttgtcagcgtattacattgagtttcttgttgttctgttgctctataaaaggcatcctgtcattacctctctcctatgggggggctctctccatcagtctattctgctcgttcacttcatagtacaaaagtgctcagtagatgctattggctgacatccagtcctagacaatcttattaactggcacacctacagaaactaactattatattattatgggatcttgaaggcattttaaagaacacagcaactatatgccaaagaggctaggagagctttcacccaaatggctgttttattacccctgcgttgcccagatttatgctcagcatttagcacagagcaatgaacgcaactttaaatacgagatttgttttcagctgagcagacaagtgtttgttttctacacaaatgaaagcccgtacgtcagtgttttgtcatttgtgcttttttgtagaactcacatgtgatgacttcattgcagattaacgtccagcactgccagggaattttcagggctgagcccctcgaactgtcatttgtcctgggtcagcccactggcatttgtgataatgcccattagataggaggactgtttcctgaagtgaaagagcaaattcctctgagcattctccgtggtgtgaggaattgcttctcaaggaaggaattgaaatcatttgaccatttctcctcacccatagtctcagtttcctgacattctgagttttgcagtgacacattcttttgggtatgtgaactgaccaaacgggatgttgcctcacagagcatgttgcagggagctgcctgcctgaaccactctcacctctaatttccagcggagagagaggccgtcgtgcacacacacacgtgtgtgtgtgtgtgtaggtcttctcttgacaaaggatagcatgaatttgatcaattcagttaattacgtgatggatgtaaaaacaaacctccaaaaagggtgaagtggtaacataatacatgggataccagcaagttcaaagtcatcttctcgtattttccagtctaacctgtaaatcctatgtttcttctctttgtatgatagcgttaaagaaaaactaggattatccctgaaccagaaccctgaatttcagagatcctccataatatattgctctattctcgccaaacaaaacactttcaggccctagaatggcttagaattaattccacagttggcagtggtgatgttcaagttgtggtgttccttcctaaggttagggaaattccattcaaagtccccaaattcttttagatttctggcatgtacagcatgcagaatttaatatagctaagtagttttattttaaaaactattcaatatcagcgggatgtttgtcacaactatgccttacttaagatcatcataaatgcctttttttagatgttctgttcacaatcctaggaacgcacagctatgggctttaattggcagcatatggtgccattaccttccgtagaaatgcatttccctccccaaatttgatgttaataatttgattcactagacttaaaattcacagaaaggttattggctttatctttccttctaaaataatcttttcactctgttgatacttggtaagctccagctcttcccaatttttctttggataaaaggtttatttattcaatgaacacctaccacatgccaggcacttcacatgtactacctcatttgatcctcgtatcactaagaaacagatataaatacctgctttacaaatgagaaaaacaaggctttgacgttttaagaaacttggttaagatctcacaaccagcgaaatgtgttggctccaaagcccgggtctttcccagatgctcagctgcctcccagaccagaggccatatgcttgcaatataagatcaggaaaggcttcctgaaggaagtggcaggaatgggaggagttttaagacaagagcaatgggagctttcagagcaataagtgggaaaactattaagaatcaaaaccatctggaaaataaacagaaacacatacacagcattcctgggcagctgaaggaaccatgagttcacgtcacttgcctgattggttctttagaaagtcattaatttcaattgttctatcacatttattgatcacctcctacttgccaggcccttttctaggtgctgggatggaaccaagactaaaataatccctgccatggagctgttgtcaagtaggaggtaaggccctccgtccctcccccgcttccttccctccctctttccttccttccttccttccttccgtcctccctccctccttccctccctccctcccttcctcaccttcacttattaattcatgtagactccctttttcagtaaccgcagaagagcgtcctggagagaaggttccagagaagcctggcgcaggttccggcctggcggaggctccccggggtcttggagctgcgcgtgggcatcaacacctggctgtctgtgtctccagcctgggtccaagatgtgtgggccgggcttgcaggcagtggtccagagaggctgttgggagatgaccatttccatctgaagggcttcgtagtctctgaggtacctttgctttctcatttgtcggctccctttgttcagagtccggttggccctgggcctccgcctgatgctgggctcgcacggaaagcgccagctcgcgtgttggtccccaccactaaacctatgcagagagcaccgcacgcgagaggctggcttactcctctcctgcggctgcacacaggccggggtgcaggagggctggatccggtttgagggagaagggagagctgggcctgggaaccaaaggaggggatggctagagaaagtgccaaggctgcatccggaagacattcaaaagggaaggcggggccaggtgcggtggcgcgcacctgggatcccagcactcaggaggctgagtcgggagtatcacttgaggccaggagatagaggctgcagtgagccgagattgggccactacactccagcctgggcaacagagcaagaccctgtcgaaagcgagagggagagaaaagaaaaaggaaggaaagggaagaaaggagaaagttacagggagaagacagcaaccagccagccaggtaatgcctgagatgaccaggagacgtcaagctaggagaaaggcctgaaacagatcctccctcggcctcacaggagcccagcctacccacaccttggttccggatttccagcctccatgagtgtgagaggagtgaactcctgttgtttaggatcccgatgttggcagagctttccctagctgactaccagggcctgccctgagaagccctcaccctcggtgctcagctgccatgggacctcggctctgtctacttccgcttgcctcttccccacaactgctgctcccactcagtagccagagtgcggttttggggtgttttttttttgctgttttttttttctttttacaggttctggttctgtcgcccaagctggagtgcagagcggcaatctcggctccactgcagcctcaacctcctaggctcaagcaatccttcagcctcagtctcccaagtagctgggaccggaggcccgcaccatcatgcccggggaatttttgtattttttgtagagatggggtcttgctatgttgcccaggctggtctgaaatgcgtggcctcaagcgatctgccctccactgcctcccaaacttctgggattatggatgtgagccctgcctcagcgtgctctttattttatttattattaatttatttttgaggagcttcgctcttgttgcccaggctggagtgcaatggcgtgatctcagctcaccgcaacctccgcctcccgggttcaagcgattctcctgcctgagcctcctgagtagctgggattacaggcatgagccaccctgcccggctaattttgtatttttagtagagacgtggtttctccacgttggtcaggctggtctcgaactcccaacctcacgcgatcacaccgccttggcctcccaaagcgttgggattaaaggcgtgagccaccgctcccggccacagcgttctctttataacatcaagtttcgcccccttaagccttccagtgacttccatccttcccttctcacagggcctggctgggccgcccccccacccccgggcctcccctctcctccctgcagcctcagccaccgcccctccgcccctgcactgtgcgacgactgcagcctccacgtgcccttcctcctgaagatgtaagtggtttcatgacttagtgtctaaaggcgaacatgacccagactggagtttttattattatagattcaatgttatcacattcaattatttattttgattttaaaataaatgaaaattaaaacgtttccctgggccgctagaagcaccgcgggcccagcactggcctatggggaagccgcccgggcaggtccccaccccggggcgaggcggaggggtgagggtggaggaggggtgtggggagcaggggccggaggggtcgtgggggggcgcagaggggtggagcaggcgggagccggaggggtgaggagagcgggggcggggggaggaagggtgagaggagcgggcggggcggaggggtgaggagggtgggggccggaggggtgagaggagcgggcggggcggaggggtgaggagagtgggggacggaggggggggggcgggggccggaggggtgaggcgagcggggggcggaggggtgaggagagttggggacgggctgggtcctcaactcgcctcagccgcgcagccaagcgggcagccttggggagaacgccgccgccgggtctgcaaaggcagctcggggcaagtccccactcctcgtccaacctaattgtggccctaaatcactcctgccagagccacccagagggggatttttgggctaaactatggggagccgtccagcaagagcggactggctcaggcgtccacaccgcttttgtgaagctggcgcaggctccgcgccctggacaccaacagcgcgccccgcccggagtcgccgcaccggccctccctacgcgcgggggtcttccgccacaaggccagtctctgctaggggaaacagaccgcagggcacttcctactgcttcgcagcagatattcgtttctgtgattattttattagtctgtcttctttaaactttaagttttgtgacgacagggtcgtgtctgcgttgcccaccactatggtctccatggctagcgctatgcctggaattcaaaacatacgtattgaatgaatgaatgaagaaaggaaaaaaatatacttataattccagaaattgcaccggaagagattcagtcctttaaaccttaaaggctttatgtctcctgaggttccctgaaaaatacaaatactcagcggttatagttaagagagaaaatgttgcccaggatgcggtggggacgtaggaggaaggagggctcgatcactgtttcctgcggataccatgccgggccagccctgtactggggatgtggtgacatggccttaccttccgtgaaatgatgccaggacacacagggtaccccccagtccctgctcttacttttgactcctcttggggaccacaaataaaaaaggaactgtgcttgggagactgtgatcttactctatttttaactgtactcagttattaaaaaattaaactggagaaggaaattgag

SEQ ID NO: 3801 - DNA, 6000 bp, Homo sapiens
attctcctgcctcagcctcccgagtagctgggactacaggcgcccgccaccacgcccggatcattttttttcatatttttagtagagacggggtttcactgtgttagccaggatggtctcccgacctcgtgatccgcccgcctcagcctcccaaagtgctgggattacagaaatgagccaccgcgcccggcctaattttcattagagtcttcatcattgttattttaaaaggtgaaaaattaggcccagccaacatggcgaaaccccgtctccactaaacaaacaaaaattagccaggcatggtggcaggagcctgtaatcccagctacttgggaggaggctgaggcaggagaatcacttgaaacccagaaggcggaggttgcagtgagccgagatagcaccactgcactccagcctgggcaacagagtgagatttggtgtcaaaaaaaaaaaagtgcaagatcagtctccttaggaaaactcccaagaggagtagggatgtgttttgagcaaggacagaaaggagacgcatccccagtgggttccttcaggtggacccgcctccctggatgtgaaattctggggtgcttgctgatgggcgcacgattacgtcaatgtttatcacactttacaaaaggacgtgcgtgtgtgtgtgtgaatgagtgtgcgagtgtgtgtgagtgaatgtgtgtgggggtgactgtgtgtgtgtgagtgagggtgtgtgaatgtgtgtgggggtgagtgtgtgagtgtgtgtgtgagggtgtgtgaatgtgtgtgggggtgagtgtgtgggggtgattgtgagggtgtgtgaatgtgtgtggggtgagtgtgtgagtgtgtgagtgtgtggggggtgagtgtatgagtgtgtgtgagtgtgtggggtgactgagtgtgagggtgtgtgaatgtgtgtggggcgagtgtgtgagtgtgtgagtgtgtgtgaatgtgtgtgtggggggggtgtgtgggtgagtgtgtgagtgtgtgtgagtgtgtgggggtgactgagggtgtgtgaatgtgtgtgggggtgagtgtgtgagtgtgtgagtgtgtgagagtgtgtggggtgagtgtatgagagtgtgagagtgtgtgtgtgagagagagtgtgtgagagtgtgtgtgtgtgtgtgtgtgtacacagatgtcaggaggctactctctcactcctggagcagaactcctgaacggggcccaggaaggcttcagtgagaagaggaattggctcaattgcaccttccctgtcagccccgtagggtttcctgacacccagtgagacgccaaggatgaaagggctgtggggcagagatatgaggaggatgtttctccttcccctgggcttcggcttgaacttgcttatgcttctgaggtttcttccccgccccacctcaccccccaaaggacccctcatgggcaggtccactcccccgcactgttcacatccctgtcctctctcagcatccctcgcatgtagggtgctcaaaggttggggtcaccgccgggagcccaaatccgctgctgcctccctcgggctccctccactctggtcattcccctcatcactacctgccacgaggtggcgctgagactccagcatcccacacgggcggagcaaacgtgggtccctaattacccccgaccccagcccgcccaggcaacctcgtgccagggactactctggggacttcttagttttttctttcctccttttattccatcaagaatttaacatatagccgggtgcggtggctcacgcctgttatccctgcactttgggaggccgaggtgggcagatcacctgaggtcaggagttcaagactagcctggccaacatggcgaaaccctgtctctactaaaaatacaaaaattagccggacgtggtggtggatgcctgtaatcccagctactcgggaggctgaggtaggagaatcgcttgaacccgggaggcagaggttgcagcaagcctagagccaagatcacaacactgcactccagcctgggcaacagagcaagactctatctcgtgagccaccgtgcccagcctgaaaccccaatttttatatgaaatgaatttttaaaatcatgtgttgaggccgggcgcggtggctcatgcctgtaatcccagaactttgggaggcagaggcgggtgaatcacctgagttcaggagtttgggaccagcctggccaacatggtaaaaccccatctctactaaaaatacaaaaattagccaggcgtggtggtgcatgcctgtaatcccagatactcaggaggctgaggccggagaatcgcttgaacctgggaggcggaggttgcagtgagccgagatcgcgccactgcactccagcttggtgacagagcgagattctgtctcaaaaaaaaatttttttaattttctactaggcacatttttagaacgtaaaaataagcagatgaaatcaataatgttgattttaataacgttttatttatcccaatatatccaaaatattatcctttcaatatacaatcaataaaaagtattaatgagatattttccattctttttgtgtttggacccagttttcgatgtcttgtgtgtattttacatctcaacttggatgagtcacatttcaagggctcggaagccacatgtggctaggggctaccgaattgggctgggtagctgtcgtccctccacccaggggtcagctccaaggctgtaccatggcattctgcccaactggataccggcttggagcctaaggggtctcagggacccacctagccaccctgtgaaggagctttcctgttatacaggattatcgtatttctggacgctcataagcaggggagcccagctcgctcccaggccccacacctggcctccctgaggactgagaggaggacgaggcggctccccaaggtcttcattttgcaaataacaatgggtttcctttattgagcacaattctctctctctctctcttttatttttttgagaggagtctcactctgtcacccaggctggagtgtagtggcatgatctccactcactgcaacctctgcctcccgggttcaagcaattctcctgcctcagcctcctgagtagctgggattacaggcatgtgccaccacacccagctaatttttgtatttctagtagagacggggtttcaccacattggtcaggatggtctcaatctcctgacctcgtgatctgcccaccttggcctcccaaagtgctgggattacaggcgtgagccaccatgcccagcctgagcaaaattcttaatttaatatagtcaaatttatgaaacctgcaaagttctcccaaagccacaaacattgttttttatttgtttgtttgtttgtttgtttttagttggagtctcattctgtcacccaggctggagtgcagtggtgcaaccttggctcactgcaacgttcgcttcttcccaggttcaagtgattctcctgcctcagtctccaaagtagctgtggttacaggcacccaccaccacgctaatttttgtatttttagtagagacagggttttgccatgatggccaggctggtctcgaactgctgacctcaagtgatccacctgcctcagcctcccaaagtgctgggattacaggcatgagtcaccgtgcccggctgagttttcaaatcttattcatttccaggtgtcctttcagccccatatctcccactgagctgtgcggcaggatctcggctcactgcagcctggacctcccaggctcaagcgattctcctccctcagcctcccaagtagctgggattacaggcatgtaccaccacgcccatatattttttgtattttttgtagagatgggattttgccatgttgcccaggctggtgtcaaactcctgggctaaagcagtccttctgcctcggcctcccgaagtgctgggtttatgggcatgagccatggcatcccgcctgatcgtaggattttaaactatttcatacaaccactttcaaaccacacacacacatccgtggcggctccagatcacacttgtaaaacaatgtaaggaggggcgtcaggaatatagaaagagatgccgaggatagagaagaaggcagagacagagggagaaaacctaagagagaacaaaggaggagaatccgataggacaaacagcctgaggcccttccgagctggcatctgcccggagcagctgacctaggggctctctgccaccggctctttagcaccccagaatcgttctgatgggcatgaggtggacccaacactcccccttatcctcttccccacctggtggtgagctacgtagaaacctactcatggggccctgctggtccatgcagggtccaggcaggatccaggggctaccctggtgctcacatctccccttcccttctggagtcgggagccaggctttggcctggatgctcccagcggttgggggtcagggtctgggtgggatgtaatagggggccctaaggtccagcatttcccaacagaaagaaagaagtacacgcttgctttggaagaagcagcggagggctcagttcccaggacagctgaagacacatccctgtggggcccaaagtgtctttctccccatccagagaccctgcccagaggagcaggccctggagctgcaacagaaaccggaggctggcccaagtccctctgggctgggctgggctgggctgggcagagctgggctgggctgggctgggctggggcagaggcaaaatcctgccagggtggttctctggggagaggggaattgaaaaggaaaagcatcaccaaggagggggagagggagggaggccgtgtgcgcacacgcacacacacacacacacacacacacacacacacacagcctccctgactgagcctgagcctccctgggaagaggcgcattcttctctctgctctctgagctttccgttgcttccctgcccatctgtgctctcagcagcaccagcaaagttggcctcaaacttgaacaaagctgcaggctccagcgtctttctgggagctccgcgggggcagcaggcaggccccagcctctgaactcagctggcttgagaagctcagcccaacccttccagcacccagccggccctccgtctcctgagggacgcccctgcccccgacctggaggccctcagtctgggctggggaatggcgcgctgaggtccctccagagccccttgtcccagcctggagctgcagccgcgcaaggcccaggcccccatggcccacccggtgcagtccgagtttccttcagcacaggagccaggctccgccgcattcctggacctgccggagatggagatactcctcaccaaggcagagaacaaggatgacaagaccctgaatctgtccaagaccctctcggggcctctggatctggagcagaacagccagggcctacccttcaaggccatctccgaggggcacctggaggccccactgcctcggtccccctcccgggccagctcaaggagggcgtcctccatcgccaccacctcctatgcccaagaccaagaagcccccagagattacctcatcctggccgtcgtcgcctgcttctgccccgtctggcccctcaacctcatccccctcatcatttccatcatggtaagtgctggtctttgttccaggggcaggggctgggcccaggggtcggcaggtgtttcccccaggcaggcaccaaacactgcccagggtgtggagaagagagagctgggagtggggggcttggggaagactcctttcctcactggcctcctccttcctcttagagaggggccccggggctggaagagctcctgctctgttctctcatctctgcttctgggcatcagagctcgactttgcacctgtgtctgctggggaggggccctcagggagctgcctggcgatacatcccgcggggcagaaagatagccaggctgggggtcttgctgttttaggagggacgggcggtcccaaagg

SEQ ID NO: 3802 - DNA, 6000 bp, Homo sapiens
cggttttgaggggggacgccgccccctggccggccggccgcagccccctcctctccgccccctcggaccaccgccgccgcggctgcagcaaaagggcgctcgcacgcaccgccgagctccggggaaagcgcccggcgcgcgtttgcaggaccgagcgatcggcggagcggggcgcctcccttcctccccccggcttccccctcctctcctcctccctccctcccttgctctctagctccctccctctcgctccgctccccgcccccgctcacggagcgcctcccatacaaaatttatgaaagtgctctcagctcgcagtgccgagcgccgtcctattcccaaggcagcagcgctcagccgcgcggcgccgcctcccaaggtgttttcactgcgcccgcccccggggaagatgctcggcccgcgtccgtccaggcacctgcccccagtccccaagccggtcctcggaccactccacgcccctccccggccccgcaggcctcctggagcccgaacccgcagcccagcccccgcccgctcgcccttcgcggctggaggtcatcgggagacgcggctgggacgcgaggaccgccgcccagagtacggatcgcgagtccgctccctgccccgtctcctccctggccagcgccccttctcccagtctcgacggctcttccccgcactgaacagctccagcgaacccggctgccccgcaccccgagtcccaggacactgttctttcgtggggagaggaggggagcaagcattcggaaagggccagctgcaaattccagggagaaggaaggacccgtgcgggttcgggtgggccgtctccgcctgggtggggtggcggcggggggtctctgatctcccttggtccacacagaccccgccggggggttcgcggaaaatggaggaggcgccgcttggaaagcgggtcccgcaggggcctgttgagctgagggaagagaaggttcgggccaggcgagatcctgggtggaggcggcaccccctgctggcctgggatcagagggattcggagagaagaaaaagcggatggaccaaggctgtcattcaacacacattcaccgaaggctcagcatgtgtggggcactactgttcctgaaaattcagcagacgaaaaagacttgtctttgccctgtcctcaaggagtttccattttaataggggccaaatgaggaaagtccagagaagatgggaagattgtgcttcgaagaaaaacaagcagagtattgttctggagctgacacgggggtagaggtggcagtcaaggaaagctgctctgagcaggtgacatccaagcagaaatccaactgaatccctccttgtaggaaaaggtgacatgataggaaggtcaaaaagaaggtcagggccgggcgcggtggctcacgcctgtaatcctagcactttgggaggcggaggcaggcagatcacgaggtcaggagttcgagaccaccctggcccgcatggtgaaacccggtctctaataaaaatacaaaaattagccgggcatggtggcaggcgcctgtaatcccaggtactcgggaggctgaggcaggagactcgcttgaacccgggaggcggaggttgcagtgagccgagatcgcgccactgcactccagcctgggtgacagagtgagactctgtctcaaaaaaaaaaaaaaaaaaagggccaggctgggcgcggtggctcacacctgtaatcccagcactttgggaggctgagcagatcacttgaggtcaggagttcgagaccagcctggccaaggtgaaaccccgtctctattaaaaatacaaaaattagccgagcgtggtggtgtgcgcctgtaatcccagctacttgggaggctacgggagaatctcttgaacacaggagatggagattgcaatgagccgagatcacaccactgcactcctgcctgggtgacagagcgagactgtctcaaaaaaacaaaacaaacaaaaaaaaagaaggccagtctgacgtattcactcacacctgcatttggtggcactgaagcttcagatttgagctaaggctctgggcttggacttccagaagcttcaggtgtcgtgggaaaagaaagacccgcaaaccatcttagagtgtgactgacagaagtcacaaagactgcgaaagggctctgctagctctgccaggggctaccagataatcaggaaacagtcacagaagaggtgcccttggagttaggtcttgaaggctgagttcaccacactaagaagggggaagggcattccacgtagatgcttgaaggtgagaagtaaccttgttctgaagatagataagattggtccttcctgaggaccatgggctcacacctataatctcaccactttggaaggctggggtgggaggattgcttgaggccaggagtttgagaccagcctgggcaacagtgtgagactccatctctatttcaaaaaaatgtttaaagataaaaaaagatggatggctgctactctgggcacactgcccatggccacaggagcagttaaacacgaacaaaaaaagattggtccctcttggcgtagaacagaaggtgaggtattccttctcttagccaccagctacaaggcagtgctcaccccactgcctgccttagccctgacactgggagcctgagaggtcctctgtaagtacaccgaggcccagagaggatgaacaacttgctcaacgtcacatcacagatcagcgataaagtgtgggcctgactcagggcctgaatgtgggataatcctccttccacctctccaagccgcctccccatgaccccctagcccacaaactctagcgtcttaggaaaagttggctggggctgggcgtgagtgtgagaagcagagttatttcaggcctcaggagggttgggtgctgccttggagtccagccagggagtgggggcgagtgaaggcgggtgttgtggtgtactgtgggggtgcactgtgcccgccttcttgtcaggcagtaattactcagactgctgagtaactcaggcagggagacccccacagacagatggaggtgccctcagcccaagctgaatggcagcccccaatgtcctgcaccacggagtcttggggaagcattctcacatctgttcttcatgtccagttctcctaggcatcatccggcttcctaatgggggccagagcagctcattaggcacagcgggtgcggggcaatgttactagagggatgggacttttgccatcaaacaggccccacctctgatgagggaaaggtcccaagggatatggcgcctgctagggagaagccattgctcagttggagccagtcctttccccttgaaactccatgctgcagtcacagctaaggctgtccacaggctgggcagcagtgtcctgagagaggaggggctgagctcccagaattcagatcttgcaccctggggatccagagaagctggggggagatgggaaggtctagtccggacgcttatcgagttgaggggagtgttcctgggacccacattggtcacttttctgtctagagctacctgtcctaagagtgccggtggcctggggggcacagcactgacccttggtgatggtccctcagctgctcactccctgcctgtccagccattcctcctctctgggcagcctcccaggcagggcctgtctctggctgcttgtttttacttctccctgcaccttaattaggggtttccaagcagggagggcctctgggggagcccgaggacacagagctgacttaaagggccagctgtgatcacagcaccaccgcagagagaggaggaggatgccagggggctgggtagaccgtcagacctggaagaccattgttccacgggacagactgctgagggccagtcctgcaggtactttgctcttccacaggtcaaagccgtctcactggctgtcttctctttggggtctctggggctctggccagtgatcaggagaaagaccagccctgaggggcagggcaaaggttggccagggtccagaagggttagacatcacagtcctccactgcccaccttcccaggaaagcaccctcaggctgtgggccttccccagaggggcagtttctacagggtctacgcagtggattctaaaggtgataaaggctgggtgcagtggctcgcgcctgtaatcccagcactttgggaggccaaagtgggaggattgcttgagtccagaggttcaagaccagcctgagcaaaatagtgaaaccttatctctactaaaaaaaaaaaaaaaaaaaaaaaaaaaaattagctgaacgtacgcctgtggtcccgggtactcagggggctgaggcaggaagatgaattgagcccagaaggttgagactgctgtgaaccatgatcgcaccactgcactccagcctgggcgacagaccaagaccctgtctcaaaaaaaataatttaaaaagctgataagggcgatccacaaacctgcaccaagactctcaacttggagctgggctggtggtccctgagttctgtcctgccggacagtagagtccccctaggtagggaacgtggccccacacggcggccgggtgaccgaccactgcttaccaggaggggagactggcagggggggctcaaggaacatctggtgggtgtccccttcacaagactcggcctgcagagttcgtgcagggagttcgcacataggagagcaccggtccgggagtgccaggctcgtgcccggccggggagaggagtgggagactaagtcgcagggcaagggcaactgcatagtcggggacctctagggaatcctgagtcccggcattctgggctggggtggagcccactacagccccgcccctatctcctcctttatggccccgcccagcgggtatcccccgcccccgctggccgatcggcgatcgatcgcaatgtctgcgctctccgcgttcttccagcgctgtctttttagtaccacatgcgcaggcaggtgatggcggcgctggtcgtatccggggcagcggagcagggcggccgagacggccctggcagaggtgggtgctggaacgctgcgccctccagacctcgcatctcggggcggggcccccaagttagggacaggaccaaccccctttaacggcggcggcgcctttctccgctagatcccgctgttagtcgccttgggccgctgtcaccagctcggggtcgctgtcagccggagcccaggggtaccagtcttttgcagctttagggcacgaccgagagcagcccttaatcctccaatcggaaactacagccttgtcttggcgggtagacggataaaatggactcgacggggagggaaagggccaggccagatgcagcgggcattttacgagtgcgccctcagggaatgctttcagggaagaggcaaaaggtttcattcgccaggcattaactgagcgcccaccgaatgccaggcctgcgctgggtgcaggtactagaatcagagatctcagtctactgggggaatgttaatgtaaacatatcatagccacgtgataaaggaggaggtgcctactggtccctgggacacattgaagggctaatgttagcagttccttacacgccagcgaccactagggacctgtcagaggaggatctgtaatgggcctaggaagcctaggctgattgtccaaggcttttgaaacaactggccaaaaaccatagcagtggtaacgttcaaatctgatctcagggccccagcctccgctggaccatccccaccgccgcccacacagtgggtgaagcctcatgtctgggcgggtccctcctatcatagtgtggggccctagcagaagttgtggcacatagcacagtctcaatacatattcgttgaataagttaatttcttgccttttcatatcctcagactctgtggctcctgaagagataacggggttgaactaagcttaattgtcggggcagggcatagtggcttacacctttagtctgagca

SEQ ID NO: 3803 - DNA, 6000 bp, Homo sapiens
tttccctcccacaaccatacacacactcagggaaaacccaaaacaaatctcccagcttgctgagagccctgcttgtccctgcaaatcccccctcccctaaacatttgggacagagaaagaaatcaatcccagtgtcttcaaagctagacccagagcaggtggtaggacctggggaggaccctaagaattctccaagctgcccctgaaatgcgctgagtgatcagtgggaggtctgccggtcgggggcggtggggggcacctgttcctcgggcacatttggggaagtagggcaaggatgggtttggagtgggaggtgcctgggagaaggtattcagttcctctacatcctacccctgtcactctaagtttctgcaatacaatgagccatccttggtggggagggtgagagctcagccatctggaaccagcacaggaacaggggaggggaacgaagaaaggggaggtcatctcatgctgggaacctcccactcccctgctgccccatcgccctcccctgctcctccctccccctccccttctcccccatccccctcccctgctcccccatcccctgctgccccatccccctcccctgctgccaccctccctcccctgctcccccaaacctctcttctccccccttcccctcccctgctccccctctctcccctccccttccccctcccctgctccccctcccctcccctgctccccatccccctccccagtttccccatcccctcccctgctgccccattcccctcccctactcccccttccccctcccctgctcccccctcccctgctgccccctcccctcctcccccactcccctgctgccccatccccctcccctgctgctgccccatccccctcccctgctgctgccctccctcccctgctgccccatcttgttgccacagactcacttccctgctcccaccgtcttgccccttggggatgctctctggggctcaggccaatttgcatacattttaatctataaaaaattaagtgctgtggctgacttagacgcctgggctgcattctaaggaggtgaataatctgcttctgggcacagcctgatttggggaagggggtggaggagggggtgactagcaggagctcaactcttccactgccacacccccaggggaaggatggggggaccccagtcactgagccaggctccacgccccaagtgtgagtctctttcaaggaagagggggttctcctccattcctagggtgagttcaggggtacaaggtcttccccacccaccccctcccccagtgattcaggcctggcagcagttcccacggcagtgttctggccagagcctcctcttcctgatgcaggaggcgtgtaggtggtgccatgtgctatgggggagctgtgcctgggtccccccatcctgggcaccaagggccctgcctgcggtggggaggtagtgggggtccggacgagagggccctgcctgtggtggggaggtagtgggggtccgggtgagggggccctgcctgtggtggggagggggtgggggccctgcctgtggtggggagggagtgggggtcccggcaagagggaggctgtgtgtattcatacagccacgcccatgcccaccacagcactcagcgcgggagtgaggacctttgggtgtgtgtgcgtgctcacggctctgggtgggtgagtcagggcatggggcgtctgtgttttgaccccacgtgtgccggagtgagggttggggtccctcctgcagcctgagcctgggtagaggaatgagggtcctcacgcagcaacagttccaggagcggctgccaggctggggcaggcggcagctgtgcccctcctaatctttgttggcagaagtggcagctgccatcccgaggaactgggagaggtagggagagaggagctgggccctgagacaccctcccagggttgggtctctcctacctcagtccctgtgtccctgtcccaccgttccccgcccctgtgcccgcaggttcacggaggccgaagtgatggtgatgggtgacgtgacctacggggcttgctgtgtggatgacttcacagcgagggccctgggagctgacttcttggtgcactacggccacagttgcctgagtatggtggggccaggacacctggacggtggcggggctggcagggaggcaggctgcacattcatcttccccatggcagtgccttcttgtcctgcttggagacacaaggtccctcctggtttctggggtggcctctgccttcccgctctgcaggtagatctttcctttggatttggttgccttggcaacggtgctctgtcccagatgcaggtgtttgaaaggctgttggttgtagagcaggctgggccccggccgggtgacagagaagtctgattgagaaggagcttctaggggatctgtgacccccctcttctcctaccctgtccttttacccccaggctgaagccactgcgcctggctgctcagagacctgagcctggccgggccctctgctgctcctgccttcccaaacagcccctgaactcctccctcccacagttcccatggacacctcggcccaagacttccgggtgctgtacgtctttgtggacatccggatagacactacacacctcctggactctctccgcctcacctttcccccagccactgcccttgccctggtcagcaccattcagtttgtgtcgaccttgcaggtgggtggaacgaggatcctcggcctcctgcagggtggacagcggccactctccagctgttgcgggatccccaggtgctccaggctgtttctcagccctggctctcctgccccagccgctggcttcacttccctcgtcattcctacaggcagccgcccaggagctgaaagccgagtatcgtgtgagtgtcccacagtgcaagcccctgtcccctggagagatcctgggctgcacatccccccgactgtccaaagaggtggaggccgttgtgtaagttaaaaatgggggccaagtaagtcctagagacatgcgtgtaccctgggagggagcctgaggttcatcatccaggaaagaaaccaaatctaatgctccttacctgtgagcccgaggtcacactgcaaggtagggaccaaacagggagcagacctcaggtttactgtcgctttctccactgcccagtccatcatccagaaggctgtgcagggtgggggcaggaatcagagggcctgatgggggttgagggtgggctggaaatggtgggaatataattggagaagatggatgggcacgcccaggctgcagccccattaatttaccatccggacagctaacaagcagaagcagcgtgtctcctgccgcctaattattttaggtaatggaaatgcttaatgttgtgtgaatgcagccagcctgagagccgacggctcccccgactgggactagggaagggagtcccgttccgtactaatggcagggagggagggtcgctccctgactcagtcccacctctggggctttggaggctgtttccacaggcctgacacccctgtccctagacaggcccacatcagggccttccccagcccagatctggcagccctgctccccgagcagcactgagtggcattccccctgtgcccacgtcactcagtctctacccttggggtcttcaaagtgtatgttggagggagggacaccctgagtgttagccattcatcagaatgaagtgtggtctccaagagggagagaaggagctgccacaggcaggttatcttccacgctctgtaatcttcatgggctgggaagctactgtcagggacagcatgtctgggggcacacttggtacagcctgggttgagcctcagacacactgcttcctagctgtttaatactaggcgagtttcttaacatccctgagcctcagttgttaccttctgtaaaacaggtatactatacgtatctgggaggattaggagataggactgcgtgaactaattcacagcaggtacttagtctatgcctggtacacagaaggcacaagtccaataaacagtagctgttggccgggcacagtggctcacgcctgtaatctcaacactttgggaggccaaggcaggagaattgcatatgtccaggagtttgagaccagcttggggaatataatgaaaccctgttctctccaaaaaaaaaaaaaaaaaaaaaaaaaagaattagctgggtacagtgtccatgcctgtagtcccagctcctcaggaggcttaggtgagaggatcgcttgagcctgggaggttgaggctgcagcgagccatgaccgagtcactcaacctgggtgacagagtaagaccctgcctcaaaaaaacaaaatgaaaatccggtagcttttgttataactcagtaactggccccaagagctagtttgggcagaaagtagccattgtatgccctgcaacctcatgtacagcatagatcagaggtccccaacccctggtcccatgtcctgttaggaaacctgccgcacagtagaaggtgaggggtgggccagccagcgtgaccacctgagctccgcctcctgtcagatccgccgcggcattagattcttgtaggagctcaaaccctatcgtgacctgtacatgcgagggatctaggttgcatgatctttatgagatcctaatgcctgatgatctgaggtgagacagtttcatcctgaaaccatcccccaatcccacccgtgtcttccacaaaacctgttcccagtgccaaaaatattggttactgctggcgtagatgactccttgaacactactgtccacatctgtattgagcttgtgaaggagaatctgttccccaacttccaaatgaggatctctagaaccccaggtggcctcaccacggccggctgctccttcactcttcctcagaagcttggggtgggacggttcttagattctgcattatgtaaatagagggaccgtagagtcatccaattcaaactccttatttcacacgtgagaaaaccaaggctccaagaggtgaagtgaaggcttgtcccagtttacacagaggcacagcacagccagctgtgaactcagtcctctggacttttttttttttttgagacagagtcttgttctgtcgcccaggctggagtgcagaggtgcgatctcggctcactgcagcctctgcctcccgggttcaagtgattatcctgcttcagcctccccagtagctgggactacaggtgcccgccaccacgcccagctaagtttttgtatttttagtagagacagggtttcaccgtgttagccaggatggtcttgatctcctgacctcgtgatccacccgcctcggcctcccaaagtgttgggattacaggcatgagccactgcacctggcagccctgtggacttctttttttttttttttctttttgagacggagtctcactctgtcacccaggctggagtgcagtggcgcgatctcagctcactgcaagctacgcctcccgggttcacgccattctcctgcctcagcctcccgagtagctgggactacaggcgcccgtcaccacacccagctaagtttttgtatttttagtagagacggggtttcactgtgttagccaggatggtctcgatctcctgacctcatgatccgcccgcctcggtctcccaaagtgctgggattacaggcgtgagccaccgcgcccggccagccctgtggacttctaagccagcgagtgcctcttctgctgccctaaaccacacttagcctcctttccacccctgcaggtatcttggagatggccgcttccatctggagtctgtcatgattgccaaccccaatgtccccgcttaccggtatgggctgggccgggctgggctgaccagctggtgaggggtgagattccctgccactgaggtcctcaattggttgcatccccatttcctggccactaagccaccagccctaagggtctgaggcacttgggccctggatct

SEQ ID NO: 3804 - DNA, 6000 bp, Homo sapiens
agggaccaaacagggagcagacctcaggtttactgtcgctttctccactgcccagtccatcatccagaaggctgtgcagggtgggggcaggaatcagagggcctgatgggggttgagggtgggctggaaatggtgggaatataattggagaagatggatgggcacgcccaggctgcagccccattaatttaccatccggacagctaacaagcagaagcagcgtgtctcctgccgcctaattattttaggtaatggaaatgcttaatgttgtgtgaatgcagccagcctgagagccgacggctcccccgactgggactagggaagggagtcccgttccgtactaatggcagggagggagggtcgctccctgactcagtcccacctctggggctttggaggctgtttccacaggcctgacacccctgtccctagacaggcccacatcagggccttccccagcccagatctggcagccctgctccccgagcagcactgagtggcattccccctgtgcccacgtcactcagtctctacccttggggtcttcaaagtgtatgttggagggagggacaccctgagtgttagccattcatcagaatgaagtgtggtctccaagagggagagaaggagctgccacaggcaggttatcttccacgctctgtaatcttcatgggctgggaagctactgtcagggacagcatgtctgggggcacacttggtacagcctgggttgagcctcagacacactgcttcctagctgtttaatactaggcgagtttcttaacatccctgagcctcagttgttaccttctgtaaaacaggtatactatacgtatctgggaggattaggagataggactgcgtgaactaattcacagcaggtacttagtctatgcctggtacacagaaggcacaagtccaataaacagtagctgttggccgggcacagtggctcacgcctgtaatctcaacactttgggaggccaaggcaggagaattgcatatgtccaggagtttgagaccagcttggggaatataatgaaaccctgttctctccaaaaaaaaaaaaaaaaaaaaaaaaaagaattagctgggtacagtgtccatgcctgtagtcccagctcctcaggaggcttaggtgagaggatcgcttgagcctgggaggttgaggctgcagcgagccatgaccgagtcactcaacctgggtgacagagtaagaccctgcctcaaaaaaacaaaatgaaaatccggtagcttttgttataactcagtaactggccccaagagctagtttgggcagaaagtagccattgtatgccctgcaacctcatgtacagcatagatcagaggtccccaacccctggtcccatgtcctgttaggaaacctgccgcacagtagaaggtgaggggtgggccagccagcgtgaccacctgagctccgcctcctgtcagatccgccgcggcattagattcttgtaggagctcaaaccctatcgtgacctgtacatgcgagggatctaggttgcatgatctttatgagatcctaatgcctgatgatctgaggtgagacagtttcatcctgaaaccatcccccaatcccacccgtgtcttccacaaaacctgttcccagtgccaaaaatattggttactgctggcgtagatgactccttgaacactactgtccacatctgtattgagcttgtgaaggagaatctgttccccaacttccaaatgaggatctctagaaccccaggtggcctcaccacggccggctgctccttcactcttcctcagaagcttggggtgggacggttcttagattctgcattatgtaaatagagggaccgtagagtcatccaattcaaactccttatttcacacgtgagaaaaccaaggctccaagaggtgaagtgaaggcttgtcccagtttacacagaggcacagcacagccagctgtgaactcagtcctctggacttttttttttttttgagacagagtcttgttctgtcgcccaggctggagtgcagaggtgcgatctcggctcactgcagcctctgcctcccgggttcaagtgattatcctgcttcagcctccccagtagctgggactacaggtgcccgccaccacgcccagctaagtttttgtatttttagtagagacagggtttcaccgtgttagccaggatggtcttgatctcctgacctcgtgatccacccgcctcggcctcccaaagtgttgggattacaggcatgagccactgcacctggcagccctgtggacttctttttttttttttttctttttgagacggagtctcactctgtcacccaggctggagtgcagtggcgcgatctcagctcactgcaagctacgcctcccgggttcacgccattctcctgcctcagcctcccgagtagctgggactacaggcgcccgtcaccacacccagctaagtttttgtatttttagtagagacggggtttcactgtgttagccaggatggtctcgatctcctgacctcatgatccgcccgcctcggtctcccaaagtgctgggattacaggcgtgagccaccgcgcccggccagccctgtggacttctaagccagcgagtgcctcttctgctgccctaaaccacacttagcctcctttccacccctgcaggtatcttggagatggccgcttccatctggagtctgtcatgattgccaaccccaatgtccccgcttaccggtatgggctgggccgggctgggctgaccagctggtgaggggtgagattccctgccactgaggtcctcaattggttgcatccccatttcctggccactaagccaccagccctaagggtctgaggcacttgggccctggatctgggcattagccccagggctgctgttgcctacccgtctcctggggtttacacggagatcttaaagccgcccactcttgtctgctccagctgtgggacaggtcttcctaatgacagtccccgctcttgcctctgttcttaattacctgcgtggggcctaaaggttcaggagcccacggggctgagtcaggagctgtgtgcataatactggtcctgacagtggctgccacagtgaccctgactgcttcttttccaggtatgacccatatagcaaagtcctatccagagaacactatgaccaccagcgcatgcaggctgctcgccaagaagccatagccactgcccgctcagctaagtcctggggccttattctgggcactttgggccgccagggcagtcctaagatcctggaggtcagtgggctcaggacagcctctggaggagggaagtgactgggaacacagctgggaaaaccagtaggccacaggttcagctttggctgcttgaccaggtgacccccaccctgcctccctctcccaacagcacctggaatctcgactccgagccttgggcctttcctttgtgaggctgctgctctctgagatcttccccagcaagcttagcctacttcctgaggtggatgtgtgagtatctgcctggctatgactggctaaagaagcttagaagctgggtcttgcccagctcgtcttgaaggctggagccaacaggaattgcttccatggtcatggaattttactgtttacagagacctccctgggagggctaactgggtcatacctgctttgggactttggggctcagaggcaatggcaacatcacatttgtccttgtgagatgagtttgagcggtggctgacacctgccctgtaccaggtactaaatgtggttctggggatactatcaccagtgagctgccctggaaagctcattgtcggcagaggaaacaggagaaaacacgcaacaatacagtattccaaacagcagtgggtcactgtctttactttaggattcataaagcctgttaatgaatgggtgtgctgggggcactgtcatgttcttcagcatgctgcctgggcgacgaggaggcccttcctagggtctgacctggcttcccttcccaggtgggtgcaggtggcatgtccacgtctctccattgactggggcacagccttccccaagccgctgctgacaccctatgaggtaacaccaagctctgggagagagtgggctttggacgtggttctcaaaggtgaggtctggagtggagtggggtgggtgggcagcacttcgttatgttcgtagattccggagtctgtctcgatttctccagcggagtcacttcctagctgtgtagccttaggcaaggccctgaaccacacagttcccttctgtggcaggggacagtgtgcccttcacaggccgtcgtgaggactgaattcagtaatccaggggcagaaaaacactggcagatgttattgtccctccctcccctcccctaggcggccgtggctctgagggacatttcctggcagcagccctacccgatggacttctacgctggcagctccttggggccctggacggtgaaccacggccaggaccgccgtccccacgccccgggccggcccgcgcgggggaaggtaggcgggggcttccaggagggaggagagaccgcgcctgggcactggccgccgccctgcgaccgcgacgggaaacgcacaggagcggagcggagggaaacgcagggtcgcaggagcgagaccctaaccaaagtctgcgacctcaggtgcaggaggggtccgcgcgtcccccttcggccgtggcttgcgaggactgcagctgcagggacgagaaggtggcgccgctggctccttgacgcgctcccgggcctcaggtatcagcccccgctctgggtgcgccccgccttttgccgttgtcatgggaacgccttggcgctccgaggcccgccctcggggcggtgctgacgttcggttccgccccgtgcattgtgcttccgctcggggaaagaccgcttccggtgcttccgtcgctccttgccgggcataatggccgcgcagcgacccctgcgggtcctgtgcctggcgggcttccggcagagcgagcggggcttccgtgagaagaccggggcgctgaggaaggcgctgcggggtcgcgccgagctcgtgtgcctcagcggcccgcacccggtccccgaccccccgggccccgagggcgccagatcagacttcggtgagacaagccccgctccggaaacgcactcagtttcctccatcttgtttcgtccccctcgacacccttcagcatcccccaccctgcgtccacccgcattcctcccacccagtccacacccttcatttctcgcgacccataccctctttgctcaaactgcagcctgtcctcccaggcttccgccttcaccgtcttcctccgctgtctcctgttcaggccaatccactcatttcccccctctcatttcccccagacttttgcctcgattccctttttctctctgtcatctcgaaccctcctgccctttctcatttctttccttcctggagcctcccatgccctaatcccatcctttttcctcatatcgctgtagggtcctgccctccggaggagcagcctcgaggctggtggttttcagagcaggaggccgacgttttctccgcattggaagagcccgccgtctgcaggggcctggaggaatcactggggatggtggcacaggcactgaacaggctggggccttttgacggccttcttggtttcagccaaggggctgcgctagcagcccttgtgtgtgccctgggccaggcaggcgatccccgcttccccttgccacggtttatcctcttggtgtctggtttctgtccccggggcattgggttcaaggaatccatcctgcaaaggcccttgtcattgccttcgctccatgtttttggggacactgacaaagtcatcccctctcaggagagtgtgcaactggccagccaatttcccggagccatcaccctcacccactctggtggccacttcattccagcagctgcaccccagcgtcaggcctacctcaagttcttggacc

SEQ ID NO: 3805 - DNA, 6000 bp, Homo sapiens
tccggcttccggattcaaacaattctctgtcctcagcctcctgagtagctgggattacgggcatgtgccatgatgcccagctaattttgtatttttggtagagacggggtttctccatgttggtcaggctggtctcaaactcccgacttcgggtggtccacctgcctcagcgtcccaaagtgttgggattacaggcgtgagacaccgtgcccggcctgagtttttttgtttttttgagacggaatctccctctgtcacccaggctagagtgcagtggcgcgatctcagctcactgcaacctccctcttttgggttcaagcgattctcctccctcagccttccaagtagctggtactacaggtgcgcaccaccacgcccagctaattttttctatttttgtagagatggggtttcgccgtgttgcccaggctggtctcgaactcctgagctctggcaatctgcccacctcagcctcccaaagtgctagggttacgggcgtgagccactgcacggggccagggctggcttcttgttggtgtcctctgcaccctaccagagccattccaagtggcatggccccaagaccatctccctaagaggtcaggtgtgtgtatgaggtgggtggatgttgttaatatctattcagcaaacttttattgagcatttactaagcaccaagcactgttttaggggcagtggatattctacaatgtaccaaaggaacctgggaactgccaaaaagggcatgaccaagggaggtaaactgaggctcgcaaaccgaggctaattaagcgacttatttgcttacttgcttgttggctgtgttgcctaatagattgtgagttgtgtgggaggcaaatagattgtgagttgtgtgggaggcaaatagattgtgagttgtgtgggaggcaggaacccgggtggtgttggtcaccacaggatccttgacacactagatactaaaaaaatatgaatgaatagactctgacgaagtctccagtgagtcccctagttctgagtcccccggggctggcagctatgacagaaacacaagtgctacacttcaggtcccagtgtacagtgacggcttcagatgagggctgcgtctcactttgtgggtgcgtgactgggcaaaacacttcccttctcggagccaattgagttttctacactgtatgatgggggtaactaaaggtctctcccctgtgggcagttctcatcagaaactgtgttcaccacccagttaacactctaaaagtgtagctccatcagtggctgtggaagtgcagagttaggaagactcagactatacaaacataaagtaaaaaaagtgtatactgctgcttctcagagggtccacacacctccagtgggtggtggatgatcactgcttgtttttgtttttttgtttgcttgtttgttttgtttttgagatggagtcttacttttgttgcccaggctggagtgcaatggcgtgatctcagctcactgcaacctccgcctcccaggttcaagcgattctcctgcctcagcctccccagtagctgggattacaggcgtcttctaccacgcccagctactttttgcatttttgtagagatgggggggtttcaccatgttggccaggctggtctcgaactcctgacttcaggtgatccacctgcctcggcctcccaaagtgctgggattacaggcgtgagccaccgcgcccggacttgtttttgtttttgtttgagacggagtctcactctcgccgaggctggagtgcagtggcgtgatcctggctcactgcaacctccgcctgccgggttcaagcaattctcctgcctcagcctccagagtagctgggattataggtgtgcgccaccatgcctggctaatttcttttgtgttattattattatttttttgagacagagtcttgggctgttgccaggcgagtgcagtggcgcaatctgagctcactgcaaccaccacctcccgggttcaagtgattctcctgcctcagcctcctgagtagctgggaacacaggcacatgccaccacgcctggctaatttttgtatttttagtagagacggggtttcaccatgttggccaggctggtctcaaactcctgacttcaggtgatccacctgcctcggcctcccaaaatgctgagattacaggcatgagccaccgtgcccggcctgtttgtttgtttgttttgagacagactcttgctctgttgcccaggctggagtgcagtggcgcaatcttggctcactgcagcctcgacctctggtgttcaagcaattctcgtgcctcagcatacgccaccatgccgggctgatttttgtatttttaatacattagattttgtaatttttgtattttcgctgcgttgaacaagatgctctggaacccctcacctcaagtgatctgcctgccttagcctcccaaagtgctgggattatgggtgtgagcccctacacacctgggccatggaggcttttttttcttttattgcatgatgcctaggtttggggtacgaatgagcccgtcacctaggtactgagcatagtacctgaaagttagttttgttttgtctttttttttgagacagagtctcactctgtcgcccaggctggagtgcaatggcatggtctcggctcactgcaacctctgtgtcccgggttcaagcgattctcccacttcagcctcccaagtagctgggactacaggcatatgccaccatgcctggctaagttttgtatttttagtagagacagggtttcactatgttggcgaggctggtcttgaactcctgatctcgtgttcctcctgcctcggcctcccaaagggctgggattacaggcatgagccaccatgcccgcccccgaaagttagtttttcaacatttgtctcctatccctacctccccactctggtagtccccagtgtttatctgtcccatcttcatgtccatgcatacccaatgtttacctcccacttataagtgagaagatgaggtatttggttatctgttcctgtgtcagtttgcttaggataatgacctccagctgcatctgtgttgctgcaaaggacattatttcattatttatttatttatttatttttgagacagagtcttgctctgttgcccagcctggagtgcaacggcgctatctcggctcactgcaacctccgcctcccaggctcaagtaattcccttgcctcagcctcccgagtagctgggactacaggtgcctgccaccacacccaaataatttttgtattttcagtagagatggggtttccctttgctggccaggctggtctccaactcctgacctcaagtgatccacctgcctcggcctcccaaagtgctggaattacaggtgtgagccaccgcaccaggcttcattcttttttatgactgcatagtattccatggtgtacatttatcacattttctttatccaatccactgttggtgggcacctgagttgattccatgtctttgctattgtaaatagcattgcggtgaacaccactgtactaagttatagatctatcatgcttttatgtttgggacattgcataaggtattcacttgtggaactgataacttcctgtttacttactaatgataacggccagcatttatatggcacttcctctcaggtgcagctctccctagctcattcttcctcatgaccctatgaaatgaggcctattattatcagcatgttaaagatgaggacacacagaggtgaggtaatttgtccactgtcacacagcaagaaagtggcaaaggcaggatatgaaccaggggctgactggtttcagtcagggcccttaccctctgtggtctctcaaaattaatttcttcttcttctttttttttttgagacagggtcttgctgtctcccagactggagtgcagtggcatgactatggggaactacaacctcgacttcctggactcaagcgatcctcctgcctcagcctcccaagtagctgggagtacaagcacacaccaccatgctgggctaatttttgtttggacagggtctcgctatgttgcccaggctggataaattattattattattactatttttgagacagagtttccctcttgtcgcccaggctggagtgcaatggtgtgatctcggctcactgcaacctctgccttccggattcaagcgattctcctgcctcagcctcccaagcagctgggattacaggcgtgcaccaccacacccagctaagttttgtattattagtagagaaggggtttcaccatgttggccaggctggtctcgaactcctgacctcaggtgatctaccctcctcggcctcccaaagtgttgggattacaggtgtgagccactgcgcctggccgataaattataaaaaaaaaaaatacgttgaagtaaatattatgggtagtaccgccaagatactagaacacatgttaaggcttaaaaaaacagaggccgggcactttgggaggccgagaatagcttgaacccaggggacggaggttgcggtgagcctagatcgtgccactgcactccagcctgggcgaaagagcgaaactccgtctcaaaacaaaacaaaatataacacaacaacaacaaaatcacaatctgtctcgattactcatttattcaacccgcattcacctactgtgtgcacgagcttttctagggcactggggaggcagaagggactaaaacaaagtataaatctccctgggctgcaagcatcgggagggcaggtccgggggctctgtgtccccactgggcccccagcactgcgcagcgcacacagtgggcgctcaccaagcgctcgctaagggcaacgcgtgaatccgtgtcccgccagcagggcgtttacggcctggtggggcggaaacggacccgacaccaccgcggcgtcctggggcttctgggaatcccatcagcgcggccagagcggccggggacaggctccgaggcaggcccgacccgcctccccggcgccgccgtggctcgacggagaccagctagggtgagtgatcgagccacgcctggggtcccggcctgtcaccccgaagtccccgccgccttccaccctgtcaggctccaactctgggctccggcgcggtcccacctccggggggaactcccctccatcccctccatttccttcatcctcgactcccgctatcttttcggacctgcggcgctccccctggacgcgtcctcccgccggacgaccgtcctccgcctcaggggacgcgcccaggacgcacggcgccccctccccagccggaccggcggtctgggagcgcggatcccttcagctcccccgcgccccagcatccggatcagggctcgaggcagtcgacaaactacacccgagctcgagcaggcgcgcccctgaacccccgggactggggctgggggcgggggcggcgccggcgcggagggcccagtccccggacgtccgcagcctcccattggctccgggtcccgccgctcggcctggcggggccggggctggtccgcccggacgcggggcggggattcctgaagcccctcctccggcgagggcggagggaagaggaggaggaggaggaggaggaagggggtggggggcggaacacaaaacctgagaggtttttttttttttttttccgtttgcatttaattaaaaaaaattttttttttttttgcatacccgaggggcgctccccggaacgggcgcgggcccggggcgcgcgggcctgggcgcggggcggcggcgggggcccggcagcggctgccgagcggccgccatgcgatcaggcagtgcgctgaccggcccggccggccggccccttctgggtcctccctttgcagcccgtgcggggccgtctcggagaccccgcgccgacggctgctcaaacatcagggtgagtttctcacaatgtagcaatttctctttaaatctcttaactctctctacctgcgagtcggggctgtgacag

SEQ ID NO: 3806 - DNA, 6000 bp, Homo sapiens
tgagttgtgtgggaggcaggaacccgggtggtgttggtcaccacaggatccttgacacactagatactaaaaaaatatgaatgaatagactctgacgaagtctccagtgagtcccctagttctgagtcccccggggctggcagctatgacagaaacacaagtgctacacttcaggtcccagtgtacagtgacggcttcagatgagggctgcgtctcactttgtgggtgcgtgactgggcaaaacacttcccttctcggagccaattgagttttctacactgtatgatgggggtaactaaaggtctctcccctgtgggcagttctcatcagaaactgtgttcaccacccagttaacactctaaaagtgtagctccatcagtggctgtggaagtgcagagttaggaagactcagactatacaaacataaagtaaaaaaagtgtatactgctgcttctcagagggtccacacacctccagtgggtggtggatgatcactgcttgtttttgtttttttgtttgcttgtttgttttgtttttgagatggagtcttacttttgttgcccaggctggagtgcaatggcgtgatctcagctcactgcaacctccgcctcccaggttcaagcgattctcctgcctcagcctccccagtagctgggattacaggcgtcttctaccacgcccagctactttttgcatttttgtagagatgggggggtttcaccatgttggccaggctggtctcgaactcctgacttcaggtgatccacctgcctcggcctcccaaagtgctgggattacaggcgtgagccaccgcgcccggacttgtttttgtttttgtttgagacggagtctcactctcgccgaggctggagtgcagtggcgtgatcctggctcactgcaacctccgcctgccgggttcaagcaattctcctgcctcagcctccagagtagctgggattataggtgtgcgccaccatgcctggctaatttcttttgtgttattattattatttttttgagacagagtcttgggctgttgccaggcgagtgcagtggcgcaatctgagctcactgcaaccaccacctcccgggttcaagtgattctcctgcctcagcctcctgagtagctgggaacacaggcacatgccaccacgcctggctaatttttgtatttttagtagagacggggtttcaccatgttggccaggctggtctcaaactcctgacttcaggtgatccacctgcctcggcctcccaaaatgctgagattacaggcatgagccaccgtgcccggcctgtttgtttgtttgttttgagacagactcttgctctgttgcccaggctggagtgcagtggcgcaatcttggctcactgcagcctcgacctctggtgttcaagcaattctcgtgcctcagcatacgccaccatgccgggctgatttttgtatttttaatacattagattttgtaatttttgtattttcgctgcgttgaacaagatgctctggaacccctcacctcaagtgatctgcctgccttagcctcccaaagtgctgggattatgggtgtgagcccctacacacctgggccatggaggcttttttttcttttattgcatgatgcctaggtttggggtacgaatgagcccgtcacctaggtactgagcatagtacctgaaagttagttttgttttgtctttttttttgagacagagtctcactctgtcgcccaggctggagtgcaatggcatggtctcggctcactgcaacctctgtgtcccgggttcaagcgattctcccacttcagcctcccaagtagctgggactacaggcatatgccaccatgcctggctaagttttgtatttttagtagagacagggtttcactatgttggcgaggctggtcttgaactcctgatctcgtgttcctcctgcctcggcctcccaaagggctgggattacaggcatgagccaccatgcccgcccccgaaagttagtttttcaacatttgtctcctatccctacctccccactctggtagtccccagtgtttatctgtcccatcttcatgtccatgcatacccaatgtttacctcccacttataagtgagaagatgaggtatttggttatctgttcctgtgtcagtttgcttaggataatgacctccagctgcatctgtgttgctgcaaaggacattatttcattatttatttatttatttatttttgagacagagtcttgctctgttgcccagcctggagtgcaacggcgctatctcggctcactgcaacctccgcctcccaggctcaagtaattcccttgcctcagcctcccgagtagctgggactacaggtgcctgccaccacacccaaataatttttgtattttcagtagagatggggtttccctttgctggccaggctggtctccaactcctgacctcaagtgatccacctgcctcggcctcccaaagtgctggaattacaggtgtgagccaccgcaccaggcttcattcttttttatgactgcatagtattccatggtgtacatttatcacattttctttatccaatccactgttggtgggcacctgagttgattccatgtctttgctattgtaaatagcattgcggtgaacaccactgtactaagttatagatctatcatgcttttatgtttgggacattgcataaggtattcacttgtggaactgataacttcctgtttacttactaatgataacggccagcatttatatggcacttcctctcaggtgcagctctccctagctcattcttcctcatgaccctatgaaatgaggcctattattatcagcatgttaaagatgaggacacacagaggtgaggtaatttgtccactgtcacacagcaagaaagtggcaaaggcaggatatgaaccaggggctgactggtttcagtcagggcccttaccctctgtggtctctcaaaattaatttcttcttcttctttttttttttgagacagggtcttgctgtctcccagactggagtgcagtggcatgactatggggaactacaacctcgacttcctggactcaagcgatcctcctgcctcagcctcccaagtagctgggagtacaagcacacaccaccatgctgggctaatttttgtttggacagggtctcgctatgttgcccaggctggataaattattattattattactatttttgagacagagtttccctcttgtcgcccaggctggagtgcaatggtgtgatctcggctcactgcaacctctgccttccggattcaagcgattctcctgcctcagcctcccaagcagctgggattacaggcgtgcaccaccacacccagctaagttttgtattattagtagagaaggggtttcaccatgttggccaggctggtctcgaactcctgacctcaggtgatctaccctcctcggcctcccaaagtgttgggattacaggtgtgagccactgcgcctggccgataaattataaaaaaaaaaaatacgttgaagtaaatattatgggtagtaccgccaagatactagaacacatgttaaggcttaaaaaaacagaggccgggcactttgggaggccgagaatagcttgaacccaggggacggaggttgcggtgagcctagatcgtgccactgcactccagcctgggcgaaagagcgaaactccgtctcaaaacaaaacaaaatataacacaacaacaacaaaatcacaatctgtctcgattactcatttattcaacccgcattcacctactgtgtgcacgagcttttctagggcactggggaggcagaagggactaaaacaaagtataaatctccctgggctgcaagcatcgggagggcaggtccgggggctctgtgtccccactgggcccccagcactgcgcagcgcacacagtgggcgctcaccaagcgctcgctaagggcaacgcgtgaatccgtgtcccgccagcagggcgtttacggcctggtggggcggaaacggacccgacaccaccgcggcgtcctggggcttctgggaatcccatcagcgcggccagagcggccggggacaggctccgaggcaggcccgacccgcctccccggcgccgccgtggctcgacggagaccagctagggtgagtgatcgagccacgcctggggtcccggcctgtcaccccgaagtccccgccgccttccaccctgtcaggctccaactctgggctccggcgcggtcccacctccggggggaactcccctccatcccctccatttccttcatcctcgactcccgctatcttttcggacctgcggcgctccccctggacgcgtcctcccgccggacgaccgtcctccgcctcaggggacgcgcccaggacgcacggcgccccctccccagccggaccggcggtctgggagcgcggatcccttcagctcccccgcgccccagcatccggatcagggctcgaggcagtcgacaaactacacccgagctcgagcaggcgcgcccctgaacccccgggactggggctgggggcgggggcggcgccggcgcggagggcccagtccccggacgtccgcagcctcccattggctccgggtcccgccgctcggcctggcggggccggggctggtccgcccggacgcggggcggggattcctgaagcccctcctccggcgagggcggagggaagaggaggaggaggaggaggaggaagggggtggggggcggaacacaaaacctgagaggtttttttttttttttttccgtttgcatttaattaaaaaaaattttttttttttttgcatacccgaggggcgctccccggaacgggcgcgggcccggggcgcgcgggcctgggcgcggggcggcggcgggggcccggcagcggctgccgagcggccgccatgcgatcaggcagtgcgctgaccggcccggccggccggccccttctgggtcctccctttgcagcccgtgcggggccgtctcggagaccccgcgccgacggctgctcaaacatcagggtgagtttctcacaatgtagcaatttctctttaaatctcttaactctctctacctgcgagtcggggctgtgacagggcgcaaaagcgaggggggagtgggggttggcggcgagggtgtgtgtggggggagccggagccggggccgaacccacccccgcgacactctcacactcagccccccagccggggcgcagcgcccgctgcctccttttttttttttttttttttttcctgctcggcgcccaccgccaccggcacccccagccccgcgtctcttccaccaccgccgccgccccgatcctatggggacccccccccaaccggcttccctgcccagacccggcgcccagtgcctccccggccctcccgccggctgccggggatacaatggagcggcggagagaggagacctaacgttccacggggggaggggcgcggagaccccctccccgtcccggccccctcccctcgccccgctccccgcctttcggggaaggcgaaggccaccgggcagcgggcggtgatctcccggccggaggcggagagcctgcatctccccgcctcgctcggcccctgcgccccctccccaaatccctcccgtgggtgtcgcggacagtggggggccctggaaagctggggagggatggatggggaaggaggccaccggggctccccccttcgcaccgcccctaaacaatgaaaggagttgacttgacccccagcccccggcaatagagggaggtgaccccctcccccacccccagctgaggctcatcccggagggggccgttacgggggtggggggggtgagcgcctcctgtcacttcccgaggttcggggcggccccccatctcctacccctcggcctgggaacgggaggcaccaggcccggccggggcaccgcgctcgggtggtgacctttagacaaaggcagccctttccccggggtgagcccggacgagctgggc

SEQ ID NO: 3807 - DNA, 6000 bp, Homo sapiens
agaaaccagtcactaataaaggtaatggtgaaaaggaccatgtagagtatgataaaaaataataatgtcatttgcacaatgaaagaggtttaaaagaaaataaatgggtcccaggggctcctttagatagtgtgatcagaaagggtcacacgagggaggtaacattgaaggtgagacctgaaggatcacagggaggtaggtggccaggcccggtgctcctggcagagggaagagcaagttcaaaggtgggagagagcttggcatggttgaggaacaggaaggaggctgatggggccaaactgaagggaaaactagtaggaggtgagactgtagtaggtaaaagtcaccaggttgtgtaggcctggaagcccgatagaggagttgttatttttattctgaatgtgacaggcagctctgatgggcccttaaacacgagaatgccatatttgatttgcttcccagagaacggaacaaaatggggaaaagtagaagtctgttgagctctgagcagctgtattagtatctatggctgtgtagattatcccagcatgcagtgccttcaacaattgttagagctcttgcagtgtctgaaggtcaggaatctgggagcagcttagctcggtggttcaggctcagggactctcatgaggttgcagtcaagctgtaggctggggctgcagtcatccaaaggtttgactggggctggcagatgtgcttccaccaggactcattcctgtggctgttggcaggaggcctcagttcctcaccacgggggcctctccttagtgctgcttgagtgtcttcacagcatggcagctggcttcccccagaacgagtgatccgagagaggacacaggaggaacccgcagtgcccttaatgacccagtctccaaagtcccacacccttcctcccatcacactgtattcactagaagctaatcagtcagtctggccagcactcagagggaggggaattgagctccacctcttgaaaggagaggtttcaaataatttatagagcagaggcatgagcaatgggatgatggcagcctgggccatggtgcaggcagtgggggaggcatgtggcactggatttgggatctatctgggaggtggcatcaactagacttgctggtggactcgatgttgagggggagagagtgtccaccatggctcctggattttggcttgagcaactgagtggattctggtgccattttctgaagttgggaatttggggaagattccagaagtccaggtggtgctggtggatgtacaagttggggttctggagagatgtccagatggaacaagaaattagggaagcccgagccatggacatacattcactgggcacatatgtggatgccagggcctgttctgggcactaaggatggtgctaagcatctgagaatgccctgcccttccagagatggcaccgcatggcttgtcaggtgcccggatggtaggtgtgccaggcactcaggctgcgttgggaaaggagtacttagtgagaagggacaggagctgttggaccacgagtgaccactcctgaaggctgtgctactggagagactggggggcagtggcagggcgcagcttgggcagaggcgtgaaggcaggattccggaattcgaggcagtcacagcaggatcgcttcgcaggccaggctcggggactcagtgctggggatgccttgggttttaggcaggcacccaagcccctgcctttggggcctcttttcggaggcgagagtttcccatacccccagccctctcccatcccaacccttgtctttttgtcctgagtgaccctaaattggtttctgctccagagcatgggcctgccctgctgacttttgaccttggatggggcgggtcttgttgcagcttgacagtgatgacctcctggataatcccggggaggcccaaagtgccttctatgaaggtcctggggtaagtgccgtggctcccgatcattgcctgagctgttggggctgccagcgggaggagggccctgaagccaagaggggaggcttgggctcatctcgtgagggctgttgacaggaggagggcgggggtgggccacccagggtggctggaccaccctggcagtgcaggagggagcagagctggggaaccctgtggggggccaacatggacaaggctgactgtgccttgcagaccccttggggaagaggtgagggtccccgaggccttggggccctggggtggctcatgcagagtggttctggggagctgaagcggatgtgggttgtggggttcacaggggcactcctggagagcagagggctgggggaggcctggggtcctgcccaactcagccatggcagggtgtgacctaggggaggggcctcctcacctgcagacttcagtcttcacctgggcagtgaatatgggtgctgagaaaagcccagagtggccaatgcagaggatgtttattgagcacctactgtgtgcctgactatgccggtcccatgactaagtgccagttgtccacaccacggtggccacctccttcctccttctccctcttctgttgctgctttccccccttcaccttttcctccccccaccttccttcggcctcccccctccccgcctccccttcctccttccccccctcaccctccccgccttccctcttcatcatcagaacacgcattcaccaaacacttattatacgaccagcccttccttgttatcttcatttagttctcacagctataatatcatattccaaatagcttatctttcataatataaatgatgaggaaatgtagtaattatataatgttggtctatttacaggcccagtaacagtggtgatcctgttactattttgtgatcacacttcttaccacgaccatcatttttgtataccctaagatccccattcaggttctaaacactctccacacgtgacatcagtgaattttcacaggcatcccaggaggcaggttggttgtgaccatctggcagttaagagctcagggggttacagtggcctgcctggtcctcagtcggttggaggctgagccagagccctgtctgcctgccactccccgccactcaccagtggttgacccaggcagttccctcgtctgtgaaatgaggaagggagcagcacccgcctcatgggactgtcaccaacaacagcatggagaatcacaataataatgagtgatgatgatagatgcttctcgagcacctgccaggggccgggtgataccgtgaaccctccatgtggatttactgagaatcctggaagctgcagattttgatgggttatctggtcagtattggtggagatggaaatctgtatcataagtattgtttgtggggctttccacacatatgcctgcagatatttttccatgcgtgtcctgggttgcagtccaggatagcatgaaaagcacttaaaaagcattgaggctgggcacggtggctcacgcctgtaatcccagcactttgggaggccgaggtgggcggatcacctgaggtcgggagttcgagaccagcctgaccaacatggagaaaccctgtctctaccaaaaatacaaaattagccgggcatggtggcacacgcctgtaatcccggctgcttgggaggctaaggcaggagaattgcttgaactcgtgggcggagattgtggtgagccaggatcacaccattgcactccagcctgggcaacaagagtggaaactccgtctcaaaaaaaacccaaagaaacaaaaagcattgaactcacagtgcggttggcacagaagttcacaaatgggagccactgctgatgtgagctttactccaccagaactacgactgcttgtcagaaacctttagggccaggtgtgtttcagaatttcgaatttctccaattctggaaaagtggtgccatatgtgtggtgtgtgtcatgtcacacgcttgcctttcggcggccaaacttgggatgtcacatcatgtggataaatggatcccacctaaagtgccatgttggttctggtcaggttttgctgccaacagagctatgaaaacagtctcagttcttagagctttttgggttttgtaattacagataagtgttgtgggcctatatcactatttaaacaatagttgcttatttttatttatttttgttttgttttgttttgagatggagtctcactctgtcacccaggctggagggcattggtaggatctcagctcattacagcctccacctcccaggttcaagccattctcctgcctcagcctcccgagtagctgggactgcaggcacgtgccaccacgcctggctaattttcgtatttttagtagagatggtgtttcaccatgttggtcaggcaggtctcaaactcctaggctcaagtgatccacctgcctctgcctcccaaagtgctgggattacaggtgtgagccaccgtgcctagactttatttttgttttttgggcgtcagctggtagagattgggggacagcacccccgcgggcttgggctggatgggcatgggcgtgcgatgcaggatcacgttgggcgccgggaccagtggtgacaagctgaggcctggggccaccaccagcggctttcctgagggtgccccgctgggtcttactcttgtcacttaggctggagtacagtgacacaatcatagctcaccgtagcctggaactcctgggcttaagagatcctctcacctcaggctcccaaagtgctaagattacaggcgtgagtcactgtggccttgaacagtagttttttttattacattttactgatgggtacagatgaagaaactgaggtcagatcaagcacgccctaggttacacagctaagccttggcagagctgggatttgatcccgggtccagccacttgcaggtggaatgttcttttttcttttttttttctttttttcttctttttttttttttcttctcaaagtcttgccctgtcaccgaggctggagtgtagtgaagtgctcgtagctccactctgcagcctcaaactcctgggctccagtgatcctctcacctcagcctcccaagtagctaagaccacaggcacatgctgccacccctgactaatttttcttttttaaaatttttttctcactgcgttgcccaggctggtctcaaactctttggctcaagccatccatcctcctacctcagcctcccaaagtgctgagattacaagcgtgaaccaccatgccaggagggaatgttctttcttgaacgtggctgccctgtcacctcagcattctttgcggcagctgtggcctaagcgtagccccttgctaacctcagctctttccttcccacctttcccggcctgcagctccatgtgcaagaagcttccggcaaccacctgaacccagagcccaaccagccggcccccagtgtggacctagacttcctggaagatgacatcctgggctctcctgcgacagggggcggcggcgggggcagtgggggcgctgaccagccctgtgacatcctccagcagagcctccaagaggccaacatcacggagcagacgctggaggccgaggctgagctggacctgggtcccttccagctgcccaccctgcagcctgcggatggcggggcaggcccgacgggcgctggaggggcagcggccgtggctgcggggccccaagccctcttcccaggcagcaccgacctgctggggctgcagggcccgcctaccgtgctgacccaccaggccctggtgccgccccaggacgtggtcaacaaggccctgagtgtgcagcccttcctgcagcctgtgggcctgggcaatgtgacactgcagcccatcccgggcctccaaggcctgcccaatggcagccctgggggtgccacggcggccacactgggcctggcgcccatccaggtggtgggccagcccgtcatggcgctcaacacgcccacctcccagctcctggccaagcaggtgcccgtcagcggctacctggc

SEQ ID NO: 3808 - DNA, 6000 bp, Homo sapiens
aaccggaaggcggacgttgcagtgagccgagattgtgccatttgcactccagcctgggcaacaagagcaagactctgtctcaaaacaaacaacagtaaaaaaaccccacaacagctacccccgagcttctccagtgtcctgataccaccttgcagcctgagggcctcagggatggcgccgcttgaattctgggtgcccctgtcccccaccacaggagctgctgatggcgcacgacttcaccaagtttcactcgctgaagccgaagctgctagaggcactggacgagatgctgacgcacgacatcgccaagctcatgcccctgctgcggcaggaggagctggagagcaccgaggtgggcgtgcaggggggcgcttttgagggcacccacatgggcccgtttgtggagcggggacctgacgaggccatggaggacggcgaggagggctcggacgacgaggccgagtgggtggtgaccaaggacaagtccaaatacgacgagatcttctacaacctggcgcctgccgacggcaagctgagcggctccaaggccaagacctggatggtggggaccaagctccccaactcagtgctggggcgcatctggaagctcagcgatgtggaccgcgacggcatgctggatgatgaggagttcgcgctggccagccacctcatcgaggccaagctggaaggccacgggctgcccgccaacctgccccgtcgcctggtgccaccctccaagcgacgccacaagggctccgccgagtgagccggcccccctcccatggccctgctgtggctccccagctccagtcggctgcacgcacacccctgctccggctcacacacgccctgcctgccctccctgcccagctgtaaggaccgggggtctccctcctcactaccgccagacaccccggtggaagcatttagaggggaccacgggagggacaaggcttctctgtccgcccttcacacctccagcctcacgttcacttaggcacatcacacacacactggcacacgcaggcatccatccatccgtcattcattcaaatatttattgagcacctactatgtgcccagccctgttctaggcactgggcattaccatagagaacaaaatagacaaatacatctgccctcatggaaggtgacgttcccaggagagggcacctacacagtcacgcaaacacacactaattcctggcagggcccccagcccctcccctggctgagcagccctgtggctgaaatgactagcagataaacagacccccttctgctccgcttcctcctgcccagccaggcaacaccctcaaccggctccatcacatcctcaggtctcgggaccatggggggctcagaggggagacacacctactgcttcctcagatgggcccctccgcagccccttcccttgctcggggaaagcccccaattctgcccacacccatttatttccttccttccttccttcttttctttccttccttccttcttttttgtttttgcccccaattctgcccatacccatttctttctttccttccttccttcttttttgtttttgcccccagttctgtccacaccccttccctttcctgtcctgtcctttctttcttttttgatagaatcttgctctgtcgcccaggctggagtgcagtggtgagatctcagctcactgcaacctccacctcctgggttgaagtgattctcgtgcctcagcctcctgagtagctgggactgcaggcacgcgccaccacgcccagctaatttttgtatttgagtagagacggggtttcaccatgttggccaggctggtctcgaactccgcatctcaggtgatctgctcgccttggcctcccaaagtgatgggattacaggcatgagccaccgtgcccggcttcacacccatttctttaaaaaggatcccgtagcaggcagaaaagccccttccatcctgctcctctgatactgtgcccccttggagatatttccgtcctccacccacgtgtctgtggctggaactgcccagcctgctcctggccccctggaagcctccccacagctggtaatctggacttaaggattgctgggccaccgcctctctgcctaccaccattccatatttaagtggagcccctacgtagaaaggccccggggctttattttagtctccttttcagggatgtcgtgggcgggggagggggttcttggtgctacagccctctccccacccctaaagggacgccgacgctgtttgctgccttcaccacatattagtgcttgaccctggcaggggaccccatggaaaagatggggaagagcaaaatacatggagacgacgcaccctccaggatgctcgctgggattcccacgcccaccactgtcccccaccccatggctgggaggggcctctgaacggaacagtgtccccacagagcgaataaagccaaggcttcttcccatgtggcagtgaggctggcttgggacagggatcgcccgccctcccccagggaaagagagacctgggcaggatttggggtggggggaggcccccttccgtgctctcaggggcggggtggagtccgtgactcaatgcagcgaggcctggtgactcaggcctgggctgggggccagaacggcatattttccgaggaaaagtgactctggggccctccccccgggacatcccttcctcccacctcccgcggcgggggcctgggaaccaagccctggggcgcgcgcggggtgtgtgtgtgtgtgtgtgtgtgtgtgtgtgtgtgtgtgtattcgggcacgaagtgctctcccagctcccgccctgcccggcaacgtgcccttgcacaacctgggtacataactcccgacgcgtaacaccaggaacacgctggtttctggttggggaagtggtgaccttgcccacacgggctgccaggagtgtgcgcgcgctcacgcaccggggactcttggccagagctgggcagcgcaccgtgcgcgccgagtcccgcgcactcacatccaggccacacccacggcgtcccgggacacgctggccgcgcactcatcccgcccacgcgggcccagtttcgcggctcgcggcgccccctggcggacgctcagaaaacagataggctgtggtcgccaaaatccctgcccaggtgattcggcgctcaggtctcggggctgcgatccagggcctgtcacctttagggcctgtcacctttccaacgctctgcgcaaggatccagttgaatttcgctgtgtgaccatgcgtgtgtcgcctgccctctctgtgcctttttcctttatgagtccagagtggcttttatgaggcctggattcctttgatttgattgttttgtttttgagacagggtcttgctctgtcacccaggctggagtgcaatggtgcaatcacggctcactgcaccctccaactcctgggctcaagcgatcctcccacctcagcctcccgagtacctgggactacaggcgcacaccatcacgcctggctaatttttaaatttttggcagacacaggatctcactatgttgcccaggctggtcttgaattcctgggctcaagcgatcctcctgcatcggcctcccaaagtgctgggattagaggcgtgaatcaccacgccctgccatggatccctttgaatggctgccagggcccaagagcctctgagcttccttccttatttgtaaatgacaaagatgagttgattctaagatgaagcctcagagggcaaggcagtaacaatagctaacactcagatgccagacgcagccttaagcgctttacatatgtttaatcttctgcatgacttatgacgcagatgtactgttatcatctttattttacagatgaggaaactgaggcacagtgaagtagcccgctcaagatgaatgattctgagtctgcacttctagggtcctaaaagtgtatgtttctaacattcctctaatgttctgtgcttccaactttgatattccgaaagttacttgatttctaagatcctaggattggaacatttgagaggacaaaacttctgagattggaatgtgtgttgtgcggaatctgccactgacggttctgactttctaagaaaacgagattaaaaaataatcaggccgagcatggtggctcacatctgtaatcctagcattttcggaggctgaggagggagaatcacttgagcccaggggttcaagaccagcctggacaacatagtgagacctttgtctcttaaaaaaaaacacacacacatcagtttggaccgggagtggtggtgtgagcctgtaatcccagcgctttgggaggcctaggaaggaggatcacttgaaaccagatgtttgagaccagcctgggcaacatggggaggctccatttctacaaaaaataaaaataaaaaattagccaggtgcggatgcacccttctgtggtcgcagctactcgggaggctgaggtaggagaatccctgagcttaggagttggaggctgcagtgagccattacccttccactgcactccagcctgggggcaacaaagtgagaccttatctattaaagaaaaaaatcagtttgagcaaagaccccaggcggccgggaaaggtgttcgcttaagggcgaaagctaagaacctgcaaccttcccgtctctttcctaccacccgccgccgttaggaatcttcagatcccgctgtaaagaatggaggaaggaggagccatttatcctttaccaagatggcagcctcctggcaactccagtcactttataaatatggctgccacaggaagtacgtcacggaagagggtgggaaatctgcgcgcgcacgctgcaaaggggctttttgggacgccagtggctgagttcttcctttgacaagatggcggcaggaggcagtggcgttggtgggaagcgcagctcgaaaagcgatgccgattctggtttcctggggctgcggcccacttcggtggacccagcgctgaggcggcggcggcgaggcccaagaaataagaagcggggctggcggcggcttgctcaggagccgctggggctggaggttgaccagttcctggaagacgtgcggctacaggagcgcacgagcgggtacgttgggcgggacttccgggaggtgggacggttcctgcgcccaggtgcaaggccaggcgtgcttgcgtggactcgtcgggggtcgggggtcgggggtcgggggttgggggctcctgtcccggggaccgccgaggaaatggagagcatgggcaggggactcagcatgggaagctggagagcttgatagagttaccagatttagcagataaatatacaggacgctcaattaaatttggattttaggtaaacaatgaataatttttagcataaatacgttccatgcatccaccttagcttgctgttttctaaatatgtgtgtgtgtgtatgtatatatgtgtgtgtatatatatgtgtatatgtgtgtatatatatatgtgtatatgtgtgtgtgtatatatatgtatatatatatgtttttcagacggagtctcgctctatcgcccaggctggagtaggcgcgatctcagctcaccgcaacctccgcctcccaggctcaagcgattctcctgcctcagctccttagtagctgggattacaggcgggcgccaccacgctcggctatttttcttttcttttcttttttcttttttttttgagacggagtctttctctgtagtccaggctggagtgcaatggcacgatctcggctcactgcaacctctgcctcctgggttcaagtgattctcctgcttcagcctcccaagtagctgggattacaggcatgcaccaccacgtccggctaatttttgtatttttagtagagacagggttttgccatgttacaggccaggctggtcttgaactcctgaccttaggtgatccacccgccccggccccctaaggtgctaagattacaggtgtgagccaccacacccagcc

SEQ ID NO: 3809 - DNA, 6000 bp, Homo sapiens
acgtcaataagataccactatacatcaattagaatggctaaaatttttttatttttaaagaacaaaaccccaggccaggcgcggtggctcacgcttgtaatcccagcactttgggaggccgaggtgggcggatcacaaggtcaggagatcgagaccatcctggctaacacggtgaaaccccgtctctactaaagatacgaaaagttagctgggcgtggtggcgggcgcctgtagccccagctacttgggaggctgaggcaggagaatgacatgaaccccggaggtggaggttgcagtgagccgagattgtgccactgtactccagcctgggcggcagagcgagactgtctcaaaaaaaaaaaaaagaacaaaacctcaaatctgataataccaactgtagacaagaatgtggagcaactggaacagtcatacattgctggtgagaatgcaaaatgatacaactgctctggggaaacaggttagcaatttctcatgaagttaaacatgtactttgtgtttgacctagcaatctcctaggtgattctcacccaagagaaacaaaacttatgtttgcaagaaacctgtacactaatgtatatagcaactttataattgctaaaaactggaaacaaaccaatatcttgcagttggtaagtagatagtatggaatacccttggcaataaaaatgagtaagttattatatactacaacttggatgaatctcaaatgcattatgctaagtgaaaaaaagccaaactcataaggctacatatgatacgattttgttgtgtgacattctggaaaggcaaaactatagggacacaagacagacagaccagtgcttgccagggattaacagtggaagcagggtttgaccatgaaggagttttgggggtgacaagatactctggtttttttttttttcttgagacagagtctcgctttgtcgcccaggctggagtgcagtggcacgatctcagctcattgcaaaaactggaaacgaagtaaatatggcaacatgctaattacatgtgacattatcagtatttgctttattattgtacttgtatattttaattggtcgacatacaaacaaggcaaaatatatcccccttagagaaaatttggaaaagacagaaaaggagatagaacaagtcaccagttgtctttatttatttattgaaacggagtctcgctctgtcgcccaggctggagtccggtggcgccatctccgcttactgcaagctctgcctctcgggttcatgccattctcccgcctcagcctcccgagtagctgggactacaggcgcccaccaccatgcccggctaattttgtttttgtatttttagtggagacagggtttcactgggttagccaggatggtcttgatctcttgacctcgtgatccacttgctttggcctcacaaagtgctgggattacaggcgtgagccactgcgcccggcccaccggttgtctttagacattgtattttttattcttttctacatgtctttttgcctaatgaaaagtgtactgtaagaaaaattttgcctgtgtattctaaacttgtttcctttgcaactttttcttttcttttttcttttttgagacagagtctcgctctgttacccaggctaaagtgcagtgtcgcgatcacagttcactgcagccttgaccttcctgagctcaggtgatcctccagcctcagcctcctgagcagctgggactacaggtgcacccacgcccggctaattttttgtattttttgtagagacaggatttcatcatgtcgcccagcctagtgtcgagctcctcagctcaagttatccgcccacctcggcctcccaaagtgccgggattacaggcacaagccaccgtgcttggccaccccttcctcttaaatgatctttgaaacattatttgcagtctcaaagcctgcatttatctaaacaactggtttcattttagggatgtaggcatttctgtaatattaaactgttatatttcacctcgctagcatgggagtacaactgaggggatgtttgcatgaatcttgtgaattatgatggctctaagccattgtaatttgattaacagaagtcctactttggggtttatcttatttttattatttatttattttttgagtggagtctcactctgttgcccaggctggagtgcagtggtgctatctgggctcactgcaacctctgcctctggggtttaagtgattctcctgcctcagcatcccgagtagctgggattacaggcgcaggccaccatgctggctaattttttgtatttttagtagagatgggatttcaccatgtcggccaggctggtcacaaactcctgacctcaagtgatctgctcaccttggcctcccaaagtgctgggattacaggcatgagccactgcgtctggcctactttgggatttttctctacagtgttttcatgttgttaatgtagctgggggtccagcatcactgctggtcacttaatcctgctggaggccaccaggatacaccatctctgtgcagtgagctgtcaaggagagccctaggcaaaattacttaggttcatggtgtcagtgcttttgtggagatatccaactcctgaggttcactcatactgtcattttctcctaaggcatcaggtgatgagcctctctgatccagcattttgactacccttttcacatttttttttttttctgagacagagtctggctctgttgcccaggctggagtgcagtggcatgatcacggcttactgcagcctcaacctcccaggctcaagtgatcctcctgcttcagcctcctgagtagctgggactacaggtgcacgccactatgcctggctaattctttcattttttatagagacaggacctcgctatgttgcccaggctggttccaactcctgaactcaagtgatccacctgccttgggctcccaaaatctcgggattacaggcgtatagtgctaggccttcacattcttatatacccttctgtttccttagctgtgaaatggagataatgacatagccttaattcacgtgggatgcttagcacagtgtctggcacttgatagatttttttctttctacttgaaatttatttttgagctgggcacggtggctcacacctgtaatcccagcacttgggaaaaccaaggcaggcagattacctgaggtgaggagttcaagaccagcctggcaaacatggtgaaaccccgtctctactaaaagtacaaaaattacctgggtgtggtggcacacacctgtaatcccagctactccagaggctgaggcacgataatcacttgaactcggcagatggaggttgcagtgagctgagactgagccactgcactccagcctgggtgataaagcgagactgtctaaaaaaaaattatttttaactaatataaaactctctgaacccttctttttctgagctgcttctccacttgagtccatcccacatcattgaacatttaattacacagaattgtgtaccatcttccttgacccccagatctttagccttctatagtaccctgtctctttttgtcgtactagtcacagttgcactttttttttttttttttttgagacagagtctcattctgtcacccaggctgcagtgcagtagcacaatctcagctcactgcaacctccgcctcccgggttcaagcaattctcctgcctcagcctcctaagtagctgggattacatgcgcgcaccaccacgccaggctaatttttgtatttttagtagagacgaggtttcaccatgttgtcaggctggtctagaactcctgaccttgtgatcagcccacttcagcctcccaaagtactgggattacaggcatgagccactgcacccggccatagttgctattttatttgtgtgattgattaccgtatgacgcttttattgaagtgcagtgaaggcaggaaacatgaccggtttttacaatattttcaacacttatcaccataggtggtacatagtagggccttaataaatatttgtaaaatgaacaaagttaatgagtgtttatgtttgtagttttaattgctctgaagtaaatatctgattttccaatttccaccagagtgctctgcacatagtaggtctaattatttttccctctttactaatcacccatgccttgtaagaattcagttagttgactttttgtactttataagcgtgatgattgggtgttcccgtgtgagatgcgccaccctcgaaccttgttacgacgtcggcacattgcgcgtctgacatgaagaaaaaaaaaattcagttagtccaccaggcacagtggctaaggcctgtaatccctgcactttgagaggccaaggcaggaggatcacttgaacccaggagttcgagaccagcctaggcaacatagcgagactccgtttcaaacaacaaataaaaataattagtcgggcatggtggtgcgcgcctacagtaccaactactcgggaggctgaggcgagacgatcgcttgagccagggaggtcaaggctgcagtgagccaagctcgcgccactgcactccagcccgggcgacagagtgagaccctgtctcaaaaaaaaaaaaaacaccaaaccttagaggggcgaaaaaaaattttatagtggaaatacagtaacgagttggcctagcctcgcctccgttacaacggcctacggtgctggaggatccttctgcgcacgcgcacagcctccggccggctatttccgcgagcgcgttccatcctctaccgagcgcgcgcgaagactacggaggtcgactcgggagcgcgcacgcagctccgccccgcgtccgacccgcggatcccgcggcgtccggcccgggtggtctggatcgcggagggaatgccccggagggcggagaactgggacgaggccgaggtaggcgcggaggaggcaggcgtcgaagagtacggccctgaagaagacggcggggaggagtcgggcgccgaggagtccggcccggaagagtccggcccggaggaactgggcgccgaggaggagatggaggccgggcggccgcggcccgtgctgcgctcggtgaactcgcgcgagccctcccaggtcatcttctgcaatcgcagtccgcgcgtcgtgctgcccgtatggctcaacttcgacggcgagccgcagccctacccaacgctgccgcctggcacgggccgccgcatccacagctaccgaggtacgggcccggcgcttaggcccgacccagcagggacgatagcacggtctgaagcccctctaccgccccggggtccattttgcagacggggaactgaggccccttgaggcaggacacatccagggtgacgctgctcgtaagcgtcagagcattcttttttttttttttttttttctgagacggagtctcgctctgtcgcccaggctggagtgcagtggcgcgatctcgactcactgcagcctccgcctcccgggttcaagcgattctcctgcctcagcctcctgagtagctgggattacaggcgtgcgccaccgcgcccggctgatttttatatttttagtagagacggggtttcaccatgttggtcaggctggtctcgaactgctgacctcgtgatccgcccgcctcggcctcccaaagtgctgggcttatgggcatgagcctccgcgcccggcccagagcattctttataaggccgaatagtttgcatttgaaggtggctccccccagtcccccaccccacgtgtattttcccctcaaagaaaagctgcatccttaacaccccatctgttcagtcctcatgactccagtgggccagttctgcgtagtccctgccctcgtggagaacacattcctcctggggagactgacagatgcaaagacaggaacaagccagggtcatgttggcgccggaagagccgaccgtgtgtggcgtgggaaattgacttacctgcctgctgggagatggaggggttgc

SEQ ID NO: 3810 - DNA, 6000 bp, Homo sapiens
ggctgccttctccaggacaaaccctcactccaactcaactagggtgctgtgatcagaatgtgcaattgaggtgtgattttactgattttttttttttttgagaccgagtttcgctcttgttgcccaggctggagtgcgatggcacgatctcagttcactgcaacctccacctcccgagtttgagcaattctcctgcctcagcctcctaagtagctgggattacaggcatgtgccaccacgcctggctaattttgtatttttagtagagacggggtttctccatgttggtcaggctggtctcaaactcctgacctcaggtgatccacccgcctcggcctcccaaagtgctagaattacaggcgtgagccaacgtgcccagcctgtttttgttttttgtgttttgaagcagggtctcactcagttccccaggctggagtgcagtgacacgataatagcttactgtagctgcaatctcccgggctcaaacgatcctcccacctcagcctcctgaacagttgggactacaggcacaccaccacacctggctaatttttttttttctttttttagtagagatgaggtcttgctatgttgcccaagctggtctcaaactcctgaggatcaagtgatcctcctaccttagcctcccaaaatgctgggattgcagatgtgagccaccacacccagcctgattttactttaaatgagagtccctcttcagagtccctcagctgttcctggcccctggccatgtgccttcagttgcccctgcttctgtggtatccttaaggctacattcagtgctgaggccctaggcaggcagcagagagaagccaaatgattctgtctttcccttatccacccagagcatgcaaaaccaggagcagtggtgggttcagggtgggcaccagctatgtatatgtacatcagggacagggggccaaaggcagtcagtttccaaagactgccccagaggccatttttcagagaagccctgggttcctcaagggccctgtgtccatgctggcccatcttgcaggacgagcctgtggagtgggagacacctgacctttctcaagctgagattgagcagaagatcaaggagtacaatgcccagatcaacagcaacctcttcatgagcttggtgagttgactgctcaggaagggggcgtggggaggagcaggtacccagctatgtgcctgatactcagagggtcacaactgaggttatcttgggtgggcgcaagcagtaatttgtgcatacccagcctagccccaagtagactgacatctcacctggaacctattatcaaggtttggtttctctatttctttagaacaaggacggttcttacacaggcttcatcaaggttcagctgaagctggtgcgccctgtctctgtgccctccagcaagaagccaccctccttgcaggatgcccggcggggcccaggacggggcacaagtgtcaggcgccgcacttccttttacctgcccaaggatgctgtcaagcacctgcatgtgctgtcacgcacaagggcacgtgaagtcattgaggccctgctgcgaaagttcttggtggtggatgacccccgcaagtttgcactctttgagcgcgctgagcgtcacggccaaggtgggcttcccaccccaccctgccctatgtgagggtatatacgcatgcacctgagcatgcaggggctgagcagctggccctgtctctgatcattacttccccttcacagtgtacttgcggaagctgttggatgatgagcagcccctgcggctgcggctcctggcagggcccagtgacaaggccctgagctttgtcctgaaggaaaatgactctggggaggtgaacgtgagtacatagttcttagtttcttggttgtcactagacaggactgatgggctgtagctacagtaaggcttggaggaggaattgtgctggaagacaagccctgcaaaacagttccaggagtgtataggcattgtaactaaagcaaaggcttccagaccactcatgccaaagcctagggttgtcccaagaagccaggaagaattgccttggtgctttgatctttcctggtgtggaaaatcttctggagatgcaggagtccatctaatgacatgaggaggcccccttcagactttttacctggaagctttctggctccaaggtattaggcctgtggagtgaaattagactcagaatatgcctgacctgtccacaggtaattggggaacatctgacttggttgtctcagtaaggtgaccgttttgtagggcccatcttccatacaaactgctgtcagggatcctaccagagatcattcagccaagagcctgacatcagaaagcccagtcctagcttgtgtgaacatgaggtgctagtcttctctggggagggtctgctggcttggccatcccttctgcagcctgtacactccccttttgccccttgcagtgggacgccttcagcatgcctgaactacataacttcctacgtatcctgcagcgggaggaggaggagcacctccgccagatcctgcagaagtactcctattgccgccagaagatccaagaggccctgcacgcctgcccccttgggtgacctcttgtacccccaggtggaaggcagacagcaggcagcgccaagtgcgtgccgtgtgagtgtgacagggccagtggggcctgtggaatgagtgtgcatggaggccctcctgtgctgggggaatgagcccagagaacagcgaagtagcttgctccctgtgtccacctgtgggtgtagccaggtatggctctgcacccctctgccctcattactgggccttagtgggccagggctgccctgagaagctgctccaggcctgcagcaggagtggtgcagacagaagtctcctcaatttttgtctcagaagtgaaaatcttggagaccctgcaaacagaacagggtcatgtttgcaggggtgacggccctcatctatgaggaaaggttttggatcttgaatgtggtctcaggatatccttatcagagctaagggtgggtgctcagaataaggcaggcattgaggaagagtcttggtttctctctacagtgccaactcctcacacaccctgaggtcagggagtgctggctcacagtacagcatgtgccttaatgcttcatatgaggaggatgtccctgggccagggtctgtgtgaatgtgggcactggcccaggttcataccttatttgctaatcaaagccagggtctctccctcaggtgttttttatgaagtgcgtgaatgtatgtaatgtgtggtggcctcagctgaatgcctcctgtggggaaaggggttggggtgacagtcatcatcagggcctggggcctgagagaattggctcaataaagatttcaagatcctcctgctgttggaatcttttatacatataaagtttttgtagagacatgagtctctctgtgttgcccaggatcctcccaacttggcctcccaaagtgttgggattacaggtgtgagccaccctgcccagcctggactctttattattataggcgcagagctgcagttgcccctcatggtgccagaagttgccaagggtgatggacaggctcccaggtgtcttgcaaagtcaccatggaccaatttgtgaagatgtagtatgcatacatacttggtcatcactcagctccctggggctcaggttgtggtggagacaaaaatggactgcagttagaacttagggaaactggctgggcatagtggctcacacctgtaatcccaacactttggttgggctaggtgggcagatcacttgaggccaggagttcgaggccagcctggccagcatggcgaaaccccatctctaccaaaaatacaaaaaaaatttagctgggcgtggtggtgggcgcttgtagtcccagctactcagaaggctgaggcaggagaatcgcttgaacccggcaggcagaggttgcagtgagtggagatcacaccactgcactccgatagagcaagactccaactcaaaaaaaaaaaaaacggccgggcgcagtggctcaggcctgtaatcccagcactttgggaggccaaggcgggtggatcacctgaggtccggagttcaagactgcctgaccaacatggtgaaaccccgtctctactagaaatacaaaaaaattagccggcatggtggcagatgcctgtaatcccaagtactcgggaggctgaggcaggagaatcgcttgaaccctggaggcagaggctgcagtgagccgagatcgtgccactgcacattatcctgggcgacaagagtgaaactccatctcaaaaaaaaaaaaaaacaaaaccatcccttcaacacacacacaccacgctctgggagaaggtgtggcataactccttcaccaaatacagagctgccaccgtggaccagacactgctcgtgataccgagggtatagctgttaacaattcttgctttcattaagcatggactctgctgggtttgaaaacactgaattcgaagttcttcagaactgaatgtaactatgtgaatctggccagttccttaattttctttcaacttggttagttcacataagcgtggcaatcgcaaaaatacagctgtgaaaatagaagccagatgggcacccggcggtctggccttaggccctgaagtgcaggtttgaggattggtgcttgcgaagtcctgctaggcctgaactcaggtgttgggggacgtcagagccgccaaatacacccaaaagaccgggaggactcacggccaccactttcctcggtgggagctgtcccagctggtcagatcgcgcttgctgggacctgggatctcgcaacgcatgctgggatgcccagcatctaagggcgcccattggtcccgcccccacgacttgagcaacagccaatcagaggtggcagcgtgcggaagcggaagtgaggtttccgtggagacagccgagcctgcggaaggcggcggcggcggcacctgcgatcagcggctggggcaggttatggtagtgcggactgcggtgtgagcagagcggccacggggcccgccatgcgccggcggccctgacatgggcgccagcgggtccaaagctcggggcctgtggcccttcgcctcggcggccggaggcggcggctcagaggcagcaggagctgagcaagctttggtgcggcctcggggccgagctgtgccccccttcgtattcacgcgccgcgggtaagggcatgggttccaccctggcggggggaacaggcgggcggccaggcgtcccgcgccacgggggaacttccaccgctgtaccccactacagccaagccaggacgacccccatattttgagcctcattggagctgggggtggagaaagccgggcagtggtctcctggcggcctggccactctgaaagtctccctagggaagagtgggcctgaggcttgtcactggtcggaccttccgcacggtaaagctaagctagggcctccataagacctccataagatctcttcctttcatcccttccggctcagcctgcatactgaagggtcctagcctccctttcccccccagttattccaaggggataataaccctctgtttaggctgcttttcctgacagtagtggggctgaacctttgagcgtagtggctgggaaagcagggataggcctcagtattgggggtgaggctgaggaaaaaagaccctcacccagttatgttctccagatccagagcgctgacctacccacccaacccccagcccagtctcccagaggcccgcacaagagtaccagattggcttggctctagtgggctcctggagatgggcgctccctgtgctagagatttggctgtagacaccaggaagacccaacagtggcaattcaccagccacctggggtgtggggtcaggggagacgcagccttcattcctttgtgcttcttcctagcttaggcttctgctatttcagtctttgacac

SEQ ID NO: 3811 - DNA, 6000 bp, Homo sapiens
ttgggttatcattctgatggcagagtgggtcctaaaccaatctctggggagtcccaggctctgcatggtgaaggggaaacataggattctgggggaggagtctaggtggtacggtgaggagtcagcctgctgcggaagggtagagggcatgagccaaggccaaacccagagtgacctttcctctctcctctggccccaggcaactggccctgaaggcactcaatgagcggctgaagagagtggaagaccagtccatctggcccagcatggatgatgatgaagaggagtctggggccaaggtggacagccccctgccctcagacaaagctcccacacccccagggaagggggctgccccagaatccagtctaatcaccttcgaggcagctcccccgacgctgtaactccagaccaccttgagtgtggcacctcccctcccaagccccccttgacatcctctcagctactccagggcacctgactgctctgaggagagggaagaaggcctgctggggctttccatggccttctgctgtttctcgccaacactacccaggactcttgctacctggttccaactccagacaaccactatgccaggcccggagcctctgaggcatcggccagtccaggccctcatctgaggtaagaatgtacatcagctggcagccccaagcaagtggctgcagggacactgatgccacagctcctgggccggccctcacatctgaaactggttgccgagagccctgagccaaggcaaggatttgccaaaaatgttctgggggcccagcaaatgcaggagccgacctggggctgcacatccctgcccatccccagaaagactgttcctgtcaggatttgtttccctctgctgtggcggtgactgcttctggaccagaacagctccagctcccaggtattttctacaggaccacttgagtgggcagccaagcccaggctcgcagtatcaataaagcagttctctgaggaatgactcctgggctcttgtcaggccaccttgtgcagccccctcatcacgttcaactgcaatgttagacagggacttgattgtctccatggtaactccagctggataagaagcccattgccccagctccccaccaccgccaccaccaccaccacatgcgcactgccaagcagccttccaagagctattgcctcagactcttactccttttttctttccctccaaaccccaatctgggaggccttctgtccctgcctagatctgatgataagggcctctccatcataaggcgctgttcttacccatggtttatctctaagacagaatgctcagttcttgccacccctggagacaactcacccccagctcccagttattgtatgtatctaacccccacagtctggagactccagcacagtagacagttggggggacagaaaggacacacagctgtaccattcacagctacagctctagggcctgccagggcccggagtggcctgggaggctcagcagctagaccctggggatttgtgtgctaggagagcttcagcccctcagggagcagccaggggtcgggggtggggggtccccatcttgcccagctgcccattttcctgtgctgatggcattaacaagaaccatccccaactctgggctgcttctcccatcaatcttttcagtcattttttacaaattttttacttttttctctcctaaaatttctgaacatacagtacaagtatgagctgccttgcaggagaggcagtcttgcagccccagcttcatccagacacatgatgcctatgttcctctgggatgacagagaaaggggaaggaaatgggaggcactccagcatgaggagcaggaattcacacacgggcctccaaatgcccaactgtcccagtgcctgaggtgtcccctgactcagctgagagagttcaacaggtccctaggcccagctcctacatggaggggcaaatccaggcttcccctaggctgggaagagctcatggttggatcctcttgcggtataggtaggcattgctcacctggttcataatgaccaagctggtgaggacagggcataatacagccaggtaccaggctgcaccagtgacagaggcagtgaaccagagtgagcacatgcccagcaagaggctggcactacccagcaggtagcccaccagcccagaagtagcatggtatagcttgagcttcgccaggggccatcggggcagcagcttggggtagagcagccccaccccacctgagcactgcagccctgcccacagcacagccagcagccctgcctgcccatgccgcgtaaccaggtgggctttgccaagctgctctttgtggaggatgacaaggccgaggcccagcagtgcacacagcagggccagcagctgcagcacccagtggcagcgtgctcggcctttccgtgagagggagtgcagcagcgaactctcaggagaaaacaccagtagtgcctcggtcatcaggaaggagaactgaggaaacaggggatgggaagctcaagtgagggtgctgccccagaagaggagaagagggctttatgtaacccttagctgccagtgagtctgggctgattcccctttttctttctctccccactgacaagactatccatttggtggggcaagagtggaaaaccccatctgggatgatatatgtgccctgaataatctccacacttcctcctaggtgccagtctgaaatgtcatctgtcgtatgttaccaagcaaacacagggtttgagatgtggcagttataaatgattcacaagctttgtttccctaacgtggggctggatacaatttcttggcaagagctggccacatgggtgcactgtttcagggaaagttaggtgcatcaccagaaattaaagtaaaaagggacagaggtacatccaaatgcaatgtctcagctttctgcctagaggtgggtgaagcctcattgtgcttagacaaatcttacccatttgacctgggtcctgggtcttcattactctgattcaagtctctttttttttttttttttttttttggagatagtctctctctgtcacccaggctggagtgcagtggcctgatctcggctcactgcaatctccgccttccgggttcaagcaattctcctgcctcaggctcctgagtaactgggattacaggcacctgccaccacacccagctaatttttggttttttggggggtttttttgtttttgggtttttttttttttttgggacagagcctcgctctgtcgcctaggttagaggttagagtgcagtggcgcaatcttggctcactgcaacctccgtctcctgggttcatgcgattctcctgcctcagcctcccgagtagctgggactacaggcgcgtgccaccatgcccggctaattttttgtatttttagtagagacggggtttcaccatgttggccaagatggtctcgatctcctgacctcaggtgatgtgcccgcctcggcctctaagtgctgggattacaggcatgagccaccgtgcccagcctcaagtctgaaatatataccatgggcaggagtagttggagcatgcaactcttccaaacagatattaaatgtggacaaagattcagaggctgccagggccaccaaccatgcccatgctcccacccctaagaactgcccaggcccactacttacagccaaagacataagcaccgggtgccaggagaacaggcctggaatgagaagaggaggcctcatggggctgaggcaagaagaaaccagccataccaatccttaagggttgaggaataccagcagcccatcacccaaggaggtgctgccaaactgtgagccccttcttgctctgcaacaagctgaccccacacctatcctctcttcctggcctcttcctggatcagaggccatgctttgccactcctctggcagtcctccctccttcccttacacctcctgagaggcagccaaatggagcacccagagaaggaaagacaaaccaggaattctgtgtgccctggccatacctacctgctccacctcactcatcgctccagcacagaattccctcaaccagccaggcctgttcccggaagtcccactgcccttcctccccaggaacagtggcccttcccttcccagaagtcagctatgaattctacttactggagccaggcctggcaagcacagccacaaagatggtaaagcccagggccacaaggtgggcggcagcgccagaagcagtacgcagagctcggtagatgtgtgactcggtctccgcagaaagggccatcgtcagccgtgctagtggttgtagcctgaaagcatagtagcgtgggccaggatctcaggtgcccactgttcactcctcactggagaaaaggctgcaaggcaggaatgccaccctcttccaataagttatggtaggaaagaacagtaccaagaccagcaccaggaatggtcacaacatgccagtcgacggccggcggcctgtcaacgtgtacccatgtctgaactggtaccaatcgctggcccgccttccaggtaggaggcgcaaagccatgtaagactacaaatcccagcgtgtaccacgccgtcgccggcagtagagccagctgggagggcgcggagcactatggaaattgtagttccctgctgcggtcccagttacagcgtgaatcccttagcgcaccgcctccccaagtgctgccagcatgctgcccctccacgctagggacttgcctgcctctgccgcagcgcagatctgatgcggtggtttcctccaaagaaagcgggatactccgggccctgccgcgcgcaccgccgctccgtcacggagccgctttacttccgggtgcgacgtctacccacccaggacttcctgggacgagccgtcccccgccccagccacgcctctgagtcgcgctgcgcaggcgccattgggcagagggattggcaagcttgcgtgccccagcgacacaggcctcgaggctgtctctgacaagtgttcacaggaggtggggacgcctctgcgcgaggaacgaggagctacgggcctgggcccggttattgccatgggcagcggctgccgcatcgaatgcatattcttcagcgagttccaccccacgctgggacccaagatcacctatcaggtgccacccgggctcgcgggactgggcgggaagagggacgttctcgagagctcaactggctgcctgaaggcagtagtttcccgtgctgcacgcaggcatgctgcttcattcgcagacaactgtgaggctagaggatagtcagacccaggcccccggctcccaatgtggcagggaagacatacgtcacattggcagtgtttgtaggatatcgggctgtagggatccggttggggggttccaggtcccacagaaggtgagttgggtgacccatgagtatccctgaactgagtgaagagtaaatgatgcataggaagtttaggtaaggcaggagaaagtgttccaggtagagggaacagcatatgcagaagccaggaaggaggtgagatcatagcgtatgtttggaaacagaaagaagtaataggcctgagtggatgggagagaggggaacgctggagaagaggacttgggcttggggggcatgaggaggtcaccatttgtactacacccagtacagatgtccactgaggggcccattgccactcccctccccaggtccctgaagacttcatctcccgagagctgtttgacacagtccaagtgtacatcatcaccaagccagagctgcagaacaagcttatcactgtgtgagaccctagctcggggtgagcggtgggtggcaggggttgtcccaggaggaggaagggacaggcttgggggcctgactgtgttccaattatccagcacagctatggaaaagaagctgatcggctgtcctgtgtgcatcgaacacaagaagtacagccgcaatgctctcctcttcaacctggg

SEQ ID NO: 3812 - DNA, 6000 bp, Homo sapiens
ggtctggactctgtcctcagacgccaagtccgcctgcacagggatgggggtaaccccgaccccaacagcccctcctgcggctgtggcatcttgacctacccgctgctcttcctcctccttatggcttcttggttcctctatttctcgcgtcccggctccactagttggctcctgaaatactgccagggcgcacgacttctctccatcctccctatgtccagactgtcatcacctgtcatgggtgaactgcggcagccttttctgtagacctacttccacgcttgatcctcatggacagcccggagccttaaaagtgtatatcaggccgggcgcggtggctgacacctgtaatctcagcactttgggaggccgaggcaggcggatcacttgaggtcaggagtttgagaccagcctgggcaacatggtgaaaccctgtctctactaaaagtacaaaaattagacaggtgtggtagcacacacctgtagtcccagctacatgggagactgaggcaggagaatcgcttgagcacaggaggtggagtttgcagtgaggcaagattgcaccaccgcactccagcctggacaacaaagggagaccgtctcaaaaaaaaaaaaaaagcatatagacattactcccttgcgtgagaggggctctgtggctacttctggccctcaaaatgttaggtgggatgccgcttactagcagctctgcaagatctacttcttgtcctctcctgtacctcgggacttggattctttcctctcctccttgcttccctgaacctccctcatacattccaaagaggtttttgcctcagagttttgcactttgcctggaatacttttccttcagggctcagtttacacctcagcatggcctttcttggccatttaatccagagcagtccctgcctccaacccaactcactcttgatcacatctttttttgaaattgagtctcctgtcacctaggctggagtgcagtggcatgatcttggctcactgcaacctctgcctcccaggttcaagtgattctcctgcctcagcttcctgagtagctgggattacaggtgtgcaccaccacacctggctaattttttgtatttttttttagtggagatggggtttcactatgttggccaggctgtttttgaacatctgacctcaggtgatctgcccgcttcagcctcccaaagtgctgggattataggcatgagccaccgcgcctggctacatctgcttctttctaggtttatttattattattattattattgagatggggtcttgctctgtcacccaggctggggtgcagtgatgggatcacagctaaatgtagcctccaactcgtggcctcaaatgatccccccacttcagcctcctgagtagctggggctacaggtgagtcaccgcatcaggacgatttttttttttttttttttttttttttgtaattaaccggcacttttatttgtcgattgtcggtcctgcccaccagatggcgatctagcccacggctcgtggctatttcattcactgctgggtctcccacggctggcccagaaacagcactcaataaaggctgtttgaaatggatgtctttatttacagaactaagagtcaacctctagacagtatgacaagcctcctagtaggagggactacccacagcaatgtgtccatccagtcactaccagcctcacttccagcagatgatgatgttggggtcattttcaagccgctcatccagctcatggtagctcatgcctgggtggggtggtggaggagaggtcagtggccttggcctggccaccctgccctgaacccaccctgactgcccgcctgcctccacctgtcttgcagcagatctcgtcatagctgtggcagcctgtataaagccgggcagggtggctctgctcttcccgagtcacccgcacaggatacttctgtagtcgcctgatgaggttcttcataagcccgaactggatcagcttcctagggtgaggatcagaggacggggtgacgccctggccaggccttctttcaggcaggccaaccctttcctgtagtctcccttcaattttgtctctgtagcccatcatctccaggaagcctgcttggattggcagtgccccatgatccagggctcctgagagacataaagggtctagcttccctcaggtaactcccaaatgccccagcaaattctcctctgaccgttcatcaacatgctgcagctgctgggggtggcggccaatgaggtctcgcacggtagtgccagggctcaggctgcagtatagctggaacacatcccggagactggccctcttgtgccctgtgggtgccagggatcagctcatcatgtggccctgccctccccaagatggcttcccccagaacccaccactaccttgcttggtcacgtaggatagacatgcctcttgcagggacttgtcatctaccaggtcctggaccttgggcgttgggcagtatacattggagtactagagggtagcagaaggcataggggcctgagtgaggggcttgggaagctgacacagccctggtctggtccagccacatgatccactctccacttaaccaaacccaactcacctacctggaggatggacaccagtgtcacaacgccgtagtacctgagagagagagctgtgctcagcttctgaggaccatgccttcccaaccctcacacccagggcccctgaggtcttccctggctggtgaccttgtcccaggtatgactgtaggcccactcacagcaggttctggatagcaatgcgcaccaggttgagctccacatctgcctctgctgaaatcttctggatgtggcggaacccatcaatgtagggcaggatctgggcagagtgggacaaggtcagaagaaacaggatgaggccagggctgtggccagccccaggtgatgatacccagggagggatggcatacttgttgtgtagtgaggtcccactgtgagttgaagaaatcctccttgtctttggtaaagacaggtacatcatactcctgggccaccggagggtctggccgctgctcaatcaccttcaagtggatggtgttggactcatctgcagggggccccatccatatcctcagtgccacttcttccaagaggtcctcaattaccatccaggcctcccagcatcccttggggcaagcaggtgcctctgggtagggctaatctttctctttttatggagtgagaaacggaggcccacaaaggggaaggaattgcccaaggggcagagctggagagctctgctttccccctacccccagtcccagctccatcatgcattggaccctggacatgggcacctcagcccatggctatttcctgcccaccaatgtgttcatgagtcttgcccttctccctgactagctgggttcactttcccatctctcctctacccctctgctgtccttgcagaggctggccataccaatgggcagagtgcaccggcctgaggcatttagctcctccagcaagatggtcatgatgggcaccaacttctgcttgctctcctccatggacacgaagctgctctctagctagacagagcatggaaagcatggtgggcacatcccaggacccctggctggttggctgccctgagtcctgagctggtttgcagggtcccaggtttgggggactttggagacatgggaacaccttccccaactctgcctgtcggtaaacccaagcccatctcattgcagacctctagtgtggtcagatagccagccagctttttaacaatgggctcgagggcgcaggtcttggcctgggcatcacacacgaagcccaggttgaagaggagagcattgcggctgtacttcttgtgttcgatgcacacaggacagccgatcagcttcttttccatagctgtgctggataattggaacacagtcaggcccccaagcctgtcccttcctcctcctgggacaacccctgccacccaccgctcaccccgagctagggtctcacacagtgataagcttgttctgcagctctggcttggtgatgatgtacacttggactgtgtcaaacagctctcgggagatgaagtcttcagggacctggggaggggagtggcaatgggcccctcagtggacatctgtactgggtgtagtacaaatggtgacctcctcatgccccccaagcccaagtcctcttctccagcgttcccctctctcccatccactcaggcctattacttctttctgtttccaaacatacgctatgatctcacctccttcctggcttctgcatatgctgttccctctacctggaacactttctcctgccttacctaaacttcctatgcatcatttactcttcactcagttcagggatactcatgggtcacccaactcaccttctgtgggacctggaaccccccaaccggatccctacagcccgatatcctacaaacactgccaatgtgacgtatgtcttccctgccacattgggagccgggggcctgggtctgactatcctctagcctcacagttgtctgcgaatgaagcagcatgcctgcgtgcagcacgggaaactactgccttcaggcagccagttgagctctcgagaacgtccctcttcccgcccagtcccgcgagcccgggtggcacctgataggtgatcttgggtcccagcgtggggtggaactcgctgaagaatatgcattcgatgcggcagccgctgcccatggcaataaccgggcccaggcccgtagctcctcgttcctcgcgcagaggcgtccccacctcctgtgaacacttgtcagagacagcctcgaggcctgtgtcgctggggcacgcaagcttgccaatccctctgcccaatggcgcctgcgcagcgcgactcagaggcgtggctggggcgggggacggctcgtcccaggaagtcctgggtgggtagacgtcgcacccggaagtaaagcggctccgtgacggagcggcggtgcgcgcggcagggcccggagtatcccgctttctttggaggaaaccaccgcatcagatctgcgctgcggcagaggcaggcaagtccctagcgtggaggggcagcatgctggcagcacttggggaggcggtgcgctaagggattcacgctgtaactgggaccgcagcagggaactacaatttccatagtgctccgcgccctcccagctggctctactgccggcgacggcgtggtacacgctgggatttgtagtcttacatggctttgcgcctcctacctggaaggcgggccagcgattggtaccagttcagacatgggtacacgttgacaggccgccggccgtcgactggcatgttgtgaccattcctggtgctggtcttggtactgttctttcctaccataacttattggaagagggtggcattcctgccttgcagccttttctccagtgaggagtgaacagtgggcacctgagatcctggcccacgctactatgctttcaggctacaaccactagcacggctgacgatggccctttctgcggagaccgagtcacacatctaccgagctctgcgtactgcttctggcgctgccgcccaccttgtggccctgggctttaccatctttgtggctgtgcttgccaggcctggctccagtaagtagaattcatagctgacttctgggaagggaagggccactgttcctggggaggaagggcagtgggacttccgggaacaggcctggctggttgagggaattctgtgctggagcgatgagtgaggtggagcaggtaggtatggccagggcacacagaattcctggtttgtctttccttctctgggtgctccatttggctgcctctcaggaggtgtaagggaaggagggaggactgccagaggagtggcaaagcatggcctctgatccaggaagaggccaggaagagaggataggtgtggggtcagcttgttgcagagcaagaaggggctcacagtttggcagca

SEQ ID NO: 3813 - DNA, 6000 bp, Homo sapiens
gcgagctccgcctcatgggttcacgcccttctcctgcctcagcgtcccaactagctgtgactacaggggcctgccaccatacctggctaacttttggaattttcagtagagacggggtttcaccgtgttagccaggatggtctcgatctcctgaccttgtgatctgccctcctcggcttcccaaagtgctgggattacaggcgtgagccaccgctcccagccccaaacataaatatttaaaagtgaatgtgtaatactttgtgggactaggttaatgtagtattttgaggaatatttatagctttcaagatacttatcaggaaataagaaaataaaatactgaattaaatatttatcacaggaaattggaaaataacagagctagatcaaagaaataaaagatagaaataatgaaataatgaaaactgattaagaagacaaaaataacaataacagatgaaggcgacaaaaatcctatccacttgtacttaccaaaccagttttagaaccattccaaatcaacgttgaatttacatcagtaaccaaacttctgaaatccagccaatctgcaaaaactgccctctacataagttaacctatctctaacccctcctacttctgaaagtttgccatctattaactccatgcttccccaaatctaaataagatgagttctctgttttgctcagaaagacagtcctacaaacacagctccctcttgtttagcaagcagtccagtcagctatttgtttcagatactgtgtaaagtctttttccatttacactatatatctgaaaaatatttctattcctttccatatggggacagttgcaaggatgttcagtgcagacttactgtgatgacaaaggtttggaggaaaactggatgtctataactgtgtaagtggatattttgaaatgaatggttgtacacattaaagtaaactgcaaaagtcagaaacaacagttcagatatacacatagcgatatgtataaatcttaaaaacatagtgcttggtgaaaagataagaaataggatgagctatatacacaatataatgcaatataatttatttcaaaaatacaaggtaactacataatacacattttgtaagaacacatagaaacaaaaagatacacatttcactcagaatgtttgcctctggggatgaggtaaggagagtgaagaacaataaggaagtacagtagagtacaggaaggtagagtaaagtgagcaaaagagagtccagcgtaaaataatagtataaggtgtaaattaagggggaaagtgaggggagaggagtggaagggaggacagaagagcctagaggagggaaggggagagaagggtgtaaagaagaaggaattggaaggaaagagaaaaaaaaggagagggagagaggaaaggagaggaaatgaggggaagaaagggaggaaaagggagaggaagagaagggagtacaagggatggagaaggaagggaagggaagaggagaagaaaggagaagaggggaggaaagcaggaagttgagagaataccctttcctggaataatgttgctaatgccttacgaattgaggaatataattaacctagcctttgccacctggagtctaaaacatgacaaaaacataatttcatacatttaattaaataatgatggcaaatgtgtatagatcataacaaattgttacagagctatttgttttaacgtatgttctaaggttcaaatgaggtattctctggtttctttcatatttggacataaaaatatgtcccccacagtctattaacatcggggaatatcttcctcttcagaactttattaaaagctttgactaaacaacacttctcacacaagcctttggtagaaaagcacagataaacttaactttttttttttgaaaggcaattaattaaagaaaatgtacaatgagaaatgattcttacactaactgtttattaatgtgttccattataatatctacctagtaatgtattccatggcttttttgcatatttcatgcatacaatgatctctatatgtctttactttctttcatttacttttggagagggatccatattatttatcatgcatgatttactttttgggagggcatccattttttaacatgcatgatattacaggttgaaatgcaaaagagaaaagtaacaacaaaatacctttgtcttttattaaaaccatgctctatatcttaccttaaattgtgtacctatctatacatagattgtaaattcatgtataggttttatctataaatgaatatgttactttaaagtagtcatcatgcgaaaagtttctacttgttaaaataaccacactattggctaaataattttcgataatcctcttttgaaattgtccaaaaaatttttatgtactctatctctctatatattttctgtattagtttattttgccatatcttgttttgtaaaactaaaatgtatacatattgcactgattgaatactttccatttcacagaatgaatgatcttcacctgtttcccaaattaaattcactcatatataatgcaaatgtaatactattgacactaaatctgaagattatcccacaggcaaaaaaaaacaagcaaaccaacaaaagtccatgatctcctacaacaagtatctgaatgatttctttctgtttatttctctataaatacttgaataatagtgcattaggaaacaaaataaaacaaaacagtaatattctcttaaaatcacacagacatgatttgtaaaaatttgtaaaaatttgtttgccactttagttaatctacaaatattttttggctaaattataccaaaaataatggtgttaggattgtaacttaagaaaaatacgatttttgaaaaacaggcttaaatgtctctaaaaagtctagagtctaatgttttcaagttttaaaatacataaatggttaaatttaacttttttgtctgtttccagttaactcattacattacagtagaggaatatgtagaagttagctttttaacctaaacagaggaattggtgatagctttagaaatcatgtttccataaatcagttttgagttacaggctgcctgcatcatcaagacttgaatttgctgtctgtcctactattcttgatttttttttttttactctaaataagaaaggcactaggaaagtcttagagatcgttttctttgctgctatccctaggcaagaagcaggaattagccttgtaatccgatccttttagtctctgcatttaattttaagcaagaaaccaggagactaaagatgtaagactgacgtagaacagcagagggcagtatttactcatgactgaaccctctctgggcgcagaaagttttacgtttgtgagggatccttgtggcagaaatgtatgacatatgccctgtatttgcattgtttggcttgaattcttattttctaggttggttcccttaaaggggaaaaatatcgatctgattcctagtaacgtttttcttcttttaaagaaacgatgcatgccaccacaaaaattaactgcagtgaatagtgggtgagttgatctgagtgcattaagtggcatgtgggtatttttaaaaacttaagcttaaatattattttatttatttctactttctcgtatctatttctcccagactgaaaagcaaaataaaactttattaggtttcctttgactaaaaaatgtggaggtggaaatactccatcagggatcaaaattccaaactaactttgcaacaggaaaagatctccctcttttcaaagggctgccattattattgttgttgaaaccctaaggtttgggctactggcacctggaatccagttgggaaagaaaacaaaacaaacactgagttcccctggcctttcctatagtaggaagtccaaagtgcccttgctacggaggcctcctgccccctagtcacctggaaggtgggggagaggggcaagtgagtgaagatttagagtttagctcgccctagacagcagggagcccactgtgtagaaagaggagcaaaggggaggatttgatttggattctgtgggatcacactgtatggcagctctatcccttgcataaagagagaaggggcaggaaatggttaaagcaaatctgcactgtgcattcccagacaggctttgcttaatccttcctccccgctttaacagaccctcaccccccgcctttcttttatttctctcgacccccttacccctgagttattactagcataacaacctaacggtcttcccccagaccctgccactaaagttatttatctgcaaacctgaccccacccccatctattctgcggcagccttttgctgttattgctctgacgccggccaagatttggccgaaaaggaaaaaaaaaaaaaaaaaagaaaagaaaaaaaatcacccccctttttagcgcctccgcctcgctgtgctcccacaccagaccgcctacagccctccgggaggctgaagtgattagcatcccgagaagccagtcggaggccgggcaaggcggagggcgctcgcggtaggagtgccggtcggggctgcttcagctccggcccaatggggctggggcgagggaggggcagaaggtgacaggactgggagctagggggagtccaggcgaactaaagtgcggggatcaatgagtgtcgagcaaagtttctgagtgctgctccagctcgcggtcttccctccccctctgtttgtgtttcggcgacgcgctgtgtgtgtgtgtgtgcgtgtgtatgtgtgtgtgtgtgcatgcctgtgcggcggggaaggggcggggagagtgtgagggaccaggcgggaggtggagaagggctcgcggagccctagctccaccgcagtccaaccttcggccccggccggcgagagggagagcgctgacaggcgccgtccggagctgcggagggcgtcactacagcccagcgccgacttcgccgcctccgctgccaactgtgaaggagagagaggcatcaaccaccccccgccccaaacaaaaagccttgtggattacaaagtgaaactgacacgggacaataaaagcagagatagcgagggcaggggcgaggcgcgctagagtgggcttctgactggggccgccggagaacgaccccccctggcatggtgaggggagggcgactcggggaccgcacgctgtttctgcccgacccctgcgaggccgagaagaaaggggaaactgcgttcgatttggatgtacaaataatgggtcggcaggcgccccggcagaggtgaaaaatgccgaggagccctggctgttgtttgtgccggaccacgggcttgaagccgcaacaggggcggcggcggcggcggctgcaggaggggaaggggcagagttgagcgctcccgggtacgggagccagagcgcgaacgctagcgcttggaacgcagttcccgaactgcctgcgcgcagacgccgccgcctgggcctcagcggccactgccggcgccctgttggaggggcgttgcagcctggtttttgaggagtggggactccaggaattccatcgcctccagcttttgggaaagaaattcgattctcccggttccccaccaccccttccccggtgcgcagttgtgcttggacgtttgttcctccctcttcacgttcttcgctgcgggtaagttctaaagtttctgaagaccgttctttgcaatgattcctcatataccttagatacaggcaacttctcccaactctcatccacccgggtgaaaacgctcagactatctggattcaaaaacaaagtaaaagggggcatatataagaggcttgagaaacttttctgggaactcagctcacaggagtgtcccgcggaatgccctgccgcttttcgccacagcatctctcttgcactccgcgttcaactggctacctagagtcttttgctgatgctacttgcttttgccggactggaggttctttgaaatagcag

SEQ ID NO: 3814 - DNA, 6000 bp, Homo sapiens
aaaatcccaggaacatgtgctgctgactgttagaagagttttagtggtgagagattaatgtaattacttttgtttgagaaatataattggtcacagttatatacatgtagcttatatgagaagtacattcagttttaaaactcattatgattaattttactttccttaaaaaatgaaaccaaagagaatctaaaatgtgtatgcttctttcattcctaatattccagaatacttagatatttttatgtgaagtaaatgcccagatatctaaatagatataatattatttaaatttaaggtataaacttttacatgacaaaatgcttaatagcctataatcttaaaaacagaattattccaattcccatattgtatgttacttcatcaaatattaccattatatcatgtttcttgtactaaagtgtttcctgtgaaataacgtaataaaatggcctttagtatgcatgataatatttaaatacgcattttctagtaaaatataatgcttattcatttttttcttctagttctaaagaaaaaaatgcaccaaatgcatacacttactttatgataatttctgaaacttaagtagagtttgggcctgcaacagacttgtgttttctagtagttatgtttcattcatgcaggtggtagtggtcctattagttttccttaataagtcccatatagctctggccagtctttcatagaatgagttggtaggtctttcctccaaagtttgatttctcccatttttttcacattgcaatttcaaactttcagtaataccatcaagatgagacagtaaactattattagagttaccacaagtttgaacaaagttgattatacatcgcaaacaaataaatacttaaaaccttgttcatagagatcaggccttgcatacctacatagtccaaacattacattcctgacatttagaacatttaaatgcaaactgttctttgttagggctttctcataactgaaatatgagtcacttgcaaaccataatagattttggctctgctacatgatgaagtgttctggatgtcgtgaaacatttcacccagacttatggcagtagaattcccagtggtcacccaaaatagggaaaaaaatgaagaacaaacttaaaggaaatatgcagactctggcaccatcctttcgtggcaatacagctctttattgttgttaagaaatggaaatatttagagcctaaacccataaactatagtacaattaggcgttgaattttttttttgttcctaattacgaaatttaactctatacttgattctcatgtttaaggtcaggtcatagagtgtttctttacacatcaccctgatgcggtcatactgagttgtctcccagcactgagcttctcactgcattgtgggcaaactcatattccacactctacactcatctcaggcaggaaaggtggagttttccttttcagggccaaaggaagcaacagctgaggcgtgatggttgtactgatattggtgtgggtttcaatttggttagtttgctttcaatttcaactcctcacttgagattccatacagaaaagtaaatggtaggcttccagcatcttgtttcactctggtgaataaaaattgttttgaatgtaagattagagtttttccttgcttaattttagtagtacctacacagcataaactgaggcatcatttagcaaaatgttattgagttgacatcataatgacctattaagggcaatacacatttgaatgagctcagttattcttccaggtttacacgtgcctttcatggtgtttagtgtagcagcttttgaagcagagatgggcaatgtgtaggaccttttattccagtctcctaagtgggagatattctgaacaaaacatattaaggatattttttctgaagtttttgaaattttaagtcatgattcacttttcaaaagaagacatttatgtggccaacaaacatgaaaaaaagctcaacatcactgataatcagagagatgcaaatcaaaaccacatggagataccatctcatgccagtcagaatggcaattattaaaaagtcaggaaacaatagatgcttctgaggctgtggagaaataagaacacttttacactgttgggggtaatgtaagtaagtttgaccattgtagaagacaatggcaattcctcaaggatctagaatcagaagtaccatttgacccagcaatcccattactgggtatatacccaaaggaatataaatcattctgctataaagacatatgcacatgtatgtttactgcagctctatttacaatagcaaagaaatggatccaacccaaatgcccatcaatgatagactagacaaagaaaatgtggtacatatacaccatggaatactatgcagccataaaaaggaatgagatcatgtccttttcagggaaatggatgaagctggaagccgtcatcctcagcaaactaacacaggaacagaaaaccatattctgcatgctctcactcataagtggaagttgaacaatgagaacacgtggacacagagaagggaacaacacacaccaaggcttgttgggggcagtgggaggcaaggggagggaagttggaggttggttcaatcagtgcagcaaaccaccatggcacatgtatacctatgcaacaaacctacacattctgcccatgtatcctgtttttcttttttagaagaaatgttttgttttaaaagaaaaaaatagtaagtcattattatgagtagttactgaattatcataaaatatcatttcataacataaaaattatatatgatagcatgttcccacacaaaaactaggaaatcaataggtttgaattgctttaaaatatcattgtaatagtggataactttgattaatacatctttatatgccagtagaatgcctatgttattattacatttgctgaatatgggactttaataaaaatgtaaaaatgacctggatttgcttaaaaacagaaatatttctagaggagaatttacatgctagacatggataagttgtcagaatgagcaggacacattattgctcttggaatctcagaatatagaagtctctaatttaagtaatataaatgatcttcagtatcctgaagatatttgcaattacctatgttggtaatatataaacttaaatcagagctacaaaatactattattgaaataaatatttctgacaaaactgttacttgcttgtatttaaaagcaatcttgatggcattatcttaatatctttagagataacacttgtgaactctaaacattatttttagtgcaaagtttgtcataatttatgtggtttaagtgacaatattacatgagacaattaattttggagtgtcagttccacaaatccaaaaagtcaataaagtaaataattatttttgccactaaacaaaacaaaaaattaagcactatttgccttgatgcatcaggtgttactattttatagtttgtacagtttctgtctatcctgccaactatttaaatgtaagccattctgaaaatgggtatttatatgttgcatcttttaagaaaaagaaatagctttttgtatacgttttaatagtaatcactttcactgatatttacagagaatttaactatagtttctttagttgtaatacatacctattgtctttctgctgaatgtctgttttccagtggcattgataagacgaactctcacagattattttatcttaatataaatataaaagaacctaaaaataggcaagaagtgaataaaatgttttttaaagtagcccatcaaatattattttcatcagaaattattttcttgttgacataaaatgcatattttttatgaaagatcattctctctgtgcaaagatcagagacattgtgtcttaggcacatcattcagcttgctccacagccctggctgtctccactactctggaaaaatcagtgccctcgagtaggaggcttaacattgtttttcttagataaatcacttgacatttcagtgccttaattttgactctctgtaaaataacagaaatggaatggaaatggacttgatgatatttaacattcctacaaaaagtattagtatgttgacttgcaaatgaatggatttctgaactttcagtgtactacaaatcctacggtctcccaaaagaaaacaaaagattgtttttcttctttatttgagaaccattttatgtagattgcaggaaggttgtgaattaaaatatgtttagattttttcattccgttcattaagaaacatttgatttaagctgcagagaggatatgcatttaagaatatgtttagaattgtggttgaggtggcaaccaccatgcaattatcagtttattaacaggggaatgaactcataatggactttgctattttagtcatttcctttaacttgaatataatcttctactttcataatatcaatttaaattggggaaatagcatgttttatcattagatccacaaatatataatggtttgatattagcgattgttaggtaatgattgttccttagttatgtagttgtatgctgaaacatttaaaaaattaatccccatgtataataacattcttgatgtagagcaaaataaaatgatagactgcatattataaaaaaaagagaaaagcattatattattttatgcactattcccacagaaatattttttagttttaaaatatccatttgacccttcagcaagctgaataccagggattttattccttcagcataaagtaatttggtaacaatatttaaaggcatatttctaacttaaattttacttttataaaattaccaaaagacagatcatttgtgaactaattggttattagctcctttaatctcagtcatgtgtttgtctctaaataaaattatttcatttaccagagttttactgctcagggctcaggtgactcagtcaagaaagtcattcttgtgaagctacctaaatggtaacaacggtagtggcagtgggtgataccttagctcaaccattagctgcagctgaagtgtttattgtaagtcaagcacagatctaccaactacatttcttctaattgtagcagatgaaaccacacacatttttaaaggaccagatatctaagcacaaaggtcaacatttggtaggcatgcagaaaacatggaagtgccttatcttaacgggatcatgaatcttcatctttaaagggcagtttttacagattttcagaattgataccttaagttgttctgaacttcaattacaaaagctattgccagattgtgttttgtttttattcaaaatgtagccactcatgaagagaaacttctgagtttgaaatgtgatttgtgtttttgcaaaatgtttatttgaatgcaattttacctccagtctaaacaaatgtaaagataaatgtaaaacactaagaggggcaatgctggcactgaaagcttaactatgtagtagtattgggtttgtcctttaatttttacaacatatgcttttttagtttagaaataatattgtagacttttaagatctcagaattttaagctaaaccactaataacaactgtcttcattatttaaagtgatctaaattgtatagaaataaaagggttttaagaattataaaaatgtagttattgtttcctgcttttttctctaaacttctaatgttcaattcttgtgttttatataacgttttaaaataaatcacaccaaaccttagtctaaagaaggtatagtaatggttggtgtcagatctgagagtgaaccaagcacatgttaggatttagaatcatcaagataaatagtaacaccaatggcaacaaggaagcaatttaaagacaaatttctggaatcaagatgtcaacagtgtattttcccagggatgactgcttctgtttgtaaatattgctattaaagtacatcacctattttctacaagggatgctgacttgtcttatt

SEQ ID NO: 3815 - DNA, 6000 bp, Homo sapiens
ttctaataattttatactgaacatttttatatttaatctttcattactttagaattcatttctctgtgatgcagtcgtcaaatttattctttccaaacagagagccagtcatgctgggcttttcattaagcaaatagacgttttcccacagaattggatagtaaaatgttatcatcttaaataaaaccctaaatcagtctcaaggggtgcaggggagtcatactttaaaaaatatgcttaaacttggttctggtttattttttcctctgtgtgattcacagggagttcatctatgacactgactggaaacagctacgtgaaataccgtctgacggaaaatgaaaacaaattagagatgaaactgaccatgaggctcagaacatattccacgcatgcggttgtcatgtatgctcgaggaactgactatagcatcttggaggtatgtttctccacagcgttgcatcttagtggaagactttcaaaccataaatttcattttatattcagattgttaatttgcacagataataaagtaagtgaaatggttgaattccacatttaaataattcattgatgcctgtacaagttttagactttgtgggatgaagagctctttttgccctgccatgacagagatttaggtccatgtgacagttaacattcaaactctaggtgatgccccattttaataatgttggctgggtgtggtggctcacgcctgtaatcccagcactttgggaagctgaggcgggtggatcacttgaggtcaggaatttgagaccagcctggccagcatggcaaaacctgctctctactaaaaatacaaaaaattagccagacttggtggcggacgcctgtaattccagctactcaggaggctgaggcacgagaatcacttgaacaggggaggcagaggttgcagtgagttgagatcacgccactgcactccagcctgggcgacaagagtgaaactgtctcaaaaaacaaaaactgttacagtttatagagacatcctacatgtgtttcaagtgttatgtatcttgcccaccttttttaaaaacattattcagttttgacttttgatattacctaatgcttatgtgttcagttaatagttaattattcgcttccatgatgctttgtggatgtgcattttaacttgatattcctaaaagacgcattttaatgatttatacagtggacaaatgaatctgtgctctgtagtacttaaatgtaaggcctaacttctaccctcactccctaagccctctcctgtagatttgtgatcaggtgctctcattgaaggttctatgagagtaatgtgaacagtcattgcttttatcctagattcatcatggaaggctgcagtacaagtttgactgtggaagtggccctggaattgtctctgttcagagcattcaggtcaatgatgggcagtggcacgcagtggccctggaagtgaatggaaactatgctcgcttggttctagaccaagttcatactgcatcgggcacagccccagggactctgaaaaccctgaacctggataactatgtgttttttggtggccacatccgtcagcagggaacaaggcatggaagaagtcctcaagttggtaatggtttcaggggttgtatggactccatttatttgaatgggcaggagctccctttaaacagcaaacccagaagctatgcacacatcgaagagtcggtggatgtatctccaggctgcttcctgacggccacggaagactgcgccagcaacccttgccagaatggaggcgtttgcaatccgtcacctgctggaggtgggctccgtaatgttgccatctttaaaatgctgcacgtgtgtacatttaaggggaagctccccaggtatttttttatttttttctcttttgattcagataattttgtcagacactgcagtcagtgttggaagcgagcagcatccctcatacgggggcagagctgggtctgctgcccttctggtgcccaggctgcaggtaccacggctcccactgctgagcgcctgcagtgccctcccagtgcccgagcaggaggcacctcaagtgactcagaactcttctttaactccatagtcatcggcccaggggaatttagaattcgtaccgcttagcccttctttgttatttgtatcaccttttatctaatggctcagcgtagggggcctgctagattcttgctggcaataatagttgggaatatgattttccagaaggccctgaatccctcctgaagtgttgccatatctgtctgtcttgaagccctggcgtagtggggtactttgtgtcttttgcaccctggactcctgttaggcccacttaccaataatagggtacagttaggaaaatgacagttgtcataccaaatagagcttggtataatgaacagagcaaaaataatactgtcattaagtgggatttccaaagctttggttttctgctgttctctcagggaggtatatttgcattctgtgtgcgtagagtgggccaggccatccccacagaaacactctcatttatactgtgctcatattagttacacgtccaaaccaggttagcaaggaggccgtcctcattttgtcacttagggatgaggctgagagaggtgctttcctgacatgcactcccatggtcccgaagcaggagtaaaggagtatggcagctgtgccctggctcctaaaggccctggcccagggcaccacagttcttcatcctgagaaaaacccacagccacgccagctttggaggggcggggaagcactgtgctgcggtgtgccctcaaggcaggcagttagaagatctgccacaccacctgtcacttgacaaagtggagtcgacattcttcgtactgctttgaacagatgtgatgatctcctttcttaaatctttacatgtttgagaggctgaggcaggaggatcacttgaggctagaagtgaggcagcctgggcgttacagggaaaccccatctctacaaaaacttaaaaaatcagccaggcatgtggcatgcctctagttccagctactcaggaggctgaggtgggaggatccctgagcccgggagtttgaggatgcaatgagctgagattgcgccactgcactccagcctgggtggcagagcgagaccctgtctcaaaaaataaaaatattgaaaggtaatttatagtcttcaaagtgcttttcacattcattattttctcatttaatccttaaatgcttgtgaattgcaaataaattgagatgttaagtggtgctgtctacgtacatggtcactcaggtaaagaactgtattttcctcctctatatgtgtgacctagtgatcttaatgcagattatgatgaactaaagctaactgagttctctcttcaattctgggtgttttggttataccagcagtggaaggcttgttgatgtagccaacttttttcccagagagagtgagaattttacgagcttttacagacctcggagaataaagataaaaagcaatataattaagaccaggtttctgagtcattgagtgataggacttttttgttcctttttgccgatttaggttattactgcaaatgcagtgccttgtacatagggacccactgtgagataagcgtcaatccgtgttcctccaagccatgcctctatgggggcacgtgtgttgtcgacaacggaggctttgtttgccagtgtagaggattatatactggtcagaggtatgtgtatttttcttaactttcataatcaattgtagtataaaattcttaaacatataatggtacatgtaaaaagtctgcacgttaatttgctaatgtgttctgttttgctttctgttttgctgtatttatttgcaataggatcatgaggtttatgtctgtttctccttactcttcaggtgtcagcttagtccatactgcaaagatgaaccctgtaagaatggcggaacatgctttgacagtttggatggcgccgtttgtcagtgtgattcgggttttaggggagaaaggtaaatggtttctttcaaaatttaggttcataccttttcatagcgtcatattgactggcagatgcaacagaccttcagtgatttgaactacattatgtcagattttgataatcctcatattggccccttatataatttataatcttttcactctttaaaatgaattatcaagcagatgaatacagtatatataatacttgaaaaaaactaatgtttagccaatggggttgatgtaatagtctgttgatcctaggaaaatggccattaatattggcttgatatgtttccttcccaaatatacatcaaaagcatgcgatcacatgattggtttctccacagaaggtcttttctcgtggttgtcgacgttacattttttagttgtcttttatctgggtttgatcttcacatagctcatcaaggagggattagtcttcagtctctaaggattgagcctgacatacgctggcgtatgctacagaggtctctcctcattcctgacttccttggcaggtgtcagagtgatatcgacgagtgctctggaaacccttgcctgcacggggccctctgtgagaacacgcacggctcctatcactgcaactgcagccacgagtacaggggacgtcactgcgaggatgctgcgcccaaccagtatgtgtccacgccgtggaacattgggttggcggaaggaattggaatcgttgtgtttgttgcagggatatttttactggtggtggtgtttgttctctgccgtaagatgattagtcggaaaaagaagcatcaggctgaacctaaagacaagcacctgggacccgctacggctttcttgcaaagaccgtattttgattccaagctaaataagaacatttactcagacataccaccccaggtgcctgtccggcctatttcctacaccccgagtattccaagtgactcaagaaacaatctggaccgaaattccttcgaaggatctgctatcccagagcatcccgaattcagcacttttaaccccgagtctgtgcacgggcaccgaaaagcagtggcggtctgcagcgtggcgccaaacctgcctcccccacccccttcaaactccccttctgacagcgactccatccagaagcctagctgggactttgactatgacagtaagagccactttttcatctcactaaagtgtcacttgagataaacagtgaggttacaaattctgtccagtcaaaatgtgtgtactcttcattagagacaagtatgctcagactgaaatccgtatgatgatttgaaacttttttggatgtcccgattgctgggttagcattgtggctttgatgttattttaattaagaaattgaatctagtcatgtttagttaatattctggagagatcatttcattttataattgataaaggttctcatctataattttttgagtttattaatatgtcaaaaaaataatcgggagcattttcatgctaggatttttaaaaatatgacctggcgaagtggaaatatttatattagtgacctaacatatatttgatgcttttttcttttaaagctgtacatactattttaaaacaaaattttagcagcctttactgtctaatgatacccataggcatgcttatgggcgatttctactctatgaataatctctaagatgatgtggaggtctttctgtgcaggggttttttatttcttcgtttgagtttgtaaggtgtttctgtttttctttcagtcattcatttattgagtaaatctcaggccatcgttgggtaatgcatggtgtgtctcaggattcagcggtgaacaaaaccgtcttggcccatatacttactgtttgtcatccttccttttagcaaaagtggtggatcttgatccctgtctttccaagaagcctctagaggaaaagccttcccagccatacagtgcccgggaaagcctgtctgaagtgcagtctctgagctccttccagtcc

SEQ ID NO: 3816 - DNA, 6000 bp, Homo sapiens
gattacaggcacccaccaccacgcccggctaatttttgtatttttagtagagacggggtttcaccacgttggccaggctggtctcgaactcctgacctcaggtgatccgcccgcctcagcctcccaaagtgctgggatgacaggcgtgagccaccgcgcctggcctcgtctcttccttttctcctccagtcctcttcttctcctacactcctcctcctctctgctcttcctcctgtcccccactcctcctcgtgtctgcttcccctcctccctcttcctcctcacactccctttcttaccatgtttccttcatcctcctttttcttcccttttcgctacaccccttctcctttccctcctcctcaccaccacactcccgtctccacctttcttctcttcctttcagatagagcagaaaggctttgttttgtatgtattttatattatagaaaactcatgtgtctgtcccatatagatttggctgtgttccaggatttttgtttaattttgtttctaatcttgtgcaggaaaataagccagtgggcttcagcgtgctgcagctggtagtaacagatgaggattcttcccataacggtccacccttcttctttactattgtaactggaaatgatgagaaggcttttgaagttaacccgcaaggagtcctcctgacatcatctgccatcaagaggaaggagaaagatcattacttactgcaggtgaaggtatgaatggctttctttgtggtttggttgtggattcatagagaagagctgcttggcgtggttcccctcttctatttgaacagcttacatttcatacaaaaacaaactttcatagaattgctgtctttgttttttgccataccttccatttttatcccgctgtgtttgaaggagctcattgttgattctgtcatagtcattgacagagctgggtttcagtgtgaattagtgaagtgctataaagaaatttgtccttttctttgatacgtttcttgtgtggagaaatgagtatctaccagttagtaattttttgggaacttgagtaatacaaatgtttttattgaagaagttataaacagtgccatagacaaaggtgattttatttttcttttcttgtaggtggcagataatggaaagcctcagttgtcatctttgacatacattgacattagggtaattgaggagagcatctatccgcctgcgattttgcccctggagattttcatcacctcttctggagaagaatactcaggtggcgtcattgggaagatccatgccacagaccaggacgtgtatgatactctaacctacagtctcgaccctcagatggacaacctgttctctgtttccagcacagggggcaagctgatagcacacaaaaagctagacatagggcaataccttctcaatgtcagcgtaacagatgggaagttcacgacggtggccgacatcacagtgcatatcagacaagtcacacaggagatgttgaaccacaccatcgcgatccgctttgccaacctcactccggaagaattcgttggtgactactggcgcaacttccagcgagctttacggaacatcctgggtgtgaggaggaacgacatacagattgttagtttgcagtcctctgaacctcacccacatctggacgtcttactttttgtagagaaaccaggtagtgctcagatctcaacaaaacaacttctgcacaagattaactcttccgtgactgacattgaggaaatcattggagttaggatactgaatgtattccagaaactctgcgcgggactggactgcccctggaagttctgcgatgaaaaggtgtctgtggatgaaagtgtgatgtcaacacacagcacagccagactgagttttgtgactccccgccaccacagggcagcggtgtgtctctgcaaaggtactgcacatgagtgtatgaaagtcggtgtcacagatggtttcagacggcctttgaagcctttgatggctatacatgaaaggtgatgttcttgaaatgtctgttaattatcttttccctttctcccctctttgaatgaagagggaaggtgcccacctgtccaccatggctgtgaagatgatccgtgccctgagggatccgaatgtgtgtctgatccctgggaggagaaacacacctgtgtctgtcccagcggcaggtttggtcagtgcccaggtgagagttgaatggttgggtatacttttatttttaaaaatcggtttcattgtttcttaccattttcttctttattggagtctaaaaatattgcaaagtatgtttattgtaagaagacagatgtggagatgaataaagaatgacagtagtaagttttgcttcctcttgttacagcacaccccttggttcatagttggtgtccctcctcctgtgtcttcaatgattatatagacatacagctaacaacgcagtgccattatgtagcagtttaattttcctggaaattcaagagtgatcatatctcacacagttctctccctgttgccttttccctccacttagcagtatggtaaagagcacctttcgtatggttccgagccagtacctttaaacctgattctttttgatagctggataatattttctagcatggctgtacttattcaacattgttcttatgtgtaaagattcgagttgttctctttctttcagataaagaaatctttatacatgtatctttacatactgatgcgttcatttctatacggtgtatagattataaaactagaatttgctatctcaaacatcaatgacattttaaatttttttgtatcactatattagttttccaaaaagtcgtattaatttttatttctcccagttatgtatgaaggtttcactctccattcttttgacatcattgaacattttcgattataaaacaaattccccaccatctattttatgggtgtgaagtgatatctaattattattttaatttgcatttctctggctactttaaaagttttcatctcatttgttcatttcctatcagtattgcctctgctgtggcctctacctgttcatgttgtttgatggtctgggttatttgtttcttagtatcaatgtgtagagttacttgtgtattaggagtattaacattcacagtgttgcagttacctctgtctttatatcatttatattgatgttatcttttgatttgttaagtatgcctcttgtcattttgaaattcaattgttatttagtcagttctacataattttatgtaacagttgccatctgtggagattgatgacatttgcatcttctttggggaatggggattgttttattttgcttgagaaggtttcttaaatcaccttgaggctatgtataactattttctgaaattttcttctaataattttatactgaacatttttatatttaatctttcattactttagaattcatttctctgtgatgcagtcgtcaaatttattctttccaaacagagagccagtcatgctgggcttttcattaagcaaatagacgttttcccacagaattggatagtaaaatgttatcatcttaaataaaaccctaaatcagtctcaaggggtgcaggggagtcatactttaaaaaatatgcttaaacttggttctggtttattttttcctctgtgtgattcacagggagttcatctatgacactgactggaaacagctacgtgaaataccgtctgacggaaaatgaaaacaaattagagatgaaactgaccatgaggctcagaacatattccacgcatgcggttgtcatgtatgctcgaggaactgactatagcatcttggaggtatgtttctccacagcgttgcatcttagtggaagactttcaaaccataaatttcattttatattcagattgttaatttgcacagataataaagtaagtgaaatggttgaattccacatttaaataattcattgatgcctgtacaagttttagactttgtgggatgaagagctctttttgccctgccatgacagagatttaggtccatgtgacagttaacattcaaactctaggtgatgccccattttaataatgttggctgggtgtggtggctcacgcctgtaatcccagcactttgggaagctgaggcgggtggatcacttgaggtcaggaatttgagaccagcctggccagcatggcaaaacctgctctctactaaaaatacaaaaaattagccagacttggtggcggacgcctgtaattccagctactcaggaggctgaggcacgagaatcacttgaacaggggaggcagaggttgcagtgagttgagatcacgccactgcactccagcctgggcgacaagagtgaaactgtctcaaaaaacaaaaactgttacagtttatagagacatcctacatgtgtttcaagtgttatgtatcttgcccaccttttttaaaaacattattcagttttgacttttgatattacctaatgcttatgtgttcagttaatagttaattattcgcttccatgatgctttgtggatgtgcattttaacttgatattcctaaaagacgcattttaatgatttatacagtggacaaatgaatctgtgctctgtagtacttaaatgtaaggcctaacttctaccctcactccctaagccctctcctgtagatttgtgatcaggtgctctcattgaaggttctatgagagtaatgtgaacagtcattgcttttatcctagattcatcatggaaggctgcagtacaagtttgactgtggaagtggccctggaattgtctctgttcagagcattcaggtcaatgatgggcagtggcacgcagtggccctggaagtgaatggaaactatgctcgcttggttctagaccaagttcatactgcatcgggcacagccccagggactctgaaaaccctgaacctggataactatgtgttttttggtggccacatccgtcagcagggaacaaggcatggaagaagtcctcaagttggtaatggtttcaggggttgtatggactccatttatttgaatgggcaggagctccctttaaacagcaaacccagaagctatgcacacatcgaagagtcggtggatgtatctccaggctgcttcctgacggccacggaagactgcgccagcaacccttgccagaatggaggcgtttgcaatccgtcacctgctggaggtgggctccgtaatgttgccatctttaaaatgctgcacgtgtgtacatttaaggggaagctccccaggtatttttttatttttttctcttttgattcagataattttgtcagacactgcagtcagtgttggaagcgagcagcatccctcatacgggggcagagctgggtctgctgcccttctggtgcccaggctgcaggtaccacggctcccactgctgagcgcctgcagtgccctcccagtgcccgagcaggaggcacctcaagtgactcagaactcttctttaactccatagtcatcggcccaggggaatttagaattcgtaccgcttagcccttctttgttatttgtatcaccttttatctaatggctcagcgtagggggcctgctagattcttgctggcaataatagttgggaatatgattttccagaaggccctgaatccctcctgaagtgttgccatatctgtctgtcttgaagccctggcgtagtggggtactttgtgtcttttgcaccctggactcctgttaggcccacttaccaataatagggtacagttaggaaaatgacagttgtcataccaaatagagcttggtataatgaacagagcaaaaataatactgtcattaagtgggatttccaaagctttggttttctgctgttctctcagggaggtatatttgcattctgtgtgcgtagagtgggccaggccatccccacagaaacactctcatttatactgtgctcatattagttacacgtccaaaccaggttagcaaggaggccgtcctcattt

SEQ ID NO: 3817 - DNA, 6000 bp, Homo sapiens
tgccacaggcttcatgctggtggggaccaggaatcatattgaacactctacgtttccccaaagaatctaagagttgcccagcatgtcactagtgtaagccctgaccctttggatttagggttccctcttttccttcaggttcctgaccctggtctctctttgccctgctttagttttctccttagcacttaattatcagcatcggatatactctgtttacttgtctgtctgtgtctggccaggaaatgtatcttccatcaggacttgttggtaatttggttcacttttgaatccccagcgtctagaactgcacctgatacatagtagatgctcattaaacctatgtaaaaggaattaaataattaatgaaaggggtgagtggatgataaagacaacacatactcatgctaaaaaaaaaccacagtagagaaaaatgccacagtaatcattccctcagctacctgtttctctaccggttctccagaagttaccactgttaacagttgcttgtctgcctagacttttctgtccattttaaagtatatccgtgggtacattgtatctaccccccttctcctctcttttaaataaacataaataggatcagcttcgtttttccagtttatatagctagacatatgtcaacatacagagtgctatcttttaatggctgcatgataactttatacgtagaattaagcaaaaatacttctagtacttgcaatagaatcctggtataatattttgttgtacaatggatgatggtaaaaatgtctcctaaaacataatgtgactcctaaaacaaaagacactgcttgctaaacatcatccaagtgtttctggttttgtttttttgtttttgagacagagtctagctctgttgcccaggctggagtgcagtggcgcgatctcggctcactgcaatctctgcctcccgggttcaagtgattctcctgcctcagcctctggagtaactgagattacaggcttgctccaccatatcctgctaatttttgtatttttagtagagatggggtttcaccatgttttggccaggctggtctcgaactcctgagctcaagggatccggctgcattggcctcccaaagttctgggattacaggtgtgagccaccgtgaccagcctctttatatgtatttttatttctagtttgtaaatcccttgggattgggatctttgtcttttattccttaacaccatgcaaggttctgtctgataaggtcctccatacctgtaggttgaactttttatttgttttgataaaattacaagattattttataatattcaaatttccctgagtattagaactgttgactaaatggagatacttaaagagatagttttgggagaaaattgttttcttattttgtttaaatgataattgttctcctagaagccaaaaatctgtctaatttctgactttatctggagaggagaaggcatcatagctaaagaacaagttagggtggccaacttgaacgtggttcaatatcaattaagctttaattgctttaagcacatcaggtctttttttccccctaaggcaatgacttatggggcagagttggcagtagctaagttaagatactataaattaatgttgtcgtaccaatttcaactgggctgtcaaacccaccctccagtttgctcttcatttacctctggtagcattcacattttgtgaatattaatttgagagtcactttgcaagatgacagtgctgtcctttgtgaagctgtgttgatttacaagatgaatttgttggcaaaggggaacagttgatctgaaaataactgtcctgcttccctggccagacctcagcccagtggacttcgcccaccttcccatttgtcattgttaaaggcaacgttttcttcatttcttcagtttctctcttttctccgccagtcacccagggactgtcctgcagagtctgccaccatgtattaatagactgatttgacccttgacgtgtgttagcttagaagatttagcttttgtgtgtgtgtgtcatcttctcatggaggggcccagggtgacaggttgttcgatgccctgaagataggagacattctgtgaacaactggttgttgacagcagtggtgataaaacattgatatagttggtaaagtttgcttcactgacttagagaggaaaaatgctgtttgacatcaggctgctgaattctggtttttcttttgtaaattgcctttctttggggcttatgttgctgataagtattatacttgatataattattttaatacttttaagtagttacatagagcgaaatgagacaataaacccttacattatgtagggagtgaacttaaccattcttatacagaaataatataatttcaggatacattttgaaatgagattacaagctgttcttatggagcgccatgtaaaaccactgctggtttttgtttttttctgaattagttgtcagaagctttgcattctcacaatactgtaggggcattatgtttgccagcttttgatcatttaattcattgtatgtaagtaaatgtaaacaatgttcattaatttttaacagttgcttatatttgccttaacgatttaaatataaaaatataacttagttgttacagttagtagcctttcatttgatactcatgaagatttttgagtcgtttaaatatgaaagagaggaccttgtcgttcaaaaatgaaaaggaagtttttgttaagcttaataattctagacatgttacaagaatgttgatacttatattggaaaacatgaaaaacatcccaaaccgttgcatttatttatattccatgtgtatggaaaatatttttttaatgagaagtttaaaacaatgtacacacttttgcttgttttatttccccaaggtaacgattctgatttcttctgtttcagattcccgacagttaagcaatggggagacatttggctttgctcctgcttctgctccttctcttccaacattttggagacagtgatggcagccaacgacttgaacagactcctctgcagtttacacacctcgagtacaacgtcaccgtgcaggagaactctgcagctaagacttatgtggggcatcctgtcaagatgggtgtttacattacacatccagcgtgggaagtaaggtacaaaattgtttccggagacagtgaaaacctgttcaaagctgaagagtacattctcggagacttttgctttctaagaataaggaccaaaggaggaaatacagctattcttaatagagaagtgaaggatcactacacattgatagtgaaagcacttgaaaaaaatactaatgtggaggcgcgaacaaaggtcagggtgcaggtgctggatacaaatgacttgagaccgttattctcacccacctcatacagcgtttctttacctgaaaacacagctataaggaccagtatcgcaagagtcagcgccacggatgcagacataggaaccaacggggaattttactacagttttaaagatcgaacagatatgtttgctattcacccaaccagtggtgtgatagtgttaactggtagacttgattacctagagaccaagctctatgagatggaaatcctcgctgcggaccgtggcatgaagttgtatgggagcagtggcatcagcagcatggccaagctaacggtgcacatcgaacaggccaatgaatgtgctccggtgataacagcagtgacattgtcaccatcagaactggacagggacccagcatatgcaattgtgacagtggatgactgcgatcagggtgccaatggtgacatagcatctttaagcatcgtggcaggtgaccttctccagcagtttagaacagtgaggtcctttccagggagtaaggagtataaagtcaaagccatcggtggcattgattgggacagtcatcctttcggctacaatctcacactacaggctaaagataaaggaactccgccccagttctcttctgttaaagtcattcacgtgacttctccacagttcaaagccgggccagtcaagtttgaaaaggatgtttacagagcagaaataagtgaatttgctcctcccaacacacctgtggtcatggtaaaggccattcctgcttattcccatttgaggtatgtttttaaaagtacacctggaaaagctaaattcagtttaaattacaacactggtctcatttctattttagaaccagttaaaagacagcaggcagcccattttgaacttgaagtaacaacaagtgacagaaaagcgtccaccaaggtcttggtgaaagtcttaggtgcaaatagcaatccccctgaatttacccagacagcgtacaaagctgcttttgatgagaacgtgcccattggtactactgtcatgagcctgagtgccgtagaccctgatgagggtgagaacgggtacgtgacatacagtatcgcaaatttaaatcatgtgccgtttgcgattgaccatttcactggtgccgtgagtacgtcagaaaacctggactacgaactgatgcctcgggtttatactctgaggattcgtgcatcagactggggcttgccgtaccgccgggaagtcgaagtccttgctacaattactctcaataacttgaatgacaacacacctttgtttgagaaaataaattgtgaagggacaattcccagagatctaggcgtgggagagcaaataaccactgtttctgctattgatgcagatgaacttcagttggtacagtatcagattgaagctggaaatgaactggatttctttagtttaaaccccaactcgggggtattgtcattaaagcgatcgctaatggatggcttaggtgcaaaggtgtctttccacagtctgagaatcacagctacagatggagaaaattttgccacaccattatatatcaacataacagtggctgccagtcacaagctggtaaacttgcagtgtgaagagactggtgttgccaaaatgctggcagagaagctcctgcaggcaaataaattacacaaccagggagaggtggaggatattttcttcgattctcactctgtcaatgctcacataccgcagtttagaagcactcttccgactggtattcaggtaaaggaaaaccagcctgtgggttccagtgtaattttcatgaactccactgaccttgacactggcttcaatggaaaactggtctatgctgtttctggaggaaatgaggatagttgcttcatgattgatatggaaacaggaatgctgaaaattttatctcctcttgaccgtgaaacaacagacaaatacaccctgaatattaccgtctatgaccttgggataccccagaaggctgcgtggcgtcttctacatgtcgtggttgtcgatgccaatgataatccacccgagtttttacaggagagctattttgtggaagtgagtgaagacaaggaggtacatagtgaaatcatccaggttgaagccacagataaagacctggggcccaacggacacgtgacgtactcaattgttacagacacagacacattttcaattgacagcgtgacgggtgttgttaacatcgcacgccctctggatcgagagctgcagcatgagcactccttaaagattgaggccagggaccaagccagagaagagcctcagctgttctccactgtcgttgtgaaagtatcactagaagatgttaatgacaacccacctacatttattccacctaattatcgtgtgaaagtccgagaggatcttccagaaggaaccgtcatcatgtggttagaagcccacgatcctgatttaggtcagtctggtcaggtgagatacagccttctggaccacggagaaggaaacttcgatgtggataaactcagtggagcagttaggatcgtccagcagttggactttgagaagaagcaagtgtataatctcactgtgagggccaaagacaagggaaagccagtttctctgtcttctacttg

SEQ ID NO: 3818 - DNA, 6000 bp, Homo sapiens
gctgcccactacattagcacagctctagaggttctgttaaaagttttctgcccatctcactttgaaaaccagctattttgactaatatcatcaattgttattcataagttcctgtcatttgtgatttttatcttttttaagtaatttggtttatttattacaactttaaagtgagtatagcaaaccaaatggacttcagcgagaagcctctcggggtgaatttattgtgaatcattttgaggacttgcaatatgtggtcaatttctaatttcaactattgacacaaaaggagagagcctgtgtagttgaaacagggaagcaggagaagtccgctgggcactgacagactggcctctcaagccagcctcctccctccttaggaatctggcaccctctagctgccctcggggtctgcaggagctctaaaatcccttcctatatccctccgtgtcctagctccctggatcctctcctcccttccaaatcaaaatgtaccttgagggagaggcttgggcaggaggatctcttgagcccaggagacctgacttgagtctggagacctgcctggcagaatctccaatcagtggtgatgatgctgattttatggattaaaaactgagacactgccaagaagtgagggaagggagcgggggagggcaggaaaactaatattgtttaagtacctactatgtgcgtgctagacacttcatatgatgctcagtaaaaatgctttgcctgcatgaataactgttatctccctggcaagtagagtgcagtatgttttttttttgaatggataaacacatgaatacatttttaccacatgaagcagatattagtcccatatcacagatgaggacactgacatttagacaagttatgacttcaaggctaaacacacacaacattccaatcacctaatcttgttctctccttactgtttagctccctgcccagtttcctctgtgctcagaattttgctcttgacctttgtaaaagaacgaccagctaaactgatcaacatatttataccaacggatgcaaatatgatagaaccgcccccagcccccttttgcaaggatcttgaatgttaatgacaatcttctggggacaatgtcaactcacagaaatggctccctcggaatttcacgctgttcggggaggtattttggtactttagtggcattaaaaatatattccacagcagatattttcctggaggctggacacttacataaagacgacgcattctttataaattaaacctcaacagtgtttgcatttatctaaatggatattatttcgaggaggagacagtgatttgcgtattagcccctatcactagggatgacttgtaagacacattaggaactggctcctcccctatcccttcgccccctcctctcagaaccttataagcttcagagtacggtcaagacaagaggagcattgggaaagaatttgaaaataaaaatacagctccgtgattttcaacacaaagaccacgaagagcataataataagtcgtgaaaaaaaattcacatccagaagttggagggccacaaagtacaagtcgtccaggccagtctgcagagactgttcatgcttccgcccagcaaaaatctggcaggcgacacatcgcgacgaatttcggctgcagaagaggaagagcatcacctgcagtccgcggcgtgggaaacgccgccggaggggctccgcgagccggggaagtgcgcgcagcggggctccaggcggctccaggcgctgagtgcgaggaacgcccgcgctcgccggcgcccgggagacgcagccgaaggaggagggcgggcgtttcacccgcgccacagctgcggccggccagagagaccgcagaggccgggacccccgcagcctccacggccgctgctgccactgtcggggtggcgcgcccagccggagaatcccgtccgcgcccggggcggggggcgaggcggggcgctgacgtcacctcccctcccccaccgcctccaagggggagggagtggggaaagaggcagcgagtcgccgcagccggcggccgcaactcctcaactcggcggctggctgcctgggcacgtcctgacaaacttggctgctcccgggccctcgttccggccccgcgcactctcttttcgcctgcgtttggtgcttaagtttgccctggtcggaagcctccggagatgcggccgcctgggtcccggcggcacggacgttggcactctggttagggacatgctgaagatcccggggaggcaaagttggtacttcaaacccggctcttaacacatatctacaccgcgaggggatcacggagctgccgaggactttagagcccagggccgaggactcggctagactggtgagttctttgttcaaatcgtgcatgccttttggcatttaagtttaaacgttaatgaaattacgtggggtgtgtggctctaagcgagtgcggggaagcgtgtgcgccctacgggttctcggctccaggagctgcgcatccctctggctttgtgcggatcggcgatgaaagattcgtatgcatagctttgggagttcataaaatacatatagagcactgttaaaaagaacttgagaggcgatgctgtttgtgcattattttgaatgtaacttattatagcaatggtgcctagggagggcgcatcggggccgcgagatttgcaggggcgcagcgccctctagtccgggcacctggcgaggcgcgctccttgcagggttctgtgcggaggcgaacctggacctccccggcgctcggcgacgtgggcgcttgctcaccccagtcttcactgaccacccacccgggcccattctttatatgagttacaaaaatcagcttgggtggactggatgtagaggccgtgctggaggaaagcgttttgtttctggaaccgtctccccaaccccctccctaatttccacgagcctttggggacagggttagggagggtcgattatttaaaggacaaatgtggaacttgaaccacatttctctctctcatataaaataattcgatttgtggtagctaataggcatgtccatttcgttctgttggcgcttaaggatcagtagaatcgtggcagagtcctaagtctgaaatctccatccctggctctcggcggctcctgtggcgacgaagtgcaacttcttccaggcagatagatttctcagggagcctggaaaatcgggattcccagacagatgtaaaacatctagtaagccctaggaagcgttattacttattaattaatggtaatcttctccaggaattctcttgtgccatttaaaaaaaatcccgtgattttacgtcagggaatggtatctttgtactttttttactgttcttcttttccccttttagcattactcccgcttcctcgctcccaggaaacggctggagttccggtgtgtttgggttttgctgagatttacaattcggcaagcggcacaagccggttgggcttggagatcaggtcacccactttcgaggtgttccatgtatgaaattgacctgtaagcacttggagcaattatggccgggacaaacacgtctttggatgatggagtttgcatttgctggatgtgtgaatctatgtgtattccaactggtgggcagggaatatagggctacgaatcggcacactcatcttgcaggcattatttttccttcccagccacaacctgctagacacctttattattattattttttccggtcacctctaagatggcttataaggtgactgcgttaactttgaacccaggaaattctctttcacacttgactgccctgccgttcccctccccgccaagctcccctcaccagtcccagggaaatcggatctctttgtcttcccagtgttaaaatgcctgagtcccacaaactttccgagatcaagtccgccctcttgtccgggctgcgtcccagcgcctccggccctccgggcttcggccgagtccgccctgcgccgagcctgcggctggagccctgcccgcaccggggatgggctccgcgcccgggacgctcaggctgggcgcccggcgcggggagttctcggagcgggcttctcggcgctggggcttcccctctgcctaggaacttgcagttgtcggcctggggtcacgctttggggcccctggggccgactcccgggctaggaagcccgcgggacgccgcgactgccttttgtcccacaggcctgggcgtccggggtgtcagcgggggaggccaggcgcccgcggcggggagggcctggggtctaactcggcagaaaaaggtcgcgggggaagcgtttccattttctggggattgaaggaggaagtagattccgacctagctgcattcctttggagacctgaaggacgacttcagcccaccaaaccttcgcggacccagagccgcgccattcaaatgcagattcaggggctcccagaaggctatggaaaagctaaagggatgcctctgggaagctttctcattaggccccagccttttttttttttttttttttttagctaagctaacgtttccctttcttggcagggagctttccccaattccttgcacagcgcctgtggctggccgtaactaacctcggcatcacaagcctcgccctgcccctcggagccgcgctagaccccgctgggcgccttctcgtctcccagcacggacctggtgttcgcagggactggggctctttgggtccgggcgggactgcgtggccgagcccgcggtcccagagccggcagccggggaaagtgggctcgagtttccgcgcccgagaaatgagcgccggcgccggcgggcggggccggggcggagggatctcctgcgctcggggagcgtgaggcgccggcgccgagctgggcggccgggcgcggggagagggcgcgggagcggctcgtgcggcaggtaccatgcggacgcgcgagcccggcgagggccccggcaggcccggtccctgctcgggggcgcgctgagacggcgggtgagctccacgagagcgccgtcgccacttcgggccaactttgcggttagttcgctggggcgcgggccggcgggcgggggcgagagcgtgcagcgcgctgcggtgcggactctgtgggtgtccgcccggtccccggctcgggctccggcgctgccgaaaacggatgagcgcgcgacttcccggagggtggagtgactcggtccttcccagttgggaaattcagcactggctaggggggtcccggcggcggagcgggaaaaggaggcgaccgcgcgggaccgatccggggccattgctggggtccgatcctttctgacacgccgccttccctccgggagctcgccgggctgcgccggcctcgcggtctcctggggcatcccgccgtctgcgaaagacccgctcgctgagcggtgcacgcgggaggcctgcgcggggctgccgggtccctgggtctctgggtgtttgcgccctgcaggagcgctgcccggaggtgcagatgcaaccggtggactgcggagtgaagggctgcgaggctgcatttcggggctgaacatctgcacaatgtgcggtttgtcagtgttttctgtcttctctggaggaggaacttctaagatctttttaaaagaaagagtttttggtccttcattgcctttaaaaaaaaatgctttcttttagagagccagctttctgctgtgtgttagatttttttgttcccgctgatgtgaattgcaaggctttggaaacaaggacgcaattgtatgagttaggaaagtaaactcataaatattttctatgcagttaagtttttttttttgtctgaactgtggtttcattaagtggcttttgttaagcaattcccgggtgcctgatagaggcgattttttaaaagtggatattaacagtgattattagtatgagaaaagattgaaaagaaaatgaccttcagatattcatttccttttcaaaagcagattctta

SEQ ID NO: 3819 - DNA, 6000 bp, Homo sapiens
agaattcattgagaatcattggtgtgtatttttctgctgttcagcctaaacaagttaaaagccagactataatttttgaattgaaaagcaatgtgtctaacagtatgcatatatatacatgaaaatatgtaatccaaacaagtaatggatgtgttttatgtatgtattcctgaacacaatcactgatgttctcactctgattaaaggacctacttttacacaattatttatccaaactcgtagctgctacaagagagcattttcctgcagctattatttgatagttttttgctcccctcctaggccaattcttaaaccacaacactgctgacctttagtgtaaaactgtcatggttcctgaagggtgcaaatgaggtgcaggctatgaggagctagtgcactatagcaggcaagagtgtttgctctggaggcagccagccttagggttcagtctgaaaggtgacccagtgtgttatttaatctacctcaaacctcagttttcatctgtaaaatcggggtagggcattaattgctaatgcttcccaggattttgtaagaatgacatgagataatgcatataaagaaggtggaaccaagtccggagcataactggcagtaaatacatgttactggccattggttctacagagcttcatagctgagataggagtggcagggtgagacacagtaggtaaatttgaggagactaatgatattgtagttacaattattctttttttttttcagatggagtttcgctctggtcgcccaggctggagagcaatggcgcaatctcagctcactgcaacctctgcctcctgggttcaagtgattctcctgcctcagcttcctgagtagctgggattataggcacacaccaccatgcccagctaatttttgtgtttttagtagagacggggttttgccacgttggccaggctggtctggaactcctgacctcaggtgatccacacgcctcggcctcccaaagtgctgggattacaggtgcaagccactgtgcttggccacaattattctttactggtatctctcacaaccagtgagggagattttgtgtgtgtgtgtccattttagagatctatctttatagaggaaagtgagattcccaaaattcagttataaccaaataaattcaaactatatatgtcaaagacaagattcaaaacaggtcaaaacaggtcttctaacctcaagtgtaatgctctttctactgcatacttctattgagaaagtagcttcaatagtaagttgccagatgacttgttgcctactgttcaaaaggttagaatctttcaatcactgagctggtaaagcatcacaaaaattatatttatcttgcaatatctgttcccaaaccacctggggatgtttatcttatatttgagggacagaatgtctacggccaccctactccactatgggtgtgtctttaaaatgaaagtatactttgtaccttttttttttaatggttagccattagtaggtgatttgtaatacctccaaatactttcccaagtgactggttatggcatcagaaatttcatgttttaactatagctttaagaaagcccttgctataaggcactgggaagggtggaaggatattattataacatactcatacccatagttaaccagcactgattcccatcagattgactaggtgtctaatgttctttttttttgagatggagtctcgctctgtcaccaggctggagtgcaatggcgccatctcagctcactgcaacctctgcctcccgggttcaagtgattctcctgcctcagcctcccgagtagctgggattacaggcacccgccaccatgcccagctaatttttgtatttttagtagagacggggtttcaccatattagccaggctggtatcaaaccctttccctcaggtgatccacccgcctcagactaccaaagtgttgggattacaggcatgagccaccgtgcccagccaggtgtctaatgttctaatggctccctctgagagtacaagctgattccggagaagagctgtatttgaatgcaaagggtaaaataattccaaggtgcaggggaagtggagagggctgatatttcctctcacctccaggaaggggaggccgcaatgggcacacaggcagatgagaaagcagtgaaagcagcagagagggtgggatgccaggagtcagtcaagcctacttagaagtatttggtcctagggctattccaaaaaatgtctcagaattgtttcctgctttaaatctatgatttcccctggttttatgagtcagcaaagacggaaaacaactaaaaggccatgttaatatttcttaatcactaaacacacctacctcattaaatcttgggtcttacatattttcacccagcatattgttggtacttgataaatatttgctgaatgaatgaatccttccatgattctgggtcctcccttatacttcagaggtgactcagtattggacacactgaaattttaatgcttgatgtagccttccataaaatagcagtgtttttaaaggtctagaccaaggtgtccagtggaactctgtcatgacgaaaatgttctttgatctgctgcgatcaatacaattgtcactagccacacatggtcactgaaactcggaatgcagctggtgagactcaggaagtgccttttaatttagtttaactggaagtagccacagggggcaagtggctgcccactacattagcacagctctagaggttctgttaaaagttttctgcccatctcactttgaaaaccagctattttgactaatatcatcaattgttattcataagttcctgtcatttgtgatttttatcttttttaagtaatttggtttatttattacaactttaaagtgagtatagcaaaccaaatggacttcagcgagaagcctctcggggtgaatttattgtgaatcattttgaggacttgcaatatgtggtcaatttctaatttcaactattgacacaaaaggagagagcctgtgtagttgaaacagggaagcaggagaagtccgctgggcactgacagactggcctctcaagccagcctcctccctccttaggaatctggcaccctctagctgccctcggggtctgcaggagctctaaaatcccttcctatatccctccgtgtcctagctccctggatcctctcctcccttccaaatcaaaatgtaccttgagggagaggcttgggcaggaggatctcttgagcccaggagacctgacttgagtctggagacctgcctggcagaatctccaatcagtggtgatgatgctgattttatggattaaaaactgagacactgccaagaagtgagggaagggagcgggggagggcaggaaaactaatattgtttaagtacctactatgtgcgtgctagacacttcatatgatgctcagtaaaaatgctttgcctgcatgaataactgttatctccctggcaagtagagtgcagtatgttttttttttgaatggataaacacatgaatacatttttaccacatgaagcagatattagtcccatatcacagatgaggacactgacatttagacaagttatgacttcaaggctaaacacacacaacattccaatcacctaatcttgttctctccttactgtttagctccctgcccagtttcctctgtgctcagaattttgctcttgacctttgtaaaagaacgaccagctaaactgatcaacatatttataccaacggatgcaaatatgatagaaccgcccccagcccccttttgcaaggatcttgaatgttaatgacaatcttctggggacaatgtcaactcacagaaatggctccctcggaatttcacgctgttcggggaggtattttggtactttagtggcattaaaaatatattccacagcagatattttcctggaggctggacacttacataaagacgacgcattctttataaattaaacctcaacagtgtttgcatttatctaaatggatattatttcgaggaggagacagtgatttgcgtattagcccctatcactagggatgacttgtaagacacattaggaactggctcctcccctatcccttcgccccctcctctcagaaccttataagcttcagagtacggtcaagacaagaggagcattgggaaagaatttgaaaataaaaatacagctccgtgattttcaacacaaagaccacgaagagcataataataagtcgtgaaaaaaaattcacatccagaagttggagggccacaaagtacaagtcgtccaggccagtctgcagagactgttcatgcttccgcccagcaaaaatctggcaggcgacacatcgcgacgaatttcggctgcagaagaggaagagcatcacctgcagtccgcggcgtgggaaacgccgccggaggggctccgcgagccggggaagtgcgcgcagcggggctccaggcggctccaggcgctgagtgcgaggaacgcccgcgctcgccggcgcccgggagacgcagccgaaggaggagggcgggcgtttcacccgcgccacagctgcggccggccagagagaccgcagaggccgggacccccgcagcctccacggccgctgctgccactgtcggggtggcgcgcccagccggagaatcccgtccgcgcccggggcggggggcgaggcggggcgctgacgtcacctcccctcccccaccgcctccaagggggagggagtggggaaagaggcagcgagtcgccgcagccggcggccgcaactcctcaactcggcggctggctgcctgggcacgtcctgacaaacttggctgctcccgggccctcgttccggccccgcgcactctcttttcgcctgcgtttggtgcttaagtttgccctggtcggaagcctccggagatgcggccgcctgggtcccggcggcacggacgttggcactctggttagggacatgctgaagatcccggggaggcaaagttggtacttcaaacccggctcttaacacatatctacaccgcgaggggatcacggagctgccgaggactttagagcccagggccgaggactcggctagactggtgagttctttgttcaaatcgtgcatgccttttggcatttaagtttaaacgttaatgaaattacgtggggtgtgtggctctaagcgagtgcggggaagcgtgtgcgccctacgggttctcggctccaggagctgcgcatccctctggctttgtgcggatcggcgatgaaagattcgtatgcatagctttgggagttcataaaatacatatagagcactgttaaaaagaacttgagaggcgatgctgtttgtgcattattttgaatgtaacttattatagcaatggtgcctagggagggcgcatcggggccgcgagatttgcaggggcgcagcgccctctagtccgggcacctggcgaggcgcgctccttgcagggttctgtgcggaggcgaacctggacctccccggcgctcggcgacgtgggcgcttgctcaccccagtcttcactgaccacccacccgggcccattctttatatgagttacaaaaatcagcttgggtggactggatgtagaggccgtgctggaggaaagcgttttgtttctggaaccgtctccccaaccccctccctaatttccacgagcctttggggacagggttagggagggtcgattatttaaaggacaaatgtggaacttgaaccacatttctctctctcatataaaataattcgatttgtggtagctaataggcatgtccatttcgttctgttggcgcttaaggatcagtagaatcgtggcagagtcctaagtctgaaatctccatccctggctctcggcggctcctgtggcgacgaagtgcaacttcttccaggcagatagatttctcagggagcctggaaaatcgggattcccagacagatgtaaaacatctagtaagccctaggaagcgttatta

SEQ ID NO: 3820 - DNA, 6000 bp, Homo sapiens
attagtttgtgcataatttttaaagatttttcttctcttctttttcttttcttttttttccccaggctgaattgcaatggcacgatctcggcttaccacaacctccgcctcccgggttgaagcgattctcctgcctcagcctcccaagtagctgggattacaggcatgcaccaccacactccgctaattttgtatttttagtagagacggggtttctccatgttggtcaggttggtctcggacccccgacctccggtgatccgcccgcctcgacctcccatagggctgggtttacaggcgtgaggcactacgcccggccataatttttaaacatttttctgttggcacctgtccggaccatggatttaaatgatctactaacatgatgagaacccaacggggatacttcaaaagagacaaatgaatatacaggtggcccgaaatgattttataaagtcctctaacaaccacacttctttccagagtgccaaagaatttggctcatttaaggtgttcatttttcaaaaaatggttatacaaatgcaaacttcattcaaatcaaaccttaccttgagcttgttaaatgccatgtttagcatcactcaaggcttataccaattgttgttttaaaaaattacatagtgctttaagtatttttacatcttaaatacaaaggaataattctaactgtggaatcagagctgtcttcctaagacaaaaagacaaagacaaatatcacaattaactattaactggagaaacaccttttcaaacgtccctgtaacaactggatgtgttggacagcataaccaaactcattaagaatagtgtgaaaaacatcaccattacctagttctcacacacagataccttcttaaactatcgaaacctgtatctgaatatacgaagcattaagaatctgcttttgaaaaggaaatgaatatctgaaggtcattttcttttcaatcttttctcatactaataatcactgttaatatccacttttaaaaaatcgcctctatcaggcacccgggaattgcttaacaaaagccacttaatgaaaccacagttcagacaaaaaaaaaaacttaactgcatagaaaatatttatgagtttactttcctaactcatacaattgcgtccttgtttccaaagccttgcaattcacatcagcgggaacaaaaaaatctaacacacagcagaaagctggctctctaaaagaaagcatttttttttaaaggcaatgaaggaccaaaaactctttcttttaaaaagatcttagaagttcctcctccagagaagacagaaaacactgacaaaccgcacattgtgcagatgttcagccccgaaatgcagcctcgcagcccttcactccgcagtccaccggttgcatctgcacctccgggcagcgctcctgcagggcgcaaacacccagagacccagggacccggcagccccgcgcaggcctcccgcgtgcaccgctcagcgagcgggtctttcgcagacggcgggatgccccaggagaccgcgaggccggcgcagcccggcgagctcccggagggaaggcggcgtgtcagaaaggatcggaccccagcaatggccccggatcggtcccgcgcggtcgcctccttttcccgctccgccgccgggacccccctagccagtgctgaatttcccaactgggaaggaccgagtcactccaccctccgggaagtcgcgcgctcatccgttttcggcagcgccggagcccgagccggggaccgggcggacacccacagagtccgcaccgcagcgcgctgcacgctctcgcccccgcccgccggcccgcgccccagcgaactaaccgcaaagttggcccgaagtggcgacggcgctctcgtggagctcacccgccgtctcagcgcgcccccgagcagggaccgggcctgccggggccctcgccgggctcgcgcgtccgcatggtacctgccgcacgagccgctcccgcgccctctccccgcgcccggccgcccagctcggcgccggcgcctcacgctccccgagcgcaggagatccctccgccccggccccgcccgccggcgccggcgctcatttctcgggcgcggaaactcgagcccactttccccggctgccggctctgggaccgcgggctcggccacgcagtcccgcccggacccaaagagccccagtccctgcgaacaccaggtccgtgctgggagacgagaaggcgcccagcggggtctagcgcggctccgaggggcagggcgaggcttgtgatgccgaggttagttacggccagccacaggcgctgtgcaaggaattggggaaagctccctgccaagaaagggaaacgttagcttagctaaaaaaaaaaaaaaaaaaaaaaggctggggcctaatgagaaagcttcccagaggcatccctttagcttttccatagccttctgggagcccctgaatctgcatttgaatggcgcggctctgggtccgcgaaggtttggtgggctgaagtcgtccttcaggtctccaaaggaatgcagctaggtcggaatctacttcctccttcaatccccagaaaatggaaacgcttcccccgcgacctttttctgccgagttagaccccaggccctccccgccgcgggcgcctggcctcccccgctgacaccccggacgcccaggcctgtgggacaaaaggcagtcgcggcgtcccgcgggcttcctagcccgggagtcggccccaggggccccaaagcgtgaccccaggccgacaactgcaagttcctaggcagaggggaagccccagcgccgagaagcccgctccgagaactccccgcgccgggcgcccagcctgagcgtcccgggcgcggagcccatccccggtgcgggcagggctccagccgcaggctcggcgcagggcggactcggccgaagcccggagggccggaggcgctgggacgcagcccggacaagagggcggacttgatctcggaaagtttgtgggactcaggcattttaacactgggaagacaaagagatccgatttccctgggactggtgaggggagcttggcggggaggggaacggcagggcagtcaagtgtgaaagagaatttcctgggttcaaagttaacgcagtcaccttataagccatcttagaggtgaccggaaaaaataataataataaaggtgtctagcaggttgtggctgggaaggaaaaataatgcctgcaagatgagtgtgccgattcgtagccctatattccctgcccaccagttggaatacacatagattcacacatccagcaaatgcaaactccatcatccaaagacgtgtttgtcccggccataattgctccaagtgcttacaggtcaatttcatacatggaacacctcgaaagtgggtgacctgatctccaagcccaaccggcttgtgccgcttgccgaattgtaaatctcagcaaaacccaaacacaccggaactccagccgtttcctgggagcgaggaagcgggagtaatgctaaaaggggaaaagaagaacagtaaaaaaagtacaaagataccattccctgacgtaaaatcacgggattttttttaaatggcacaagagaattcctggagaagattaccattaattaataagtaataacgcttcctagggcttactagatgttttacatctgtctgggaatcccgattttccaggctccctgagaaatctatctgcctggaagaagttgcacttcgtcgccacaggagccgccgagagccagggatggagatttcagacttaggactctgccacgattctactgatccttaagcgccaacagaacgaaatggacatgcctattagctaccacaaatcgaattattttatatgagagagagaaatgtggttcaagttccacatttgtcctttaaataatcgaccctccctaaccctgtccccaaaggctcgtggaaattagggagggggttggggagacggttccagaaacaaaacgctttcctccagcacggcctctacatccagtccacccaagctgatttttgtaactcatataaagaatgggcccgggtgggtggtcagtgaagactggggtgagcaagcgcccacgtcgccgagcgccggggaggtccaggttcgcctccgcacagaaccctgcaaggagcgcgcctcgccaggtgcccggactagagggcgctgcgcccctgcaaatctcgcggccccgatgcgccctccctaggcaccattgctataataagttacattcaaaataatgcacaaacagcatcgcctctcaagttctttttaacagtgctctatatgtattttatgaactcccaaagctatgcatacgaatctttcatcgccgatccgcacaaagccagagggatgcgcagctcctggagccgagaacccgtagggcgcacacgcttccccgcactcgcttagagccacacaccccacgtaatttcattaacgtttaaacttaaatgccaaaaggcatgcacgatttgaacaaagaactcaccagtctagccgagtcctcggccctgggctctaaagtcctcggcagctccgtgatcccctcgcggtgtagatatgtgttaagagccgggtttgaagtaccaactttgcctccccgggatcttcagcatgtccctaaccagagtgccaacgtccgtgccgccgggacccaggcggccgcatctccggaggcttccgaccagggcaaacttaagcaccaaacgcaggcgaaaagagagtgcgcggggccggaacgagggcccgggagcagccaagtttgtcaggacgtgcccaggcagccagccgccgagttgaggagttgcggccgccggctgcggcgactcgctgcctctttccccactccctcccccttggaggcggtgggggaggggaggtgacgtcagcgccccgcctcgccccccgccccgggcgcggacgggattctccggctgggcgcgccaccccgacagtggcagcagcggccgtggaggctgcgggggtcccggcctctgcggtctctctggccggccgcagctgtggcgcgggtgaaacgcccgccctcctccttcggctgcgtctcccgggcgccggcgagcgcgggcgttcctcgcactcagcgcctggagccgcctggagccccgctgcgcgcacttccccggctcgcggagcccctccggcggcgtttcccacgccgcggactgcaggtgatgctcttcctcttctgcagccgaaattcgtcgcgatgtgtcgcctgccagatttttgctgggcggaagcatgaacagtctctgcagactggcctggacgacttgtactttgtggccctccaacttctggatgtgaattttttttcacgacttattattatgctcttcgtggtctttgtgttgaaaatcacggagctgtatttttattttcaaattctttcccaatgctcctcttgtcttgaccgtactctgaagcttataaggttctgagaggagggggcgaagggataggggaggagccagttcctaatgtgtcttacaagtcatccctagtgataggggctaatacgcaaatcactgtctcctcctcgaaataatatccatttagataaatgcaaacactgttgaggtttaatttataaagaatgcgtcgtctttatgtaagtgtccagcctccaggaaaatatctgctgtggaatatatttttaatgccactaaagtaccaaaatacctccccgaacagcgtgaaattccgagggagccatttctgtgagttgacattgtccccagaagattgtcattaacattcaagatccttgcaaaagggggctgggggcggttctatcatatttgcatccgttggtataaatatgttgatcagtttagctggtcgttcttttacaaaggtcaagagcaaaattctgagcacagaggaaactgggcagggagctaaacagtaaggagagaacaagattaggtgat

SEQ ID NO: 3821 - DNA, 6000 bp, Homo sapiens
ctcaggtggccacccagattctgcttggattcccccagtgatgaggagccctccacgttcaaacttttatcaatgagttggacaaagacatgaatgttacaactatcaggtttctgaatgtcggaatcaagatcctgagaagctggagtagagagctgaaacacagggtgaactgaatcacagcctctataaagccctacagcactaagttgcagaaaattagcctgcacaagcatagatcagggatgacggaataatttgtctgaaagtcttttttgttttgttttattttgagatggagtcctgctctgttgccaggctggagtgcagtggcgcgatctcggctcactgcaacctccaactccctggttcaagcgattctcctgcctcagcctcccgagtagctaggattataggcacatgccactgcgcccagctaatttttgtatttttagtagagacggagtttcaccatgttggccaggatggtcttcatctcccgaccttgtgatctgccccgcttggcctcccaaagtcctgagatcacaggcatgagccactgcgcctggcctgaaagtttttattatccacaaactcaacagttaatagtataagccaggtactaaacagttgtattactaggtaatatttgttgaaaactatatcacgtattgtgctcggcacttatgtgcattaactaactttcattcttgaaacgacctgcagaagtagggaaactaaggatcagagaaggcaagccatttgcccaaggtcacacagccagagcctgtgtgttgttagccaccttctcctgccttccacatctttgaaatggggctgggagttacatggaggcagagttggttcatacatatatcctaaaagggtccattcatggccaggtagacacagaactaatgtacccacacaattattcaaaaaattgactactgagtatgcatgtgtgccctcttgtaaatgtgcacattcactcagatgcaggtctctttctgggcctgaggagccaaggagcatgaggccccaccccagacaagtgcctgctcgcagcttcccggaacagtctgtggctaggccagcaagcttagactcgaccagagaccagtggcttcctgctgtgttggggcacaggctggaccttctccagaggcttcagcggaccccaccctcaacccagcccaggctttgattctgccttggcattaaaatctaataacgaatatgtcttgagttttgtctacataccaggcactgtgctgagtacattaacgtgcacgatcttatgtagtctccataaaaccctatgaatatgaatgcagtactcttaagagccctctctcacagatgaaaaagctgaggttcaggaatattgagtaactttctaaggttgaacaggtagcaagtggtagagctgtgatttgaaatcaaacagtcagattcataagtgaccacagctctttccagaagcacagtcaggaggaaagaacctggctctaattctcaccctgtgactttgggcaagtctctttctttctttgggactttattttccagcttccaaaaggaaggaatgatcatgaaaggctctttcagcgttcattctgtcattgtgtttcctaagtctagattcttccatttctcaactagtattgattgagcctggttctataccaggcactgttctaggcactagggaattcatctgtgaataagatacacagagctcctctcttcatggagtccaagaagacagtcattaaacaaataaacaagaaaatattgggtagtgatatatgtcatgaagaaaatagggcaaagtgataaagaggggaattgacaggaagtctactccaaacaggagctcaggaggtgacatttaagctgaaaactgaatgacaagaaggaattattcatgtgagaatcttaagggaagcagtaagtgcaaaggccccgaggcaggtctgggttttgtgtggctgcagcttgtgaactggagaagtagcatgggcccaggaggtgcagagccttctaggccagggcaaggagtttctattttaatctaagtgctatgggaagccactggaaagtgttaagcagggaagtcatatgaattgatgtacgtttacacaagatgttttaaaatagtggtccctgggtgttgtgaactaggaaggtagtacaaggagcctaacatgcttctgcgccctgcaagcttgttcactcatctaaacctggggccaggaaacagctgtgcagacactgttccctccctcagcaaactactccccaggtgtgcaggtcctacagcctgggcaggtcatgggcaccaagccaccatccaagggtgcattctctctgcattttatcctcctccagggagatccctccccttccccttccctacagctcatcttaacggcgcctgcattgcaaggcaccggtgcagccatcgagcagagtatcttgctggggcctgcccaacacgggtgctgacctggtgaacaggaagctctccacacagcagggcaggcagggctgggaggctgcgtgcaccctgggctcacagagctgtggagccagtggacctgggactggggtgaggactcactttcccttggggtttcaacttcaaaagcaatgccatcctgcatgggttgggggctgaatgactcaggcgtccccttctgcttgtgggggctgggtcaggggtagggtgagtgtggcttttgcctggggctggccccactatgggctgcagctctaagcatggaaggacagtagtgggcaggcagggcgggaaacgtacagcagctctttctgccactaactttcagacctcgaatgaagaatctgccaccttcctgccctctcttttctgaggtgcctaagcttagggcaccaccaacagaatctcaggagttgggaggcgggtggtagggaagctcgaagggtgggacatattgaaattattttctgtcacaggccttcagaccccgatttaggcagacttttctattcctgcctcttatctcggaatgctgtcagcatgatcttggggaaccctgtgcccagttcacacaggactctggcaagacggggctccaagcctctccttccccctttgccttggaagtttaactcttccttggctttgaagagcaaggcaactggaaaatcaggtctggccagtttcatccaagaatgctccagcgcatctggctggcagccatgaagctcctaggaatcaaggctcccaggggcaagccaggcatcagcctggtgcaccagacctacacatggccctgccaaaccctgccccgctcctcctgccccttgccccatccttggccctggtgagtctcacattttcacccaggctggagttcggggatgggctctgtgggaaacagcaagggtctaagagaggcgaagcatttattcatgatcagttcaacaagaactaactcccagggactagttcttacccggccacacactgtgtgacttggagcttgactgatctcgactctggggctctatttccccatctatactcatctatgatgaaaagcagggacagaagcccatcatctctaatgtccatttcaactcagacattccaggagcctgggagttttcatgttccaggttacatgatgagtcagagtcatgccctgtctataagggacatgtggtgaaacaggtataaataggactggggcaaggaggcaaccctggtctgtgcaaggagctcccactagctataaggccctgggcagctcccttccttttatgaaccttagtttcctattatcaataatggctgacattaaattagaactgacaataaactaggcactctgataagtcatttacctttattatttcactgaattttcacaacaatcctaagagattgatgattttcttatccttattctacagaaggtgaaatgaaggctcatgaggttaaataacttgctctaaaagtcacctacctagcaaatgacagaggcagggctgacagccaggcagcctgatgccacgcctgggatcttggtcactttgctttcctgcagcctctgcatgtgcggaaacagctcagtttggctagagctcagccccagtggaaaggccttgtaggaaggagagagaatagtagtttagaaccagatagctaaacttggttcctggctaagagttgggactatctcaccatcgcccaaggagtcacagaaagtttttgggaaaaaagagtaagagttcaggactgtgttctagctgctgagtgtctttgagagagcattttgaactagtctgctattcttcagccacggggtttctcaaccatggcactattgacattggggctggataattctgttgcagggctgatatggtttggctgtgttcccacccaaatctcatcttgaattgtggctcccataatccccctgtatcatgggagggatccagtgggaggtaattgaatcatgggggtgtgtttttctcatgctgttctcgtgatagtgaataagtctcatgagatctgatggttttacaaaggggagttcccctgcctacgcgctcttgcctgctgccaagtaagatatgactttgcttttcctttgccttctgccatgattatggggcctccccagtcatgtggaacggtgagtccattaaacctcattcctttataaattacccagtctcaggtatgtctttattctcagtgtgagaactgactcacacaaaggcactgtcctatgcattgtaggttgtttagcagtatccccagcctctacctgccagatgccattagcaccaccactcccaagctgggtcagccaaaagtatcttcagacattgccaagtgtcccttgagggtcaaaatcacctccagttaagaatcacagcagtagaaaccattttttccccctaacttgcaccctgtcttttattttctgcccagggtttcgggagttttccaccatgactattgccctgctgggttttgccatattcttgctccattgtgcgacctgtgagaagcctctagaagggattctctcctcctctgcttggcacttcacacactcccattacaatgccaccatctatgaaaattcttctcccaagacctatgtggagagcttcgagaaaatgggcatctacctcgcggagccacagtgggcagtgaggtaccggatcatctctggggatgtggccaatgtatttaaaactgaggagtatgtggtgggcaacttctgcttcctaagaataaggacaaagagcagcaacacagctcttctgaacagagaggtgcgagacagctacaccctcatcatccaagccacagagaagaccttggagttggaagctttgacccgtgtggtggtccacatcctggaccagaatgacctgaagcctctcttctctccaccttcgtacagagtcaccatctctgaggacatgcccctgaagagccccatctgcaaggtgactgccacagatgctgatctaggccagaatgctgagttctattatgcctttaacacaaggtcagagatgtttgccatccatcccaccagcggtgtggtcactgtggctgggaagcttaacgtcacctggcgaggaaagcatgagctccaggtgctagctgtggaccgcatgcggaaaatctctgagggcaatgggtttggcagcctggctgcacttgtggttcatgtggagcctgccctcaggaagcccccagccattgcttcggtggtggtgactccaccagacagcaatgatggtaccacctatgccactgtactggtcgatgcaaatagctcaggagctgaagtggagtcagtggaagttgttggtggtgaccctggaaagcacttcaaagccatcaagtcttatgcccggagcaatgagttcagtttggtgtctgtcaaagacatcaactggatggagtaccttcatgggttc

SEQ ID NO: 3822 - DNA, 6000 bp, Homo sapiens
agaaaaaatcagccaattatgttggtgtgcacctgcagtcccagctactggagagactgaggtgggtggatcaattgagcccaggaggtcgaggctgcagtgagctgtgattgtgccactacactccagcccgggcatcagagcaaaactctgtcccagaaaaaataaataaataaataaattgagtatatcttaagatcaacccttgggcccccaacttctatgagcaataagctagctgagaaagatgtgtaccttccaaagagagaatactcacccaacacacacttcacaggtggccgagtatgataatgaaaacaatggatgagagttccttccaaataaatcaaggtccaatctcccctccaaagcagagaagttctagagtagcagtcattgcacatgcctaacttaaccatacataaaagtcgaaatctctgttacctcaattgtattattttctttttttttttttgagacagagtctccctctgttgcccaggctggagtgcaatggtgccatctcggctcactgcaacctctgcctcccgggttcaagcaattcttctgcctcagcctcccaagtagctgggattacaggagcccaccaccacacccggctaattttttgtatttttagtagagacggggtttctccatgttgcctaggctggtctcgaatgcctgacctcgggtgatccacccgccttggcctctcaaagtgctgcgattacaggtgtgagccaccatacccggacaattgtaatattttcattggcagcaccatatatgatgctcaaaatgttttttctttttttctgttttgtttttgtttttttgagaaggagtttctctcttgttgcccaggttggagtgcaatggcgtgatctcagctgactgcaacctctgcctcccgggttcaagcaattctcctgcctcagcctcccaagtagctggaattacaggcatgtgccaccatgtgtggctaatttttgtatttttagtagagatggggtttcaccatgttggccagggtggtcttgaactcctaacctcaggtgatccacctgcctcggcctcccgaagtgctgggattatataggcatgaaccactgcgcacggcctctttttttcttttatcattattacttttttttttttgtgagactgtctcactcaggctggagtgcagtgtcgtattctggctcactgcaacctctgctttccaagttcaagtgattctcatgcctcagcctccggagtagctgggactacaggtacccaccaccacacctggctaatttttgtatttttagtagagacaggggtttgccacgttggccaggttggtcttgaactcctgacctcatgtgatccacacacctcagcctcccaaagtgctgggattacaagcatgagctaccacgcccagctattattatttttgtaaatacagatggagatcttgctaggttgcccaggctggtctcaaactcctgaattcaagtgttcctcctgcctcagcctcccaaaatactgggatgataccatgcctggtccacaaaatgttctgaaagattccattgtgacatagtattgtgcactcaaactgtcattcaatagacaatgcaattaaaggcataagtaattattaaattcaagcaagatcacagaattttcaaaggtaagacagactcaaaagtctgccaaaacttttggagttatcttcagaagaagctgtttaatttccagcaataggtaattcaattaagaagaagaaaaaaaaactaagtaagcaaaaatgaaaggcaagcaaaaccccagtattcttcaatataccttaaaattatacacacaatcataaagacaatataggttaagataattaactagcattatgaaaagcagcctgttatcatgatgttgcattaactaaccgaagtaattcagaaggatcctagattctgaatgtgaataaggctgagactcaaactttattgtgacagacgaaaatggtatacaattgaatgaataaatgtatgctattattaataaaagctttatgtttactttcttcctgctaaaaaattgctactaaatagatggcttatcttagatttagtggtatttcagaattgataaagtatgatagttcaaccttattcctttaaataccgatattgaatttcatcatgtagatgtactattttttatttatttatttattatttctttatttctttatttatttttgagacagagtctcactgtcgcaggctggagtgccgtggtgccatctcagctcactgcaacctccgtctctcgggttcaagtgattctcctgcctcagccttacaagtagctgggactacagacccgcgctaccacaccgagctaatttttgtatttttagtagagatggggtttcaccatgttggccaggctggtctcgaactccagacctcaggtaatccgccctccttggcctcccaaagtgctggttacaggcgtgagccactgcgcccggctagatgtactattacttataaatccctgactgatggacatttaggttgttcctcatttttttgctaatgtaaaataatactgcaaactggtaacttcaattatactggtaatattcttgttctgagttcaggtggtaagttcatggatgttcattttattatgcctcatagtttaataaaatgaacatatgtataatatacatatagcatattccttgcacataacgaaattagttaataaaaaaattgctgcaataaaaattcttgtgcacacattgctgagcatttttcttaaaataaattcccagaagtggaattgctggatcaaagagaatacatatttaaaattctgatacttattgtcagaatgccttctagaaagttatactaattttataatccccacaacaaggtatggttaatactggcattactaaatctcaacaatctttgctgctatgacatgtgaaaattcaaattattactaggcaaaaagaatttttaaaataattcttcaaagcaaaactgcttacctttttaacccacactacgatggggccagattcgtcttaataaacaattctgatcatgtcacctacctaccccataactttcaatgactttaatctcatggttaaagtaagagctctggaatcaaactgcctgggtatgacagatcgccatttttttttttttaaagttcagaccctcatcaaaaatacaaacatcaacaaacaagtatcattgattagtttgtccaacttaggaaaaaaaaaatgataccattacataagatttcaaagtgttaatttgggttgaattaagtttatcagaaaggtaccctggctgggtgcagtagtgcacctgtagtcccagctacttgagaggctgtggtgggaggattgctcgagtccaggagttggaatccagcgcaggcaacatagcgagttcccatctttaaaggaaactgcatactgacattttcttcagttcactttctaataattgtcagatcaaaagtgaaagcaacgctgtatcttcatgctgaaaaatgattgctgttcctacttagcgaaaatgttattcaatgactaaataacttttgtgatgtataacaatctcccattgatgtaaataaaacatctaaaataaccaaataaccagggttagaacagttccaacactatttatatagaacaaggacttgcaataaaaacaaaacaaaaataaaaacgacctacacaatgaaagccagatattatacattaaaaatgtagtagaagtattttttggtgagcagcaaggcatattccatcaatatttaggcatagaatgtgccattccaagcatggaccatgatctagtttcttgcagtagcagccaattggactaacacaatgctacttcttttactgttcaatcaaattcctccactgccttaaggaatcaactaccccattttaccgtcagagataataagctttgttttcgtagcacagaacattcactccaattataatgtcctaccttttcttcctcatggaggaaatttgataaaaaattaagtttatcagaaacttctgataaactgataaactgataaatttattaaccttcaataaataattcataaagttcaaacaagtttcatgatcgctaacattcaaatccatttccaaaactggagttatacaatattacttctgtgcatgagattatacttattgttcactagatttatgaataacttctggaggatgatacatgttttaaaagccgtattaacatatgagttgacaaacattaaattttgttcccttagaaattgacagagaagtcagaatggggataaatcaagtcatctgaggcattcattgagctacaagctatttcaggttataaaaaacactgttcccttaattgtcgttccttcatttgctgtatttatatacacactcctactccataaagacctctccatctctcccacctcttccaactatgaacagtaacctaaaatcacactgaactagacgtaagagactcccaggatttctctaaggtatacccaggatcaaggccctctgggatccaaagaactgtagctcttttactgcaattttccttcagaaccacctttcccgttccttccctcctggacaccgccgactcgcgtgttgggggtggggtgggagacacgccgccagaaagacaggctctacccagccaaacctgcacctccgaggccgaaaagcctggggctcttcctgcagcaccgggcgcggccaaccctcgcttccccagggcagggctcagctcgggtcaatgcaaccagccaagtcaggcccggagcgggccggctctgcccgccagtccaaacctctggaccctcgccagcggggatgggcgtgggccccggcggccaccgccccgccaactcgagcactggaggagcgcacccgctacgccagccccggacctacctggaggggagagcagagctcctggacagcggccacgggcctgagggcggacgctgaggcggccagagtccgtcccagcaaccccaagtatccctggtggggcagagcggggagacgaacgggggggctgccgcgggccagcgcggcccgtcccaggggtcgtgaggacctggctctccccttaacaccaggccaccgccgccgccgccgccattttgccttccactcagtgtcgccgccgccgcactccgctgcaggtttcccggatgtgggcatttcccggcgtcgcttgcgcgggggccgaggactgggggcttttgcccgcccggctgctgcgagggagcgcgcagcctgcggcctccgggcttcgttgcgtcgcccgcagctctgatcgttcgtgagcgtcgccccacgtcgctcccgcctgcccctgcccatacgactcgcccgcgcccgtgggttaaggctgtctcccgcccagcctacttggttgattcaatccttttccccattgatctatttctctggaccgagtagggatgtgcatttcacggagctacgttctcagaagggaacaactgagttgctctgggaaacctccctgtggacctcagaattccagatttttggcgctttgaaataaaattttattcttgcttagcgttctttccccgaacaagccggtgagcttccagcatctgtattttctgaatccggcagataagaaatgcttgagccaggaccgattgattagcagcggtttagagatcttatctgtcaaccgcatccgtagaaggagatcgttattgccataattggaataccggtgacggtgtgacaagaggttttacttctggttaagctgaatgtaaagtgtgggatgggatcgttgggtttgatgtataaggtacggtccaccctttgtgaagatcgcctttgccagtttttcctctaggaaatatacagttagtgttttcaagtaccttctt

SEQ ID NO: 3823 - DNA, 6000 bp, Homo sapiens
ctggtcttgaactcctgggctcaagcaatctacttgccttggcctcccgaagtgctaggattacaggcaagagccaccatgcccagccagaaagatgttaaatgaaatgaagtttttaggcccactgctggagtcttctcaattatcaatgaaacatgaatctctggtatttggctacagttactgaaatatttataaaacaacctaatttattgacatttcattccatttatcttatttccaaggttattgtgagaaaatgtgctgtagttatactatcaaaaatttggcataattgaaaaattcctggtcctttgtgaatagtacttttatttaattgtattgtggaaacatccttttaataatccactctagactcttgtccaagaagcatattaaattcaacagtatatagtttatattgaacctttagttaagcttatggtgtcaatagtatctagctcagactaatagaaggtctggccaggtgcagtggctcacgcctgtaatcccagcactttgggaggccaaggggggtggatcacctgagatcaggtgttcaagaccaacatggtgaaaccccgtctctactaaaaacacaaaaattagcctggcctggtggcaggcacctgtagtcccagctactcaggaggctgaggcaggagaattgcttgaacccaggaggcagaggttgcagtgagcggagatcgtgccactgcactccagcctggcaacacagcaagactccatctcaaaaaaagaaaaaatggggctgggcacggtggctcacacctgtaattccagcactttgggaggcggaggcaggcggatcacctggggtgggaagttcgagaccagcctgaccaacatggtgaaaccccatctctactaaaaaaaaaaaaaaagaaaattagccaggcatattggcacatgcctgtaatcccagctacttgggaggctgagccaggaggattgcttgagcctgggaggcagaggtgcagtgagtgagccgagattgcaccattgcattctagcctgggtgacacagcatgactcaaaactaaattacattaatttaaatttaattaaagtattttttaaaaaatttgtagctgcaaaaaatcagaagagtttttacccctctataggggtagaataaactaaaaaatcttagccagagaagtcttagaatccatgatacaccagtagcaaggcatacacctagcacccagatttggtttcttataccatattccaataaaaggaaccagggatccttggaggaatggtgatccctgaaccggggcaagaaatatacaagatatcttggagaactgggcgcggcagctcaagcttgtaatcccgcactttgggaggccaaggcgggcggatcgcttgagctcaggagttcaaggccagcctgggtgacatagggagacctggtctcgacaaaaaatacaaaaattaggcgtgccaggcgcggtggctcacgcctgtaatgccagcactttgggaggccgagatgggcagatcatctgaggtcgggagttcaagaccagcttgaccaacatggagaaaccccttctctactaaaaatacaaaattagccaggcatggtggcgcatgcctgtaatcccagcttctcagggaggctgaggcagaagaattgcttgaacccagcaggcggaggttgcggtgagcagagatggcgccactgtactccagcctgggcaacaagagaaacttggtctcaaaaaaaaaaaaagttggacatggtggcctgcgcctgtaatcccaagttacttggatgctgaggcatcacctgagtcccgggggttgaggctgcagtgagccataatcatgtcactgcacttcaaccagggtgacacagtgagaccccatctaaaaaaaaaaaaaaaaaaaaaaaaaaagattttggaacataatgtactgccagaaaagaagaaagttcttttttttttttttttttttttttttaggtgaggtcttgctttgtcacccaggctggagtgcagtggctagatctcggctcactgcagcctcagcctcctgagctcaggcgatccttctgcctcagcctcctgagtagctgggactacagttgtgtaccaccacacctggctgatttatagagatgaggtcttgctatgttacccaggctggtcttgaactcttgggcccaagtgatcctcctgcctcagcctccagaagtactgggattaaaaagtgctgggattaaaggggtgagccaccaaactgggcagaaagttctttaaaacacacacacacacacacacacacacacacacacacgccaactgaaagagctccagtggccaaaactgaaacaacttgagcaacaaaataaatacccaaagcataaaataaatatccatgaggccatactgacataacgagtttttgttttgtttatgtttttgctttttgttttttttgtaagacagtcttgctctgtcacccagactagagtgcagtagcacagtctcggctcactgcaacctccacctcctgagttcaagcgattctcctgcctcagcctcccaagtagctgggactataggcatgcgcccaccacgcccagccaattttttttatttttagtagagacgaggtttcaccatgttggccagactggtctggaactcctgacctcaagtgatccgcctgcctcggcctcccaaagtgctaggattataggtgtgagccaccacacccggccaataaatgtttgaataaataaaggagaagggataaatctgcagaatgtcaaataatttatttgaattctccactttatttattttatttatttattttttggggacagagtctggctggattctccactttcaagaagatggagcacaactccccattccttaagagtgggtggcacatagtctggtgtcttcccctaagatcgtatgaatttctggaagggtttatgttctcagggccacactggtctccagacttcttccatgtacactgccccctaattcctttctaaggtcacacaagcatgaaatcggattctacatctattgctaaaaacaagccccatttccatgaagcactgaagaattgagtaggctgaaactggaccaagatcttccatcacaataatataaaaacctgcaaatgtgatggcaggtatcaccattcccacacatccagcacccacagtaagtatttccccaaccatcatcactctccgcacctacagtccccaatgctttgcatctcgtcagttctcttcctgatcattccacctctgctttccctgctcttttatctctcgccctacttcacaggagtaagcctcctagtcctacacagagcaatttactcagctccctgaattatctaggaatttccccaaagactagagtttgtggagatactttcctttaggtttagagagcattgaggagcttaagtaccatgggttgatgacagacgtgacaggattctgggggcagtctgcccttccagatgcataatccttttggatagggcaagcagacctgtggacatattagattcctataattcatataattttagggctgaaaaggtctttatggggcacccttacgttgaagaaagtaagccctggggctctttagtgacccaccttgggtcacattgccttctacaaactctgtgcttgtagaaaatagactttcaaccaaatgttcttggaacataatctttttttttttttttttttttttgagacggagtctcgctctgtcgtccaggctggagtgcggtggcgcgatctcggctcaatgcaagctccgcctcccgggttcctgccattctcctgcctcagcctcccgagtagctaggactacaggcgcccgccaccacgccgggcaaatttttctggattttttagcagagacggggtttcaccgtgttaggcaggatgttctcgatctcctgacctcgtgatccgcccgcctcggcctcccaaagtgctgggattacaggcgtgagacaccgcgcccgtccggaacataatcttttaacgggttttcacatttggatttctagatacagtaagtagccagttattactttaacgtcagaaaaagatgtctttaatttttttgtactctgtagtagaaaaattacgaaagaaggtacttgaaaacactaactgtatatttcctagaggaaaaactggcaaaggcgatcttcacaaagggtggaccgtaccttatacatcaaacccaacgatcccatcccacactttacattcagcttaaccagaagtaaaacctcttgtcacaccgtcaccggtattccaattatggcaataacgatctccttctacggatgcggttgacagataagatctctaaaccgctgctaatcaatcggtcctggctcaagcatttcttatctgccggattcagaaaatacagatgctggaagctcaccggcttgttcggggaaagaacgctaagcaagaataaaattttatttcaaagcgccaaaaatctggaattctgaggtccacagggaggtttcccagagcaactcagttgttcccttctgagaacgtagctccgtgaaatgcacatccctactcggtccagagaaatagatcaatggggaaaaggattgaatcaaccaagtaggctgggcgggagacagccttaacccacgggcgcgggcgagtcgtatgggcaggggcaggcgggagcgacgtggggcgacgctcacgaacgatcagagctgcgggcgacgcaacgaagcccggaggccgcaggctgcgcgctccctcgcagcagccgggcgggcaaaagcccccagtcctcggcccccgcgcaagcgacgccgggaaatgcccacatccgggaaacctgcagcggagtgcggcggcggcgacactgagtggaaggcaaaatggcggcggcggcggcggtggcctggtgttaaggggagagccaggtcctcacgacccctgggacgggccgcgctggcccgcggcagcccccccgttcgtctccccgctctgccccaccagggatacttggggttgctgggacggactctggccgcctcagcgtccgccctcaggcccgtggccgctgtccaggagctctgctctcccctccaggtaggtccggggctggcgtagcgggtgcgctcctccagtgctcgagttggcggggcggtggccgccggggcccacgcccatccccgctggcgagggtccagaggtttggactggcgggcagagccggcccgctccgggcctgacttggctggttgcattgacccgagctgagccctgccctggggaagcgagggttggccgcgcccggtgctgcaggaagagccccaggcttttcggcctcggaggtgcaggtttggctgggtagagcctgtctttctggcggcgtgtctcccaccccacccccaacacgcgagtcggcggtgtccaggagggaaggaacgggaaaggtggttctgaaggaaaattgcagtaaaagagctacagttctttggatcccagagggccttgatcctgggtataccttagagaaatcctgggagtctcttacgtctagttcagtgtgattttaggttactgttcatagttggaagaggtgggagagatggagaggtctttatggagtaggagtgtgtatataaatacagcaaatgaaggaacgacaattaagggaacagtgttttttataacctgaaatagcttgtagctcaatgaatgcctcagatgacttgatttatccccattctgacttctctgtcaatttctaagggaacaaaatttaatgtttgtcaactcatatgttaatacggcttttaaaacatgtatcatcctccagaagttattcataaatctagtgaacaataagtataatctcatgcacagaagtaatattgtataactccagttttggaaatggatttgaatgt

SEQ ID NO: 3824 - DNA, 6000 bp, Homo sapiens
gtagagtgtcactgacaatctttggagtaaggagaatgacatgattagtgctgtgctttagggaataaacagaatgggtggattcatctactcattcaacaagtgctgtattctggatagtgtggactaaaaggtgcagaaaacaaagtttctaccgtcctagagcttacattctaatgggaaaagacaaacaattatagggcagaggaagcaatcagatatgcatttgtgtcaggtgaacagggggatgactttgagtcagctagtgatggatgctattgaaaagataaagcaagcgctattctagacagtatgaatacataccctctgtcccatggagtttgcatcctaacggggaaagactagaaataaatgaaacaatagcatgtcaggaagtgatagtagcagtactataaaaagttaaggagtgtgtgtgtcaagggtaaggagttttaagaaggggaggtttgggaaactaggagatgacgtgttgggagatcagagccttgacctgaataaagtgatgaaatacacctcgtgaacatctatcatggtcaaacttgtccaactcgtggcctgcgggttgcatgtaacccaggacggccttgaatgcagcccaatacaaattcataaactttttgaaaacatgagtttttttgcaacttttttaaagctcatcagctatcattagtgtttgtaactgtattttatatgtggcccacaacacttctccttccagtgtgccccagggaatacaaaagattggacaccactgatctaggcaaaaagggttccaacaaagggaacagcagtacaaagtgtagagacagagtctgcacggcatatttgggaaagcaagacagctagccttgctggagcagcatgagaaagcagaggaaaaataggaaatgatgttaggaaaggttgccaggtagaaggtaatgtaaagtcctgagggcatggaagattttgcatttgctggtgaggacagagataatactttacactgatttatgtattaaaaggatcactccagacactttaccaagaaaagaatgcaagaggactgggcgcagtggctcacgcctgtaatcccagcactttgggatgccgaggtgggtggatcacctgaggtcagtagtacgagaccagcctggacaacatggtgaaaccctatctgtactgaaaacacaaaaattagccgggcgtggtggcgggtgcctatactcccagctactcgggaggctgaggcaggagaagagcttgaacctgggaggcggaggttgcagtgagctgagattgtgccactgcacgccagcctgggtgacagagcaagattccgtctcaaaaaaaaaaaaaaaaaaaaaaaaaaaaaaaaaaaaaaaaaaagaatgcaggaaggcaggattaaggagtcttgcattatgcctgtatgggaggttggtgagattttaagtgaggactaagctctgattttctatcttgcccaaattccttctaaggtgtctggggagtcatgccctacaaaccataaattctcatcagatggattttatttgaccctgtatatcatgacttacttttcattctgactctggcataatagtatgagacaaggaaaaaaaaatatatccttgccataccttgaaattgccctgcaaagtctcttgtgggaaaaatccacattctatacagaatcccctttcccctttgtttttcttcctttctttgcagatccagtaagataatcaactaagagccaggcacccttttaggtctcttaagaaacatgttacaacctgctctctctctctctgaagtctgtctgagagattgctctgcacaataaaacttggtctccataatcctttaccttaacctaaacattcctttccactgatcccaggttttcagataaactccaccaatcgtcagtcagaaaatgtttaattttatccatagcctggaagctcccctccaccccactttaagtcgtcctgcctttctgaacgaaaccaatgcatttcttaaatgtatttgattgatgtctcatgcctctctaaaatatataaaaccaagctgcaccccgaccacctcgggcacatgttctcaggacctcctgaggctgtgtcactggccaaggtcactcatatttggctcagaataaatctcttcaaacattttacagagtttgactcttgtcatcaacctaagtcagggaaggagggtcaactgataatgacatctcatgtgtttctaatgaatgctagagttacaaaatgggagacagaaaacaaatccctaggaccctgtggagggagcgtaacttggaaactgaatataaaggcagcatgtttggggaggatgggaaaatggaagacagctttgaggctctgaaaattggtaattagaaggattgaagtaccattgcttacaataaagaaattaccacaagttggggagagaaagggaaagatgatgagttgtgattatgttgagtatatctagatgtcaatattttactgataaagataataaatttacttgtctccaaacagacaaaagttgaggctatttttatgtctcaaggaaacagccaggagccattgtttaggagtgttaaagcaaaaatacgcaagaggcaattagcctggggtggttgtgtaagtggagctcttatgtacgcacataggagcttatcttggaaacagttcttgtaactgacttattaaaacccaccagccgcaggcaatcacaaacagccaacaggatgactggttatacaactagggacctcccatcagaccacagccatataggtaaatgccttattacaccatgaccaaataaggcaaacgtagctgtagccaattaggtaatttccttactttgtttttatgtttagtctattgaagcttgctctcaggccactggagctgagctttctgaacacttctggttcagagtgctgcagatttatgaattgttgtttgctgaaataaggtgtaaagtttattttgtctaaagtttttaacaggagtgataattcaggcaaaatgttcacataatagtgggaaatcaaaagcttgcgatacagaaaagtgatatatatttgtaaactcctttaacaaaggcatcgtagcataagcatgactgtagagccagactgtcaatgttcaaattttttctgggccttaatttctttatctgaaaatcgttaacagtggaacctagttgatagggttgttgtggagcaagcgttcttaatctggagtccatgaaatttcagcatctgtgaactttgtattgaaaaaatcgtaactttatgtctattaacctcacaacagtttcgtttctttgaattataaaggcaggcaacaaaccacagtagtattatcagtacctacaactttgtttcctacagaaattattttcatactcagtaagttgttgcagatatcttgaacaattatacgtatatattccttaagtattatatatataatatttttatattctgtatatatttttggagacagggttttgctctgtctcccaggctggagtgctgtagcatgatcggaactcactgtaacctcaaactcctgggctctagtgatccttccagcctcagtcttggaatagctaggactacaagtactccccaccatacccagctgttaatttttttttttttcgtaaagacaaggtctcactatcttgcccaggctgctctccaactcttggacacaagcctcctgcataggtctcccaaagcattgggtttacaggtgtgagccaccgtgcctggctaatactatgtatttaatttcatgcgtttagaaatatgtgctattttaagaaggcgtctacaggttttatcacattaccaaaggtgttcatggcacaagtgaagaaatctctagatactagagtaataaaaaccatgatgcattagaacggatcaggcccatatcaaacgttcaacatacagtctgctgctatggttctttttttttttttttttttttttttgagacagagtctcattctgtctcccaggctggagtgcagtggagtgatctcggctcactgcaacctctgcctcccgggtttatgccattctcctgcctcagcctcccaagtagaggaactgcaaggcgctccaccatgcccggctactttttgtatttttagtagaaatggggtttccccatgttacggcaggctggtcttgaactcctgacctcaggtgagccacctgcctcagcctcccaaagtgctgggattacaggcatgagccaccatgtccagtctgctatggttcttaaaatattcatagaatagaaattgaagtaagtctattcgtttttatattaaaagtagctagtacggtgctctgtacttatgcactccatggatgctgaatgagtcattgaatgaagtggagtctaggttgtgcctcaggccttccagtggggctggaaggaacagttgtgaagttgtggggcggcttctgtgcatcgggggactctggagttagatggtttcccagggctctgaaggagaagagctgtgttcctaataatgatctcaatgggaatagagattgctggggaccgcaggggccaggttgtcattccccaaagcttccccttcatcatccaagaaggcattcaggtctttctgtgctaggccccaggtaaagtgctggactacccagtaattgggttcagtagcaggatggcctcagattgaggtcccagggccaaaggaccactcctctcctcagcgctggtccgggaaaggcaagctccgggcgggagcgcacgccgcgcccccgaagcctggctccctcgccacgcccacttcctgcccccatcccgcgcctttccaggtcttctcccggtgaaccggatgctctgtcagtctcctcctctgcgtcctcggccgcggcccgggtccctcgcaaagccgctgccatcccggagggcccagccagcgggctcccggaggctggccgggcaggcgtggtgcgcggtaggagctgggcgcgcacggctaccgcgcgtggaggagacactgccctgccgcgatgggggcccggggcgctccttcacgccgtaggcaagcggggcggcggctgcggtacctgcccaccgggagctttcccttccttctcctgctgctgctgctctgcatccagctcgggggaggacagaagaaaaaggaggtagaatggatccccttggccttcccctgtgggcgggggcgggccagggtgggccgcgttgccaggcagccctgccgtgttgctaggcagcctggtcgccggcgtgggcgatgccggcgctggggcgggagccgcgagggtgggaggccctggggcgtttccgggacgtggagttagcagggttctgacttgaaaaacgacggcaaagcgtgttcttgactgcttctgagcacctcacacctttcagacccagggcgcctttattcccagctggaagcccagcttagagcaatggtgccactaaaaggggtgtgttggatgtgaaaataccctttggaagtatttataagcctgcaggaaatatgttttccttattttcttactctgctcccttcattacccatttcaagaagcaacagaacctgtgcagagtgtgttttaagttacactgtatgtttatttttgtttatgttgaactcggtgtatacttgtgagaataagcttgcattttttattttgtgcaagtacaacagaacatattgagagtgtgttttaagttatcctgtatgtttactttacgttgaactcagtgtatacttgtgaaaataacctgccatttattttatgtggatttatttctgaagttcattcaatctgatttcaatcttaatccaccattaactttgaaaaggttgagatttgaagtgactggttgtatttaaagtaggtggagtgtttgtaagttctaattatccatcatggatagt

SEQ ID NO: 3825 - DNA, 6000 bp, Homo sapiens
tgatgaacatctgtcgcttgctacttgtctaatgtctcaatctaatcaaagattctttctgttaagaatttgaactatgtggaataagagcagtatcttgctgtgtcctttccagaaaaatcctcagatcatgtatctagaacaggagttagaaagcctgaaagctgtgttagagatcaagaatgagaaactgcatcaacaggacatcaagttaatgaaaatggagaaactggtatgtttccttcagaatgaaagaggatcttacaaatggggtaatatgtgtgaaattgagccctgcattttagaactgtggagttgggttaactgctcctaaagatatttagaaattatacaaaagataaagttcacattttctttccaagtttgttccatatttattcattgctgcctcctagaatgttttctttttcaaggaacatgtaaaacagcacccagtccttggaaaaactacaaacaaatcaggcttatatttcagtggtattttggatcttcacctgcataagaaaaatgtttaaatatctatgtaaaatcagtactttaatataccagccaccctggacaggtttcttagatccaaaacagttggatacgtttaatagaaatgaatagaaatgaatttaatagaaatgaatagcaatactatttatcaaaattcttcatcttgcttcttgtgaattagcatgtgataaaagaatcgtgggctgggcgcagtggctcattcctctaatgccagcagtttagggaggttgagatgggtgggtcacttgaggtcaggagttcgagaccagcctggccaacatggtgaaaccctgtctctactaaaaatataaaacttagccgggtgtggtggtgggtgcctgtaatcccaagtactgggaaggtggaggttccattgaggtgagatggcaccagtgcattccagcctgggcgacatagcaagactccatctcaaaaaaaaaattgtgctataataagattaatccatttggacaagtagcaggtgttaccaaaaatatgaattaacattcactttgcagtgtctagaacagagaacgatgttagtgtgagtggcatgttcagtgttcagcgtcagtcttggcccggccctgaaatacagctgctgccagccaggactctaaccaagttggcagagtttggcaaggcagcttaagtgatccccgccctcgcggtgccttgctgttgactgtccagctgccgcatgctactggcctcttctccccacagtgatgagtgactcaggcttctacaagtgcctcattcaaacccaaaccagccctggacagtaggggacatgggggacctctctgctgcttggtttgtgttggtttggcgtttggttttcttctggagactatgacttctgttgagggagataacggccaagcccctgtgtggatataccagcattttgaattatcaggaaatttttgtaaaggaaggaaaggaactcatggttgttaatgggccaacctagtatacataccagttcctgccaaaggtcgtcctgttcgactgagtctggtatcttctaatctggtagtcagggatgactcagatgatcctgttaataggactgctccatatgccattcatgcatcaaaactttcaaaaaatcatgtgcaataaatcagactttgctgtaaacttaccaacacatttaatttctgatgatctactatttgtttcttgccatgccccagaggtatcctgataatatccttcagccttgcattgtgtatgtgtgcaagaatgagttgatacaatgagagggagacccactgttcccttcatatttgtaaattacaggcctctgatgaaattaagagacttagaagcacaggaagttttctaagaaagacagctttcccatgaaaccggcactgcccataatcagctctgtgacattattaggactagtttccctaggatgagatatttaaaggacaatacctcccaatctcaaattccaggtttttttccacgttgttttatctgggaatccttcataattactgaacgtagactccttttctggaaagtgatttaacctgaacaggttgtcctgagctgcttctggataacaggatgtcttaagaacaatcaggttccaaactaagcaacatactcaaagcgcgttagtcctgctacaaggacaaggacttagacttaatcctgacggagctataatattgcctcttcataaagccttacctttagaaagtgagtgggggatggaatcaggtcttcatcatgttaagtgattaaatgtcctcaggcatcttatcctttcatctctccgctgatcagtttgtttgccttgaaagttcagcctgcacagggcagcaagagaacagacctatctatcttcagctgacctgaggagactcgtggcatgttacttctttgatggcatgctctaagagctctatcgaattgaagctttgtatggccactcagacgcaaatgctgaaaacttaccatgaaactgagttcaagtccatagtaaacgttgccagggactgtgaattgctggcctgtgagttttcatcagatgtgggaatctttttttttttttttccagcaaaattcaccgtaaggagatagataagctttgataagtgtgggcagtgtgtctgcagggtttatttcacattgaaacagaaagaggcaccaattcttagagaattccaaaacaacatgacctggaacaaatctgttacccactcgtatcaatatttaagtgtcctggcatacatgttttaaaaatacccagccgctctgttttgctgttttaaaatctttttcagtatgtttgttagtgtataaatattttaatatggaattgcattttccttaattaaatctccaaagtgtgcttgtgtcgtgaggtgccttaagaaatgaggggttttttttttaatattgtataaatgttggaattcttgtttatgccaaggtggacaacaacacagcattggttgacaaattgaagcgtttccagcaggagaatgaagaattgaaagctcggatggacaagcacatggcaatctcaaggtaaaaataaaacagtgctgtttctcccgagctccccgctcccttggacatccagtgtactttctggacacgctctacccctgcacctcctggaaatatgatggaagcagatggttaaaagggcattgatttctctgtggaaaatatgattgtagtagttcatgcttttaccaaagcggcctgaaaactgtacactgagacccaggccagcaagcctgctcccacggcctctggctgcctctgagaatgctttcagacaaagagcaacacaaaaccaaatagaaaacagcctgcaacataaggtagtcataaaacatgtcgaatatttgcaaaagtggctctcagcctactatgaaattgcccaaaaagtacagttattattatatatttttttgagatgaggtctcactcttctgcccaggctggagtacagtggtgtgatcttagcttactgcagcctccacctcctaggctcgagcagtcctcccacctcagcctcctgagtagctgggactacaggcacatgtcaccatgcgtgactaatttttgtatttttaatagagacagagtttcgccatgttgcccaagttgatcttgaactcctggcctcaagttatccacccaccttggcctcccaaggtgccaggattatgagcttgagccaccacgcccggcctgtgtttgggttttcttagccagccaaatacctgtgaccttgtgcaggattctgttttatcccaaaggaataattttggactttaaagtttcaaacgctaagaaaaatttttcaagttttttttttttttacatagatctcatggtttctggcctttttcttcaaggcagctttccacggagcaggctgttctgcaagagtcgctggagaaggagtcgaaagtcaacaagcgactctctatggaaaacgaggagcttctgtggaaactgcacaatggggacctgtgtagccccaagagatcccccacatcctccgccatccctttgcagtcaccaaggaattcgggctccttccctagccccagcatttcacccagatgacacctccccaaagtccacagactctctgaaagcattttgatgcaggtctgcaggactgaccccaaggaggaacgtgggcacaagaggtatatcagcacacgtgtgatcaccgtagggtaactggagcgtcaccaccggcggaatcgcagcttctgagactggaactctggaggaagacttttgcctccgtccaaaagattcctccaaaaaaagatttaaaaaaagatttcggcatcgacacggacgttgttgcacaaagcacttaaagaacgagagcatcttgttcattgcctttttcacctaagcatagggggaaaaactctcagggccctattaagatttataacctttgtaatgttcttcaccacagacaccttcttgtgagttttcagtctgactgtgggggtggggggtgtgaatgaaatggatgtcacagagtgtcatgtgtctgatgcagcctcctctgctgtgtattaaatgtcaaaatctgaatatatctggatatgtactaatcaaataataatcaatcaatcagcatatacatttcagccaaagccatagaagaaaaagcaatagttgcttgaattatgatcatctaccaccaactctgctcagccctgtaacagggtagggagagggtataacaggaagagctttgacttgtccctgtctatacattctctgtatcttttgggggtaacttcttggcagtttttcagtgttcagccatgtcagttgaaactagatttttctgtagattttttacttacccatgtgagcctaacactatcctgtaattcattttctcaggctatgtgtaaatgtagaaccctaatttttctataaaaaaacaaactaactaactaactgtgtaaagaaagaaaaagggaagtaccaatgggtttttccaccttatttttacctttgatctacccttgcagatttaacctgtcttcttccctcccattattctcattttccttttacctttctccaccatccagagccacaaaagcaaaccttctacctcctacctacttttctctgggacaaggataaaggaatatgattttccagagccccagagccagctcatcttccaggtgctgaaaccactttccaaataaactaaagcctggatttgatattacaaattttgggaaatcttagaataaagaacgagaacaaggaagtcattggctagtataattaagaaaggtaggattcagtgcttaccgatgatgcagtacttgatagaagaaaacagtctgggaggatagcgctcatttttcagttaccctttaaggagtccctttgtctttgggaaagtagcagaatggtccgcttctttcccatgagtggaaaatgtggcttgtccaactctcctccaggttgcatttcagtttctttccaaaacttattacctcccctaatcctgagactttggaaaaggtggaaggaagaactgttgctttatctccccctccctgcatgtgtcaacattgtgatgtcagtatttactaatctacattcagtggctgtacaaataacagctgtagtaagaagagattcaggatgctagaggtgaatatttgggtcatttacatgtacactacatagcaagttgatactcatgttgcatgttcttttaaattagtgattttgtgtcttaagtctttaacttccaatacttcatcatgtatgtaaccttccatgtttgcttctgataaatggaaatgtaggttcactgccacttcatgagatatctctgctcacgcttccaagttgttctcaatgacattagccaaagttgggtttgccattcatcccctaggcatggtaaatctt

SEQ ID NO: 3826 - DNA, 6000 bp, Homo sapiens
gagagcctgccctgaaatggcactcagtgttgtcctaaggtcgcatggcctctgtgggccatggtgggcttcagtgggcctcagggctctcagtcataaaatgggaatgtctaccctaaccacctctcaaggccattttgagaacagatggccaatttacataaaagcatactatagatgtaaagtaacgtcatacggcttcatcatcaacccctacatctatatgctttaactgttttagagtacattgatctcatagaatgttattgcctcaaaaatatccgtttattttcccagaaattaagaaaggccatgaaatagaaaagaaatcgcttgaagatttactttctgagaagcaggaatcgctagaggtgggtgaatgtcaatatcccagtatcccccacaaaaaaaaatatcatttttgattttgtttggttttaatgtttctgtgtacgtatgctgagtttctggggttttcttgttaacttaagttccacatttcattgtgttttagaagcaaatcaatgatctgaagagtgaaaatgatgctttaaatgaaaaattgaaatcagaagaacaaaaaagaagagcaagagaaaaagcaaatttggtaagttgtgtgtgctcctttatcagtatggaatttttcttctcagttgccttttagagtcattcaagtactcagcagccagagaaataacacaggttgggaatccttctcatgtctggcaatgtgctttctaaggtgtgtaaaacaactgctttgcttactggcgtcttgttttaccatcctaaaatctgacatacggatgaagtccaggatgtttctggtggtctaagctaaaaagaaggaaactaccaattaggattagagttttatgtgaagactttatttaaaaaaaaaatcactgtattgagataaaacaaactacaaagttcactctttctttttttttttttgagagggagtctcactctgtcactcaggctggagtgtagtggcgtgatctcggctcactgcaacgtccacctcctgggttcaagcgagtctcctgcctcaccctcccgagtagctgggattacaggcacgcatcaccatggccagctaatttttgtatttttagtagagatgggattttaccatgttgcccaggaaaagttcactcttttaacatgtaaaattcagtggcttttagtatattcataaagttgtccattggtcaccagtacctctttctagaacatttttatcacccccaaaaggaaccctggacccattagcagtcactccccattcccccaaattccccagcaccaggctctcccccgtctactttctatctctatggatttacttattctgaggaatgaatagaaaaggttgattgtagaacatgtggtccttttaagactggcgtcgtttacttagtataaagtttccaaggttcatccgtggtgtagcctatgttagtatttcatttctttttatggatgaataatatttcgccgtatggataaatgtcaattctgaaaagtacaaatctcttggaagctgaaatttcttgtggcacatttgtcctttttccccagccttaccccaacctttgtctttttgaaaaaaatttgtttccttgctgcttctgcctttagtaccactgttttcatttcatgtttatactctgagactgcagaagcaaagcttttctccacttcaaatctctggccagctctagaaagtacatgtgtggatctctcagtgagaccttctgcaaataatgtcattgggagaccctctagctatttgataacattagatgagcttatattcaaagaaacttcaaagctatttattctagaagattcttaggaagagtcagtgatttcaaaagaaatctagacttacatgcagggatatgcagggtataaactttattgatggctcaggaaacaggtttgaaagagcttccggtacacaaaggggattcttctactgcagccgcttttgaaaagctaaggcagagtcagagtgaggaacacagaagcatccaaccgcttctgtcacgtaagcatgctgaggctgcggaaaaagagtgcgtctgactgtagtccgggagaaagggatgggctggcagaggaggaggagaaaatgcagagggtacaagtcttgtaaatgctctaattttaaaactgacggtaagttatgccatttccctctaacaaaaatgaggtaggattcgctattttcaaggtaaaaaaaaaaaaaaaaatcctgcgtacaagggtaacactgtataaaatgtatgaaatttaaaaattgatacttagtatttgcatgtacttatggggtacgtgtgatgtgttgagacaatcatagactgtgtaatgcccaagtcagggtatttagggtatccgtcatcattatcatttctttgtgtttggaacattttatatcttctcttgtagctattttgaagtacgcaatatattattattaactatagtcaccctactatgttcttgaacactagaacctattccttctgtctaactgtatgtttgtatgcattaaccaacctctcctcatcccaccccaccccacctcccaccatacacacgcatacctctcctagcctcagggaactatctaaagaacctagaattaaagatgtattagtccctgccctgaccctttccagctctggaagctttcctgatctttcctgagtagggcgcttaacccgtggaacacgtttcctctttctgtgtgaagtaaggggtttggattaagtaatccccgaggccccttcctggattctccctaaggattggtccagagcagaaaccaatgccccggaagataagcttgatgaccacaccaccgactcttacctaagacgttgcttcattaaacatatctgatcagtggaccatatgctgttcttctgtagcataaattttgaatggtttagttgaatttccgaataaagcaaggagtgggtgggcggtggtgggaaatccacactgatggtgtgctctcagaggacgcctcccctgatgtagcatttattttggagagttttgtgtttttgagacaggatcttgttctgccaccaggttagaatgcagtggtgcattcacagttcactgcagccttgacctcctggctcagttgatcctcccgcctcagcctcctgagtagctgggactgtaggcatatgccactatgcctggcaaacttgtaatttttggagagaaatttaaataggctgtgtactccatgccgtgtaggtactggggtgtcacaatagaaaatgatagtattatgtctgccctagaagtatggcccagtcaacgtagccccatcataacaaaaatccaaacactcaggacattgttatccctgttgttttccagagagccgtataatgcactgctttttctttcctgatcagtttgtttggtaggagagaactgttgttccctgttctcccagaaaatgccaataactgactcacagattgcctcatctccagccaagattctgttttgtatgtaagcaaagtttttctcttgatacaataacatgtttgatgcaactcacatttttgcatattaagttactgataaataagtgaaatgtttgctttcagtattaggaccagtcttcgacattaaggtgctcttgtttttcacctctttctttgaaattgctctaagatgatgaacatctgtcgcttgctacttgtctaatgtctcaatctaatcaaagattctttctgttaagaatttgaactatgtggaataagagcagtatcttgctgtgtcctttccagaaaaatcctcagatcatgtatctagaacaggagttagaaagcctgaaagctgtgttagagatcaagaatgagaaactgcatcaacaggacatcaagttaatgaaaatggagaaactggtatgtttccttcagaatgaaagaggatcttacaaatggggtaatatgtgtgaaattgagccctgcattttagaactgtggagttgggttaactgctcctaaagatatttagaaattatacaaaagataaagttcacattttctttccaagtttgttccatatttattcattgctgcctcctagaatgttttctttttcaaggaacatgtaaaacagcacccagtccttggaaaaactacaaacaaatcaggcttatatttcagtggtattttggatcttcacctgcataagaaaaatgtttaaatatctatgtaaaatcagtactttaatataccagccaccctggacaggtttcttagatccaaaacagttggatacgtttaatagaaatgaatagaaatgaatttaatagaaatgaatagcaatactatttatcaaaattcttcatcttgcttcttgtgaattagcatgtgataaaagaatcgtgggctgggcgcagtggctcattcctctaatgccagcagtttagggaggttgagatgggtgggtcacttgaggtcaggagttcgagaccagcctggccaacatggtgaaaccctgtctctactaaaaatataaaacttagccgggtgtggtggtgggtgcctgtaatcccaagtactgggaaggtggaggttccattgaggtgagatggcaccagtgcattccagcctgggcgacatagcaagactccatctcaaaaaaaaaattgtgctataataagattaatccatttggacaagtagcaggtgttaccaaaaatatgaattaacattcactttgcagtgtctagaacagagaacgatgttagtgtgagtggcatgttcagtgttcagcgtcagtcttggcccggccctgaaatacagctgctgccagccaggactctaaccaagttggcagagtttggcaaggcagcttaagtgatccccgccctcgcggtgccttgctgttgactgtccagctgccgcatgctactggcctcttctccccacagtgatgagtgactcaggcttctacaagtgcctcattcaaacccaaaccagccctggacagtaggggacatgggggacctctctgctgcttggtttgtgttggtttggcgtttggttttcttctggagactatgacttctgttgagggagataacggccaagcccctgtgtggatataccagcattttgaattatcaggaaatttttgtaaaggaaggaaaggaactcatggttgttaatgggccaacctagtatacataccagttcctgccaaaggtcgtcctgttcgactgagtctggtatcttctaatctggtagtcagggatgactcagatgatcctgttaataggactgctccatatgccattcatgcatcaaaactttcaaaaaatcatgtgcaataaatcagactttgctgtaaacttaccaacacatttaatttctgatgatctactatttgtttcttgccatgccccagaggtatcctgataatatccttcagccttgcattgtgtatgtgtgcaagaatgagttgatacaatgagagggagacccactgttcccttcatatttgtaaattacaggcctctgatgaaattaagagacttagaagcacaggaagttttctaagaaagacagctttcccatgaaaccggcactgcccataatcagctctgtgacattattaggactagtttccctaggatgagatatttaaaggacaatacctcccaatctcaaattccaggtttttttccacgttgttttatctgggaatccttcataattactgaacgtagactccttttctggaaagtgatttaacctgaacaggttgtcctgagctgcttctggataacaggatgtcttaagaacaatcaggttccaaactaagcaacatactcaaagcgcgttagtcctgctacaaggacaaggacttagacttaatcctgacggagctataatattgcctcttcataaagccttacctttagaaagtgagtgggggatggaatca

SEQ ID NO: 3827 - DNA, 6000 bp, Homo sapiens
tcacgtatcattactgggttgctgtccttgcccacaatacctacatgttcaggtcggttttacagcagcatcacatcaccacttgcatttaatttacatagattcagtacacaaacaactgaaggaagaaaaatgcaggccgggcgctgtggctcacacctgtaatcccagcacttggggaggccaaggcgggtggatcacctgaggtcagaagttcgagaccagcctgaccaatatggtaaaaccccatctcccctaaaactacaaaaattagccatgtgtggtggcatgtgcctgtagtcccagctactcgggaggctaaggtagaagaatcactttactttgagaggtggaggtggcagtgagccaagatcgcaccactacactccatcctgggcaacagagcgagattccaacttaaaaaaaaaagaaaaaaagcaaattaaatgaagaacacaagtccaccttgtattccccccagtgaacgaaggcccgggagtcaatttgagatgaaggtcaggagtccacccttccttcatgtgtctgctcagtccccgaacacctcttgtggcgtgagcattctatactctctgctatcttagtgtttaaagatacttttccctcatgcaacctggcctctaaacacaagccgaggcctttatcaggtgctcagttatagagagagttgatccaacgctagaggaaaaaaattcactgggttggatctacagagagatgcattgtccacaaacatggcaagctcctagtgaatttcccagacaattgtactgtgtgtgaatttcaccttatacttaaatttaggtcctgacagccaaggaattgtgactgcactgaatacagctccagaacccgcttttttttttttttttttttttttttttttttgcgacagtggccttgctctgtcacccagtctggagtgcagtggcgcaatctcagctcactgcaacctccgccacctgggttcaaccagttctcctgactcagcctcctgagtagctgggattacggatgcccaccaccatacccagataatttttgtatttttagtagagatgaggtttcaccatgttggccaggctggtcttaaagtcctcacctcaagtgatccacctgcctcggccttccaaagtgctgggattacaggcatgatccaccactcccagtccagaacccactcaggaatgatttcctggccttctagatctacgttctgttcccgtctggattccaggagcatatatgcttctctttcattgtctgtgttatattagagataccggtttaatgcttgtttttgctttttaagacaggaaatttactgaaggcaggatctgcatctagttctttcttatgaaaccaccccagcagctttaatagtcaacacagtatatatgtgagtgaacatatgaacggagaggatggaattccagatgtaggatgagcataaagtcttatgtaaatgttctttgctctctttattttataatcagcaaatatttactgattgtgtaatgtatactgagcactattataaaacagttggaggctaggcatggtggctcacacctgtaatcccagcactttgggaggctgaggcgggtggatcgcttgaggtccagagtttgagaccagtctggccaacatggcgaaaccctgtctctaccaaaaaatacaaaaattagccaggcatggtggcatgtgcctgtagtcccagctactcaagagactgaggcatacgaatcgcttgaacccaataggtggaggttgcagtgagccaagatcgcaccaccgcactccagcctgggtgacagtgagaccctgtctcaaaaaataaataaataaataaataaataaataaaataaaaatagttggagaaaaaaaatcatgggtaaagttaaacaattttaaaaactcccttaaccttttagttcccattcccattacagaagtatatatactgtgtttatacacacacacacacacacacacgcgcgcgcacacatgcatatgtatataaaatagatacagatacacattgtatacatatacattatgtatgttttttatatacatgatatacctatacattgtatgtctatgtatttttatatatgtataatatataggtatttgtgtgtgtgtgtgtatatatattttttgttattgctaaccttttctaaatggctttagagccttcgattatgggtgaaaatggttaagagaatcttgcaactaccatgcttttgttgcaagtctacttagtaactataagtttcccactgtagtggcagacatatttcattacatatcagacattcttatatctcatgaatctgagaactaatgtcacactctgtttcgcagaagacacactaaagttattttagtttttttctaattcttggtttatccttgcttagttagacggtattctgcacagacagccaaagtgaacaacagtattgatggtagtaattaagcttcttcctaaaagggtctattgggtggctttctaggtaaacttgaacagggctgaggtcaccctccccaaacctctaattcttcaaaatgcctccacatcttttttttttttttttgcaagtggaatttaacctaaagtagcacctgaacaaaggtgaattttgaatggcactagcagtaaagttgacttggaacaaaaaaacatagatgcattgagcaaattcactgtgtgggtgatggggaggaggtcagatgcagcacacgtctgagccatctgatgtggctattctctgcaagatgctctatgctgttgatgctactcagtggctagcaaaaatgcaggcacaccgatgggaccacagccagagactaagtgcctgtgtcccagggactcctaattcaattatggtgaatccattttttttttcttgagcatttcatatatttaatgcctgagcataaaggcatctttatatccagatttccacctttctcttttttcacattgtgtgtaattctgcatgttacaatacaaagagaattgaatcaacctgttatctagacggttaagagtttatcatctaagagagaaacactgatctaggagcagctgagtaaaaagaaacagtaaatcagtatctaaaggacataatgcattttatcatctacaagtaaagggtaagtacatgtaaaggccaagctaccagggagagtcaggcagaaactaacccttagtatgtgtcttttacagtatgggcactggggtcagcatttcatctatggatggtatttaaagcccttggtttttttcattactgcttcccatccgatgaggtcatctgccttgatagatgaccaaaagaattgagcctggatgttctagttctaggtaggccccatgcttcttgaaggcagggaccatgtcttaaatttcttttatattttcacagcatctgctatgaaaaatgcttagttaattagtttgaagtaataagttaccaaccaatttagaagggtaaatggtctatgcatttggaggaggggaatggtgtcacattacaagggaagaaccaactgacttttgcacaacccatttagacaaagagtgaaagatgacctcaaggttttcctgttactgttactgtgcctgacagaggttggaagatgtcagtagtttctgaggcattaaggacaggaacgtggagtgcagtggagttgaagtttggggaaatgtcgacatgcttggtgaaactccctttcccaaaacctcccttaataagcaaaaatatcacctggtgtatttttgcagtagaacataatgatttcacacaatttttctttgcagttatactaactgtaatttttaatttctttcatcctcccattagtttccataaatttgaaaaatgattgaattttcttgccatctcttccttctgttagtaacttggttactactgaaaagtgaattttaagcaagttcaccaaatgagtttcaggattgtttgtgggcatttagtaaagctgtcttgtttttcctgttacttgagtggtaaagcttcctggtgtttacttgaagtagattactaaacaaaattcaggcttaaatttgatattacgagaagtatttatgatacatatttttatgtttttcttccattattatgcgggctgattttcctcaggctttaatttctacattagaaaaccaattacttattattttaagaaactctgactcactggtgatttcagaacaacttaatgccatatttttaaaaaccaagcatttagaataccattgaagccagaaaggtactcagtgaaaagtgggtcttaaatcccagtccctgctgaccacgtttcagtgctggcgtttagacttgacttccgtagctcttactgagaggtgagaacaaagtaaaagttaaaaatatatgggatctccaactctcagatcagcacttcagacttattttgaaacacctctcatttcataatgtcatttaaatttgtaaacgacagcatgcccctttccttgctcttcacctagttcataacctcatttagtatatgggcttcgaagaacaagtttcccttttctattagtaagtgtgatcaaataatgaccacaattagagaggggaagaaaaaggctcacaagtctaaaaataactccattatccatgcagagggggtcagttttttctttcctccgttgcagctgatatttaactaaatggcaatcgatcagtctaatgcctgcctctcgtttttcataaatgaaaggctgtggctttaagtaatcacaggctgcctgtgccaaaggcagaagctgcagtatcagcttctgtgagtgaggaatccgaggcacacggtaacctgcaggacatgaagtaagacgcccgagggccaatggcgcgcctcctgctagagctttgaatgtagacagacccgactggtgggtggcgcggccacctgtatgcttcttgcacagtgcgaggggtggggggacttggagacagaagctggaaaatgggctgccccagcagcaaactgtgcctctattctccatgtgcagcaacaagggtaattagtatttgtttatagtgcttttctggaagaatgtcaggactactgcagaggctgtctggaattcagggaaaatgctttgaatgacaagcaactcttgcctgcaaaggccgggtctcatgatctctgcaacgctgtgatcaggatgtggtgggagctccgtcttgggtgatcctcgtgagggcatttttcagcgagctttgaaattcttcattttttttttagttactccctggtgctagggaatctaccttttaaggaactgtatgtaattactgtatttgtgtaagtatgtgtgtatgtgtgattgccgggagttgctggtaacttgaacattattcttcagctcaaggttgatacttgcttctctgatactaaaaacagccatccggttttctttggtttgtttctctaacatcgatttagaattatcactgatccaaaatatcataatccttagaaaatggtatgtagctgaaaaaaattaatttaattttgtctttaaaggattatctttctgctatagctttctaacaaactttttgtctttcttttagaaggattggcattgtaacgaaacttttttatgtgcaaatataggacaaagtgcatatatgtgcttatgtttagaacattaaatatttatcttaaactgattagatgtttattgcccttggaggaggagaacgcattacatcttaagtacagtatgcattagccgaaaggttctatggatcagcagtgaagcactggctcaaagtaaatatttctaaatgggccattcactgcgtcaaaccaaagtttcactgggacctgcaaaaatacagatttttgaattacgaatttccttaacagctaagggacaactgtgtttcttttaacaacacaaattgttagcctaa

SEQ ID NO: 3828 - DNA, 6000 bp, Homo sapiens
tatttctgagcatagaatgtggtgggacgggggctggtcattgtagagatccggccagaataagctttctcattgatcccacgcagagggcactgggcactctgatatattattactgggtggtatccatcactggcaaagcgtgttgttggatcgaggttatctttcctctttaaacaggggagaggaggaaaagagtgaatttgtcaggaactgtgcgtgatgttgcaggacattaggcacagatgaaaatctaagaagtccagtgatgacgtcactgacatggagaagggtcagcaatagtctttttaccaaagtattaaactcggtctatttcggaattctacctcaacatattagttctatttttataatgagttagtggagggaaaagactttgctaagaaatattccctgccacttagcattcagtttttctatgaagctggaaattcttgtattaattgctatgaagagtgccatttgaacctcacaggttaatttccttcttgactccagtgaaggcaattcagtacgctaaagacagaattctttctgctgagctagtgacattaaaagtgattactgcagcgcaagggaggaacatgtgtacgtacgtatcgagggatggcagaggtagtatcagaacaaaatatttccatttacttttgccattttattttattttgaacttttaggttcaggggtacatgtaaaggtttgttatataggtaaactcatgtcacagagtttattgtacagattcttgtacaataaatagtttattgtacagatgatttcatcacccaagtattaagcccagcacccaagttattgttttctgctcctctccctcctcctaccctgcaccctcaattagacccccatctgttgtttcccttctttgtgttcgtgaagagaaccgttttaaagaagtgttcagtaacaggcaggcagaatgtgaatgcgtttgtttaattaggatgaaattcatcaaattatgttctcgcatttggtattcacttttgactctttttagatggaattaacagcttcactaagaagcaacttgtctcacctgaagaaaagcagctttgaggttgttcggtggctctgccgtgtcaggaatcctcatctctgctgtcttcttagccgtgtcctcatgattgttgcctcatgatctcacagtagctgctccaggaaggaagaaaaagaaatgaggaaggggtggtgccaggtcgcttaagcttccgtctcattggccgggtcttagtcacatgactcgacctggaagggaggctgggaaatagagcgtgtgacttctctagtctctgtcccacagacaggtataaaatgttataagagctctattggaatatctgccacagagaaggcagaacaggtatttctcaagcggatgttggccgattataaatgaggggagtgtattatttaacaagttggatcttgcaacaggccttgctattttttctctattctatgcgttttggaggggcattgattacctgtgtgtaatggttccattaaactttcaagttattttgtcgtttggacgtaagtcttaacatttgatttttgatctcttgaatgaattttcagttataaaatacattgggaagaatgtgttcaactttaaatgtggcttttgtatgcttaatatgttattagcgcatttatggatgtgttatggattaggagggcatttattcatgtactgttaaggtgacagtaagtaaacttcaatttctcttgtgtttttcgtactacaaaatgtagacgtcaatgaagccatattagaaagcttccattaaaaaaaaacacatatattagcatttgcgtgtgaaaaggtaaaattcagggatttgtagaatgtagaagaaatcaaaaggaccaaggtgaagaagaacgagagatgtagtctttcactgccccttagttatcttactgtgaatccagattcttcctttcagcctccttgaaagcagtcatgaaagattttgctggcctcttgccacatagacaagcatttgctaagaactggtgtgatgaatggcatgatgctgaaaacgttttgtcgtggattgattccaagcttcggtagctgtggcggttttagagctgtagctttgccgtgacatgaatatctgcccttttgtagttacagctttcaattgaagaagacaataaagtgttgaatggcaagttttgctcacaataggtaagattttgataagtttttaaaagtgagatgttgaaagggacagtatgtcctaatttgacaagtttcagataactagagttttactacactaaattatgttttaatgtagtatctacttttacacaaaaatggaaagtaagtaataaattacggtttagagttgcattcagaatgggaaggatagcagtgtttttcatcaagagacactggaggaatatggcaagctgtatataagtaaatacttgttttgttagaacaatttattctggttaattaatagataattaccctataaattaatgtaatgatgctttttatgagctttaaagcctctttcagagctaagaataatattttattaatagtatatgcatattattttcttagaaacacaacaggtgtgattttagaggtatctaatattgaatatcatatttctgtatttatcttaggcaatactttgggtcattttagtacacgagggtcctttttataaacatcagcaattatgtggctctgtggaaaattaagagtaatagagctttcttttggggtgagagatttgccttttttctccctggtgacctgagtcctaggcacgtttcttccaaattgcttgtcgacagtttagtattttgagaatgatgttctctttttatttattgtttgtattgtaaatatttctaatgtttaatgttttaattggctattttaattttcatttctgttataagatagtctgtgtttttcttttcctttgggaagatacccagcagtgggattgctgggtgaatggtagttctatttttagttctttgaggaatctccatactgttttccatagagattgtactaattcacagtcccaccaacagtgtataagcattgccttctctccacatctttgccaacatctgtggttttttgactttttggtaatagccgttctggctgataggaaatggtatctcatcgtggttttcatttgcatttctctgatgattagtgatgttgagcattttttcgtatgttctactttttccatatgttggctgcttctgtgtcttcttttgagaaacatctgttcatgtcctttgcccattttttattggggttgtattttttcttgctagttgctagcgttccttgtaaattctgaatattagatctttgtcaaatgcatagtttgcaaatattttctcccattctataggttgtctgtttcctctgttgactgtttcttttactgtgcagaacctttttagtttaagtcccatttgtctatttttgtttttgctgcatttgcttttgagatcttagtcatgaattccttgcgtcggccaatgttgtgaagagttttttctagttccctccccccacccaggaatttttattttttcaggtcttacgtttaagtcttaaatctgtcttaatttttgcatatgataagagataggtctccagtttctctgttccaattttcccagcaccatttattgaatagggtgtcctttccccattgtatgtatttttgctgactttgtcaaagatcaattagctgtaagcatgtggctttatttctgggttctctgttctcttccactgatctatgtgtctatttttagaccagtgccatgcttttttggttgctataggagagaggcaatgccttcttaaaagtacttctgaatgtggtgaatttatattaactcttctttgagttaggagtccattttaggtacataagagtatgagaaatttggttttttcctgccagctatatggaaaatagtttagggcaagtttggactgttgcttcaggaaaaattttataagcgtaattaacccaaacaggaattttttatatgaatatgctttctattctcgaatatgctttctattctctaatctgcttttaatgtgaagaaaagaagtagaaccctttttgatataatatgagctattgcaacgaattctaccaatatagtaatgaaaagtttaaatggtgaggcatcctaaatcctcctccctccccctacaaataattgggcttggcttggggttttttgtttgtttgtttgtttgtttttgagaacggagtcttgctctgtcacccaggctggagtgcagtggcgtgatctcggctcactggaacttccacctcccggattcaagtgattctcctgcctcagcctcccgagtagctgggagtacaggcaggtgccaccacacccagctaactttttgtatttttagtcgagatggggtttcactgtgttagccagaatggtctcaatcacgtgactttgtgatctgcccgccttggcctcccaaaatgttgggattacaggtgtgagccaccgcacccggcctggcttgggtaattctaaatgtctaaacactgtgctttgctgagcttaaaattttccattttcagtaaatgccatgtctacctagaaatagaaaaatattatatgtaaatagaaaaatatatgtctcctaaattattactgttaactcttttagagtaaacagctaatgaacactagaaaactttatacaaacataaactaataattgacatgaatggtaactttaaaaaactgtatgtaagattgcataggcaggataagcacctgccaccagatgctggggaaactgactgaaagaacttctgtgtcagtgtccctgtgagggcttttagatgtgtacgattagattaaggcagaaaaaagggaattttctgtctgtccatgccgctagcagagagagacctctcactagcttctgagttcataacctatgttttgtcaacccacaaacatcggtttttaatgcaatatgttgtagaaaggacttaccatccagtcagtgactgtcacctttttacagataggttgagatttggagttgaagagctgagcactagggaaacatgagtcagcagagatctttggtgtctttgtgcctctctgagcaataccaccctcttatgtgatacttctcctgtccccgcaaagcaccagggcaggtgcacacccaccacagcagtgccctcatggtagattttaataaatatatttcatgagtgagtgagtaggtcagtgagtatacacaaaagtggacaacgttcgtttccaaattctgtgtttagtttgtgtttcacggaacccaaggcaaactccctcagtaggtctggtctctaacttgattttaataattggaaaagccagcagattgaggaaatgtgtggcttcttcagcctagaatgaatgtgtcctcagctgctagtatgtggttacggttagtccatgtcttaatggttaggtttttctctcaaaattgtttttggtcttgggatttggaggtctatttgcctaagtgatttgagcctgagaaatgggcatcttcctcattaaccaactactttctttaagaagatgatacatgacttcattgcactagttttaaatcttattaaattgaggtttctgaatagaaagaacaaagatagccaacagggtcatccagctgctttccaaatgagcaaatgtctttggttctggccttcgttttcctgatggaggctgccatttcattagaatgagtcccagtaaggctggatcacagctgatggtggtaattatcttgttgagataaatctgaatcgatatagaagttgacgtttaattttaaggtttctgattaaattggccctttaaaatcagaacatgttctgttaataggtacagtaaaca

SEQ ID NO: 3829 - DNA, 6000 bp, Homo sapiens
tgttcttgccacaattaaaaaaactaaacaaaaagaaagggaaaaataagtggatggacagaaaagaaatatatgaaggactaaggaatatatgaaaaatgtttaccaaatatgagttaaaataatgtgctctcagttcttgcttatttcttaatgttagcacctggtactggcgaagaataagaaacagcactcatatgtacagctccttggtaaattacagcagctgtagcagagagcaaacaccttccacccgggaattctgtttttcagaattggtcctaggaaagtaatttatttacttattgactgcttttcagaattgtttacaatgggggaaaattggaaacaacctatataccttacaggaattaagttcgttgacattttaaagacatttttgaagccattaaaataacaatataaatgcttatttaatcccatggaaagataagtgtgaaatttttaagtttaataagtttattaagcttatgttaagtttaaaaacaaattggagagcagtctgatgtgtaagtaatttaaattgaaaagaaaattctggccgggtgcggtggctcacgcttgtaatcccagcactttgggaggccaaagcaggtggatcacaaggtcaggagattgagaccatcctggctaacacggtgaaaccctgtctctactaaaaatacaaaaaaaattagtcaggcgtggtggcgggcgcctgtagtcccagctactcaggaggctgaggcaggagaatcacttgaacccgagaggtggagcttgcagtgagccgagatcacgccactgcactccagccttggcgacagaccgaggttccgtctcaaaaaaaaaattctacgatgaacatatgaggttttgttttttaaaaacaaacattgtacatgaattaaaagcattactgcttttaatttaaactcttattttgcttattgcaaaataaaaggcaatgtcactgttctttgagagcttatcatcttacaggtgggtggaagttgattgtttttctaattgctttgtgttaattttttgataattacaatttatcttcgtactgaggaagaggatagtgtggaaaaattgggccttaagttgaagtttctacaactggaatagagaattgaacttactacattaaagactgtgaggagtaaaatgaagaaaatgttgcaattaatgctgtgttagggaaagtaaggagataaatataaagattaatattccatattaggctaaggaagattggttggatagagatgcttgaatctccacacaagtcacttggtttaaattttaatcttcttcctcattctttatgatcattaacaacaacaaacaataacagataaattgaaggcattttgtagcatctaagcaccccatacagattatgctagattcttgtctagaatcatgacatcattgttttctaaatcactgatttaaaaaaacacatttctatgcagaccagtggaatttctgtttgtttgaatatactgtgatattacaacatactgacttatgaaacattctgtatcatcctcttttgttatttaagccttagtatagactttacacatcgtttatttttctttgtgtcattatgaaaactcggctcattttgtaggctttctataaaattattctaacacttaaactttttaatttttttctggctgcatgatttttgaaaaaaaaaattaggaaaatacaaaaacatataataaagaaaaaatagaaatcctccctcttctacctcccagagcattggtgacattctggcatgtttgctccaatatacttaatcgtttttgtttaatgttgagatcctacattgcataaaattttaaatcatgtttttgttttccactgacatcctaacacaggctctgcttcataaagactcatcttttttttttttttgaggagttttgctcttattgcccaggctggagtgcaatggcacaatctctgctgattgcaacctccatctcccagattcaagcggttctcctgcctcagcttcctgagtagctgggattacaggcccctgtcaccatgcccagctaattttttgtgtttttagtagagacggggtttcaccatgttggccaggctggtcttgaacttctgacctcaggtgatcccacctgccttggcctcccaaagtgctgagattacaggcatgtaatctcaccaccgcgcccggcccataaagactcatagctaacttttacaactacaaactgttgtactttaggcactaaaatttccttattttttcctctactgtccttggtgatgcctatcttttcctcttaaattaagacttttaaaaataacaaagatgctttttttaggtacttctcacattcgttcaatttcagaaaatatggagttcctaactggtaacagatgatcaaataatcaaagaattttttggaaccaattttttatcttggctccccccagaggcatatatagtataaaaatagttgtgacctgaaagtaattgcttatccagttatttaaatgagcaaacgtaaagtgtgtaagagagtgcttggagcagtagattgtaagcgatggccatttgtttatggactgccaaggcagctcccttgctttggtgcacttgtgctgcacggccaccaggaggcagactatgtttgggaaagaactgaatttagtttattcctgcagcttcttgctctgctgttaagagatatcattaacaatgtttattttcaatatgtgtggttatagcttaatgtaattcaagtaaaaatgttaatgaatctgattaatcgatgattagatggtaatttcttcttttagggagtctaaagaacttcccttttaacaaggataatttaaggctgggcgtggtggctcacccctgtaatcccagcacttgggaggccgaggtgtgtggatcacctgaggtcaggagttcgagacgagcctggccaacatggtgaaaactcatctctactaaaaatacaaaaattagccaggcatggtggcgggcacctgtaatcccatctacggaggctgaggcaggagaatcacttgaacccgggaggcagagattgcagtgagcagagactgcgccattacactccagcctgggcaacaagagtgaaactccatctcaaaaaacaaacaaaaacaaacaaaaaaggataatttagaatttgctgttactgaagaaacaacaaacacaaccaaaagaaagaaaaaccacctcctactatatggagtggtggcatgtctgtttttaatcatggcaaaatttgactctgttcttctgtttgtttttaatgctgattggtttcttggtttttacaaggttttgggaggtagaggaaaaggttctggtatatttttagtatgtagaatctggaaggaaaaggtgttcaggttttttaataataaactgggatgaagtaaaaggcaacacctagaagcagctggccttgattttaattccttgatcatttagcttcagttgctgtggtgcaatgtatgtagcaggtttttcgtcagtgtatgaactaggtgtatctttctcacaggaaccctggacaggttattgggtctgtctctcttgctgacaacctctaaaatggcaagttgggggcttgagtgaagagggagggggcttgagggaagagaacttatttaaattttctcttcctccctctctcttccctgcttcataccctactctatagaatttctaaaagaactgcttcctgctagttttaatagcacttaatagtgttatttatggtaacaattctgcatttatttctgagtcttattttctaggaaatcttggaaacaggcataggacatttttaaaacattgttttgtttataacatttttaaaaatgttaagagctcaggctattcgtggtttaatggaattagcttaagtgggcatattgttgttgttaattcttataaccatatctttgtttttcaagttcttttggttttgctatcatgttttaacatacttttacaagccactctactgaaataaaaattagtagataactggcaaaagatattcataactgtgccctcctcacactcctagtcttgaaagaccactataagagaccacatgatgttctataaatgcaattactcatgcaataaatgtagtctttagaatatgcctatctgatggactattcttctggaactctgatattacatctgatagagaaaccgtattaatcttttactgttgattatttgtgaggtcctcagcatgtgggaattaaagttgaactttaaccttttgacaatctgtcattaatatattagaatagaaattttcttaaatattgtagttgagaacatttattgcctgaagtctttaaaaaaaaaacttttccaaaataccaggtttaaatgtagtttacatgtaaaatatctagagaaaaaatgctcatgttatcattgtgaatataaggagtgaaaaatgttaaaatcaggacacagtttactttcaggaaatcctaatttttttctaattatgaaagaaacattaggcacttgaagtagttaatttcccctagcgatctttcaagtggttacaggatctgtgacattattggttgttctgtaaagctcctgagaccacccactttctcctcccctttaccatctcggatgaaaaccataacaactccacaagcatgcacagtgtgatgtggttcagaggcagcttctagacctgcaggagggagattgtattcagaggaagagcatcattttggcaacatctgaaagtgaaaacggaagccagaaacacttggccagccctgggggatttttttcttctatgcctctctggtggaatgacatttgctgtgtaggcatctttcctctgactgtatttcttggccttgaagagtactgagtttaaaaagacagtatgtgacagtccatggaaattgcctcttctgtgaaatctcgccacctgctccgaagacatgttgttgtctcccaaattctccttatccaccattcacatacgactgacggccaaaggattgcttcgaaaccttcgacttccttcagggtttaggagaagcactgttgttttccacacaggtctgtctcgcatagatctctgtttagtgttgcacgggggatgtcttcattaatttgcagatgtttatcagaggtttttccaaggagacagataattggaggaaaaaagctctctctaatgagagatgaggcttaatttaaaaattgttttctgttgcttcagcacaagtgcatagtacttttacttttggcagcagattgtgttgtttgtgttgatggaaggcagaattgttgccttggtgttccctagctcttttctccatcaccagccaaatgtgtgaaaatcagcacctgttaaattatattttagttccagtgtttgggaaataggacacaggtaaatttagaagaatatttcctgttcgcctgtgtagatgagaaggttcccatcgtttttcattggatagtttctcagtcagatttgacagttaattttaatatgctaaaagatttctgtatactaaacacttctgacagaaaacatcctaatggttatggggaagtagtaagtgaatcacaaatctagttttccaatcttcataataaaagtgtgtgcagtctcaaaatacttcccctgaggtttatgtttgtatctgcttattattttcggtgcctaagatgaaaataaatttagtatatattttaggcacgtggtgacctgtctgctcacttttagggcattgggttggcctatgttgctacttttgtcctagatgattttacagctacagtaaattaaatcagttttattctgtaaaatatgttagctggggtgtttttatatttgttttgggctgaatagcgttaggtgtcacaggaatgtttgatgaggatgtaaatagattttt

SEQ ID NO: 3830 - DNA, 6000 bp, Homo sapiens
ggcaatttggcaaatttatattctaaaaatctgttttcctgttcttcctaaagcaagtaaaactggtggctaaccataaatttttaaagtgtgtatttgctatctaacagttgctaattattgtaaaggatgtaaagaaaaaagtctctaatagactgaagattcaaataagcttgtaaaaatgggttaagcactgaatgcttcagtatagatgatgggagaacacattatcaaaatacatcatttactgttggcatttaaaaaaatgaatttgttgaggaaacatttattaagtctcactccatgctagacctttgccagttcctgaggaccagaattgaatcaggtgctcttcctgatctcaggaaccttagagatggtccaagaagaatgtggaggcaaatgctgtgatagaaacaagtacatggtgtgaggagaaagcaaggcttagtccacggcattcagagaagggtgtcctggcaggataagctcacagagaggtcctgattctcaacagtgcttcagaaactccaggtgcattttaatcacctggggatcttgtgaaactgcaggtggtgattcagtaggcctagggtggagctgcaaatgagtagcaagggttcagaagagaagcttgagctgactttggattcactggacagaaataggggaggggatagaaaggaggccgttcagtcggaaggatgggcgtaagcagaagaatagagcgaaatgactggagagaaaccacgaaggggtgtgtgtgtatgaaggggtagaggcatggcctgagggggaagaagtgggtagggatcaaccccacattgccttttaagcctgtgaaattaaatattaaataaaaggattgaaactacgatcaccatcctatagattggggtgtgcaatcttttggcttccctgggccacattggaagaagaagaattgtcttgggccacacataaaatatgctgatgatagctgatgagctaataaaagaaattgcaaaaaaatctcataatgttctaagaaaatttatgaatttgtattgggttagcgttcaaagctgtgctgggccgcatgctgtagatggtggagaatcccaaattttagattgggtcatgaccttaattttcacatttaggagattaacatgatggagttggaagggatggaaggacaggattttaggagtccaatacagtttagacaatgatataaagggttaaataaggattcaaagggtggaagaagagctctttgaaaagaaatgatgtgcctgttggaatattaatagaatagcacatgatgtgccctggtgtcagagagaaagcgaggttaatcggagcagagcacacatggatgtaggagagccatacaagagtgaggctggagccgaaggaggggagcttaatgtggtaatttcaaatgccaggcctgaggagcttcagcatctttttctccattaggatgaggtttttatgagcaaaatcgctagaacaaagcaatgggcattactttccagcagcattatttgactcacttatgggatccttagtgatacgcaacaatgtcattttcatcaaaggtctttttcaactctgggtagtcttcagttaggtggtactggtagcattgggagacagtgctagaatatatggggatctggggaagaaaagatgattccaatggtttgaagctggaaaaaaataaaaaatagggctatatggctgggtggggtggtttacacctgtaattccagcagtttgggagactgaggcgggaggactgcttaaggccagaagtttgagaccagcctgggcaacaaagcaagatttttaaaaaaataaaacagtggagctataattagcataaacaggagcatgtcggtctaagatgaaaacctagagtactcaataagtactttaaaacatgagtagccttgagattcagaaggaagatagggctgcaggtgagaacatgggattcatccgcataggacaatggttagaggaaagtagagaaaatagactctccaagagaatgggcatgaggagggttaagagcgaaagactgggcttgggaaatgcccatatttaggtagcaggttcgtgagcatcaggagaatgtagtttcagagatgccagaggatacgcagcctgtatatttatttcactgataagtggaaacatttttactgcaagaaagagttgcaagttggagtgaagatcatttaagtttggcaaataaactgtgtggggagtaaagaagaaaaggtgagattaaaaaaaaaaatcttaatagtatagcaccacctggtgttagaacattaggcatttttcaaatgaaatttttgcttatcaaattgcatttttcttcctgtttgggtgattttaaaattttccactcaggagaattttgttaaagttttcagttaacgtgagttctgttttctgtgtataaatgagtgaatttcctgagatctctctttcattccaaagatgtatttggacttggttcttatttatttcttatatgatagcctattgtcctaatggattattttttttttagtcaccagtatggggggtcgtatcaatttgtttatttttttatttcagttttgccaaaagctgctttctcatgattattctgattgatcatctccttcagagaacatgtgtgagttaattactttaggagacagggttactcctacacttctcatatcctaattgcctcatcatttctgctctcttgcctctaaatgatcaaaaataaacatgtctgcgtgaagctttcatctttcatctgaagttacatgattgtgaacattcattttgtgttttgactttgttgttagtgcagaagtttgagtttacaggcttaaaaagtgccagctttcgggatgaatagcactggaaactttttgttttttttaaaccccaaggaaagcctacatccttgaaaactgcacagtcgtcatgggtgaatttgcctagaccacttcctaaatccaaagcatctttgaaaagtcctgcgctgcggaggacaggaagcaccccctcaatagccagcacccacagtgagctgagcacttacagcaacaattgtaagtcgactttatatcacacttcgggggttgtggaaacagtcattacaagaaaaactaatgctctgcaaataattagaatttttgtttctggggtttcaggaaaaataggcatactgcttccttggagttgctctgaaagtttggcagaaaaaaaattctttgaaaaacactcttgaaataattatgtgttaaagtatatttttgcatgaaggattcgaaagtgcatcgtctgaagtgatggtgttttggaggtttaagagtagcaacccaggggatttggactctaactggaatcagaaaaaaagattatttcagtttcatttactttgcaaaagactatctcctgtggaatctttggatgctagattttgtgtaataggactaatataacttgaatcctaattctaaaaaattgaaactcaggagaattttgttaaagttttcagttaacgtgagttctattttctgtgtataaatgagtgaatttactgagatacctctttcattccaaagatgtatttggacttggttcttattttctcatttccttttttatacttccccacgaaataattcataaatttaaaccatcttggagtgcccgctgtgcacagacaccatgataggcgcagtgaggagcacaggatataaaagaaatggcccttattctaaaaaatagttgaggagaaaaagaaggtattttcatggatgatgagaataccaataaaaccagacacaagggtgtggagaggagtggcgaactgatctcttcagtttgacagatcagtttcttcttttgggtgaggagttggggacaaagtgtaataatgctcatgaggctcctctgggtgtggagcagtactttaggatgtccatatttgcttttatttttttctctcaggtaacttctgctgttaccctgatatttatatagaaggtgattgaggctcagagatgttgtcactggtctaaaatcacacagcagctatgtgagggaattgagaatgcattttttgtagagaaggcattgaattaatgaccgaattaatgagcacatttccgacgggtcacctagcagcagtagctggactcatatgagagtaagtagctgcataccctggcacttcaggaatactgggatatgtgacttgcaattaaacaggattgttaccagctttactgttggaattttgaaggtgtggcacaaaatcaggcttgcatgtaagagggaactctgaatttgaaaaggtaattcacacgtgtattattttaagctctctttgtcttgcaaagcaattttaaagacaaactgccaaaacagaatcaccaacatgctctagaaaaactgttgtggcaacagaatttgtggcacttgaagcagacacagtctgtagtgccacagccccgtgttttccatcgacatccatgttgacttggccaccgtttcagtactgtgtctgatgctcctaaggaggctgtaaagtgcttttgtccattcctttttgtcttttaacaaaggggtttaccatacacccacagagcctgtctagtggcgatgtgttcctgttgcggattaagcattcaaatcagtgagtctctttcttagtttgatttgctagctggtttaatctgttttgtgtagtgccttggagcttacgcatttttttttttttccctccattcgaattcactaagagcaagcatgagggatatgagagtgaacatggctgcagtttttcctgcttaagcttgctttgatccttttaaatgactgtaccaggaggatttcgcagttgtacagaaactgatatttcttcaaaaatctttatcaattctacactcaccccaccggctggttcagagaggcactatgatgctaccttattgacactgctggtcgtgggatcgtacagcctttgtataattcctttgttagccacgtttactgggaaaaaaagtaggtcgacgatttctggtttcttttctttgtaagcatgcttaaatttttattcaataaattgatttaggatctcttgacttctgtttttgtaacttgtaatttatggtaatggtagtatttgggggcattttgtatgtatatttaagatgtgaatgcttctgtgtaggaccaattttgttgtctcttttatgtgttttgcactcttaatataattcagcagcatcgttaatgttctggcacatgaaattatcctattatcaaagactttttgatggtttaatttcttatgaaataactagtttttgtgtgtatgtagctggtagttgtgcaagtgtagaaaaatacttttctaaaattaaaatggaaacatcacatctttattttcctaagttgtaactgaaagtattaaacatgtatacttttaaaggctacctcaaaacatgaaaaaatcatctcgcgctgaaaatttcctgtttctgataatgggtggtcatgttaagaattaacttcctcttttgatcagtgttctgatttatactggcttaagtatttgaatccctttaacaaatattggtttctcgctttgtctgcttgtttctttgtgatgtgatatctttagtggcatcatttaagaacttctgatataacacagtgctgttgtaaaattagcactgggttctcggaactttgggatcctatagaaataatgttactaaattttttaaatgaccaaatcaaaatacgtaaggcaataaattgttcttatttgggaattttagcaggttctttgtgtgtgttcttttaagtgtagaaaatttcaaagttacgatcttgatccttttggatattagtgtaaaacatttcacaatggtttctataccaaatgtgctcatttatagaggttaaagattataaggtctttcacac

SEQ ID NO: 3831 - DNA, 6000 bp, Homo sapiens
attatttacaaagacagttcccacgatctatgctaagtgcgtgtttgcagtgcactttgcatatatttgcttatgccacagtctgttaactgagtattagctgttagggaagcagaaagctgtagcatatttagtgcttttggaaattatatcccctgcatgtaagcctaaaaatgaataaatatatttcttgatttaaacatttagcttggatgtattttatactggaggattaaaaatgttaatttatgtttcataaaagcttttattaaggctcttgccaataaactattcagtgatttcactaaggagttatatggtaaaaagggttcacaaatttacactttccatcagtatataaatcacgcagccttcatttttggattcaaaatcgctttttggatgtgtatgtgtgcacatgctgttgaaatcaacattgcagcctttctttattccattaaaggctggtatcaggatgcttggccagaaagacacagagcactgttagcgaagaaaactgatcgtttcagttttaacatagttcctattctggttttattcaggccactgaagtttgaatgcagagaaaacgctgcaagatagaaaaatgagacctactcttcattcggcaagttgaattaacacacgaaatggcattttttccctccctcatggatatttttttttctttacaacagtactgtgacatcggattgacattgaatactaggattagaaaattagttcaagtgtgtgcgtatctgtttgcagtagtaaaaagagttaacaaatttacactttccatcagaatataaatcacacagccctcattttaggattcacaatgacctgtttgcagtcctagcttgaacatttggacctttctttggcactgcagtttgaccaaaagcataataaaatttaagttatttcccaaaagtggccgggcgtggtggctcatgcctgtaatcccagtgctttgggaggccgaggtgggcagattacctgaggtcaggagttcgagaccagcctggccagtgtggtgaaaccctgtctctactaaaaatacaaaaatcagccacgcatgaaggtgtacacctgtagtccctgctactcaggaggctgaggcaggaagattgcctgaaaccgggaggtggaggttgcagtgagccgagattgcatcactgcactccagcctgggtggcagagcaagactccatctcaaaaaagcaataataatttatttgcaaaaagttttagatttaaatgctttcgtgggtgttttaatggtttcatttttaagtgtacaattcagtagttttcagtatataacattgtgcagccatcatcagtacatagttttagaacatactcgcaaaagaaacgtcatcccaattagcagccactttaggttttcttattctggacatttcatgtaaatagtgtcatatagtatgtagactttcatgactggcttctttcatttgatataatatttcaagtgtaatattatatccgtgttgtaccatgtgtcaatattgcattcctttctattgctgaggaatattttgtcaaatgcataagagtacattttgctttctgctcttcagttgatgggcatgtgggtttctactttatgactattatgaatagtgcttctatttagaatcatgtacatttgtgtgcaagttcccatgttgacatatgttttcattttcttcagtagattcttaggagtagaattgctggggcatgtggtacttaagtcttcttcggccaccataacaaattatcatacactggatggcttaaacaacaaaaacttactttctcacagttttggaggctggaaagttgaagattaaggttcttttcagggtttggtttttggtgagagctctcctactcttctcagtgtaccctaatttggtagagagaggggatgaaccaagagtgggagagcattctggtgtcactttcccttcttctaagggcaccagctctgttggatcagcactccacgcttatgactgcttttaaccttaatcacctccttaaaggctctgtctccaacatagttacataaggggtgggggtttgggcttgacatatgaattggagaggggtggggaacagtttagtgtataacataaggtaactcacatttcaagggacttccaacagggtaccactggagcctttaagaatcgacaatttttttttccccttcaatttggaaatagcatatgtttaagataggaataaaaacaaaggagaaacgtgagttcttgattgatcttcagctgatttgctgggctttcatggcctgtctaataatcactctgcatggaaataataggggggcccttctgagaatgaaagggacatgtttactaatcatcctgggacaacagacatactttgggactgtcataagcaaatttgggtgaattgtcactctgtcagccaacaagaagaaaatactattgccagatttacctcctcctctctttgacaagtccctgggagtgggggagaggcatatcagttataaagtcagggacagggttaacgagcaatgaccccatcttccattttgccccatttgctattccctcaaattaaaaaagtatcttgaaaagcggtgatagattgcctgattatatctcagttacccacatcagtagttgtggggtctaaatgtgaacataaagtgattgaaactaatcacttagtgattgaaaccaaggggtggcctgttaatttttcttatagttacttgagttaaacattttatttcttccagggaacaacaaatcatttaatcttcagagcatcttagactgaaaacctttcaactgtgctgaaaaacctagaagacagaccattttgcccaccctctcatttaaaaggaattgaagaagaaataaaatggcagaggtttaaggttactattcaggatgactgatgataattcagatgataaaatagaagatgaattgcaaaccttctttaccagtgataaagatggaaatacacatgcatacaacccgaaatcaccacctacacaaaactcttcagccagcagtgtgaactggaattctgccaacccagatgacatggtggttgattatgaaactgaccctgctgtagttactggtgaaaatatttctttaagccttcagggtgttgaagtatttggtcatgaaaagtcttctagtgatttcattagtaagcaggtgttagatatgcataaagattctatttgtcagtgtcctgcacttgtaggtactgagaagcccaaatatctgcaacacagttgtcattccctagaagcagttgagggccagagtgttgagccatctttgccttttgtgtggaagcctaatgacaatttgaactgtgcaggctactgtgatgccttggagctaaaccaaacatttgacatgacagtggataaagttaactgcacctttatatcacatcatgccatcggaaagagtcagtccttccatactgctggaagcctgccaccaactggtaggagaagtggaagtacatcttctttatcctattccacttggacatcttcccattctgataagacgcatgcaagagaaactacttatgatagagaaagctttgaaaaccctcaagtcacaccatcagaagcccaagacatgacttacacagcattttctgatgtggtgatgcaaagtgaggtttttgtttcagatattggaaatcagtgtgcatgttcttcaggaaaggtcaccagtgagtacacagatggatcacaacaaagactagttggagaaaaggagacacaagcactaacaccagtttctgatggcatggaagtccccaatgattctgcattacaagagttcttttgtttatcccatgatgaatccaatagcgaaccacattcacagagctcatacaggcacaaggaaatgggccaaaatctgagagagacagtgtcctattgtcttattgatgatgaatgccctttaatggtgccagcttttgataagagcgaagctcaagtgctgaacccagagcataaagtcactgagactgaagacacacaaatggtctccaaaggaaaggatttgggaacccaaaatcatacctcagaattgattctaagtagcccgccaggacaaaaggtgggctcgtcatttggactgacttgggatgcaaatgatatggtcattagcacagacaaaacgatgtgcatgtcaacaccagtcctagaacccacaaaagtaaccttttctgtttcaccgattgaagcgacggagaaatgtaagaaagtggagaagggtaatcgagggcttaaaaacataccagactcgaaggaggcacctgtgaacctgtgtaaacccagtttaggaaaatcaacaatcaaaacgaataccccaataggctgcaaagttagaaaaactgaaattataagttacccaagaccaaacttcaagaatgtcaaagcaaaagttatgtctagagcagtgttgcagcccaaagatgctgctttatcaaaggtcacgcccagacctcagcagaccagtgcctcatcaccctcatcagtgaattcaagacaacaaacagtcttgagcagaacaccgagatctgacttgaatgcagacaaaaaagcagaaattctaattaacaagacacataagcagcagtttaataaactcattactagccaggctgtgcatgttacaactcattctaaaaatgcttcacacagggttccaagaacaacatctgccgtgaaatcgaatcaggaagatgttgacaaagccagttcttctaactcagcatgcgagaccgggtccgtttctgcgttgtttcagaagatcaaaggcatactccctgttaaaatggaaagtgcagaatgtttggaaatgacctatgttcccaacattgataggattagccctgaaaagaagggtgaaaaagaaaatgggacatctatggaaaaacaagagctgaaacaagagattatgaatgagacttttgaatatggttctctgtttttggtaagtaatatatatatattttttgcatgcttcagagaactgtggagaaaactgagatgtgttagcatttagttatctattagtcaataatattgcagaaccaggtgggcagatttacatttagttgttaattcattgtcttgtcagtactggggtgttaataggtttcaatacaacaaaactgcatatggaaaaaaaaatcctcaatttcagtattttgtatcaagtatcaccgttccttttaatagtgtgctgaaaaatgaagttactttaatattttagtataattagtagtttaagtgcctgatacaatcaggttatattttatttttctgaaaaagttgggttgtcaactttaaaatgtattggacagcatttaagaaagggcttgggagtgctggtaaacatgtcaacataaaaataactcctggactcttgcggaggaggcagctctgggaagtagagccctcttgtatgagcaagagtgttcttgatttttcctctgaccggccaataatgatttttggcaagtaatttttcgagacccaaagatgaaaggattggacctagtggatgtgtgaagcctcttgcagccttaatatattaattcctggtatataaaataaaatcttttacttatgtatagtgaaaaaccagtatgttttccatagcgcctgtctaaaatatttgggggggacctagagagtgctgtttaaagaataaagaattcacatgcagtgtaaaggtgattttcctttaaacatgcatgtgtttttgagaatagtgtgtagaaattggttttctgggttttaaaaacatttgacaggccactgttggtcgttgggcatgtgtcctcagccctatttttggcagtggggacttaggtgtattttcagccccagacaggctgtccttgggtgcctgtcctctgggccaggaagggagctaa

SEQ ID NO: 3832 - DNA, 6000 bp, Homo sapiens
tgtctgggtgagtaacttcctcaagttgagttttattacaatacttttgtttttttggccaggcacagtggctcacgcctgtaatcccagcactttgggaggccaagtctggagaattgcttgagcccaggatgggcaacatagcgagaccccgtctctattaaaaaaaaagaagaaaaaaacttctagttttattcacagtcactatgaaaaatagccacatgaagttccttatggtattttaatagtatattgtcattttccattttgtagtcttgaattgaaaatgagtgacaaaaatttttcttaaaattcagtgctaggaaaagtttttcttcctttgagaaactttcagcctcttttgaaaatgacaattatgtaagcggttggcgtacctgggtctcaggaagctcagtgttttaattcgttgctcaatagtatgtttactattacctgtatgcttttccgggaataccattttatactaaaaatacttacactttgaaatatttatttttaaaatgtactgtttctgtcttttaaagatgttcaactcccttctcagtgagatggtgccataaggaaacataaataaaaaaaaagggacccggattgggaacaaaggcaatgactccatggagttccccttgagaattaaggcctggaatacttttttcatttctgattgaatgcaactttggtaaagttatctggaagccctacccaagggagatgtcactgctaatcaaattgcaaggaatttacaatttgctaattcatcgttttcaccacacttgtgttagagttttatgtaccaaagttgtcttttttagataaactagagaagaaatagggtcagaagcatctattgaacatttttttttttttttgagatggagtttcgctcttgttgcccaggctggagtgcaatggcgaggtctctgcttaccgcaacctccgcctcccaggttcaagcgattctcccgcctcagcctccctagtagctgggattacaggcatgcaccaccatgcccccgctaatttttgtatttttagcagagacggggtttctccaagttggtcaagctgctgtcgaactccgaacctcaggtgatacacctaccacggcaccatgcctgaccaatcatttattttatctataagtgaaattcgttcacagagaaactttggtcattcctgatggcaaaacttcatgcggtaaaacattttaaaatattagaatgggttctgttatttatatggctcaaaatccaaaaaaagtacaaaattgtatttagtaacaaatttctcttctaatgctgccatttaactatccaactcccatctcaagacacaaccaatgttatctgcttctggtatatctctccagatattttatgggtttttgttttgttttcttttgacacagggtcttgctctgtcaccagcttgcaatgcagtggcacaatcatggctcacgatggcctcaacctcttggactcaagccatcctcccacctcagcctccagagtagctgggactataagcgcatgccaccatgcgcagctaatttttgtattttttatagagacagggtctaagttgccctggcaggtctcaaactcttgggttcaaattatcctcccccttagacttcccaaatagctgggattaaaggtgcaagccaccatgcctggtggcttatgcttagtttatgcttatacaaacatatctatatatgtatctatacaagtttgtatcatttcctcccttttagtagaaattgtagcatactattaggtaattgttttgtgttaaaaaatgcacatgacatagattgaagatcatctcataaaagtacaaagagctttctcagtctttttaaaagctttcataagatttcattttatgcctatatcatgatttatcagtcctttactaaagaatatttgtatttgaaatatatcttattataaacaatgctgaaataaacaaggttgtagatacataccatttctcctgtgtgttgtaagataaactctttttttttttttgagacagagtcgcggtgcgttgcccaggctggagtgcagtgtcacaatctcggctcactgcaaacttcgctttccaggttcaagggattctcctgcctcagcctcccaagtagctgggattacaggcgcctgctatcatgtctggctaatttttgtatttttagttgagacagggtttcaccatgttggccaggctggtctccaactcctgacctcaggtgatctgcccgcctcggcctccccaagtgctgggattgcaggcatgagtcaccgtgccaccacgcagggccaagataaactcttatacgtatagttgcaatattgttaggtatcctgaccttccccctagggaggtcattataatttacatttacattttcattgtgactgctagtctacacttttaccaacactgtgattatcaaactttctaatctttgacaatctgataagtgaaaaaatggtttctcaatacagttgcaatttgcattttcttatggaggaaaaaaaattgagccaacttttttttttttttttagaataaagagccacaaagttatgtgagttattattttatccttaatattgctcctggagtctgtagcaggtcagcatcagagttcagagatcaggaacatggcaacatgcccagaaccaagatgaaaagaaaagccaataggccccatttcatgaatatttgccttgaggagtccctgaagatgtccctagaagttaacttctgtttttatgtggagacaattagaagctaagtttcagattccccaatgcctgcgtaagtagctctaattacttagcagagcattgtatgtttccccccttcaaaccacctgacacaaaaatgaagtaaaacaggttctatatttatagatataactaagccacacaataggattgtggggtttagaccaaatcatctaggtcacatcagggttataaagattaaatgatatgtttcacacaagaactattctgcttagggatggaggcttgttgctaattagcataattgcctcgtgacttgcggaaactatgtcagcgttttgttttgtttttgtgtgctttttcagagggagactcatctggtggtgttaaatactatatctatttaaaattaatcacatgcctttcctaacaacacggatcatgctagttgcatctatctttacaacagggatttctgaagcaaatgagaggtgtcattatgtaatggaattaaaagagaagattaggagttaggctggctgggtttgcacttgccctcactggctgtgtgaccttgcgctagtcacttgacctttctgagcttcaattcctcatttgaataatggagataatctgacctatatacccctgggttttgtagtcaggaaataatggatcattgtacatatgaaaagtctttacaactatcaatggcaagacatctgtcagttattctaatattcatggtatagaaaactgtgaaatacagagtccttacgtctattctccaaaaaagttcacttctctttaaaagcttttagcaaaccacaatccaggtaattaaaaaggaaatattaaaattttgttctcaggttgtctgacatttcacggttcagcaatgtgacatctctcacaggcagaatagcatcttcggacaagttttctattaaaaatatgctttatagaagaaaatattttacggacctagaagacagctgtcgatgaaatttgctcagtttagcaaacagcaaggactgtgtttgtgtttagagaaaagtaggtcgagcctagtttatctccctggggttctagactcctttccacgttgtatctcaagctctaatagctggaaagctactttctttaacctttaatacacacttgctagtaaacttgctagaagcatgaagataatacagactgcgaatcagcccttctaagagacaatcacgactccttccttgcaagcttccgccctgataattctgcaaccttcccaccttctatacgccccgcggtgcgaggcccctcggcctgcaggtggccagaggcaagcaggagtcagatcccccacctaccgcggcccggcctgggccctagcgctgggtgcggcggagccccgggctcctgcggggacgagcgtggtcccgggacgcgcggtgcagccaggtgcgccggcggcagtggcagccgctgagcgccgcgtcgcacgtggcaacaggtgcagcgctgtcccgggctggcgccggggggcgtggggcgcgtccgcacttagtccgggagcgcgcggagcgtcgggattgggacccgagagcgggagcggagagcgggagcgcccgagcggagtccagcgccccgaggtacggcctcgcacgtcattcaggttccccgagggccgtcccctgggacggcggctggccttggtctcccgcagcgagccgctggagtggagccttcggaaggagccgccccgggttggggcgggaggcccgagttcggctatttacaagtttcccgaactccccgccctgctccaccccctggcggccccggaggcggggaggcggggaggccggggctccgggtcccgcctggtagccgccgcaggcgtggggtggtgccgcgccgcgcgcccccaggtgcagacgccgcccccgagacctccggggcgggttctcggcgaccccgccagtggtgcaaagggcgccagccctccccgcctctgcgtctttgctcccggagcgcttgaaggagctgcgggtaagtgcgcgctggaatctgttcccgctgcccggcggccggggtggggaggggacaggcgagcgcgccgcccagggtgacgggaccggtcctcggggaggggagggggcgttccaggggcctgggggccgaagctgagggctaaagggggcggcagcgccggcggagcggaggcgggtctcacgtgggccagcgcagagcctgcggaagggacggatgcggatctcgtcgctgtcaccttgaaagtgaccgaggggcttgactgtggactccttacgccgcccacccgggcccggcggtcccagccttctcgcagggccccttctcagcagaagcaagcggggccgagaaagcgggtggaatagggttgctgcaggtcccaaagacccctcgtggcgcctcgctactttctgcagcttgtttgcactttttcacgctctagaaaaatctcatcttaattaaggtgaccttattgactactctatagtgcttagtggacttaggtgttcactgaggaacgtttttgttcttttttgaagacgtactcctttctaccaagttgtttgttgatttttgacttggagtaatttgggactaggaaggaagaggttaattcatttagcctgcgtagttacacatactctgttaaatactgtttgtttgaagtagtcagtgttctaagaaaggaaatccagtgtgttttgtttgtttcaatgaaaccaaagtcttaggcaaaacggtgcgtggaagctttcaagttttgccaggtgcaggtgatcgaaagtcaatcatcactaaatcacagcgctggggctggagggtgggagtaggggtgttaccagtgaatttcaggaggaagggaggcaatgcaggagggaggggattaaaaaagagagtcattgcttcctgggaaccagtgacctctttaaggagggtatatacaagataacagtgcatggacaactttaaaaggaattgcataaacggaattgcaattctgtagacagtttgctttttcagggatggttagggcaggaaatgatacacaacttaaaatggtgatgtcctgttagtacagtgctttacagtgtagaaagtgctgttacagattttttttttttcataggcaatatattccattaggaaagctatacaaagaaaagattagaactacatgcttatc

SEQ ID NO: 3833 - DNA, 6000 bp, Homo sapiens
acctgtaatcccagtgctttgggaggccaaggtgggaggatagcttgaggtcaggagtttaagaccagcatgggcaacacagcgagacccctgtctctacaaaagaattatttaattagccaggagtaatggtatgtgccgtcatcccatctactctggggctaaggtgggaagatcacttgagcccagcagctggaggctgcagtgagctgtgatcactgttacctactgcagtccagcttggatgacagaatgagactctgtttctaaaatttaaaaataaataaaaaataataagattagtacaggtgagagcaagccttacacagggaataaacaggttggtagaaagtaatcggggagggatgcaagggtttcaagattaactggagaaagccaccttgcagacatgagactcaagttgagaactagaaaatgagaaaggctgatgtatgtgaagagcccaaggaggagaattccaggcaggggaagcagcagcaagtgcagagtctcctggatgggtcaagacttcgtatgttcacccaccaggaaagagatgagtgtgtctgtccctgggacatggcgggacaaggtgaggagtccgcattgtactctaacacagtgggaagactggaagggttcccattaggaagtgctatgacctggacgcttcagatgtgtctgatgaacagactggggaaagacattgggaggctccttcaaggcccaggtgagaggagatggaggtgagaggagatggatgagaaccataaacagattcatttagcaccgatgcactgatactgtcaatagcctccagcggtgtcataggcttgaaggcaacacatatcgtgcacacatctgtagatcgcctactacatgccaggccttgtattttccttctgtttgtttcggctccctaatgttcctatttaatattaatattttcagtttgtaaatgaagaaacctcagagagattgattttcaaatcaaactcctgccgatgccacagctgatggtctggtctgtacagccctgcaggtacagctgctcggcaatgtgtattgcatggcaaaaaaaggaggagctgagcatattgcgcagagcacgggagggtcttttggcccaaaatgacacccctgcatgtggaccagagtagtattttcgccccataggaactagaggtgttagctaagctagggatggatgacctagggggatgaaaacacattttgtcagtgtcaagtttatatcagcagagccaccctgtgctcctaagtcacacctcgcaggaatgggaggcagaaaggttgcatttagaaggaaaggattagctctggaaagtgagtttggacattgaggctccccagatccatagggatgatggatgttggcaaggacaatggtcacaatataagtaacagataccgataacactgcctagcatttattgagtgcccactatgtactaagtattgagtaaatgttccagagctgttatcttatggtggtatttcttaaatttctcataacgatcctatgaggtaggctgcttcactgtatttcctcgagtatacaaagccatcaattcaataaaagcttttcacatcaaaacatattaaacttacacaacgaagttttgttgtgtcatgcttttcctaacaaaatatagaacatattcataacataacctctttattcttcaggatgataacgcaagtttgaatcgaagcctagatattcagagtcacagagtctccatgcacaactgctaattgtaaaaaatatatatataataaaattaaaattaaaaaacagagtcagaaagtttctggctccctttcagctgtgcccatgcagttctccatgtcccacctgggatttctttagcccctttaggatggatggtataatttagagctcagcgaagaacagaggctccttccacatctcctgttttattaaacttgtggctttccccttcttaattggatatctgtcttttgactaagaaatacttcacagtgcatgacaatcaccaacctttcctagctttgaaaattgtgtgatctaaacttagagatttgcctgaatctgcacatgtgctggcactgacatcccaatttctcctgtctggtgactgacaaggttgttattgtttaagcattgattattagatgctatcctattactttaaaaaaaaaatgtgcccagtccggtggctcacgcctataatcccggcactttgggaggcctaggcaggtggatcacctgaggtcaggagttcgagaccagcctggccaacatgggaaaaccccatctctactaaaaatacaaagattagccagccagtcatggtggtgctcacctgtaatcccagctatgtgggagactgaggtgggagaatcatttgaacccgcgaggtggaggttgcagtgagccaagatcatgccactgcactccagcctgggcaacagagtgagactctatctcaaaaaaaaaaaaaaaaaaagtttaagggtgtcttagaattagtttgtaacactgaaggttaaagatattaaacagtttaccttccatgtcatagctggcaggtgatgtaactagaatgcacaccaagtcggctgggtacttctcaacattaaggctgtaatgactttctccttctttctctcttgaatcttctcaatgaggccttccttccaccattcctccaaaactgctcttgtcaaggttaccaaagatctccacatggccaaatgcattgactaattctcaattgttatcttactttcagcagcacttgacaacttttttttttgagacaggaactcagtctgttgcccaggctggagtgcagtggcgtgatctcagctcactgcaacctccgcctcctgggttcaagctattctcatgcctcagcttcctcagtagctgggactacaggtgcgtgccaccatgcccaatttgcctggctaattttttatatttttagtagagacggggttccaccatgttagccaggctggtttcaaacccttgacctcaagtgatctgcccaccttggcctcccaaagtgctgggattacaggcttgagccattgcgcctggccatttgacaccatttttaggaaacaatttcttgacttggctttcttaggtcttctatatcgacatcaccctgaaaaccttctctgctgctctttttcacttctcctaacctgcctgacctccagatgccgagtgctccatgttaaccatcctcaggcctctcttgtctttctgcatccgctctttggtgaccccatctagtctcatagccacttccacactcccagctctgacaagtgcatctgcagctcccagcagctgcccactcaccctcctgcctactctccatcactccctggatgccaaataggctttgcaaactgaatgtcttcaaccaaactcctctctttggcattgtccctgactcctctctttcgctcactccctacatctgatcctttagcaagtcctgtcagctcaacctcaaaattacattgaaaactgttttttagagacagggtctcactgtgttgcccaggctggtcttgaactcctggcctcaagtgatcctcctgccttggcctcccaaaatgctgggattacagacgtgagccaccaccacatctaaatccacaactaccaccctagactattagcctgtaattggccaccacttctatcccccgtctcctcaataagcttcttccccacccggaagccagagtgaccttccccaacctaaggcagatcaaggtgtcagctgcttaaagccatccaggggctccttgtctcaacccaagcaaagccagagctctttgagctgcacagcctccttgttctctgatgtctgctggctcctggtttctgtttctccttcccagccttgctaattgttctccagccaggctgcttcccatgtgggtctcacacagccaagccccctctgcctcagggactcaggcttttatacttggggtttcttctggtacccctctccccctagattttcatatgacttgcacctcattttcttttcttcttcttcttttttttttttttttttttttttgagtcaggcccaggctggagtgcagtggcacaattgtggctcactgcagccttgatccccggggctcagacgattctcccacctcaccctcccaagtagctgggattacaggtgtgcaccactacgcccggctaatttttgtatttttagtagaaatggggtttctctaagttgcacaggctggtctcgaactcctggactcaagcaatctgcccacctcagcctcccagagtgctgggattacaggtgtgaaccatcatgcctggctgccccctcattttcttgaagccttttaaaatgctaccctaacaaaagaagaccttcctgcataaaacagccacctcccagaattctgttctgtcctctctgctccagtttcccccgcagcactggtacccgcagcactggtacccgcagcactggtaccacttgctatagtatacattggtttgcttctggcctctccacaccactgtaaccctaagttccaggaatgcagggactgtgactgttttagtcacttgctgggtcccgagtgtttagagtagaggcttgcatgaagtgggctcccagtgaatgtttgttgaattatcagacaaaggaagaaggaacggagcacccggtggtggagacagtgctgggctctgacatgtgtttctctactgcccagatctggaagtcggaatcagcactgtgctgtgaccactcccacccacgctgacttctgtcttgtgtcttcttccaggtctacggctctcgcaggctctgtgagggctttgctatgacctcagtcccctcacggagccacgactgccccttgctgccacagcctttccaagaccctgcccggccctgccccatcctcagccccgagtcaccatgggcagcgtcagtagcctcatctccggccacagcttccacagcaagcactgccgggcttcgcagtacaagctgcgcaagtcctcccacctcaagaagctcaaccggtattccgacgggctgctgaggtttggcttctcccaggactccggtcacggcaagtccagctccaaaatgggcaagagcgaagacttcttctacatcaaggtcagccagaaagcccggggctcccatcacccagattacacggcactgtccagcggggatttagggggccaggctggggtggactttgacccgtccacaccccccaagctcatgcccttctccaatcagctagaaatggtaagcgggggtcgctggcaagggtaagtgggttggaaacgcaggagaaagcaaaatgggggtggagagcctgggggttcagggggagtggtgacctgagcattcagactcctcaaaaccagagcggcaggggtgccggcggaagcctgtggccacaccgcagagatcaaacgtttcacaaaggaattagagcatcgctcagtccccctgaagcagaagtcttgggtcaggccataagcaaagagcacaggggatatgtgagctttctggagtcccactgaaatgtagctggattgtcaacgtaggatccaggcgtttgccaagcctcgggaaggagagggagccctgttctcatctggaagcacagatgaagaggatgcaggccgggagttaaccgcttctctccccgggagactcgtgggggtgggtgcggtcttctcatttgctgccctggtgtgcattagctccttgttcaagctgcgcctgggggcatctttgaatacaggctggagttttgtcatccatttaccagagattagggcaaaggaggcccaggcactgagaaatccagccctcacaccagctcaagccctcgtgcgtcccacgagtggacactgaaatcaattttcctattcagtcctctgccccttgccct

SEQ ID NO: 3834 - DNA, 6000 bp, Homo sapiens
atttgagccctcgcattgcattagccaagttagctgtctcactattctctgctcaggagaaggctgcctgcttgtggtcaacactgcccagatcaaaccacattcaggccctgtgtcagttacaaggtttctgaggcaggtaggaggcatgtgcccttaaaccctgaggtcccagctccagtgaagctgggtcaatttcttgtcttgcactttgactcagttttcctttcactgaaagagtagggtggacatatttcctgatataacttgagtgtcttagtagggaggggtcatcgttgaataggaattgtatgtcagcaagttctcccagggcatctaaggctatttgttctctctgtaacttctctggtctccctaacctgaatacaggtgaagacttagaatgaagttatgaatcataatgctagtgatgatgatgattaacaatttcttgaagtcatgcagcactttcgaggaaagtagaaaaactactttcattttatctcatttgtctttataacatgcagagaagacagaggagagatggtcctggccaggcgtggtggctcacgcctgtaatcccagcactttgggaggccgaggtgggcggatcacaaggtcaggagatcgagaccatcctgactaacacagtgaaaccccgtctctactaaaaatacaaaaaattagccgggcgtggtggtgggcgcctgtagtcccagctactcgggaggctgaggcaggagaatggcatgaacccgggaggcggagcttgcagtgagccgagatggcaccactgcactccagtctgggcgacagagcgagactccgtctcaaaaaaaataaaaaataaataaataaatttaaagaaaaaagagatggtccttccaattcagagacaagtctcctgaagcccagagataagagattcaaggtggtcagagacctacaggtaaggaatgaaaattcttgttataaaagttgcacattcaaagcaactccacgggaactgttttctaccctggaaaaagacagggatggtaagacatcttctaaggtcatgggaccattggctctgactgcagaaaaactgctctccctggacctttactggggtcactgggaaatcaggagtggcctcagttgattccttaaagctttgctcagttgtctaggctcatattttttcaccggcttttggagattatccaacctcacttaaatatagtcagcatttcttttctcttaacacaaggccctggattttgagacttgaaataatattaaaaaattatttgatattttgtatttttcataacacctttgactttattaattcttttcattttgtattgttgccaaaagatagatagggaaaatgttattaggcttctttcactgatagcaaactaaacctccaaagggttgtgagaagactgcagattggaagaagtaggaatacacgtggattttctgaatttgagtcaatttatctctctgaaacatcatctcgcctccctcccctcatagcactcattctagtattttttgagcgcttgctttgtaccaataatgtgctgagttctgtggattcaatgttgactaagacagacatgatctttgaacaagaaacttgcagaagagatgaacagacaaacaagaagccagggaattaattaaattgtgataggtgacagtaccttgaggaaggcagagttgtctgtaatccaaacaagctgctggcttaactggtctatgggtctggtccagtgtggccaatcttaggtcctagagatgaagcatgatgctctgtatctcaggtgatgaatacaggaggagggtaggagatttttacaagaaatgttttgtgacccagctttctagactcgactcaggcaagggagagcctgagggatgcagagtttcacataagacacctctcgggaacccagacactaaggaagggcagcgccccttcactagacaaggaagaaaaggagccacactgagaacctaccggtggtgttgggggtagacacacccagccattgcattaccatacccaactgctgaatcagggagctaattatggctttgtgctgctggagaccacattcctgaggctttcatgcacacatacggaaccataatacatacacacatgctgtgctgtccatcactggtctccttctccactctgccttctcatttccagccccactctctatgcattctgtctctaaagtatcccttccacagggtgtttctgttgttccatagggtatcccatttccaccgctcatacacaaaccaacacactgctcataccctttgcctgactcagtcattccaggaaggctgcacatcatacccagctttcacctagaatgtcactgacaaaggtgtcagtgctgaaggagggtccttaaggagtatcttctcatccaaaccatccactttccagatgaggaaactgaggcctcatcagggactccaaaccatccactttccagataggaaactgaggtctcatcagggactccaaaccatccactttccagatgaggaaactgaggcctcattagggacatggcttgtccaagagcatatagtcagcagtagggccagaacaaaaagtgggcttccagagtcctttgtctcttccatggaatctcacctccgacgatgtgaaaatgagtttgaagtctggagcccacctcataccttaatctaccttccaggagtctgctctttccttaaagcgctggaatgtttgatcgatattaactcattcagctaaaattcttgagatactctcaccagcaagcaagaatacatgttctctgtcaataaatgcaacacaaagaagcatggcgctttagaaaaagaagacattattttgccctggacgataagagaaggtgtgagtaagggttccatattttgtctcagattttgagaggtagagttagaagagcaggagaaaagcttttcagactgaggggcaggtttatacaaaggtggggaaaaggaggtgatgttcaggaaaaggctgagtagcctttggggttgacacttagaaattgtcgtattgcttgtaattactgccacgtgtatgtacttaccgcaaggcagtgggtttcatttaatcatcagaacaaacctatacatgagaaattcattcatttaacaaatacatattgagtgcctactatgttgcctggcaagttctaggtgtcggggatacatctatgaataaaacagaccaagtccctcagccaccaataaaagagaacaagttcctgccttcagggaatttacactgggacttgttacctcatttcacaaataaaaaaagaaagaaagaaaaagaaaaactgagaaagagggaggggaaggtaatggctcaaataacaagcagcgaagcctgtctgtgttcttaaaccctcgcggtgccatctttcaggaagcctagattcgaaggtcagagtcttcagggtcaacaaccgaaggcagtgagattcccctacagggttttgagcaggggtgtggcagaaaccatatggcttgttttcctttgagctgtcccccctgccaccacaattctatttaatttttttgtatttatttatttatttatttattttgagacacggtgtcactctgtcacccaggctggagtgcagtggcactatcttggctcactgcaacctctgccttccaggctcaagcaattcccaagcctcagcctcccaagtagctgggattacaggctcctgccaccacacccagctaatttttgtatttttttttttttttttttttagtagagacggggtttcaccatgttggccaggctggtcttcaactcctgacctcaagtgatccaccaacctcggcctcccaaagtgctgagattacaggcatgagccaccgcgtccggcccccatgctatttataatcagatcggctatgtcaatcctaatccattacatctatcccccaccccccaacacacacacacacacacacacacacacacacacacacacacaggcttctttcaagatgaggctaacactccttgggcagagctgccatcttcccgccaagcctggttttagaggattagcctcagtgcaccctcaagcccccaagcctcatgctgcacctagcactccggttaactgaccctttgtcctacaaaaccttgtaagcttgaatcctctcctggctcagttgctagaagttaaaagtgagggtggttgagaaaatgatagtattataaggggactgggtgagactaatagctataaacttgaaacaggcctctgctgtcacctgaaactcagctccctcagagctggaaaagtttgcttttgacatgttttgggagtgggagtcccggtgctctggactctagcctgtaatcctggtgtggttcgcaatgcccctcacttgggtgctagtccagtccttgaacaaaacacacgccctttagtgcgagtcgggagcgggagagacggtattaagaaaaataaactggcgattaagaggaaggggtaatgaagaaaggggaacatacacagaacgggagaaggaatggattttaaacaaaactggagtaagaatttcaggtaatgaaagggaaaaaaggatgcgacaagagcaagacaggaacaatcggagaaagggggccaggcaagaaaggaagactgagggggcagggtcgcccaatggggctgatggaagtgagagcagagagacgggacccgggaccccgcgcaggccgcgggcgcgaaggagccgcgaggtcgcgagcagccccagctgtcagcccggaacaaaggccgccgagcggcacagaccaggctgccggcagctcgctgccaatcagcggcgccggctctggccccgccccgggccggccccgccccgccccgccccgccccgccccgccccggctccgggacccgcgcagaggccggcgcgcctggagctggcgggttggcagcggccgggcggggaggccgaaagtttctctgcccgcctcggccagtgagtgggagccgggagctgcatcccgcgcagtgggaccggcccggcccgctcagcagctctggaaaaagagagacgggaacacaccgggaaacactgggaaaaaaaaaaagtctcaagtgcgcccgaggcgcagggggcaggtaaggtgcggtggccggggatctcctcgcccctggagggtctgctgccctggctgcgggaaaccgctttcccctcgccgggccggaccgtccgtgcgtccgcgcgtccgtcggtctttgtctgtctgtgtccgtggctgtcgaggtgtctttgtctccgcgtggagctgtcagggtctcccctctgcagggtgggcgccgcttctccggcccggcccagaggaggtgactgtgcgtctgtcctcctgtctttgtcttcgtgtctcctgcagacggggttcgtctattcccagcaccgatgctgatcctggcggggacgtcagtgttaggtgacactggtgtcggaggtgaagaagtgggaggtggggacgcgaggccgcaggagcaggggccgcaggaagagggtccggcggtcggtccgggccgctgaacttcgccgcctggaactttgcagatgagctgtgtccacaccggtggggaggacaccggtgcgttgcagccagagatttgaaaggtttccctcaaggaataagtcacacgggcggaggtggttagagaggaaggtggtaaatcgaagtgtctaagtggctccctggggctgcagcttcctggggtcggtcctggatgtgcaattcaggaatttagtcaaagcaccatgcacacacagacagccccacactaccttcacttcttccaccgccaccctaggcagccagacctcacccctccaccctgccacaggctttgctctggctggaggggcttcagaggtcgcagcttggcagcaacaggcatccccgag

SEQ ID NO: 3835 - DNA, 6000 bp, Homo sapiens
aaccaagttctctgctaaggcataacacacgtgatatttgcttcagttctcagtaagatcctcatttccatctgagaccttctcagcctggattcctcgtccatatcactatcagaattttagttacaaccattttaaccagtctctaagaagttccaaagtttccctcatcttcctctcttcttctgagccctccaaagtcttccaccctctgcctgttccccagttccaaagctctttccatatttttaggtatctttttagcaatgtcccactccttggtaccaattttctgtataaggccatttttgcattgctataaaaaaaaaataccagagactgggtaattttgaagaaaagaagctggctcacagttctgcaagctgtacaggtaacacagtgctggcatttgcttacgggaggtctcaggaagcttttagtagtggtggaaggcaaagagggagtaggcactcacatggcaaaaacaggagcaagaaagagacggggaaggtgctacacacttttaaacaactagatctcacaagaactcactcacaattgcaaagatagcaccaaggggatggtcctaagccattcatgagaaatctgcccccatgatccattcacctcccactaggccccacatccaaatttggggattagaattcaacgtgagatttggtggggacatgtatccaaactttatcactttccaaagctccatctccaaataccaacacattggtggtcaggggttcaactcatgaattttggacctacagtagtcagtctatagtaatacattacaaccaaactcctagacaaaagaatgtgaggactcttggtaggagagtgaacagaccagcaggaaagtaatggaaggtaagcacagagatactcaggtcatccacattgtgtatagccctaaatgccagactactgagtataacactgttatttattgaacttgatcaaacttgttttccagaattcatttggtgcaatattatacaatgttataaagagaaaagcaacaaagagaaattgaatgtgagatgacgtgttcagtgtgaaatgtgccacagattaccttaacgtttgacttactttataagaaatatgattcaaaatgggcaaacgagagttaaatgaacatgataataaaatattagaaatcaactaagaagacaagaaacaacctataggtcctcttaagccaacatctagaaatatgtaacagctacagtatctggaaagaacaacttgtttgagggatacaaggaaggggcaataaattcaacagctattattcaaagatggttgtaagaaatactaaatatctgcatgaagtgcaaggcagaaaacagtcccggctccaatttgctggcagctttttttaacagccgtattctcaaaaatgttggtttgaggcattattttaagaagcatgatgattgtaaacttatgtttttattttttattttacctaagataggaggcagatcaattttagaataagatacttaagttgtcagataattagagaagggcattggttttgtgttagaaggcatggagactaaatacttacaaaaatgtcccttttcaaaaagaaaaaaagggttgttttggggaaatagaaaaactaagcattccaaattacttaacagtagtctcccccttatctgaggtttctctttccacggttcaagttacttgcagtcatccctggccaaaaatattaaatggaaagtcccaggaaagaaaaacatttcgtaagttttaaagtgtgcactattctgagtaatgtaatgaagtctctcaccatttccatcctgataggaatgtgaatcatctttgtccactgcatctatgctgttgaccctactcacccatcggtcactcagcggctatgtcagttatcaactggaaaaaaaacatggtacaattgtccctcagcatccttgggggattggatccaggactcttgataatatgctcaaggaccttatataaaatgtcatagtatttgcatacaacctacacacatcctcccatatactttaaatcctctctagattactaaccaaagccctgtaaattctatgtaaatagttgttacactgtatttttgtttttttaattgtatttttatttaaaaatatttttgatctgtggttgattgtctaccagtgtggaacccaccaatacagaaggaagactgtatgtgtatacagggttcattaccatccaaggtttcaggcattcactgaggatcttggaatgtatccctacaaataagaggggctgctgtacttgcatttttctgttcttttacttcaaacttcgtaaccttagtcaggaaataatctttggtcttagagtttcctaaatgcaaagtgcaagtagtccttttctttttagttttaaaactgtttaaacagaattctttttatagcagaattctttttcttgagcaagagtagcttaaggaacaatgatgaaccagttgtcagaaaagagtgacctatgtcctttaagactttcttctatttagcaagcaagcaattttactgttcagaagcccccagtcttaaaaagcagcacaggtatctatctaccttttatttttctaatcaagcacttatatacttattctatatgttttaagtattattgtagtcttgcatttcttttaaatttgatcagttccgtatattttccaaattttttccattttattttcatatataggtacatattatttgcccagtaatatttttatatgtagaccattaacaaactacagtgtggagaagcatttttactctttgtgctaccatcctcagaaaagctgtaattttcatcttcgagtatatgattcttgacatattattctaggtaaattaaaataaatacaagtatatacttttagtactaatcattttaatcactctgttgtctcaactccactttcaacttagaaatgacattgtctctatgtcgtatttgaaagattggtggactctccattaacaaatcataagacaaatgttcactgctacataagacagtctttatgagtcttaatacctttttgttggatcgattttttccacatttttttctttccttttcttccaaacttccctttctccctctcttcatcccttcccccttccttattttttgagataggtctccttttgtcgcccaggatggagtacaatggtgtgatcatagctcacagcagtcttgcagcctcaaccttaatgtaaattaagaatgatacagtccttcttgagtctcttgaacccggaaggtggtggtggcagtgagcagagatggcgccattgcactccagcctaggcaacaagagcgaaactcccatctcaagaatgatatgctcctttttttttttttttttttttttgaaaaggagccttgctctgtcgcccaggctggagtgcaatgacgcaatctcagctcactgcaaactctgcctcccgggttcaagtgattctcctgcctcagcctcccgagtagctgagactacaggcccgtgccaccacgcccggctaatttttgtatttttagtagagacggggtttcattgtgttagccaggatggtcttgatctcctgaccttgtgatcctcccgcctcggcctcccaaagtgctaggattacaggcgtgagccaccacgcccggcctggaatgtggtccttcttaaaactaaatttatattttttgaaattccaaaattatatctttcatgtgataaaatgagataattgagaacacatttggtgttgtggtctcttaagatcttgcctaacaaaataaaagtacaaaaaaattgagcaaatattttccccttatttgtacttgtcaatgaagaccccatgtatgtacttatatgtttttcttgttcgttacttgctccagtggtttggaaattttggttatcctgagaattctctgggaccctgttagacatgtagattcttgctagggcatacttgcttaagagattctggcgtcagtacctaatccttaaattactttgcaatcatccagttactatgtaggttgagaccctacaagaaggaatgattcattcaatgagatgtacatccttgatcccagaaactttggaactaagtattcagtttcttcaataaacagagcacttcttgtttcatagcttttgggggttggcctgaacaaatcaactaagtatgacctagtttctatagcgttctgaacaatttacagagtgaattcctggctgttcacaaattgggaattgactgcattctttggagagccaggtgtttccaccgggaaaccccatgacaggtactcagcccaattctgtttaatgttttattaaacataggggtgggttaaaccactgggttttaaatgaagcacttagagcttttcaacttgccccatagctttgtctcagaaccgatcattctattatcattagttttgagaatgccgtgtaaagagcaaagtaaccactggtggttgcactccggagcgggcgaggacggctagttcctgcagtgcccaggcctgcacggaagcgccctggcacaactcagctgaggatacacgctttttcccgcgcagccggagggctgaacagcaaagcactccccgggggaactgtgtgtcagcgcagcctggagagagcaggcccagggggcagctccaccacaggagacaggacacgcctcagtctgggcaaattcccggcctcctttggctctaagccagcagccgccgcccgcgacctcctctcctcctccgtcgtcaccccggccgccctgccagccccgaacttgcccgcgcctggccgcgcggcccctcagcccacggggctggcggcgcggttgggatgggaccgatgtggcgcatgcgtggtggcgccactaggcgcgggagttgctgcggcggggacggtgctgcggacggccgagggccaggccgctccggccgggctcgtggtgggggcagccccagcggcggcggcggcggcgtgggctggcgaggccgcgcggacggcgcccgacagcagctggaggagcggtttgccgacctggcggcgagccacttggaggccatccgtgcgcgggacgagtgggaccggcagaacgcgcggctgcgtcaggagaacgcccggctgcggctcgagaaccggcggctgaagcgcgagaaccgcagcctcttccgtcaggctttgcggctccccggcgaaggcggcaacgggacgcccgcggaggcacgccgggtccctgaagaggccagcacgaaccggagggctagagacagcggccgagaggacgagccgggcagccccagggccctgagggcccgacttgagaagctggaagccatgtaccgccgggccctgctgcagctgcacctcgagcagcggggaccacgtccgagcggggacaaggaggagcagcctctacaggaacccgactccggcctccgctcccgggactcggagccctctgggccctggctgtagccgaggccgcagccggtgagaggcggagcctcgagcgggcccctcctcctccgttcccagctacccccgacctcgcgcacgccctggcccgctccctgcccgcggataccttggactacggtgccttcccgcccccaccagtggacacttccgggtggcgcttggccatccgcttggtggaggtcgagtgggtgcaagggccctcaggacctcccacatgtacagttcccctgcctcttgccccggctagtttccctggagagaggcctagccaacaacgaagggacggattttaaaacagcgagaactgggtgccaagaaacacttcatattccctgaacttttctggatgttgtgcgaacctgttgtatttttttttttcctgtattttggttctgagggatgagtaatgtgtttttagttggttgagtttatccattcttcaatcc

SEQ ID NO: 3836 - DNA, 6000 bp, Homo sapiens
ctaacaccatatggaaaccaccaaggcttacagcttgcacctgttggagtggcagcctgagctgcacctggggccctttgagtcaaggctggagctgcagcagccacaatatgcagagtagtgtcttgaggttgcacagggcagtggggccgttctttgtaggaggaaggaaaccattctttcctcctaggcttctgggcccatgatgggaggggctgctgggaaggtctctgaaatgctttctagaccttttccccattttcttgaatattagcccttgttttcttttcagttatgcatgtttttccagcaagtggttgcttcacatcccagctgaattcatctcctgaaaaagctttttctttctctgccatatggccaggccgcaaatcttccaaactgtgcttccattttaatatatattccaacttactcctttactttacttgctcctgcatcctatactttacttgttcctgcatctgagtataggtcattagaagcagtcaggccacatcttgaatgctttgctccttagaaatttcttccaccagatacactaaatcttcattctcatattcaaacttcctcagataccttgggcaagggcataatgcaaccaagttctctgctaaggcataacacacgtgatatttgcttcagttctcagtaagatcctcatttccatctgagaccttctcagcctggattcctcgtccatatcactatcagaattttagttacaaccattttaaccagtctctaagaagttccaaagtttccctcatcttcctctcttcttctgagccctccaaagtcttccaccctctgcctgttccccagttccaaagctctttccatatttttaggtatctttttagcaatgtcccactccttggtaccaattttctgtataaggccatttttgcattgctataaaaaaaaaataccagagactgggtaattttgaagaaaagaagctggctcacagttctgcaagctgtacaggtaacacagtgctggcatttgcttacgggaggtctcaggaagcttttagtagtggtggaaggcaaagagggagtaggcactcacatggcaaaaacaggagcaagaaagagacggggaaggtgctacacacttttaaacaactagatctcacaagaactcactcacaattgcaaagatagcaccaaggggatggtcctaagccattcatgagaaatctgcccccatgatccattcacctcccactaggccccacatccaaatttggggattagaattcaacgtgagatttggtggggacatgtatccaaactttatcactttccaaagctccatctccaaataccaacacattggtggtcaggggttcaactcatgaattttggacctacagtagtcagtctatagtaatacattacaaccaaactcctagacaaaagaatgtgaggactcttggtaggagagtgaacagaccagcaggaaagtaatggaaggtaagcacagagatactcaggtcatccacattgtgtatagccctaaatgccagactactgagtataacactgttatttattgaacttgatcaaacttgttttccagaattcatttggtgcaatattatacaatgttataaagagaaaagcaacaaagagaaattgaatgtgagatgacgtgttcagtgtgaaatgtgccacagattaccttaacgtttgacttactttataagaaatatgattcaaaatgggcaaacgagagttaaatgaacatgataataaaatattagaaatcaactaagaagacaagaaacaacctataggtcctcttaagccaacatctagaaatatgtaacagctacagtatctggaaagaacaacttgtttgagggatacaaggaaggggcaataaattcaacagctattattcaaagatggttgtaagaaatactaaatatctgcatgaagtgcaaggcagaaaacagtcccggctccaatttgctggcagctttttttaacagccgtattctcaaaaatgttggtttgaggcattattttaagaagcatgatgattgtaaacttatgtttttattttttattttacctaagataggaggcagatcaattttagaataagatacttaagttgtcagataattagagaagggcattggttttgtgttagaaggcatggagactaaatacttacaaaaatgtcccttttcaaaaagaaaaaaagggttgttttggggaaatagaaaaactaagcattccaaattacttaacagtagtctcccccttatctgaggtttctctttccacggttcaagttacttgcagtcatccctggccaaaaatattaaatggaaagtcccaggaaagaaaaacatttcgtaagttttaaagtgtgcactattctgagtaatgtaatgaagtctctcaccatttccatcctgataggaatgtgaatcatctttgtccactgcatctatgctgttgaccctactcacccatcggtcactcagcggctatgtcagttatcaactggaaaaaaaacatggtacaattgtccctcagcatccttgggggattggatccaggactcttgataatatgctcaaggaccttatataaaatgtcatagtatttgcatacaacctacacacatcctcccatatactttaaatcctctctagattactaaccaaagccctgtaaattctatgtaaatagttgttacactgtatttttgtttttttaattgtatttttatttaaaaatatttttgatctgtggttgattgtctaccagtgtggaacccaccaatacagaaggaagactgtatgtgtatacagggttcattaccatccaaggtttcaggcattcactgaggatcttggaatgtatccctacaaataagaggggctgctgtacttgcatttttctgttcttttacttcaaacttcgtaaccttagtcaggaaataatctttggtcttagagtttcctaaatgcaaagtgcaagtagtccttttctttttagttttaaaactgtttaaacagaattctttttatagcagaattctttttcttgagcaagagtagcttaaggaacaatgatgaaccagttgtcagaaaagagtgacctatgtcctttaagactttcttctatttagcaagcaagcaattttactgttcagaagcccccagtcttaaaaagcagcacaggtatctatctaccttttatttttctaatcaagcacttatatacttattctatatgttttaagtattattgtagtcttgcatttcttttaaatttgatcagttccgtatattttccaaattttttccattttattttcatatataggtacatattatttgcccagtaatatttttatatgtagaccattaacaaactacagtgtggagaagcatttttactctttgtgctaccatcctcagaaaagctgtaattttcatcttcgagtatatgattcttgacatattattctaggtaaattaaaataaatacaagtatatacttttagtactaatcattttaatcactctgttgtctcaactccactttcaacttagaaatgacattgtctctatgtcgtatttgaaagattggtggactctccattaacaaatcataagacaaatgttcactgctacataagacagtctttatgagtcttaatacctttttgttggatcgattttttccacatttttttctttccttttcttccaaacttccctttctccctctcttcatcccttcccccttccttattttttgagataggtctccttttgtcgcccaggatggagtacaatggtgtgatcatagctcacagcagtcttgcagcctcaaccttaatgtaaattaagaatgatacagtccttcttgagtctcttgaacccggaaggtggtggtggcagtgagcagagatggcgccattgcactccagcctaggcaacaagagcgaaactcccatctcaagaatgatatgctcctttttttttttttttttttttttgaaaaggagccttgctctgtcgcccaggctggagtgcaatgacgcaatctcagctcactgcaaactctgcctcccgggttcaagtgattctcctgcctcagcctcccgagtagctgagactacaggcccgtgccaccacgcccggctaatttttgtatttttagtagagacggggtttcattgtgttagccaggatggtcttgatctcctgaccttgtgatcctcccgcctcggcctcccaaagtgctaggattacaggcgtgagccaccacgcccggcctggaatgtggtccttcttaaaactaaatttatattttttgaaattccaaaattatatctttcatgtgataaaatgagataattgagaacacatttggtgttgtggtctcttaagatcttgcctaacaaaataaaagtacaaaaaaattgagcaaatattttccccttatttgtacttgtcaatgaagaccccatgtatgtacttatatgtttttcttgttcgttacttgctccagtggtttggaaattttggttatcctgagaattctctgggaccctgttagacatgtagattcttgctagggcatacttgcttaagagattctggcgtcagtacctaatccttaaattactttgcaatcatccagttactatgtaggttgagaccctacaagaaggaatgattcattcaatgagatgtacatccttgatcccagaaactttggaactaagtattcagtttcttcaataaacagagcacttcttgtttcatagcttttgggggttggcctgaacaaatcaactaagtatgacctagtttctatagcgttctgaacaatttacagagtgaattcctggctgttcacaaattgggaattgactgcattctttggagagccaggtgtttccaccgggaaaccccatgacaggtactcagcccaattctgtttaatgttttattaaacataggggtgggttaaaccactgggttttaaatgaagcacttagagcttttcaacttgccccatagctttgtctcagaaccgatcattctattatcattagttttgagaatgccgtgtaaagagcaaagtaaccactggtggttgcactccggagcgggcgaggacggctagttcctgcagtgcccaggcctgcacggaagcgccctggcacaactcagctgaggatacacgctttttcccgcgcagccggagggctgaacagcaaagcactccccgggggaactgtgtgtcagcgcagcctggagagagcaggcccagggggcagctccaccacaggagacaggacacgcctcagtctgggcaaattcccggcctcctttggctctaagccagcagccgccgcccgcgacctcctctcctcctccgtcgtcaccccggccgccctgccagccccgaacttgcccgcgcctggccgcgcggcccctcagcccacggggctggcggcgcggttgggatgggaccgatgtggcgcatgcgtggtggcgccactaggcgcgggagttgctgcggcggggacggtgctgcggacggccgagggccaggccgctccggccgggctcgtggtgggggcagccccagcggcggcggcggcggcgtgggctggcgaggccgcgcggacggcgcccgacagcagctggaggagcggtttgccgacctggcggcgagccacttggaggccatccgtgcgcgggacgagtgggaccggcagaacgcgcggctgcgtcaggagaacgcccggctgcggctcgagaaccggcggctgaagcgcgagaaccgcagcctcttccgtcaggctttgcggctccccggcgaaggcggcaacgggacgcccgcggaggcacgccgggtccctgaagaggccagcacgaaccggagggctagagacagcggccgagaggacgagccgggcagccccagggccctg

SEQ ID NO: 3837 - DNA, 6000 bp, Homo sapiens
tgcaagctctgcctcccgggttcatgccattctcctgcctcagcctcccaaccaactgggactacaggcgtccaccaccatgcctggctaattatttttttttttagtagagatgaggtttcaccgtgttagccaggatggtcttgatctcctgacctcgtggtctgcccgcctcagcctcccagagtcctgggagtacaggcgtgagccactgcttccagccaggggcagcttatatattttttattttttattttttgagacagagtcttgctctgtcgcccaggctggagtgcagtggcatgatctcggctcactgcaagctccgacttgcgggttcatgccattctcctgcctcagcatcctgagtagctggggctacaagcgcctgccaccatgcccagctaattttttgtatttttagtagagatgaggtttcaccgtgttagccaggatggtcttgatctcctgaccttgtgatccacccacccctgcctcccaaagtgctgggattacaggcatgagccaccgcaccgagccaatatatttttaaataataatgcaatctaccactttattcctgggttcctaaacttgagcggagacctaagtgtccctaataacttagcctgaggagtggtgagaggtcagaaataccatgctcatggctttcagtgctatctcttcttcaattcaaattctcctccccaggtcaggaaaccctatctaacctccagggagggtggtctggttcttcatctgttctcttctaattgactgtttatggacaaaacattcatgtttcacttctttctgcacttagccctttgaagctccagaaaacccatcttttgcaaaatcacaaaccttggtgtttaagattagtttttctgctatgaattttaaaaaatctatttacaagctgagaattgatttcttttattctttctcttttcttactttttttttttttttgagatagggtcttgctctgtcacccaggctgcagtgcagtggtacaatcatggctcactgaagcctctacctcctgagctcaagcaatcctcccacctcagcctcctgagtagctgggaccacaggtgcacatcaccatgcctggctaacttttgtattttttttgtagagacggggttttgtcttcttgcccaggctggtcttgaactcctgggctcaagtgatctgcccaccttggcctcccaaaatgctgaggttataggcatgccaggtccgctttgttttttcttttaaaaatttgttgtttttttttggtggttgttttgttgtttttgtgtccacccttgataaatgctctcagaaaaaatagattctcttgcctcagtgagctgagtagtcatgagggcaataaggaatggtattaaaagaaaacctcaattattgtctccagatagaatttcctcaaaactggaaggtaggtaaagtagatgtgaaagtaaagcctgcttggatgggagctttagggtgttttgtcttgagtgactgctctaaagcatgcttactgtagtagtggtggattatcactttccatcccataatctccaatgctctttagaaaggatttgtaaaagatttacaatgctagcttcctattttctgcttgaaacttccccttgagaattacaatatttgcctacagtatcacactagccaagctcacacgtatgctaaagtaatactcaagtgaatgtacatgaaattacaatgaaccagaaaccgagtaaaacagggagcttaccttagattctgttttttcaacatgttggtttttatttttgatttttttatttatggactatttccatgactttcaattgaagtcactcatatactactgagagatactccacagggccacctaccattcttgtactctctttgccagtagtttctatggagttaactgtttgctcagtcttttctcagaactgttatttcaggtaccactttcatctctcacattacagctcccattccactttctcacactatccacctgctgtaggcatcctcattgctaattagtatagatgagcaaaattcagcagagattcagttcagatacttcccaaagttaagaacaacacatctgtgaattcctgcccatatgattgaagccccaaggtgagctggggacagaggaacatggcctctttccataaatccagagaggaggaagccttgcctgagtcccacattgcttctcactgtggaaggaggcaggcagttttgtgttttttaaacttactttgttttttgagacagagtctcactctgtcacccaggctggagagcagtggtgtgatctcagctcactgcaacctctgtcttctgggttcaagcgattctctggcctcagccttctaagtagttgggattacaggtgcacaccaccatgcctggctaattttttgtattttttgtagagatgggattttaccatgttggccaggctagtcttgaactcctggccttaaagtggtccaccaaccttggcctcccaaatatctgggattacaggcgtgagccaccacatccacccccaattgttctttcagccatcacaatttcattctatcaagcactgtggaatgccccttttacctccttatagaaacaacgttataactctttgtgtttccaggaacacaaaacacaacacttgtatacatgaagctgactagcaaatgtttgttgaaagttttgaatgactttccagccagtgatctctaagacaaaatacaccctcagccttcatccttgccattttgatgttaattttaatttggctttgctaataaaaacatttcggtagagaagtgagacaccacaggccaaacaaggatttgtaggaggttctggtggataatccctgggctaccttctaaaaactaggaattgggggccacatctttctttttagttgtcgtttgcctcgtcttttcttttcctgcttctccccataggtgtttgtttgtttgtttgtttatcactgcttttcctctctgaatctgtttctctgtaacaccttctggccttcccctcacatctgacccatctagctgttaaaaaccatctatctggaaagtctctttccttttgcaacacagctccccatgccctcttcactttcctccttttttaaggattcagattcaactctgtgggatccctgttctgctttgcaattacctcgagttcaggaagttcccaaggtacaacataatgcaacataatgtgtttcccaagtgcctttgttagtaagttgtttggattcagaacagattttcccagcaaaagaaggctcttagtggtgtttacagtctagcctgcaacatcttactcaacatactacacctttgttgcgtcaagtattcagtaaatgctggtggttgagtatttctgtgtttaccaggttgcccttcagcaccgtgatgtttgagctgagctgttctctcccttgacagagagagctctttccgacccccgcccctccgagacggagtcttgctctgtcgcccaggctggagtgcagtggcgcgatctcggctcactgcaacctccgcctcccaggttcaaacgattctcctgcctcagcctccagagtagctgggattacaggtgcgtgccaccacgcccggctttttgtatttttagtagagacgggttttcaccatgtttgccaccgagcttttttatcatatgcaaagcttctgcttgtaaaagtaaacacatgatctttctttagccctagcttcgcaagttgtacttctctctacacagttcaactgcaagacaccgcaataattttctgaacacttagatgaaacaataattttcacatgctgatgaaaacttagctgtagccccggggaggtttgaggcacattaggctattatggtctataggataagacccacggagtaagggacgtaaccttattaaaacatcctctgcagagaaaacagaatctctttgatggtaggggacagattatctaacaggttgtttgcaaggatgaggttcctagctggcacacagaagggcgcagtattaatggtgaatgcaagatgaatgaatgaacggatggatggatggcaaagggtcacaggaagacatctgggcacacaactctcattgcttcctaagggcctgaagtctgagtgggaaggacttcacctcacagtatttcctttttgtaaggtcaccaggaaagcacaactttgaacatttctgtgacttcgttattgctttgcagaattcagagagaacaatgccttcatgacatttgttttactttgcatctttcttctttactaaaggtgggtcagtggaggttttatatttcagctttgaaaaacaaagtatccaggactatttgccccaggaggccaagaaacctcttacaagaaccttaaatattgttggttgcctctgggggctgtccgcaccctcgggtagctttggggttgaggtttccagcgttaggtcgggcttggagtagagcctgcctcccacgggggtggtgggtgtgggctgcacttcccgcagccacttcaaacaaatctctgaggacagaggggcagagggactgcgttctaatacggagctccgaggtatggctccgtgaggcttgtgggtactagcggtcctttagtgggcgcttttccctctcggggccggccgaccacccacctggggacgatcccaggcaggaacgcgtctgcaagagcgctgccctcccgcggctcgcacgggcccctttgagcgcagctcgcggccttgcaggttggggacgctctccagtgggaacgtcgaacgcacccggcggggcggggcggggcagggaggggccgctgtccctaggtccctccctcgcaccgccaaactttcctttggctctggacgcgtcgcaggggtcgctggagaggaggcgctccgcccgcccgccgcgtcctccgctgcttctccgcgcccggctggagcccggcgcccggtcgccccgtcgcgctcgaccccgagggcatgcggcagccgcaggggcccccgctcccgggctcggcggcgcgggtgaacgtgagcggtgagtgagggtccgggcgcagggagggtaccccgagccgcagtcaccagggcgtgcgtcgtggggaggccggggcgcagcggcgcctgcagggctctagcctgcggcttttcggggttgcctggcgtgcaagcctgggctccagacccactccaaaccccgggacaagactctcccggcgggtgtatggcacaacttgctcttttcccacctttttccccgctaggagcaaaaagcaatctagatgcaaaatcggcgttgcgtccgctgctgagggctggcgggctgggcgcagaggccaggagagcgccgcacgggttgcgtctgcctttgcacacgtggttctttccaaactcagtctcattgccatcgatggtgattaggaaactggggttctctcgtgaagcctagggatataacatttttcagcctccagttacatctggtactgtgctgtgtccgctggggaacagcttgaaccatgtgcaggcttctagagattcgggaactagtaactagcaacactgtcggggttgtttgttcagggtatgccccctcaccaccacgagacaaaagtgcttttgttctgtagcagagttactttattgctttccctcaacaagttgcagctacacaaaattgcttagaaattccgcacgcatgtaatttgaggagtgactgtgaatattggaaacaatttagtcttattaaggtaatcattaaaatggccctgaaaagcatttgtaggttagtttttatttatttatttatttatttatttatttatttatttatttatttttgagacacagtctcgcactatcatccgggctggagtgcagtggcgcgatctcggctcactgcaacctccgcctcccag

SEQ ID NO: 3838 - DNA, 6000 bp, Homo sapiens
ctttccttgtacgattccattcgctcctcctgccaactctatgaggtgaatatcatgaccctgcttttgagttgaggagactagcgtcaggcgaggttacaaaatttgccagggtcacaaagacctggtacacagtagagttaaagtgtgaacccaggcagaatacgcccatgtgcttcgctgctttgctgcctctagtgaatgatggccttgtttggggggaaaagaaaagaaggtgttggagacagctcaggccctacacattgtttctcttgctttaggtccactgaaacccttactgatgctctcccagctcagagcctgactccttttggtctctgagctgatggtctcccagctcagagccttttgagtcctttcaggtactggacttaggtctgcccaggaatccaggcttgctggagaccttgatctacttggggctgaacctggtagctggaagggcagcctgatgatgcacaggctacccacaaggctcccttccagggttcagagctcacagggttataggggtccgggctcctggaaccatgcatcactgggccttacccaggtggccagaatgctgtcagactgcccagactggactgaggatggggggcagggaagcacttggactggggaaaggagttgagcagagcaggacagagaaagaagtgtctgggcccccagcttccctgcttgatatcagcactgtggagcagataagagcaggcttggatccaggtccaccactagccaactgggtggccttgggcaagtagcattctcccaggcctgtttcctcatccacagacgaacatattggcagaacagcctcatggacctacagcacataaaaggggctttgcatctggccataactgtccactgtctttacttctactgttttatccttcagctctcaaatagccacagcctagtttcatgcagtgaattctctcccacaagcacacctccagatccactttccagaacctgaatacctctggagctgtgtgacctgggacacgaaatttctcctctctgggcctcagttttcctatccataaaatagggattgtaggggcagaaagggtaatctctttcctctctgtcataagggtcatggctaacaagcctgtaacaaagacaagttaacaagaaagaagcatgacaaatttatttgattatagttttatgtggcacagagccttcagaatgaggacccaaagacatgggggaaactgtccatttttatgcttagcattagaacatgccctttttgtccagtcatatttctccacagctgtccatatgccattagaatcgcttaaaatcgcttgaacctgggaggcagaggttgcagtgagccgagatagtgccactgcactccagcctgggcaagaaagcgagactctgtctccaaaaaaagaaaaaaggagactcaaaagcagtctctgtcctgccctcctgtctctgacccctaaaccatagaaactagaacctcctagaactaggtctgcaacctccgcctcccaggttcaagcgattccaagctattctaattgcgtatggacagctgtggagaaatatgactgctaataagagacagagtgaggaagcccagcaagacctgtctgtccagattcttcttggcctttctgtgcagcgttcctccctcctgggtatggggtaggacccttctggaataagggtcttaatttctttctttttttcttttttttttttttgagggagtctagctctgtcgcccaggctggagtacagtggtacaatcttggctcacagcaacttccacctcctggattcaagcaattctcctgcctcagcctcccgagtagctgggattacaggcacctgccaccatgcccagctaattttttatttttagtagagacagggtttcaccatgttggccaggctgatctcgaactcccaaccttgtgatccacctgcctcagcctcccaaagtgctgggattactagcgtgagccaccatacccagccaagggtcttaatttctttatggccacatgttacacaaaaagactggggtggggtggggtgggggtgggaggcaggaaagttatatttatatatatatatatatttttttttttttttttttgagatggagtctcactctgtcaccaggctgcagtgtagtggtgcaatcttggctcactgcaacctctgcctcctgggttccagtgattatcctgcctcagcctcctgagtagctgggactacaggtgcacaccaccacacccagctaatttttgtatttttagtagagacggagttttaccatgttggccaggatggtctccatctctcgacctcgtcatccgttcgcctcggcctcctaaagtgctgggattacaggcgtgagccaccgcgcccggcctggagcaatatttttaggtgttatgcctggttttgggggaaaagggttctagtttctatgacctgcattgggaaagaaatattctagtttctatggtttaggggtcagagacaggagggcaggacagagactgcttttgagtctgcttttttcttttttttttggagacagagtctcgctttcttgcccaggctggagtgcagtggcgctatctcggctcactgcaacctccgcctcccaggttcaagcgattctcctgcttcagcctcctgagtagctgggattacaggtgtgcgtcaccatgcccacctaatttttgtatttttagtagaaatggggtttcaccatgttggccaggctggtctcgaactcccggcctcaagtgatccacccgcttcagcctcccaaagtgttgggattacaggaatttgctttgtcttttcttctttttccttttttttttttcattctttccttctttccatccatccatcaagtgcagtagtgaggaggggtaaagagtcgaacaaggagtttgatctgtaactgactgaacaatcaaactgagataattcactacttttggaccagactgaggctgcttcttagaccttcactttggggactttggtgtattattttctgagcccccacaggatcatcacactcacctcaaaggaatgaatgagggttaaatgagaacagaaaaatctcttgtcacctctctgagcctcagcttcccaatttgtaaaatgggttaattatagtatgtgcttcgtagagttgtctggatcaaaggaggtagtcactgcaaccatttagtgcaccgcttggcacatggcaagagcttaacaaactgtagctttctaaaggagcccagcatggagcaggtgttccaaaaatgaaggctgagtccaagtcaccttccaagtttttaatttttattcacaataacagaatatattctattatgcagaatatcttctccataatgtccttacttgttttcattgcctgttctctatcagctgtaaatgaaggttttctatgctactcttcccattcatgcaggtaacagatttaactaattcttatgggtttgtctgaacctgttgaaggagagaccggtttcatgctattacattacgattatataactaaccttccttccttcctttccttgcttccttctttctctctcccttccctcccctcctttcttttccctttccctttcctttcctttccacagggtctcactctgtcacccaggctggaatgcagtgctacaatcatagctctctgtaacctggaactcctgggctcaaccagttctcccaccttggccttccaaagtgctggcattacaggcatgggccaccttgcctggcctgactatatgaatttcaaatataatagagaaatacatcttcttctaggactttgcagtggacaaagacccttcatgctcattgctttttttaattcttctaacagtgctggcagattggtggtattatttctattttacagataataaacctgtggcccagagagaacaaggagactgtcccaagattccatggtgagttacgggagctctggggctgggatcttcgcatcgtgcttaggcacaaccgcctctcccagtggtctcagaactccctaagggcagagcggcgtcttctcctaggctgtctcctcttggcctcccatccggcagactgtgtgctcccaagagccgcgggagtgggggtctcccaactctgcctgttccaggtctttgcatactagaggaacgggcaatctgtggcattgttgatccagtatttaccgagggcctgctatgtgaagggattcctcacccttcaggtgctcccagggctgggaatgtgtaacaccagagggtagagagtgggtgtttgaatacaggtccaggctgggtgcactcggctgggcagagccggggaagctgcccgaggggcgggtttcgggtgggaacttgaagaagccaggggtgcccaaagagggggtggagctgccccagcagagaaatgaaggtgcgaacgctggggcgtatctcgagcagagtggcctcgggagcagggggcggggtgggctgagtaagcgtaggggccggccgagctctagctgggaaacgcagccactctcctgcggccgccctccccgaccctcccagggtcagccgggcccagaagccggagcctgcgcttcccgtcgtcccgaagtgcgagaagcgcggctgcagctctgcgccgaggagccccgggagtccactcccgggcctcggtcttcccatctgtgtgacgccacaggaagtcctgagacgccacctctgcgcggccgacccctctcccgcgcgtgcaacacgtgggcctggcggggcagagctgcttgtgcgcggcgggcggggtgcggggcgctcggcgtcgcctgggcccgcggaggcggctgtagccagagcgcccgaggccgcccgccctcccccggcttggggcggggccgctgcccggctgctcttttatctgccagctccgccgacccggcccccgcggccctcccagctcggctccggctcaggtacggggctgccaagacggggaggcctggctggccgcagacgagggtgctctccacggggcgcggcggggctgcggggctgcggggctggacgtggaaagagcaaggctccgcggggcaggggcggacttgggacccggggaagacaggcaggacgcggagccggaggggagcacctgggctaagtgagaggacgcccgcccggggaagcagccagcggagggcgcaggaaggaggagctcgctggatgggggcgtcttgggaagggtgggaggagcagaaggagcacggctgaggaggatgcggatgggggcctgagagcctgtttgtccagtgagcaggggaggggagggctgcttggagaaaatgaaggatggagggcagggagtgggtaggggcgtctggcccgggcaaggccgctgccttcctggagcaggacagtcagggagctcactgctttctggaggaggaatgtaggtgagaccgggacaggaaggggtatgggtgcccagaaccggctgatgtgaaggagtcccacttagggatccaggaacagtgggaatagcactgctgggggccaagaggggcacttgctccatgggcccaagcagtctagacaccttgggggatgagggagcctcccctggtgtcaggagagcctgggggtcccccacacacagtgagggaaggggaaaacccacagcacttgcctcaaggctgcaggttttgaagaccttcagaaatttccctgtagcagcccctggaggaggcctgtggggctaggtcaagccaaggcctcggagtctgaacagttcgatggattcggagtctggctgctcctgggtggacagcccaggaccccaagtctgagctcctatcggagagagggacccagcctctagtcatgaggcctgtgctacctctgggtccttttgttgagaggctgcccctctccagccttagtttct

SEQ ID NO: 3839 - DNA, 6000 bp, Homo sapiens
caattctcctgtctacaagtttaccttcctcccatttctcattcctaatgacaagggaaatatccagtgttatctgaagtggtcataaaagacattttttttctttttatgtgaggaattgaaacttatggctttagattatggggcttaccatcaaggaaagggcgtagcgtggtcagaggacaaaacttcttcctgcatttctcaggaagtctttgattagtgtgtccacctaggagcaattttttttggggggggcactgggaaatatacttaagtgattaaatccaagtgtagacatgagagctttacctaaagccaggtctaattaccatacctgagaatcagggagtatttaaaatttgagaaataattttctatacttgaaagtcacttatgtaggtaggcctcagattataataaataacatttattgtgctatactatgtggtaggcatgaggttaagtatttttacctatattatatcacttatttcttacaaatggagcaagggagcaagcaaacaagggaggtattattatccctattttatgtatttatgtatttatttttgatttctattcttttggtttttttgttgttttttattgatgtatcatagttgtacatgttttggggtacatgtgatatttttgatacatgtatacaatgtgtaatgatcaaatcagagtaatttggatattcatcaccttgaatatttatcttttctttgtgttgggaacattataatttttctctgctagctattttagaatatataataaattattgttccctacgatttctccattgtataattgaatactaaaatttattatgtctatctacatatccccagttcaataactataatttctctgctgtgcaatcaaatactagaacttcttccttcgaacgctatatccctaattcaataacaagtaaactgaagctcagcatggtctaggaactttgttacgttaacacagcaagtgagtgttgcagcctggatccaaaaatcaggcctggtcgacctcaaagtccagattattgacctttctaccataatgtatggaggtaagtttgtgaatttattcaaaaatcaggcctggtcaacctcaaagtccaaattattaacctttctaccataatgtatggagctaagtttgtgaattttcatagttttaggatttgaagataaaagaggtgaaaatttggaaatggtttctggacttttgaattttggcaaacagctatgtgataagtccaccctgcagacccacaacttttggaaataactctactgtgatcttcagtagcagaagctgctcctggggtggtagaacacaaggaaaacacacactagtaaaaatttcatgtgccttctttgttctgtacatgtgtttctcttgattagtatatggtagtatcctcaaatcatagtaacaagtatactttttccagtgaattgcatgtgtatattattgtatagtataaaaggcaatatttccatttattatcatctgtgcttttcaaagaaactctgtgagtccaacagggcgataatagaagcaactgccctttctctccccctttaaatgcaacccaatgtcacagtccgtagcatccccagatgagtgtattaaaggtgagaaattcccaaagtcaaactcagtagcatccttgaatgagtgtattaaaggtgataaatttattttatttatgttctttttaacctgtgttctcagaaacagagactactgtatttcatcctaccttagtcttgcttagcagtttctcttctcctttgaggctcttttatttttaaatcattgttcatatcttctaatctcccctttctcccattcttcccatatttttaatctttttttaactttatctctgttctactttttctgtatttcaaattgatccatagactttagaaaaatgagttgaatgctggctgtaggctgtcttatccccagcaagaaacatgttgtaaagtcttagtaccttcccactggaagatcattagtcatggctactatgtttttaaatgagaattgttttaattatgcattttaaaattattggaaaacatgagggagaggaatgaaccataagtaataaagattattgacttgaagttaagaccttactatgatctgggattattagtcttacttgtcaatcaagaactatccactttctattcgtttgtgggtatctaatatggttatatacacagaagtaatgataattgatatgaaaaggtctcctcctgttatatcaatttaggtatttttcacacattgtatacctcattcttctcctattcaattttcactaattcctaaagggtcaggtcaatgtccttggcataacctcctccacctgttcttaatggcaatcgtctcttctgccctccaatatctataacacttttttctttaaaactctttgaatgtttatcttaatactcatttgatatatattgtataccacatatgattgtttgttatatgtacaatacatgttttttcaactttttttggttctttctatttacaggaattagagaaagaacaaatcagtgtgaaggagaattgtcagtaaaattacaagaaaagattgagatcataattgacctttgaggataataaaatttaaagaccaaaaggatggacttcacagaaacatgaccttaggttgtttttgcagttgtagtaactggttatatgaccaacaaaatatgaagaatgggtacaaattctgatagtaatgatcagtcactttgcaaatataaagttactatttactactgtattgtacaggttcaataatctttgtgtacacattttatgtatttattgtcaggctgctatataattcagtatttataatagatactatgtatagcaatctatggttagttttggtcttaaccaggaaaaatcactcttttgagttttgctgtttttactagattatttttactggatgattgctcatattatttgattattattgcaatttgtctttctggaataggaagcaagaggcctgaattctggttcctattctatcaattgtgtgaattctggaaactcagtttacttttctgggcctcatggttttcatctgaatgatgaccaacttggataaaatggtctttatataatttcgtaggcatttcccttcccaagggcttgagtctttttcaacaattatagagttttccggtccctcttcccagtgcctcagcaccttgctattcatgttcatctgatcagttgtttgcatgctgacttacattaccctgatgggcagtacctgtggctgtttctgctccctcacccagtccataggcttctggttgtaaaaagtgtgcatcttgagactgtggacagttagctccagaggtgacagtataatcacttcacgtagaagaggatagagagagactcatgccagtggtggtgagcaagtattagagatatgatgtgtgcctctgtgagttttggggtctaagataaattatggcactaggaagatggtcctttgtgtcagaagaactggagttgttggtgcaaaaaagtatgatgtcagcatagcagttttatttgtacctcagcaacttctaaaataatctctattaagtgttttcaggaactactttctactataggaaaatgattgaggtgagtatccatctggacacagagaaatataacactgttttctgctcaccctccacttcacatataaatacaatatgtgttaaaggactaaatttctagtgtcacagtttgtactttatagtttgaagtcaataagaaagctcatataccttcctaaaagtcacttgttaatgtttgatattaatctaattttatcataaattaaaagtataaaactacaaatttcttaaagataaaatatccgaatggattcagtcaaattaagcatgataatatcaaatatcagaataggttaccatgcaggaggtactgagtacttaaaagggtggggaatgcaatgaacataaaagctggtaccaaggggaggaggagacagtgatgaattaaaacattatcttaactaatccaagtgctggtcttcaatactttcatgtgtatagacaaagagaaactgcagagatttctcacaacctctgtggccattttatgcatgtatcttagcagaaacactggtgaaatccctccaaaacatatttattaggcatggaaaaagccttacatgacaggtggcataggctccttatgaaatcattgcaggatgggaagccatttagggcttcgtaattgtgaaagattgtatagaaactgaggcacttaaatagcagtaagcatgagaaaatgtggtagataatggtggtgattctatttcttgtgaaagtccacttactctagtctgctacagttgtgggctttccgatttcacataccccagtctctatattctctcaatccacagcctacctcaactaagtctgtcccaggcacctcttactgcagtgataatccatctgttaatcatgttttcctcttatgtctactttctgtcagagaattgtgggtgcaaactgggaagggaaggaaattataagaatatgtataagtacaaatggaatatgttggaaatgaggaatagttaatatcacaggtcatttaaacacctgatgaatttcatggatagtcaggaatcttgttcttacctaatctgttaattttagatcagacattacactgaaagtattgatgatgggtttaaatcaggttgcagctcacatgttgtgataatattatgttgattttttgtttttaatatgtgaggaacagaataactgtatactatttattcatagtgacattgcaatattgattttagtacatattattatcttcataatcacaatttcctccccattttcttagttctcataattttagccacagcccagttggctggaccaatggatggagagaatcactcagtggtatctgagtttttgtttctgggactcactcattcatgggagatccagctcctcctcctagtgttttcctctgtgctctatgtggcaagcattactggaaacatcctcattgtgttttctgtgaccactgaccctcacttacactcccccatgtactttctactggccagtctctccttcattgacttaggagcctgctctgtcacttctcccaagatgatttatgacctgttcagaaagcgcaaagtcatctcctttggaggctgcatcgctcaaatcttcttcatccacgtcgttggtggtgtggagatggtgctgctcatagccatggcctttgacagatatgtggccctatgtaagcccctccactatctgaccattatgagcccaagaatgtgcctttcatttctggctgttgcctggacccttggtgtcagtcactccctgttccaactggcatttcttgttaatttagccttctgtggccctaatgtgttggacagcttctactgtgaccttcctcggcttctcagactagcctgtaccgacacctacagattgcagttcatggtcactgttaacagtgggtttatctgtgtgggtactttcttcatacttctaatctcctacgtcttcatcctgtttactgtttggaaacattcctcaggtggttcatccaaggccctttccactctttcagctcacagcacagtggtccttttgttctttggtccacccatgtttgtgtatacacggccacaccctaattcacagatggacaagtttctggctatttttgatgcagttctcactccttttctgaatccagttgtctatacattcaggaataaggagatgaaggcagcaataaagagagtatgcaaacagctagtgatttacaagaggatctcataaatgatataataagcccttctcattaaacatgatatggctttatgtttctttctttgatatt

SEQ ID NO: 3840 - DNA, 6000 bp, Homo sapiens
tataacttgacattacatcctctggctgactgcgctctctcttgccaatataccatttgtctatgaaacacttaggcccaaaaatagctgtacagtttggtgtcattgtggatgaaatgaagggcaactgccccatctctttggctttcagacaccctcaaaatgttgcgatgaaatgtcccagaggaattagcacagctcattaaacctgaattcccagccagggtggggccagtcagaacatggcgttgggacagatgggacatcagaagtgaccacctaatactccaggggtggcacctgcccaggggccacaagacagagtgaaagggggtgccgttcataatcgcagcccgtcgacaggcatgaaccaggaccgtcctgggcagaaccccgtcttgggccaaatcccacctgttcagttggctctgcccccagaccaatgagatggggtccctggggtccaaggtgccgcctcctgagtgtacggtccagagcgtggtgacagggctccctcccaacaaagcaggcctattgctcccagtacggggcggggccttctcaaggccataggcagcacagcatctgcccacttctcgctggggcaatggccgtgtgcagctggctttccccacttctctccggggcggtgaccgtgtgcagctggctttccccacgtctctctggggcagtgaccgtgtgcagctggctttccccacttctctgcggggtggtgactgtgtgcagctttcctgggagtgcagcgaatgcagggtccctcttcctttccacttccgttcagctcccatgtttcattatcaagtgcattttccaccgaagtccagtagcaaacaggccctgggcttggaggtcacctgctgtgaaaggtggtgagaggatgtcacagggctcggcacttcactgactgcttctgacccgccatgcccttagtgtctcctctatggagctctgccacctgtggctcctgcggcccctcaaagcatcttggctgaacatacccagcccagtcaataggcccatcagcgaggtgggacatgagccccatgcctgggctacccggcagtcccaggaggccagcggggccgaggcgtggtactcagcatgcaccaggggtggggcagatcccacgggtggggggcagggccccaggccaggtcacaaggccacggcactggttctgcagtgaccctaacctgcctgtctctgtgtgtggtccacagcccgagaccgaggacgagaagaagcgctttgaggaaggcaaagggcggtacctgcagatgaaggcgaagcgacagggccacgcggagcctcagccctagactccctcctcctgccactggtgcctcgagtagccatggcaacgggcccagtgtccagtcacttagaagttccccccttggccaaaaacccaattcacattgagagctggtgttgtctgaagttttcgtatcacagtgttaacctgtactctctcctgcaaacctacacaccaaagctttatttatatcattccagtatcaatgctacacagtgttgtcccgagcgccgggaggcgttgggcagaaaccctcgggaatgcttccgagcacgctgtagggtatgggaagaacccagcaccactaataaagctgctgcttggctggacccacgtgtcctgggtggtcatttgtcttgggggggctgctttcccagggggtgtgggacattggggctcccgtggacagtctcagccctcccagcaccagcacctgcatgtaccctagaacctcaggcacagccacaccgattggtgtccggctggtgacttgctggctatgaatgcccatttcccgtgggtccctggtttggtgtcctggccccagacaccctggctccctggacctcataggcagcccagatgctgggaggatgtgggctcagggccacgctgcctggtgggagtgccagcaccccacaacccccctgtctggcttgcagaggatgccggctctgagcctgtgtggctttcctatgaacagggtggggctgctgggaaagactcagcgaggtgatggtgtgggaagagccaaatgtggcctggctcagcgtgtgggagccccaccctgacccagcctcttgctagaaactgcctagacaccccaaaatcctgtctgaaggagccccccagctggcgccaggactctgtgcctgacgtggaaactcccccagccactcaggcaggagtctgctgggatggcttatagggcaggggtctgagggacagcacgaatgtgtgtcagtgccgttggtgtgaagctgtgggcatacgtgtcactgacatatctgtgcatgtgcgtgtgcatctgtctgcatatctgtgagcacgtgtgtggtgagggtatcggtgtagcagggttgatctgtgcatctggcccagccaaggccactacagggaccaggaccccacctgcatccatggctgaaaaggaggccctccaatcaagcacacccagaagtggcatctgggagaatgttcccaattcagtctgtccctgaagccccaacatctgtcctgccgcctggagaagactggcccgtcaacagctgcggcctcgcacaaggctccctctggcccctggagagcgaggactcggctccagatgtgcagaaacaccagccaagagcttgggaatctgtcccgggccccagtcacggctgacggggttatttcctgtctgggagggggttggaggtgggagggacaagctcagccacatgaagcttctgccacgccaccatgccccttggccccccggggctggcctcagccagcctcggcccccagctccacccatgacccatgccagaatggtgccctgggttcagagcaatgaggaggccacccttcccagctagcagaaggcccagggctggccacagcagtgcctgagcccaggggctcactgaggggaccagttccccaaagcacccacacccttcacttgaagttgggccccgcatcagactccctagttcagtcctggctcagccactcatccgtgtggctttgggcaaaccaggcacctgaaaaccgcctcccaggggcaccgggcactttgcagcagaacccagcacagcacgaaataagccagggccccggggcggccatcagaggccatctcccacctgccctagagccagctgaggccgggcagaggcactggtccaggcagtgggtcagctgggctggcagaggggagccaggcccagacagaggcatggctctccatggctgtgtgtgcaatcttaaccgtggtgtttctaagcggcatggctctcggtggccatgtaattaagtgtggcgtttctaccgtttcaccccgagtcacaggcgagacacttagaaacaccacccttgattacagctgccctgtgccagcctcccactgctggtggcctatttataaccaggaccacctggagggggagccaacctgtccacagagggctcactggggacactgagggccctggctgcccgagaaaccacagggagtataggtgtgcatggccccagattcccccttgctcagccccacacgttattgcggggcctttctctacagacactcctctttttgtctcatgggacggaccctaagacccatcctgggccccctaaaagctgctcagggacctggggtgtggggacggtttaggcaggtgcaggctgtggagcagccctgcccggactgggcaagctccaagcatccgttttggctgcaattggtttgggtctcctcctggtcgggtgcctagtttcctccagacacaggggtgcctagtcatggatgtgtcccagaggcacggaaggacactatgccaggcagccccagaggccttgtgcccattgtgtgtgtggtcaggtgctttctagaaaagacaggcacgatcctcaggaggcgtcctctccagggcccccatcaagaagcaggaggctttccgcctgcatggggccagctgaggctgtcagtctgtgggtgacagcctgtgctctatgaggagtggtgatagcatgagggcttgggagggaggggcggaggggcgggaagaatgggaggaggggaggaggggagtaggagaaggcttcaggcgctgggctgcagaccctggcctctcccggctgggcggtggtgctcagagtttcagagagaacaatttctgagcctgtgggggtggcggggaccactcggcagcccggtggcccgtgcactttattccctcagtggaccccccaggcccggggagcagcgtgaatccgtaactggcccaaccttgcccctcgctgcccctgcttcagactggattcccggttcctagaagccgctggccatgcgtcccttgtcctctccacgccccgccccgattgttcatcttagatgcggcttcctccaggaaggtctccctgagccccagccctggccccaggttctcagtgtccattcctgccccagctccctctggcccccgggcccccagagctccgggcctgggtcttgccccggcgtccgaaggcggcgtccggagtgtgcaccgagccgagctgggagccaggggcgcggcgctgtcaggaggcgccaccagcccagggaggctcgggccggccgcgggcggacgcggggacacgggtgggctgcgtacggacggactgacggaaggacggacgggctgacagaccgacagacggccgcgcctctgagcgggcgggggcggggcgggccgaggggcggtgcggaggccccggcggagacatgcgccctgctccgccccccgcccccggccgcccggcgcagcagcggagcggcgggagctgagcgaagcgcggcggcggcggcggcgcctaggggagggaggggcggcggggccgagcccacctagcggagcgcgccggccgccggtggccgccgccagcatgccccggcccgcgggccgctccgccgccagccacccccgcggccctcggcggcctgcgctcggcccgggggcgcgggaaccgcagccggagccggaggcgggagcagcgagccggagccccgggcgctcgaatgcagggtgagcgtcgccgccctggcccgagggcggacggacgggaggaccccggcgggaggactcggcgggaagggagggggctttccgcgccctatcggtcgcggggtccgtccgagggcccacgagcggcgcttagcgctggcacccccccaacttggggaccttcggggtaacttccctggggccagcccctccctccgtccccctgcatcggggcctagcagcgccgccccctgggcttctcaggggacgggggcggggcgcggtctggggatcctgagcccgcccctgctcggcgcaacccagaggggtccgggggccgcagtcccgccaggtttcccagcctgtcgctcggacgcgccctcggggtggggcaggactcggggcacccactggggaccagcaggcgagagcacgcgagtcggagcggggattgcggggggggggggggatcggagccccagggggttgggactgtaggggcgggggctggggggggcgtgccggagatgtccaggcctcgcgctgcgcgtccctccctgggcgacggccaggccgggccccgtggaacacatcggctgcagcgcgggcggagaccggcgtgggggcggaagccggggcgcagccagagcccggggaatcctttcaagttctgggttctctttgttgcgcaatggggcctcggggccgcgcggcctcattggcccggagctgtgacgtcacgccccggccccgcccgcatgtcttgcggagggaggcctcatggcccgggtgggtcccaggctagttgcacctgcagttggccctgcagtgggcggggaagtgggaagccgggtcctgagatgctgcggaatgctttaagtgccctgcaggagaaacttcccagcagaa

SEQ ID NO: 3841 - DNA, 6000 bp, Homo sapiens
atacaatggaatactatacagtagtgaaaatgaatgaattgcatgtaggtgtaagaagatggatgaatctcacaaaaataatattgaacaaaaaccagaaaacacaaaagggaacggagagtatgattccacttacataaagctcaatgacaggcaaactacactgttttgttcagggatgcaaacatggatgggtaaaagcaagagcctccagtggtggctcctgtctgtagtcccagctacttaggaggctgaggccagaggatcctttgagcccaggagttaaagaccagccttcgcaaaaaacaaaacagaaaaacagcaaggaaatgactgagggggaaggggtgtttggggaggtttgtggtacgctggtaatgttatatttcttgctctggatggctgtttataattatttaataagttgtacatttgtattttaggcacttttcaatatgcatatttcgtaaaacaatttatttttatttttatttatttttttttttgagacagagtttcactcttattgcccaggctggagtacaatggtgtgatctcggctcactgcaacctccgcctgccgggttcaagtgattcttctgcctcagcctccaaagtagctgggattacgccctaaatccatgcctggctaattttgtatttttagttgaggtggggtttcaccattttggtcaggctggtcttggaactcctgacctcaggtgatctgcctgccttggcctcccaaagtgctgggattacaggtgtgagccaccatgcccagcctttattttatttttgtatgagatggagtctcactaagtcgtctaggctggtcttaaactcctggcctctcaagtgtttctcccatcttagcctcccaaagagctgggattacaggccactgcgcccggccaaaataatttttttaaagttagatatacaaagataatctttgctttctatgaatcaaatgcaagatcaaacctaatgtacaccaaaaactacaaaacatcactaaaaggaagttaaagaagagctaaataaatggaaagacatccttggtccatggataaggagatctcatattattaatatagcattattctccacttttatctacagaatcaaagcaatctctatcaatcttttccattcctcttgcagaaatagaaaaacggatcctcaaattgatagggaatcgcaaggggcgtcagatagccaaaatattggaaaagaaaaacaatgttgaagggtagggtgcggtggttcatgcctgtaatcccagcactttgggaggtcgaggcgggcagaccacttgagatcaggagttcgaaaacagcctgggcaacatagtgaaaccctgcctccactaaaaatacaaaaattagccaggcatggtagcgggcgcctgtagtcccagctactcggaaggctgaggcaggagaatcgctcgaacctgggaagcaaaggttgcagtgggccaagatcaaaccactgcactccagtctgggcaagatagtaagactctccccaaaaaagaaaaaacaattttgaaggactcccttcccaatttcaaaactcactacaaagctacagtaaccataacagtgaggtattggaaagaaacaaaacatagatgcaaaccttcatgagtttggcataggtgatggtttcttagatgtgacaccaaaagcacaaacaaccaaagaaaaaaatggacaaattggacatactcaaaaaacacttttttcctttgaaacatgctatcaagaaagtgaaaagacaaaccacaaaatgggagaaaatatttgcaaatcatatagctgataagggtgtaatagctagaatatataaagaactcttgcaactcaacaacaaaaagacaaaccaatttaaaaataagaaagaaaattgaccaggtgtggtgactgacgcctgtaatcctagcactttgagaggccgaggcgggtggatcactctaagtcaggagtttgtgaccagcctgatcaacatggtgaaaccccatctctactaaaaagacaaaaattagctgggcgtggtggctggcgcctataatcccagctacttgggaggctgagacaggagaatcgcttgaacccaagaggcagaagtcacagtgagccaagatcgcgccattgcattccagccagggtgacagtgcgagactcagtctcaaaaaaaaaaaaaaaaaaaaaaaaggaacagaagaaagaaagagagacagagagagaaagagagagagagaaagaaagaaagaaagttgaacagacatttctccaaagaggatatgcaaatgtccaatacacacatggaaagatgtttgagggcattattcatcagggaaacgcaaatcaaaaccacaatgaggaacaacttcacacccactaggatggctattatcacaaagataatacaaaatgtaggaaggctgggtgaggtggcctcacgcctgtaatcccagcactttgggaggccaaggcaggagtttgagaccagcctgggcaatacagtgagaccccatctccaaaaaaaaaattagtggggcccaggcaaggtggctcacacctgtaatcccagcactttgggaggttgaggcgggcagatcacctgaggtcaggagttcaagaccagcctggccaatacagtgaaaccctgtctctactaaaaatacaaaaattagcaggttgtggtggtgcacacctgtaatcccagctactcaggaggctgagacaggaaaatcgcttgaacccgggaggcagaggttgcagtgagccaagatcacgccactgcactccaacctgggcaacaagagcgagactcagtctcaaaaaaaaaaaaaaaaaaaaattagtggggcatggtgacatgcacctgaagtcctaactactggggaggccaaggtgggagaattcttaagcctaggaatttgagactgcagtgagctgtggttgtacctgcactccagcctcggcgacaagaccttgtctcaaaaaaaagttttggaagaatgtagagaaattgcgaccttcattgctagtgcaaatgtaaaatgatatgtacagtcactttggaaaacaccttggcagttcctcacaaggtgaaatataaagttgcgtatggcccagcaactccattcctaggtatacacataggagaattgaaaacatacacccacaaaaaaacttgtatgcaaattttcatagtggtattattcttaatagttaaaaagtgttaacaacccaaatgtccatcggctgatgaataatagctaagtaaaatgtggtatatcctgccgagcgcggtagctcatgcctgtaatcctagcactttgggaggccaaggcaggcagattgcctgagctcaggagttcaagaccagcctgggcaacacggtgaaaccccacctctactaaaatagaaaagaaattagccgggcgtggcggcgtgtgcctgtagtcccagctactcgggaggctgaggcaggagaactgcttgaagccgggaggcagaggttgcagtgagccgagatcatgccacggctctccagcctgggcgacagagggagactccgtctctagaaaaaaaaaaaaaaggtggtatatccatataatggaatattacggggcagtaaaaggaatgaagcactgcatatgctacgatgaaccttggaaacgtgctaagttaaaaaagtcagacataaaggccacagagcatatgagtctatttacaggaaatgtgcagaataagcaaatccacggtagaagagtggttgccagggctgtcggggagaactgagggctaacagctgagggataaggatttctttttgggagtaatgacaatgttgtagaattacataataatgatggttgcacaaacttgtgaacatactactgaattgttcggttaagagggccaattttatggtatgtgaattacatcttaattacaaagtttgaaatttttaaagaaaaagccatgccctgcctagcatttcattttttaaaaatcacacctagttagctatggtttttaaaaaatagcatgcttattttaagaaaaggtggaaacgccggcttccccaagtcaccaccaacttgtgaacacgtcgggatcacggctgaaggaatgaggatcatacccgagagctgtttctgttgctagtggaaagaatgcctctgatcctcacgcccttccactcacaacacacacagaagctggctgaaaagagggaaagtaatattagccctaaaaatgccagcccttcctctcacaggactggatgtcccagacacctggcaagagcaggggtgggcctggaggagcgtggagggacaggtgctgggacctgggggtgccctgaggtagggcttagggacctaggggcttaggggcgtggtgtgagggcgtgggcggggctcaggagcctcgggcaccgggtggagcttggaagcctcaggggcgtggcgggggcggggctcagggcccggggcaacgggacgaggaagggcacctgagccagggtcagggcccggaacacaggggtgtggcggggtgcgtgggcggagcggggcgcgtgggttaggctctaggcccaggtctctgggccctgtggacaggggatcggggcgcgtgggcggagctctaagtcccagtctcaacgcgggggcacacgggcggggggggggcgtgtgggcgggaagggcatgtgggccgggggacgtgtgtccggggctcggattgtgggcggggctcagggcctgggacggcgggacggggctgggagtgtaggcggggcttaaaggccggggtaccggggtggggcgcggcgcgtgggcggggctcagggcccgggatataggggcggggcgcagggcgtggacggggttcagggcccggggcccagatgggcgggggagcggccggacgcgggcggggcgggcgcctggacgcgagcctagggcgcctcggtgcccagacggcggcggcgtggccgcacgcgcggcccggcttctgtcctcgcggcgctccggctcctggccccccacgccatgcagccgtccccgccgcccaccgagctggtgccgtcggagcgcgccgtggtgctgctgtcgtgcgcactctccgcgctcggctcgggcctgctggtggccacgcacgccctgtggcccgacctgcgcagccgggcacggcgcctgctgctcttcctgtcgctggccgacctgctctcggccgcctcctacttctacggagtgctgcagaacttcgcgggcccgtcgtgggactgcgtgctgcagggcgcgctgtccaccttcgccaacaccagctccttcttctggaccgtggccattgcgctctacttgtacctcagcatcgtccgcgccgcgcgcgggcctcgcacagatcgcctgctttgggccttccatgtcgtcaggtgggtggcggtggcgctgcttttccaggagcccccgacacaggccgacccctcccggtcttgccctcccagaggccgcgtctaggttggacaccccctacccacagcaagcagtgcctgctggcgcccccgaggctgtcctgggccagcgggaggaggccagccttgcccgagattcgctccctcccgaaggagccccgctgtgcctgccccagggcacagccccttggggtagtggggacagagttcgcccccagagccgggccctgtttccttggacggggctggggaggacactctgagccccttgtgacctgcttcactgtgtcctggctgtctctgctgcccatggggaaacaggctgggagacgagttaggtaactgtcccgggctggagagccggcaactgccagtcccacgccaccaccccaccccaagccacagtgagcttggtgcactccgccactcccgagctgccgtgtctctgctgtacagtttacaaaggactgtgctttttattctgtctttggtcgtttctagcct

SEQ ID NO: 3842 - DNA, 6000 bp, Homo sapiens
acatagtagcaccttaaaaggtagaataggccaggcgcagtggctcactcctgtattcccagcactttgagaggccaaggtgtgtggatcacctgaggtcaggagtttgagaccagcctgaccaatatggcgaaaccccatctctcctaaaaatacaaaaatcagccagacatggtggcacatgcctgtaatcccagctacccgggaggttgaggcatggaaatcgcttgaaccgggaggtgggggttgcagtgagccgagatcgcgtcactgcactccagcctgggtgtcagagcaagactccatctcaaaaaaaaaaaaaaaaaagaggtagaataaaacagaatggcggagcataacaagggctcagcgcagcacctggtggagagtgagcactcaaatcacgttaacaacataaatcactcgtgctcactatcaccatcattgtcccatgtttcaaggcacagaccctgccttccccaaggagctcttggctggtcggtgccttccttcctctttactctatcccggtggcatcacacaccgtcctgatgtacttttgattgactttattagagcagaggtctcaaatcccagccttagccccttgttcctgaaagaaatctgcctttctggacttggtccagaaagaacttggtcctgaaagtcaatatgcctttctggacttgggtgactgcccctttccaggcctcagtttccctatctgtatactgggtgggtttgtgggtctccgtaggctctctcagctctgacacagtacatcacactgcggatgggcctggttccccggtgtcttccagtgtgcactgccctcacccgggccctggtttctgtctccggatggtaaaccctgtcacacagtgggctcagctggtgcccactggataaacagcttgcttaaccattcttgttttctaccaccctccccgtcccaaaccctgagactggggctttgggccgactgacatggaggcagatgaagacagtgcaaagagggcaaagagggcctccccactctatagatgaggaaactgagacccagagaagggagagtcaggcccagagcccacacgtcccaacaccccacgcaaggtgcttccttttgttttatgagtccccacctcccatccagtggtttacccaaagaggggcagggacaggccctgatcacacagccaattctgcctcttcctgcagcaccaggaggcctccccatcttgacttaaaggcccacaggatggccctgccccaggggtggtcaggggcagggaggggcgtgccctgagatcagggctacatcctgggcttcccagttaacttagatgctctctctctctctctggcatacccccacccctaagctttgccaaataatgtgccttttctagaagtcttcaggacatcccagtgcctcctggcctctttattccccaattcagaactgacatgtgcagtcatatgtgccttcttgtggctgtaccaggaacgaatccttccccaacagctggggtgggacctgagttgagggagggcagggccatcccagaacccccatggcaggaggtgcagtgacagcttctgtaggcagaacacacttagcacaggggctaagagcttgggcagcgtggatttacattctggcttcaccacctagtagctttgtgacttctggaaagttgcttagcctctttgagcctcagtttcctcatcttcaaaatggtagtaaaaatggctactttgaaggggagttgtaagaattaaatgataatgtatataaaatgcttggcacaatgcctggtgtttaatagactctgggtggatttaatacacaccaggcgtggtgatttacacctgtcatcccagcactttagcaggcagaggagggagaacctcttgaggccaggagttcatgaccattctgggcaacataaagagactccatctctacaaaaaattaaaaaaacttagctgggtgtggtggcacgtgcctgtagccctagctactcaggaggctgaggtgggaggatcacttgagcccagaaggtcaagactgcagtgagttttcatcatgccactgcactccagcctgggtgacagagtgagaccctgtctctaaaaaacagaaacaatacatcacactctgggaaaggcgctatttgttgttacaacccactcataaacccctaggtatttggcagggcgggcgtctatggtctcggaggcccctagaatgccaccccaggaagatcctccagggacccagacccaaggaggccagtgtggctgtggtttgtggcacgtggtgcaggagagaccaggctggaaaggccaggaaagggaggatgagtgagctggggctgggctggggaggcctcaaatgccaggacaaggagctcagacttgatccagctggtgacggggagccccggcgggtattagagcagaggagtgattagctgacagctgtggtttggggttttaaacagtcagtgtggggcagatggagaggtgcagaaagggggtgatgagggtctgcgggggttgtggcgtggaaagtgggagggcatggagagaacccatggggcagtggtgacgggtcagtgctggggttttgggccagctgacatggaggcagacacgggcagtgcaaagaggggctccccactgtacagatgaggggactgagacccagagagaggagagtcaggcccagaacccacacctccaaacaccccttgcagggcgcttccttttattttatgagtccccacctccaatccactggtttacacaggcccagagaggggcagggacaagcccagatcacacagccaattctgcctcttcctgcagcaccaggaggcctccccttgttggcttacaggcccacgggatgaccccgtcccaggagaggtcaggggcaggggaggaggcgccacttcggctctgcagtagctaaagacatccaacatccttcagggtaacttcgagaggctttgggacacaaaggggcaatttcagctggtcatggagcccacggtgccccctgcggcagttgatttcgttgtaaaaagaaacaacctcgcactttggcaaactcacctttctccaagcctgctccacaccccccagttttatttaacttaattcccacaccaagtccatgaggctgaaattgttatccttgtttcaacggggaagaaacagagcctcagagagattaaggaacctgcccatgctcatccagcaaacagctgatgtcaaatccaggtgggtccacgtcacgtggtttcaagggtcctcaagtagagtggacacacgcagcaggatccggttaacggtgtaaggctggtagccagtgcccagcgatgacgcagacaggaggcttgttgctgctcagagccggggaggttcccttgaactgggggcaggagtggttcctaggaggaggagaagctcagactgggccctgaaggaggagcagggcttggctggggtggggcaggagagagcatgtttttatttgtttttattttttattttttgagatggagtctcactctgtagcccaagctggagtgcagtggcatgacctcagctcactgcaacctctgcctcctaggctcaagcgattctcgattcttgtgcctcagcctctcgagtagctgggattacagtgtgtgccaccatacccagctaattttttgtatttttagtagagaccgggtttcaccacgttgcccaaggtggtctcaaactcttgagctcagatgatcttcctgtctcggcctcccaaagtgctgggattacaggcgtaagccaccgtgcccagccgatcatggggtttttgatcacctttttctaccttgaagcctctgcccatcagaaccatggagcgcagcagccgggtatgtgcctgtgacagacccattccagccatgtggtgtgtggcaggttccctagggctcggccacatgttggtaggcctggaaaggagcaaaacagcactaaatggacaggggtctctgattcaaatgggtccctaattcactggagccacctccccgcttctgactccttgggcgtattcacctttgaatttaggaattttcaactttctgttttgccaacaaccctgccctttggtgtggggtccaaggggtcggggacccagagtgggtgttgctaggctgactgatggcagccttcagagggagtgagaccacccctcccttccctccttcccccaccctctttgacaccgctgggttttttttttttttttttttttatcaaaagcactaattttgtgatgtaatgtgatgtagcgatgaaggacccagccccggagtcagaccatgtggtttgaatctcagctctgctagtcaggaagcctgggctggatttcttaatttctcagtgcctccatttcttcatctttgaaatggggttagtaatagtcccggttactgcaaccattatatgagatgatgaaccgcgacaccagcatgatgcctggttcttattgacaatggctaccactttctccacacctatacatcactacatgcctggcctaacttggctggactccagagcttgggctcttttggccacagtactctgtttcctgacagcacttatgtcctttactcctgaaatatttgaaatgtcaggaagatgagacttgtccttggacaagtggcagaaggccagggcatggccaagttatcaggatgctctctctttccaaatagggttcccctagaccacctagcccctctatgctctaagaaagaatcatcataattccaccctcctttcctccctctgggcccccaaacctctccacctgctccaggtgccccacagtcggtggcaggaccatcgctatgtaaatgtctgtgcaaataccctggtgtcaagctgccaattctccagtgaggcaggactacctcctgagaccatcacttcccagccatggggcccagggcaaagaccatctcctccctgttcttcctcctatgggtcctggctgagccggctgagaactcggacttctacctgcctggggattacctcctgggtggcctcttctccctccatgccaacatgaagggcattgttcaccttaacttcctgcaggtgcccatgtgcaaggagtgagtctccagtgtggggctggaagtggcagtggggatggggtgggaggccaggcctggtcctgtgggtccttgggagccagaccaggaccaagggcttaaagcactcctccccattcattgccaacccccttattctggatccatgcccctagtcctcagggaggccccgtataatatgggttaccaaaatctttggcgactgtgctctgaaacactgagactggggtcatctcagtgccattttttttaaatagagttacagaatgtttgagcctagagggctcttagaggccatcaagactgctcccacccactttggcaactgggggactcccaatgggtccatgtcaaagcccattctgaaaacctttgggaggcagaatgtgatttttctgtagcaggttctgtggtgggtaggggtgcttttgggccgagagggaagttcctcttcccccacctcctccctgagccccttggggtggcagcatcacttggagattgtgggggctgtgtgcatctgcatgcaagcacgaaggacatggagccagcctgggactaaaaaagagtgacctcttgcagagagggtgaaggtattgcgggagacaaggagaaaggaagaacagtgcaaaagatgattaagggttgagtatgagaaatgcatcatttatgacactggggaagattatatgctggcttgagaatggtgaaggtgatggcaccaggcatgatgctgggttttctaatgcttgtgatcatggtggggtgtataatgatggtgatagttgtgatgaaagtaatggtggtgatgctgata

SEQ ID NO: 3843 - DNA, 6000 bp, Homo sapiens
gagggcctgctatgtgaagggattcctcacccttcaggtgctcccagggctgggaatgtgtaacaccagagggtagagagtgggtgtttgaatacaggtccaggctgggtgcactcggctgggcagagccggggaagctgcccgaggggcgggtttcgggtgggaacttgaagaagccaggggtgcccaaagagggggtggagctgccccagcagagaaatgaaggtgcgaacgctggggcgtatctcgagcagagtggcctcgggagcagggggcggggtgggctgagtaagcgtaggggccggccgagctctagctgggaaacgcagccactctcctgcggccgccctccccgaccctcccagggtcagccgggcccagaagccggagcctgcgcttcccgtcgtcccgaagtgcgagaagcgcggctgcagctctgcgccgaggagccccgggagtccactcccgggcctcggtcttcccatctgtgtgacgccacaggaagtcctgagacgccacctctgcgcggccgacccctctcccgcgcgtgcaacacgtgggcctggcggggcagagctgcttgtgcgcggcgggcggggtgcggggcgctcggcgtcgcctgggcccgcggaggcggctgtagccagagcgcccgaggccgcccgccctcccccggcttggggcggggccgctgcccggctgctcttttatctgccagctccgccgacccggcccccgcggccctcccagctcggctccggctcaggtacggggctgccaagacggggaggcctggctggccgcagacgagggtgctctccacggggcgcggcggggctgcggggctgcggggctggacgtggaaagagcaaggctccgcggggcaggggcggacttgggacccggggaagacaggcaggacgcggagccggaggggagcacctgggctaagtgagaggacgcccgcccggggaagcagccagcggagggcgcaggaaggaggagctcgctggatgggggcgtcttgggaagggtgggaggagcagaaggagcacggctgaggaggatgcggatgggggcctgagagcctgtttgtccagtgagcaggggaggggagggctgcttggagaaaatgaaggatggagggcagggagtgggtaggggcgtctggcccgggcaaggccgctgccttcctggagcaggacagtcagggagctcactgctttctggaggaggaatgtaggtgagaccgggacaggaaggggtatgggtgcccagaaccggctgatgtgaaggagtcccacttagggatccaggaacagtgggaatagcactgctgggggccaagaggggcacttgctccatgggcccaagcagtctagacaccttgggggatgagggagcctcccctggtgtcaggagagcctgggggtcccccacacacagtgagggaaggggaaaacccacagcacttgcctcaaggctgcaggttttgaagaccttcagaaatttccctgtagcagcccctggaggaggcctgtggggctaggtcaagccaaggcctcggagtctgaacagttcgatggattcggagtctggctgctcctgggtggacagcccaggaccccaagtctgagctcctatcggagagagggacccagcctctagtcatgaggcctgtgctacctctgggtccttttgttgagaggctgcccctctccagccttagtttctctgtccagagggttccttgctggtcagcagtgcagctcaggtcctttttctgtgccccatgctgggtgactatagctcgttcacccaacctctctgggcctaagagattccccctcctcagagcagctgtaagtctcagctccacagaatactttctttaagaattgctttttcaggccatctgtgggagctcacacttataatcccagcgctttgggaggctgaggtgagaggatggcttaagccgtgagttcaaggttgcagtgagctgagatggtgccactgtactccagcctgggggacagagcatagaccctgtttaaaaaaaaaaaaaaaagtctgggcatggtggctcacacctgtaatcccagtactttgggaggccgaggcaggcggatcacctgaggttgggagtttgagaccagcctgaccaacatggagaaaccccatctctactaaaaatacaaaattagccgggtgtggtggtgcatgcctgtaatcccagttactcaggagactgaggcaggagaatcgcttgaagccgggaggcggaggttgcagtgagccgagatcttgccattgtacttcagcctgggcaacaagagtgaaactttgtctcaaaaaataaaaaaagaaaagaaaagaattaggctgggcacagtggctcatgattgtaaccccagcactttgagaggccaacgcaggaggattgctcaagcccaggaattcaagaccagcctgggcaacatagtgagaccttgtctctacacataataaaaaaattagccaggcgtggtgttgtgtgcctgtggtcagggctactcaggaggctgaggtgggaggatggcttgagcctgggcagttgaggctgcagtgatggctgcactgcacttcaacctggggacagagtgataccctatctcaagaaaagaaatagttacttatttcattctgatcacattttccagtacaaatacatggaggtcccaagtgccaaagttacaaaaaaaaaaaacagtttctgttcagttttggaagacatgtagggactttttctttaaacactttggaccaagttggggagttagcctgcattgagggaggtgacccagttgctaagagactgggaggccagccagggatgaaaactttgcctgtataatctgtggtcaccactgggtgcctgggagttacccacggtggacaaagggcaagagcgctggttttggagtcagatagatgtgctctgccctcccgcctccagggctgggctcccaggttggctgtggatccagagagttgtgagggagaggtaaaatgtgtgtgaaagttcttggtaaacacccagccactatatattatgagtggtagcacctaatctccttaatgatatttcaggtgccatattgggtcatcctcactaaagacccttcaagagggttttcctccaatagccccagtattaacattggtctggccttattatttgtatctaatggggttagactttcccttccatgctgagaaaaagttgtctttaagagaatgtgctgaacaatcagggcccagaaaggcaacaacgaatattttgcatgccaagaaggaggcaaaagaggaagtggaattgtacccaaataatgcttataataggtgttatttagctgagctgtaagctccaggagggcagggtattaatatattgaggtgttggctgagcactgtggctcactcctataatctcaacactttgggaggccaaggtgggaggatgacttgagaccaggagttcgagaccagcctgggcaacatagcaagacctcgtctctacacataatttaaaaaaataggcatggtagcgtgcgcctgtgattcccaactactcaagaggctgaagaaggatcaccggagactgggaggtcaaggctgcagtgagctgtgtttgcaccactgcactccagcctgggggacagagcatgaccctgtctcaaaaaaaaaaaaaaaaaaaaaaaatcctgtggtgttaccattggtatgaattccctgggctgttagttctgcgagggcagtggtttaaatggctctgtcactgaggaagctgcagcgcctggcacataggaggcctaaagtaaatattcttggactgtcccagggcctaagggcccttggaagtcactggtgaatttactctctcctttgacatttggagaaacagggccaagaggggaggggacttgtccaaggtcacacagggattgagtggctgagtcaggacgagaatcccacagaaacggcagagccagcactgtgccagagccaacacctggcatccatggctttgttttgcttccacaagagcccaagaggcagctattttaatcctctgattccaaaaggaaacaagctcagagaggttgagggactgttgcagagtcacacagcaggtgaattccagacccgaaatttcatcctcacataaaaatgaggcctgtggcgtctcttgaaacagcctgccggagagcctgcagagattagtggaggatgtccaccaccagggcagcagtcttctccagttctccaggctcactacctggctggcttccctccaggctggatcttcctaggccctgtgggcatttgtgtgggtgagcccgttggggcagggagcctgtctgcttcattttctgtgtgccccagcacacagaatgcctgggtagcgttgaggctggcatatagtataagcactgagtgaaatctgtgagatgggggtaacccagggctctccctctccataagcccattttccaccacctccctgcagcctggtctgttttgccccacgggtgttatgggaacctttgacagtgtgtatccttggagagcaggctggggcttgcaagccttcgttaaggagagaggtgaggagggctgaccttgagttgaggaatatgaattgggaggggtgaggaagtggaggggaggggaagggaggaaggagcggctcaggctgacagaggcactcccactggagccctggagatcgcacttcagaggttcagccaacccagaagactcccaaaccttctgcaagacatgtccaggccagaccatatgccatttggatcacctgctaatttggttcaccctcttgtgccctcgtgctctccagggcttctgagctgctggagttgaggccccttcccctgggactgtcactgcttagccacatctcttgggcctgtgggtaagcaccaatttacagggctctgtgaattcaaaacagttactctgaatggtctttgctaagaacaatttaatgattaagtaaggtcagtgtccttggaagtccaaactctagccagatttccctggtctacacccctagggataaggtaaatgtttaagcacacagtgaacttcctgaggcccccaaatctaatggaactagctattgagggctaaaagaggatggtttttttagaaaactcgaagcaaatctctcaggctggggatatttcaaagactactactattattattaataacaattgcaatatttgttgagtccctaaatgaagctaaaactttgttctaataaatttaatctttacagcaacctatgaggtagataatattgtcattcccatgagggagctaaggatcagagaaggtaagtcacttgtctaaggtcacatagctagcatgttatgcaatcaggagtcaaacctggtttgtctgaatctgaagtccatctgctctgtgcacttttataccgtctgctttttcctttattcctaaccttcttccattctgattcccactgagtagtggacaggaaccactgaagtttgcctgacaccatcaaccaggccctagtcacctggctttgcctttgccctgctgtgtgatcttaggtaagtcaaacttttcagctggccctcggtttccccgtaagtctcatgcagaggtgaatggtgagctgcttgctgcagcagaggcctggctaggaaggcacacagtttagcatggatttcaccactatgggagtggtgaagttggggaggagaggtgtgggaggttgtctttagccccaccctctggtgacatcacacaagacacccccagtccctggaagccccgcccctagtgcccctcatctgtggaagtgctcagcatctggtgaatttgcccagtcccatagtagaggtcaccagcccccaggcttgagagaaacccccaggtacccagtgcaatttgccagacttggag

SEQ ID NO: 3844 - DNA, 6000 bp, Homo sapiens
tgagattacaggcatgcaccactatgcccggcaattttgtatttttaatagagacggggtttctccatgttgaggctggtcttgaactgctgacctcaggtgatccgcccgcctcagcctcccaaagtactgagattacaggcgtgagccaccgcgcccggctagaatttatttattgaagaaagcaggttgtgtgttccatatgtttcttatcatgtgcgtttgttgagtgcatccctatgatctgtttccttctgtaacaggagtaaactagtgattaaacttgctgattctgtttcggtttccttggcaagactgttttataggtggtgttgtgaattgtacgtgctcaaacacaacttcatagaaaagttttcaaacatacacaaaaagagaaggaagagtacaagaaatccttgtggtagtttcctgtggctgctataagaagttaccacaaacttagtggtttcaaataacacacgaccgggcgtggtgctcacacctgtaatcccagcactttggaaggcggaggagggcggattgcttcaggtcaggggtttgagatcagcctggacaacacagtgagactgagatcgcgccactgcactccaacttgggagacagagtgagactccatctcaaaaaaataaataaataaaaatcaatcaatcaataaaataaatattttgccacattttctatttctcccctctctcccttcattcctcttcctttcttttttcttcatactctgtatccatccttctttatttcttctctttttctttactttctctctccttcctttcttcttattttgctgtaatattttaaagcaaattccacatatatggacattttgtttataactgcaacaccattatctcttaatgctattatcaataattccttagaattatctaaaatcctgtccatataccagtttctgtgattttctcaggtatgtctgtcctggatatcttctgctttctcctccagacccactgtgggattggtgatgcatgcccagagtacactccacccttcttcacccacctcttgccccggaggctgccctgtatggaccacattaatggttcctttgtttctggttggggtcagccaactggcggtgccgataagatgtcagaggatgggagaagagaaaggtttgagtatttatttcctggttccctccctgcctgttgcaggctcagctgcaacttcttttttatatatatatattttgagacagagtcttgctctgtcgcccagggtggagagcagtggcttgatcttggctcactgcaacctctgcctcccgggttcaggcaattctcctgcctcagcctcccgggtagttgggattacaggcgtgagccaccatgtccatcctcttaaatctcttttaatctggaacaatctcctccctgtttcttttgtgcttttatttcattttatttttaacttttgttttgttttgtagagacagggtctccctgttttgcccaggttggtctcaaactcctgggctcaggggatccttccgcctcagcttcccaaagtgttgggattacaggcatgagccactgagcctggccctctgtttgtttttgtgttcaagcggttgatttctggagagaactggctccattgtccagtagaatgttctatattttggaattggttgattgcttccttatgaggtcctttaatttattcctctgtcccctatattttctgaaaactgaggttagacctaaaggcttgattagattcaaatttggacatattttctttttttttttccacccaggctggagtgcagtggcaccatcttggctcactgcaacctccgcctcctgggttcaagcaattctcatgcctcaacctcccaagccactgggattaccagcggtaatcagcaggtgtgtgccaccatgcctggctctttttttaattattattatttttagtagagacagggtttcaccgtattggccaggctggtcttgaattcctgacctcaagtgatctgcccgcctcagcatcccaaagtgctgggattacaggcgtgagtcactgtgcccggccaaatctggacatattttcaagtggagccaacataatttgctaacagaatggatgtggggtgtgagagaaagagttgaactcagtttcctcatttgtaaaatattgatagtaatatctacctacctaccctgcttattgataatctcaaaagaggtgctgatctgcagttgccacatgcgcgcatggaagggactatactggaaggcaggccgagccaacagttccggaccttgagccaggcgtcctggagactctgggcaatggaggctggttgatcccggaggtccctcccaggcttgctgtccctcctggagggtggtggctggaggagggctgaggtgaaactgttttggaaccaaggatctgggctggggagcagagttgaggccttgccttttaggtgagcagtttgcatgaaggctaagttcatgtacagaccatgtcctcatatttcagggcactcgaggctcaaaaagcctgtaagggagacaagaagaaatgatcaaactgagcctgtttcttttcttttttttttgttttaaatatgaagatggggtctcactatattgcccaggctggtctcgaactcctgggctcagcaatcctcctgccttggtctcccaaagtgcttggcctgagcctgtttcagtgtccctggcaggacatggggattgggagagtgtgtgcggtgcgtgagtgtggagcagtatggacgcatgaactcgaggaaggagatgagcctggcaggtgtgagtgaggggagactgggcgtgagtgtgcaggtgagtggaggaacacagtgtgagtgggcatcttcgcatgagagtaggcgctgagtgtatgcgagtgtgcaagtgttatgtggtctgagtgtgtctgcctgtgtgtgatggggggctggaggtggaggagggggcagatgcttggctctagttctacatgactgaggcaaatgttaaaagtggtttgttctggccaggcgcggtgggtcatgcctgtaatcctggcactttgggaggctgaggtgggcagatcattggaggtcaggagttcaaaaccagcctggctaacatggtgaaaccccgtctctactaaaaagacaaaaattagccgggcgtggcagtgcttgcctgtaatctcagctactccagaggctgaggcaggagaatcccttgaaagtgggaggcagaggttgcagtgagctgagattgcatcactgcactccagcctgggagacagagtgagactctgtctcaaaaaaaataaaaaataaaaaaataaaaaaagtgttttgtcctttgagagccatttttggctttgataagggacattaggaggaggagcctggcccagatacccagagcggagctgagactggatgctgatgcaggcccccgactctccttatacctgccttgctgtgggaccctggtcctgtcgggacctcagtttccctctctgtgtaggaggttgttgggtcggctgatgtatctgagggacttgcttctttagacagggtccaccccagtgcctggtgcctgggggtgctcagatggtgcttgttggttggttgaaggaatgagtgggtaaatggactggaaactgaggcagatactctggctcacctctcacttatgcacacgggatgcccccaccagctcactttcacacataccctcacacctacactcagagattcatgtgcattcaccatcgattgtccacccctcttcacctgcatgctcccatgaactcatacgctgccaacccacaccagcctgggtgaaaaaaaaaaagaagaaagtatgtccaaatttgaatctaatcaaacctgttttcagaaaatacaggagacagaggaatagattaaaggacctcacaaggaagcaatcaaccaagtccagaatatagaacattctactggacaatggagccagttctctccagaaatcaaccgcatgaacaaaaaaacaaacacagggccaggctcagtggctcatgcctgtaatcccaacactttgggaagctgaggcggaaggatcccttgagcccaggagtttgagaccaacctaggcaaaacagggagaccctatctctacaaaacacggtctcagggagcttccacctccacccccacagatctgttcccatggggtttctgggctcaatgtttcttggtctccagggaggccctgccctgtcatgcccctgaccacagtggctcttccgagctcctctcttctccctccactttatatcccagcgggcattctctttcctccactccccttcttttattttctctctcacccccatccagagacgcacagacccaaatgtgcacaggcacatgctcgctgtctgtgtcttgtcatctcgtcttttgtcttggatcttaccttgtctttgtccctgaatctccttgttcctctcatctctcccggtgtttacatctgtctttttccctgagcctcgctccctccatccattcctccgccctctcattttttttcccgactccctcctgcctcctccctttctcctttgattttcctggtccctcatctctcctccctcctctttctcactctcatgctccctttttcgctctcttgagtacatgcacttgctttctctctcttgcttttcctctttctcaccttagctcctggcctcgggcgctgtctacaccccaccccatccctcgctctttgagaagcctctgtgcagtgcccaggtcctggcggcccagcttggaagttcctgtggtaccccttgagaggccctagggccacagcatttcctcccaggggtgacttggtagtgatacgctctgtttcttcacttctgcaattgccagacagcatagaggctgaggctggggccaggacccagacagagacacacggtcactgcagctgaagccgctgcccctgctacaggtaagggggaatcctggcccctgctgggcaagggggaggcatataaaaatgtcctcaggaggcaaaccaaggtcatgcccccaggctgcacctaagcagatgggtgcttctatttcttttcttttctttttttttttttttttttttgagacagggtctctcactctgttgtccaggcagaagtgcagtggcgcgatcatggctcgctgcagcctggacctgccaggctcaggtgatcctcccacttcagcctcccgagtatctgggactagaggcatgctctaccacgcctggctaatttttgtattttttgtggagacgaggtcttgccttgttgcccagactggtctctaactcctgggctcaagcaatcagcctgcctcggcctcccaaagtgctgggattgcaggcttgagtcactgtgctcggctgcttctgtttttaagggatttttctggcacctttctcaggcccagagtctcatgtttagaaataacttctagtgtccaaacattcctggagaacccaacacccaagtttggcttttctgaggctggggcagtgctgaccccagagatcccactgggaggtgttgatggtggtgatggtggcagtgctgaccccagagaccctactgggaggtggtgatggtggtgatgggggcagcttggatctcagggagccaaatgacatctacttgactagctgtgtggtcttggccaagttacgctccatctctgtgcagttttctaaattgtcaaataatgataatcccatctcccccacagaattgtcgggtcatataaaggatctggtacagggcggggtacttaggaactcactaaatgctaggtttgcggggtggggaagggggtgctgaaaataaccaggttcttatacacagggccaagcccacaaacaatagcccctatcaggtcccaggtgctggggacagggcccaggc

SEQ ID NO: 3845 - DNA, 6000 bp, Homo sapiens
gtgaggggacagaggcaggaatccagatctgtgtggcttcggagcctgaagtcttctggttcatcacatgggaaactgtgaaccagtgttttactgcacaaacatcagtcaagagtcacagatcaaaagctctgtgagggcaaggtgtctgcttgccatttcaccattcattcactcagtgaatatttgctgactacttaccttgtacctggtggtgggtgccacgggccccagctgtgaatggatggacaaggtccctgacttcacagaactcacagtccaggggggcaacaagttacatgtgtgtaaataaacaacatattttcagagcaatgagtattgccaaggaaatataacaggggtatgggatgaagcaactgggggtggggtagggctattttagaggtgtggtcaggggaggctccctggaggaagtgaccttggagctgagaccttcttgataaggagtcagccatgggaattgccgggggaagggtttggagttttctaagagcagcaaggagaactctgtggctgcagcatggtgtggggtgggggtaggggactggagatgggtctgaaaggctgctaagggccaggctatgcagggtctggaaggccacattgtcaagtgcagtgggaagccactagcaggcttaagaggtgccctgatttacacttttaaagagatggctcagttcagtgggctccaggagaatggactgaggtgggggaggtaggagtggaagcccagaaattaagtaagggagaatctgggcactggatgatggtggcgtggactcccctgttggcagtggggatgtaacgagtggatagatgtgggatattttgggaggtagaagcaacaagacttgctgatggccgggatcccagtgcctagaacatagtagactcaataaatatttgttgaataaatgaataaaggcgccaggctctatatacacttgtgtgcatcctctggtataaggcatgtatgtaaagatcacccaagaccctaaagggctgctctatcctctgccctaggggccaggggccagagaatgcaggtgctgctcaaggagttgcacacaaaccaggcatttctgggaagatttggctagtgagcaacgcatcctctcttctttccccaatctgcagcagcaagaaaatgacaaacaccctacctgggttgccccaggctcctaacccctttggcatctgcagcaggaaggatggaagctagacatgaaggatttcccacaggcagagaaggccagtctaccttttccaggatggcctccaggatgcatgccattcagagctctcaggtgttggtcataggaactctggggcagaagattgtcacatggatttgggtgtctttagggacaggttatgagcgcctgataggtgtatggggtaggagcgggactggaaggagaccttggcacccacagctttgggtggccctggatggtgcctagttgaacggcagtggtgaacagggctgagtgaggggtgctcctaggtcccactggctggaaggaaacctgcctaggctctgggccaaataaatcattgggaagggaagaagaacattttctcatctgtttaaagggcaacgaagcatagcagcggccagcccagcaggaggcaaggctgaggccaagcgggtgaggccagggcagctcccttcctcgacacaccatcctctcctgagcagccccaccggcttaggccttgagggctgtctgccttccaactgggccattgatggttgttattgttgacaaaaatattaattaattggtaataaaataattacttacaaaggccccttcagggacgtaacccttgctaatccatcttttatctcactggatcacagactgagatcatttataccatttcccagataaggaaacagaggcccagaaagctgaagggactttctcaaggtcatctagcatggcagggtgacagcaaggcagttgcccttgtggagtggatccccataatcccatcagaggttccagagggggccccaatggggctaaagggctgaagtgattgtccttggtccagcttagggggttcagagggatgtccctttattctgctcaagccctctgtgctcaagctctggccggtgccccttcccatgcccagtctctgccccaggctccctggaggcccctcctggggctaaggcttgctcttttcacccccgcctgagcatcagagaagtaatttatcttcaaccagctggatttgaatatggaaacgatttgtaattactccaagtcctcctgggcggcattattaccagagtgagtctggaagggcaggggctcctgggaaaggaggtggggaaaccctgatgcagagaggtgcctccagggagagccttccagaggtcagccctagtctcgcctgctcactcctgtacaaccctggggaggtcctgctctccccacacagctcccacaaccccctttgccttgctgacctccccaccttgcccctactgagcccccggctaagggacaccatctctgtcagtccctcactctgtctacctatgcttccttgggcgtacatttttgtggctgatagaagggatcaagaagtcagagggctagcgaggaacagagagacagacaaaaacgctgctgtcgatctggggccagtccctcccatcacctctcacccagctgcctcctggggaaggaggagggggggcctcaggcatccagctgcatcacatctgcaagagacctgcctaggtttctctgatctaatatgctaatgatcatgaatattcaaaaagagggaagcaagctccctgtaggagaggagggggctggagctttggacagggtcctggagatttctaaggggcttgcatccttgtgggcaacccatgtctccaccattttccccacttttgcctacctccttgaagccccagtctagcaaccccattccccctcccagtgcccatgtaaggagggggcccggatttcccactgccctggggtggctttcaacatactttgcagctggcaaggcctgcctggcctggctttcacatagtagctgagccttgaaatccagagatgtctgactgtgtttgagggtgcctagcaaaccctaggagccttgcttgccagtgctaggcccaaggcacaggcctccttgggcatccgcagcgaaagggaaggtgccggcccagccctcctccctgcctcataaggcctcataaattctcttaaggtgacaggtgagattccttcatcgtcccttattacctccttccattaaagttgataatctctcacaatcactcacaacaaatgtcaccgaggctgctggaggtgggagggacagaaggagggaaaagagggcggttctatgcctcttcctggtactgcccctgggaagaggtaggcttttctcttcttgccccatcttgagggtgccacaacttaaggggcatcagtggagaggtggggttggtatttgctgaaatgaggacttctttgcactgaaaatttggcccttcctggctagtgaaccttcaaaaagtatggtcctgaaaccatcccaccctcatcgcaaagctgaaaccatcccacccttattgcaaagctgccccctgctggtttctcctctgaccaaagccatgggattaacctacttgtgttggctgcaatggtgcgtccctggtcggcctaccttactgatggcaacatgcccaggccacaaactgcctgaccagagccctgaaccatgggcatctccctgtgtaccgcctgaaccatgagggctcaggccccacccaactgtttctgggcttagtgccaagatggggaaggggtgggtctgtacatctctgctgcttctacacaaacagatgcaacatgggggcgcccctggcacagggaaaggcacttgtgggaatagacagggactcaggaaaacatgtaacacactgcacacgtgtagcatccccgtgcctaaggacgtgcaacattgcagtttacagtatgcatcaaacatgtcacattgcagtatacatatgtggctgctacatgagttacccacagtcctcagcacacatgtggcacctgtaagcttgcatacatataacatccctgcgcacaggaacaagcaacatgcattcaggacttgggcacatgttaatacaccgtgcatgtgtgtggcacttgcatgcacctacccaggcaacatggcagtgcacacttagggcacctgtatgcatatgcaaagttcagcgcacatgactggcacctgcatgcacagggacatgcaatatgcaatgcacatgggaaggtgagcaaatgcttcagcctgcagggcccgggacaccctggcggcgcgacaagcctccggcatgggtatagctggaggggcgtcgcggatcgcctcattctgcggtccaagaagcagcgggctgggcgggggcttacccagggcttctcccgcgccggcgcctggggcccaaggcggggaggtggggggcacgatcggctcggctggcgctgttccccctttaacaggaggcggcgcgcgtcgcccccgccccttctcccgcggctcctcgcgcccggcccggcgcgcgccccctcccgggcccggcccgcgcaggcgccgcgtcccgcctcggccgtcactcggcccggcgcgcgctgcgggcagcggccggagcggccggaggaaccgggttcggcggcagcggcggcggcgctcagagaccgaagaggatgcggcaccggctctcagagcccggggctgcggccgccgcccgcaaataggaggcggcgcgcggcgcgggcggtgctcggggcgggggagcgggggagcggggggcggcgcggcaaggaggcggcggcggcggcggcggcaggagcccgcgcccggcccggcgccgcccgcccgcccgccccgcgctgctccgcggcgccttttctgcacccgccgcccgggagagcgggagcctcggccctccgcgcggctgcagctacctaccctgcgcccggcccggtccccgacttagggatggcaaacttgcgccccgtggccgcccccgccagcgccggcccccgctcctgctgctgacggcgcccaggtgagtgctcggccccagaccccgacctggcctcgcaccgagccctgccggcgcggtcccgagtttccgcaccggcccggactcggggcgctctcctaacccgtctctgctgaattctcccccagcccgaactgagttcgttcagcgttcgcccacccccatcttctggggaactcccaaacctagggccgaggcccccttaatcgctggtgaatctctaatctcggccccccccctcccccagcctggaccgaccctcttacccatctatgctaaagtctccccctccagaattctgacacagaccgtgcttgctgtctcgagtctttccctatctcggcctggatccgggcagtgtgccccccacctttattagagcccccccattaacctgcagctcaactgtgtctccccctctatttcccgtcacggtctgaatgccggaccctgctcctctcctccacttcatcactgcccggagtctttcctgtccccatccatgtctgcccatagtttctaccctcccccgcgcctgtaccccgaccatgcttcttctctatttctgcccctagcgccccctcccccatatctatctgaccggagtcccgccttccctcgccaatcttgctgcaagtcccctcccctcagcttggaattggggccgtgtcccccgtgtctgctccgcgccccctcccctccagctgagatcccgactggacccgcatccctgactcccgtgtccatctttggccggagtctatctgtccatcccccatccctatcctcccacccctggtcatagagctgggcaccagacgcaccctcccgcagccccagggccggcatga

SEQ ID NO: 3846 - DNA, 6000 bp, Homo sapiens
cattaagaaaggtcttgtatctccatacaaaataagacaatggggtccgcagaaaaagaagggaggggtggttttgtttgggggaaaaagagcattttaaaagaagttgtgtgtgtgtgtgtctatatgtgtgtgtgtatgtgtgtgtgtgtgtgtggtgaaaagtgacactgaataatagagtgtgaacccacagtgctcgctcacattcacaggtaccaattaccagaaaataccaacaaccatggagccatagggatgccatttatggataaaagctatttatgagaatgagaagactcagagtgggattattcctcttgttagtttcctctgggaagtaaattagatgtttcaggagatgtattcaatctttttagaactctacattacatttactgcaatgccaataataatgtgctgctcttggcttccaaaggaggctttctcaacttcagaatctaagccctcctctgtgcaaggtgctgtgctgggactgtgaggcacacaaaggctcagatcacactctccttgtgttgaaggaatttgcaagccagttagggtaacaacacatcacatatatagatacatgtgcaaaatgcagtctagtgtataggtgccaggtaggaatatagtcagtcaattatatataggaactgggggtgagggaggagttatatctaccttcagttagatatccatttatccattcattcattcatgaattcatgcattcattcatctattcaatacatacgcatggaacatcactatgaccttccatatcccaaacactttttttttttttgagatggaattttgccattgttgcccaggctggagtgcaatggcgtgatctcagctcactgcaacctccgcctcccaggttcaagtgattctcccgcctcagcctcccgattacaggcatgcctcaccacgcccggctaatttgtatttttagtagagacagggtttctccatgttggtcaggctggtctcgaactcctgacctcaggtaatccgcccacctcagcctcccaaagtgctgggattacaggcgtgagccaccatgcccggcatatcccaaacactttgaataaaatgatgaataaatcagaatacctaatataaagtctagtggaatggagttgaaatgatcagtttttattgacagagttggatttgcccttggatcatttcagtctctgggataatctacctaatgacaatgactcaaaacaaacatttccttggcagctggaagtttttagaacagatgtttctatgttaaaaaccactgagtattgtcaaagttcaattctagatgttgtccttattaacacacttgtcaagtaaagttaaccacctagacttctcctaacatatgcttcaaacagtaatcacaatatgataaaaattttagagctgagcaataatcagtcatcagttttactagttttactagtttttaaacacaaaattattgatttcccttagtttcctaaatataataataaatattcatatcttacaagaataccatgaaatagtactattattcccattttacggaagggaaaactcttctgtaaagagtgaaggttttacagaagcctcagagttggtctgtgaagcctcagaggtggtaagtaactgcataatggcctataatcacatgaaacaaggggcagatgggatctgggttccaaaccagatccagctgactctaactgtcatgttcttttctattcacctgtgttgtccgcttgggaaataaagattcacagtcacttttaatgtttaaaaagatgtgatagaaattcaatttttttaaagcagcccatggtgatgaatactacaggtgtctacatcccaccaagttgggcattattggtaatctcatgacagaagtactgattagcaattagaaatatccctttttaattaaaataactatttaataagtgctcttttaaagcaggggatcatcttggtggagaaccagcaactcatttacagatgagaaaactgaaacctaaggagttaggctagttactctgcagagatgcatttcagagcagagggggtggggtgtattgtagcagctcattaaaaactaagtcaaggagttcactaatctgaataaatcacttctaccactccagacattttttatggatccagtttatatttgaagtggacgggggccaggcgtggtagctcacacctgtaatcccagcactttgggagcagaggtgggtggatcacctgaggtcaggagttcaagaccagcctagccaacatggcgaaaccccatttctactaaaaatacaaaaattagctagatgtggtggtgggcacctgtaatcccagctacacaggaggctgaggcaggagaattgcttgagctcaggaggcagaggttgcagtgagccaagatcgtgtcactgcactgcagactgggcgacagaatgagactctgtctcaaaaacaaacaaacaaataaataaacaaaaaacccaccattttttctctaccctcttatgcatagtgcttgggggtctgtggactaaactgacaaaagacagattagcaaggcaaaagacaaatttttgttcacatatatcaaatgtatgtgggcattcataaccactcaaggaggcagttgttaatagaatttggagcttatattctatcttaataggagaagaagtgtatttatgagaaaacaaatgacttttaggaaagataaatgggcccttaggagtgctgggctcagaacatgataccccaaggtatctgagtactttgaactgaaggacattggaaggacaacaattctgtctacttcatcctttctgatagtacctggtgtttgccaaagtagaggtaattaattactattcagtgaataacatttggactgggggggggttcctctggggcaggtgcaagtactttgacatcttggtatccttgagtgcttaagaaagaaagcctggaacatgttaaaggctcaataagtgacttggataaagagttgaatgagagaatagataaacagcaaccacagtcatgcattgcttaatgatgggaataccttctgagaatgtgttgttaggtgatttgtcattgtgcaaatgtcatagagggcacttacataaacctaggtagcatagcctactacagacctaggctacaccgtgtagctgattgctcctagactacaaacctgtctggcatgttactgtactgaacactgtagacaactgtaatgcaatagtaagcactctgtgtatctaaacatatctatagaaaaggtgttgtaagaatatggtattataaccttataggactactgtcacacacacggtctgttgttgactgaaacatccttatgtgacacataatgatgtgtatatcctcagaactgttaagaactattagatgttgaagagatggagttttgtatgcataaagtttggtgcttgtccttgacaagtctctgttctatttggagattagaaatgaatgcttctattaagtgtaacctgcatgacatcttttataagggcaatgaaaattcaggaacagagtagaggaggagagaggactgggaaaaatagtctcttggcatgaagagggtgtgtaaggatgggagggacaagaaacaagatgtgtgggtggtggtggtagaaactgcacgtttggggagcagggtggggtatttaccaaaccaagggtctattgagtaaggtgagttgtactggccaagcggccagtttatgaaacatggaaaaaccaggcccagaaatttaggcttgatagagcaggaaatctctatcgggagccccgcccctctttttatggaagttaagtataaatataaatatatgatttctcacaaagagacaacaaacattgtaacttaatataggtaccctctaaaccaactaagatctctttagacctttgaaatacaaactgtgggcttgctttcacattcacttattcattccacaaaagattatggggcacctactagagctagcattttgttaggcaccatggggggtacaaagaacaaaaaaaacttggtccctattccccaggagtttacagctcagtggtggagacaaacgtgtacacaaatccttacaataggaggtaaaaatgtaaatacaggattgtaggggctcagttcccagagatactgcatggaggtggtgtggaaaattagaaagattttttaacactagttggttttggatcaggtttaacattgatggagtagaacatgttctctttaaggcaataaccagggttaaggctgtggaagcacatgtgctggagtaacgaacagtggtctgatttggctggagagcaagtttcctcaaggggcgccgtggggaatttagctgggtatgtgcccaataaccgaggctgggaatctggtagaaagaagtcgagctgagactttattccgcatctctgtgttttgacttaggcatctattgggtccttttaaaaaaaattctcctcctctttcctaaagagagttctagcagttgggggtggggtggggaccatttcctaaagtcaacgcgtaagttaaaggtctgcaaggcggtccaccggtgatttaaatctcgcacttcggaaaccagaaaaggaaacctgtgagaagctgggcagggggaacccgcttaacatcaacagcaacccctaaatggcatcagaccttggagagacaggttgcaggccagactcgggagccaggcgccagcacccgccagagctctgagccccgaactggtgggcaaggggtagaggaagagagggagggagggagggaggaagcgcgagagggagggaggaagaaagggagggaggcggcgtcatgtgatccgcttccctgctcctttaagcgtccacaggcggcggagcggccacaatcacagctccgggcattgggggaacccgagccggctgcgccgggggaatccgtgcgggcgccttccgtcccggtcccatcctcgccgcgctccagcacctctgaagttttgcagcgcccagaaaggaggcgaggaaggagggagtgtgtgagaggagggagcaaaaagctcaccctaaaacatttatttcaaggagaaaagaaaaagggggggcgcaaaaatggctggggcaattatagaaaacatgagcaccaagaagctgtgcattgttggtgggattctgctcgtgttccaaatcatcgcctttctggtgggaggcttgattggtaagtgcggagagctgcaaacttttccccctttctgtcttttcgggccccttccctctttgcctcttgggctacttgttacagtatcactgccttgcttctatgatctaattagtccggctattgtgcttaagaaagcagagctccatggggctccgtggggcacaatccagtctagtggctaagagaaaaggaggggaaaaagttttggcctagtttcagtatccacttgaaaggcaagaggggggcggcgggggtgggaatcttaagcatggcgacggatcgcgcgaggaagcgctgggttacaaagttgattgctcgcccccccccccccccgctttttcccgcgttcccccccttttcctctcggttcccttccaatcagctccgggagggcaacgtaatcgactttattaggaacaacagaagagtcggggaactgtgcccggcgcaaacccggagctctgttacaaggctgagatacttgcacggttgtaaatgcatttggtcgtctttgctaggggctgagggtttgcaatttggggtcccgaccttcgcgccctctgctttcccgccgcactccaccccacgctctgccgtggacaggtccgaattgtcggccgggaggttgggtgggatggggtggggtgggagggagtccttgaccagcgccgcgggaagttggagaggtcggaggggaaaagcgtatccgaaaggtg

SEQ ID NO: 3847 - DNA, 6000 bp, Homo sapiens
tgcgtatttgtttcctcttaggaaatcctagaaaagtctagttttgtgttatatgttggggtgcatcgattaaactgctagtgctgggtttctgcaaactaaagatttatgtaggtgctcaaatggatgacaaacttagatacctaggtcaccactcgaatttctaaggggtgttttagtaactgcctccaagaagctgtgatgactaggaaaatccatctatttccctttaagtagaacatattattatgaatgtttaaataacttaaagatgcctgttacttgtctttaaaaaaaattctcctcagatttcaggtaaaaacaataattgaagatgtccagcaaaacagcaagcaccaacaatatagcccaggcaaggagaactgtgcagcagttaagattagaagcctccattgaaagaataaaggtaagaagccccgactggataacatatgctttctgctcagttccccctgttccttgtggctggaccacttgtcagagaagataataccatttcattccgcttgcttccaggatttttccagaacaggctgagagtctcaaaatcctaactttcattttcctatatagcatgggcctcacttcaaaagtgtctgcattagcctctctgtttgtaaaactctggacaggatttcctaaggacctgtctcccctgaatgaacatggtcaagtccgttgatccctgtgttctaaagtgggacaggggttccaagtagacttcataaacaccctagtcattcctttggaatttaagtgttctagaattatcagtgcagctgaggcagcttcacgtaagaagtcagcagtctaggtttcctttttagggaaatgaagcttttaaatgtgtttggccctcagtgaccactttctgtgcccagagtaataatgcgagctttagttgagatcccatagagaaactggaatgcatttcttagatcacctgacttcgaagtcttttcccctaaatcccaagagagaactaggcagtgagtgccctggaatgttatgactagttcttccttgaaactgaagcagttggccaggcgcggtggctcacgcctgtaatcccagcactttgggaggccgaggcgggcagatcacctgaggttgggaattcgagaccagcctgaccaacatggagaaacccctgtctctactaaaaatacaaaattagccaggcacggtggcgtgcgcacgcctataatcccagctactcggaaggctgaggcaggagaattgcttgaatctaggaggcagaggttgcagtgaaccaagatcgcgccattgcactccagcctgggcaacaagaacaaaacttcatctcaaaaaaaaaaaaaaaagaaagaaaagaaaaaagaaactgaagcaatcacttgatccattcctctgggcctggagatagtcacctgtcttcccagcatgaggctatctgggctgtgctagacagggctcagctgccccattgctctttgcttagggcaaagagatcctattctgtaggatctccctcccagacttctgaaacagggcatgatattttccgtgtttaattcatgcgggagtaaggtactgcctcttcccatgctggtttcgtctctctttttacttccgcaagcccaatctctaacagtaaatcctgaagctccacaacttggctccagagttttggctccgagcccatcgttcagttcttaaagtgtgttctgcattccaatctgtttttttctgggtagaatttaagatacaaccttcccttgattcacatatgctttttctcacctggcccctaactttttattttgagacatttcaaacctgctgaagagttgtaacaacaaacatttataaaccgtttaccaggattcaccagtttttaacatttgaccacatgtacttgcttgcactgtctctctccctccttctgtctgtacacacatacacacaaaacatatataatgtcttctttaaacccttgaaagttatttgcagttcaggattatctaataagaatacctcacacacagtccatttttgaagaatccaggccacttattttgcagaatcaccctcacttcgggtgtgatcgttcgctgattggactccagttcaatgttggacaggaatgctagctcattagctggcggtgtgtcctcagcactcccatgaagggatacatggtgccagtttgtctgaccattgttaagttgcttggttaagaaagaccttacctgccaaattgcaccattttaaaggtaccatttcctttttatacctgacaagaatctgagagtgatgctttgagactctgattatcttgttcaaatcagtcttccattcaatagcctagcattcaaatacgctctgaaagtgtgcaagtaaaatattttctttcttgtttgtttgatttatctccatgtcaggtttcgaaggcatcagcggacctcatgtcctactgtgaggaacatgccaggagtgaccctttgctgataggaataccaacttcagaaaaccctttcaaggataaaaaaacttgcatcatcttatagtggaatagagaaacagctcctcgcctcttcccaacaacgcaaattatgagcagctccttgaagagatttaccttcagcttatttggtaaccactgctaataactaaaatgttctcagcttggaataatggactctgaagtctctattttccaagttgtcctttctcttaaaataccctttactgatttaatacagaataacaatcttattttccacttggtaactatggctttatgttgggttactgtttaaggaaagttgatctgggcctttttaaaaacataattatatactttagaaatacaagggattccgatatgtcaggacctaaatggcctaagcacctgtcaaattaaaattccaaaattcattgaaatcctaaagccttgatattatattctttataaggcgtgtgccagcctgtatagtatataagagagaggggtgtttgtgtgtatatatatatgcctttgtgtatacacttatcaaagctattttcttatgaaaacgtccctctctccataccatcagtttctcagttccagaagttatacctttattttgagctgtgtataggtagaataaaaaattcctttcatatcgttattgtacaaaaagtaaagagtatcctaaagattgtattcattgtaatcaagtaatgcaatcatctctcctctcttgaaatcttgctggacctcttaggctacaataaactgtaccaaactaaactgacagtccttcgataatatgaaacattaatttacaaggacccgttagggcttcaatgatgctgagtctggaaaaggggaggagacccttgggaggactccaggcagctgtgctcccagggctcatgttctctactggattagggataggcacctctgaaatctccaccctgatgattggaatgaaacggagtgaacatgagcccagctgagagaggagcaggaatgtgtgaaaaacagctgctctccttgtcccagctttgtgattgagccctctgtcttgctctctctgccttccctgtgtctttcttctcttaccagagcatctgtttgcagaggtaacattaccttccccagccacaggtatgtggaatacggtgaggaaaaaaaaaattaaaaaaaaaatgcaagctgtcaggatgcttaagctcttttcagacatctgcagtttcatccctaccttgttcacataccatccaagaggcacataggctacccaagagagccttggattcagtggtacactccttgggcccaagggctttagcagctggatatggggttccttgattttcctctgggcccaaatatagccctcacactcttggaatttccaggtatgggggtagccccaaaaggaggaatctcctatggccaataaggtatcttgactttatcaaagtagaagagagggtcacttcggagtcaaatcatacactaggcctttgatgctttaattcttcttcagttcattaaaagtaactactaaggaaaggttaaaaacttcccctcaaaaaggaatcaaccccaggaagtaattatttacaacgattttcccaaattttgtacaatctgtcctggaaagcaaaccccttttaaaatctaatgtctgggctttgagtattagctcatttagggtggacaaatgcattactgttttcaaactgctcacatttattcagtatttctccaagttgctatctactcagccttatgaatgcccctcgcttttctaaggccatgtgaaaatcacggcactgcccttagccttgtgtcatctgctttttcgttctgcgatatgcccagttcccaaatcaattataggtacctgtttaggagagaggaagattttacctctcaaagggtgagatttgaaatttacactaaaaagacaactttacatttaatgcttcacttaatgagacattcttttttttataagtctatttttctactcagtttcagaacactaatctgattttcactctgatttttaacgtttctttaaatatttataatgtagcttctttcaaaatattttcatgaaaaattacttttattataccattatgtgcatgttattggtagcaggcatagtttattatttagtactgaaacatgctcttttacctaacagtaaacaagtatgttttgatatatatctgttaatatgcttatagtggtaagaaatggacttgaggtcccaggagatttcattttattcaccctggtcagatacaataaaggctatgagtataaatacataacttcctaaccaggtgtagggcatgttcatgaatatcaaatcttttgatgctggacccaagagaggaaaagttgtagctaaatgttgatttacttataactagacgtctatgtgagaaaatatatgtatacatatatatgatatgcagaagtcactttttttatcaggctttattctccttacaaagccacagtttaactgtctgcaacagttggtttatgttaatgatagacaaatacccagtgtttgttactttttccaactaccactgtaatgataatctttctcacgtatatacatgcaacttcttggcttcatttccatgaagctgtttcaatatattcagtatactttgtccttaatgctgcttctgttaacagtgatctctttctttttttcattcttatatcttcattagttcatcataaatctgtccagttgaggcctcaggaccacggcatgatttcatgactccgaagtattttacagaaacattttttaaataagggaaatattttatataccagatggttcacaagtgatggctcatagctagtttttttttttcttctaaaaaatgtcaggtttttaaaatcatttaccttattaaaatgaaaagtgccatacttaacttttaaaggaaagacctgacttgctttttctctatttagactgtttttgtactttactaatctttaaactatcaggaaaaaaaccaaaactttataccaatgatttagtaattttgaggcatagggtagcttacgtagtggaggatgtgccaaatattctcttcaaatgccaccttctcaatttataactaaaatagtgttatctgactaattcctctgaattttgatgtaagatctatataggcccccaaaatgatcgtagtacatgccagtcatttctcagtgaaataaatacaataccagagtacattatgggttttattgctttcttttatggtagacctgttaatggggaaaaaatacatcaaatcaaatagaatcttatatctgtatgttaaaatagagcacttacctgaagtcagtggcctggatcatagccctggatcatttcccagtctgtcctgtgctgtgtgaccttggacaaggcgcttcatctctctgggcctctatttctccatttgtaa

SEQ ID NO: 3848 - DNA, 6000 bp, Homo sapiens
atatgatgctctctataatactctctttcattgatctatagatcagtgtcttagtttgttttgtgctactataacagtactacatctgggtaatttataaagaatataaatttatttctcaatgttttggatgttggggatgttcaaaagcaaggcgccatcatctggtctctggtgaaggccttcttgccctgtcctcacatgtcaggatgacaagaaagggaccaaactccctctgtcaagcccttttgtaagagcagctaatcccattccctcaagagatgtcctcatagcccaaccacctcttaaaggcgtcacctcttaataccatcatagtagccattaagtttcaacacgaattttggagaagacacattcaaaccatagcatgcctatctttatgccagtatcacgctgccctgcatataacaatagtaaaatatagttaaatttgtaaaaacaagtatttgaattttattaaactattgcattggaaggcattcaaaagcatacagaaatcatagaagagaaaaaaagacctgcaaatgaaaggagtaaaaattatgacttactggtttttgggatcgaggatcctgcccattcttcatgactatggctatgggaaatactggtagaaaaaaaaaaatcatagccttactggcaaaaagttccagagactggagttaaggcttgaaaagccactgcaaatttaagtaggaaatcttggtaatgagaaccagagaagaaatgagatagaactacccaaattcatgtctcacagcaaactctgcatgagtgaaggagaccacatgaagcctgaggaaaaagcaagcaaagaccagatagaaatctagtcccagcactttgggaggtcaaagtgggaggatcatgatgttaggaaatcgagaccatcctggctaacatggtgaaaccctgtctctactaaaaatacaaaaaattagccaggcgtggtggtgggcgcctgtagtcccagctacttgggaggctgaggcaggagaatggcgagaatctgggaagcggcgcttgcagtgagccaagattgcaccactgcatccaacctggatgacagagtgagactccgtctaaaaaaaaaaaaaaaaaaaaaaaaaaacaaaacacacacaaaaaccattattcaagaatacatctactttgattactttgatgctttacttaaggggatgtattcctccctgtgctgtgtgtactttgggtgggagaaagctgaagcttcagaaactttaaatgtcagggaatagccctaagctggcagagtagctgcaaataagaggagaatccctagaatcaaggaacccacacagaaggtgatctccattgctaactgaccagcaaattacacaggcatagggaaatcaatctctaggaagccaagctaaaagagcatggaaaaccatgagaatgaagcagagataccaagagcagcatgccccatgggaggcaatattggcagtttgaatccggacaagttaactgtcaaacagagcaaacaaacataaaatagataatactcagggaaaaaaacccggtagactccagagtcattacaatatattacaatgtccagttttcaattaaaaaaaacaggcatgtaaagaataggaagaaaagacagcagaaaaggcattcatagaaagggactctttgatctagcaaagacttctaggcattgcttttattttgatacagtaattacattgattgatgtttaaatgttaagtctacattgcactgtacttccatgacaatcattctgagaagacaaaagccatgggatcagtgtttctcctgttatttggcacttagaatcagtaattttgcactaaaatataaaccccatgaatataggcactgttatgtattgcttttgtatccctaatgactgaaacagtgtctgacatagattgggtgctcaatgaatggttattgaatgaatgaatgactaaaatataaactaaaattactggttggctccatgaagaaagactttcagatattttccatccatagtgaggcaatcaaaggctgatcatgtgactcattattaatcttattttgtatccatatttaagatttttaaatagatgtttaatagaagtaaatagcaaaataaattcatcatcactagctaaatattgacatacattatacattttaagctgtagggtacaattaagtaatctgtgaatttaaaacatgtccaggttagaatttcattgaaaacataataggtgaatatatactttaaattaaaaaaaaatgaatatctggtctttcagtttaatcctctactggtttattgactgttaaacaaagttgccaatttgtaacctcaaaggaaaacaaagtgaccacaattatgtactgataagtagatctctaggaaagaaatcagagattccctaagcaaagcatccattggccctatggaaattctctttaaaacagcataaagcatgttattagccttttggtcactagagggtggtgttgtttcagaccaacacaattcacactatatccgtagtaactgaccagaaagtaccaaccagaatccaactgccagcttcacactgttactccacaaaacctcacagtcacttgtttacaaggtgaatagctaaaggcagacaatataggatgaagcaaagtgctgaaagaagagaaatacccaaattatctgaaatgcaacacattttgttcattggcatagaggttagtgagaggctaacaattctttactaatacatgccccgacgcttaccatgcttatcaagtccaattggctacagcaagcacttcagtgggagaagtaaaagtttcaaagaagtcaaatatttgtgaataaaaatgagaatagtttttgatgtaactggaaaaagataagccttgcttcctttgctgtgtgaatggtgatatggtcttaaattttaaatattgaattacactagaattttactaactatagatggtataaacttgatagccactttcatccaaatgctttggataaagctttgtctaagaataacctcaaatattattttattttcaaatgatattaggctagaaaaatactatcccaaatacaggtttgagattaattcaaaataataagacaaaagtttacggaagattttagaatcaaaccatttcacccttcctagctgttgttcccattgtaaacgtgacattttagtcagtaaaacgcaaaagtgcaaaacatttttaaatgacagcaaaacacaaaatgaaattcatgttgtgattaatgcatcttattaaaatggagtttaagttgcattcttgcttttccttctttaaaaaacatataatgttatagtgatattttttcaaactctcatacagaatcaagacaacagcacataaagtatgcagagggacatatcccattcttacctcttaacagtaatttaaaagttaagaacacccatacagaacatcagctaagctaggaaaggcaaaactgattgggcttgttctgaaagttgatctgtgtcaatcaaaataatggtctttagagtgctatatgattaagtctaatttcttaaatatgaggaaaaatgaactttgcaattatttttaaaaatcttttcatctcttagacagtgtaaaaaggcaaaaagcaaaaaacacaagactttcccaagattaggggaagatgatctcaccgttaatattcatctgctgagagcagttatgggacccatgtcaggaatacatgcttcaaataagatgggacttgagaattgctgagagacttcaggaacattctttaacttcatggggcctcagttaccccacctttaagggaaataataatagcaatagtaccttggaggatttctgtgataaaatgagaaaatgcttgtgagaagtacataaaatattggcttactgaaagatgttacgaggcaagcaagtatgcctattttcattcaatgtttattatttcaaaggcaaagtttccatatagattaaggccttcataacatctgaataccttttctagttcttattgtatgaagataagaaggatggttggaggctttgtaaggaatacctttctcttctgctcccctctcactcccataggctgggagcagttgatttcactacctcagatatgcaaattgatgccaccttcctgtagccacttttgccatagctgacctttttgttgggtggtggggaggggagcgggcaggattaggcgaggggtagtagttgggatttcttggtcttggaattcaaccatccgatgtatttgtttccctgtgtctattcccttaagtctacaggcactgtctagtaattttatagttttcagcggcaccccaggggacaggacaccttggcctttttataatcactctagagtcacaaagcagaaaggaaaaaagttaacgatcagctatgcaaaggcttgtgtggattgcttaaggacaggcgattttcactttaccagagttactaaaggacttcaggagaaggatcccgtccctgtaggagcgtttgtggttgaagaagcaggaggacgagcgctcaggtgcgcctcggcagtttgcctggggtccgcaagtccagtgctacttattagctgcttgccgtccaccgacactttagcggagaactggaggagaccccagtgggctcccggtccggccaggagcagggcgtttcagaggagaccgtctggggcttcccaacccaggcgatcaggataggcaacagccaagagaggcgctcagttgctttgcaccctcctcccacctcggttctgtccacacccacgggcgccccgccccctcggccttataaaggggactcggcacctccgcgcgcctcgccaccagaggtttcccagagaggaaggcgtggctccctcccgggccagtgagccctggcgccgccgcggccgcggtcccagcagcggagtagggcggcggctgcgccccgcaccatggggggcagcccagccccagccgcggtaaacgccgacctccgccgccgcccgcgccgcgtctgccccctcccgctgcggctctctggacgccatcccctcctcacctcgaagccaacatgaaggagacccggggctacggaggggatgcccccttctgcacccgcctcaaccactcctacacaggcatgtgggcgcccgagcgttccgccgaggcgcggggcaacctcacgcgccctccagggtctggcgaggattgcggatcggtgtccgtggccttcccgatcaccatgctgctcactggtttcgtgggcaacgcactggccatgctgctcgtgtcgcgcagctaccggcgccgggagagcaagcgcaagaagtccttcctgctgtgcatcggctggctggcgctcaccgacctggtcgggcagcttctcaccaccccggtcgtcatcgtcgtgtacctgtccaagcagcgttgggagcacatcgacccgtcggggcggctctgcacctttttcgggctgaccatgactgttttcgggctctcctcgttgttcatcgccagcgccatggccgtcgagcgggcgctggccatcagggcgccgcactggtatgcgagccacatgaagacgcgtgccacccgcgctgtgctgctcggcgtgtggctggccgtgctcgccttcgccctgctgccggtgctgggcgtgggccagtacaccgtccagtggcccgggacgtggtgcttcatcagcaccgggcgagggggcaacgggactagctcttcgcataactggggcaaccttttcttcgcctctgcctttgccttcctggggctcttggcgctgacagtcaccttttcctgcaacctggccaccattaaggccctggtgtcccgctgccgggccaaggccacggcatctcagtccagtgcccagtggggccgcatcacgaccgagacggccattcagcttatgggg

SEQ ID NO: 3849 - DNA, 6000 bp, Homo sapiens
aaattattgttggctataatcacccttttgtgctatcaaatactagattttattcactttatctaacttatatttctgtacccattaaccatccccagtccccaccccactacccttcccagcctctggtaaccatcattctactatctccatgagttcaactgtttcaatttttactgccaaataagtgagaacatgtgaggtttgtgtttctgtgtctggctttttcacttaacataatgacatccagttctatccatgttgttgcaaatgagatgatctcattcttttttatggcggaacggtactccattgtttatttgtaccacattttctttactcattcattcatctgttgatagacacttaggttgcttttaaatcttggctattgtgaatagtgctgcagtaaacaagggagtgctgatacctcgatatactggtttcttttcttttgggtctatagctagcagtgggattcctgggacatactgaagctctatttttagttttttctgaggaacctccaagttggtctccatagtggtggtactaatttacattctcaccaacagtgtacaagagttcccttttctccacatcctcaccagcatttgttattgtctatcttttgcataaaagccactttaattggggagagatgatatctcattgtagttttgatttgcatttctcctgatgatcggtgatgttgaataccttttcatatacctgtttgccatttgtaagtcttcttttgaaaaatgtttactcagcttttttgcccatttttaaagcgggttattagatttttttcctatatagttgagctccttatatattctggttataaatcctttatcagatggatagtttgcaaatatttcttcccattctgtgagttgtctcttcactttgctgattatttcctttgtaatgcaggtttttatttttattttttgagacagggcttctctgttgcccatgctggagtgcagtggcatgatcacagctcactgcagccttgacctctgcaggttcccaagtagctgggaccacaggtacatgccaccatgtccagctttttgtatttttgtcaagatggggttttgactttgccatgttgcccaggctgttatacaactcctgggttcgagaaatctacctgcttcagcctcccaaagtgctgggattacaagcgtaagccaccgtgcctggccctgtgcaggtttttaacttgatgtaatcccattcgttcatttttgctttggttgcctgtgcttgtagggcattattcaaaaaatctttacccaatccaatgtcctggaaagtttctgcactgttttcttttctttttttgagagatgggtctcactctgtcaccccggctggagtgcaatggcgtgatctccgcttactgcaatctctgcctcccggattcaagtgattctcctgcctcagcttcccaagtagctgcgactacaggcatgtgccactacgcccagctaatttttgtattcttagtagagacaggatttcactatatgttggccaggctggcctgaaactcctgacctcaggtgatccacctgcctcggcctcccaaagtgctgggattacaggtgtaagccaccatgccccaactccaatgttttcttatagacgtttcatagtttgaggtcttagatttaagtctttaacccattttgatttgattttggtatacgaggagagagacatctagcttcattcttctaatacggatattcagttttcccagcaccatttattggagggactgtcctttctccaatgtatgttcttggcaccttcgtaaaaaacgagttcactgtaggtgaatgaatttgtttctgggttctctattctgttctactggtctatgttttttttttttttatgccagtaccatgctgttttggttactatagctctgttgtataatttgaggtcaggtaacatgattcctccatttttattcttttggctcagggtaactttggtgactctgggtcttttatggttctgtataagttttaggattgtttttaatacttctgtgaagaatgtcattggtattttgatagagattgcactgaatctgtagattgctttgggtattagagacattttaactatattgaatcttccaatacatgaacatggagtatcttcccattttttttgtgtcctcttcaatttcttgcatcagtgttttatggttttctttgtacagatctttaacttccttggttaattcctaagtattttatttgtagctattgtatatatttttttctccaaacttcaatttccttagccattataaaaacagaataagctcattctttgagaaagaagtcagaattgtgaaatccccctttgaagagattcagcttttagttaaagtacaaagtacagcatgtgactcttatttattcaaattctgaatttagacctagtgaactaaagaacttagggtactaattaattgaatacggtgaagatctcaggtaaatttaaattgacagtgctctgctgacaaaacataaagtgacagattacttggtggtcttttcttggcatttattgctaaaagaatcctcttggtgacaacaggccagtcttcaaccaactgaacagtgagcatctatgtctgtacagttggtaacatgtttgaaatgtcttagatcattgtggaaggtcaaagaacatctaaacaaaagtttaagagatacagatagttcataaactatatttactggtaatcacttcagatgcaactgaacttaaagttatctcaatggttttgtttttttttttttgagacggagtctcactctgtcgccaggctggagtgcagtggtgccatctcggctcactgcaacctctgcctcccaggttcaagcgaatctcctgcatcaagcctcctgggcagctgggactcctgggtggcgcgcaccaccacgcccagctaatttttgtattttttagtagagacggtttccccacgttggccaggatggtctcgatctcttgacctcgtgatctgctcgcctcagcctgctaaagtgctgggattacaggcgtgagccaccataccaggcctcaatgttttatttttcttttgtatcctaaatagaatctttaaacacacgctacaaaaaaataacacctggtgtttgagacagcactccagtctgtggtttcccaatgcagcagttaataaaaaagcaacaattttttttttttctgaaactgtttcggcctaaaacactgcttattcctcaacagtctccctcacagaagtaattattggaccatatattccctaaaatctcttccagcattaacataccacggttctaagagttcagtgatatattttacaactactgtaaaacagatcattctttgaatagatacttgtgtttaatcttacaaatctgtaaagtatgaatgacgttttagcattatacagtcaacaaagcaccaaaggtgaaataattacaataccttttgggaaaagacaatatttattgagatagctttcacattctttttacatataatgtcatttcattccgaaaaacaactctacgaagctgtataatttactttgaaataaggaaataaagcctcagtaacttaagtggcttgcccaagaataccgtaagtagcagagccagaattcaaaccctggttttaaccccaatcattacatccgtatgaattaagtaaaatgctaaacttacgatgtacatttttgcgaactgatataaactgttgagtaaataaattagattttgttgaccagtgcaattacacatgcttccctaataaaaaatttgaaatccattaatgataaaattattaacattaatggaaaacatcagcgcattcggagattgactacccgaaaagaaataggaaacatctgcccttagtgctgtgacataacacacatatttccgtggatgaaagaaagacctactggctgagcctattttgtttggttagaccctaccctctctcctaaaaactcctttggtactcaatttcaagcaggaggtaataaattacaacggaaatactaaagagcaaactttccggaaacacaaaaataagttttattttaaaaagtacaataagcattaattctccagagtaaatgggtaaccgagcagacaggtgtaatcttcagccagcaccttggcttcttcacaatctccttcagaaaaaccgattcaagagctaagaagccagtaaagtcaaacctcgagaagatcccttctccagcgaatcagcgcccctgctccccgcccgcccggctccgctgggtacgcgacagcgacctccgcgcctgctctccgcctcgggtcagcggggctgggggttgggggtggaactgaaaatgcctgttggccaaactcgggtcacagagagacacgcctgtacggggcgggggtgtgcgggtgactcacgccgggtgcacagtagctcctacgcctcacccagtatctcccctcacttccctcaacccttcccacaaactgggaggaaaactgagacctcctggtcacccgccgccgggccttttagaaactcccacaagctctgccttccctccctggtcctcttcagaccccctcttagttcttcgcggctaacggtaagctctctccttacctctccctaatcggcccctctggagaggaaaagaaaacttaagagtcgggtcgcgctagcctccagcagccgccgcgcccaccgactgctccgccccttctcctccccctcctccaggctcgcgctcggggccgggtgtggagctggaacagagggctggcaaggcgcgcatgcgcaccgagggtggagccgctgagcacagaaccggaaacttagagacaaagttcggagccccgcccccgccgcgcgccgctgagttgtctggccccgccgacccacggcccacgacccaccgacccacgaatcggcccggccgtcgcgtgcaccatgtctggctcctccagcgtcgccgctatgaagaaagtggttcaacagctccggctggaggccggactcaaccgcgtaaaagtgagcgggggcgggcggccgaggcgggaggaaggcggcggcggcgggtgggatccggcggcccagctggcgggggcgggcgggacacgcgccggccctcgcttcccctggagaggacgcgcgctcagcggcggcgatcggggagcggccagctttagagcaggcgccgcgtgggtctacgctgtgttttagggggacgattagttcgcccttccgccccaggactttccgaggcgggctggcccctgggttgaaccgtggccgacattccggtcctcctccgtctctacctcccttggcagccttctcggctggtctcaccaacagctgcgcctccgcgcgctgtccgcacccttcctttcccactttgccagcctcctgtttctcatcggacagggtattttccgacttttgattcagagcagacttttctcccatttgatctttcccaaacctacttcctttagtattaaattcttaccttcaacttctcttgtccgttgaacacatacttttaagcgaattattgcataacttaaactgtggattgaataagcatttttcgaaacgatcctggagtgtaaagttccggtcagtgccccgtacaacctcgaacaaagcgtgcatttcatacctatggcacagtttgctcatatttgaccttggggatatcgactggtccgcatgccggagaaaatgattattgtgggtaattattggtcttattttggcgtctggttagtattggccttgtcttggggtactttgggagaaaaagccttttgtctgtgttgatagaataacttgacattcaagtgctgttctaagtatttcctgatttttacagtcctaaatggattggcttctttctggtacaataggtca

SEQ ID NO: 3850 - DNA, 6000 bp, Homo sapiens
acagcttgggatttgacagaagtaaagttgagcaatgttaacctggtcctgaaattgaccatattgtatcctacttaccataaaagttgaaaacatattttcagaaaagtgtcttctcagggttaagaaaaaaaaaggccaaaggctatttagaatgccctctattttttatagcatggggcagtcttttaatgtgatttgatcagatcattctattttggtaattctgtaactcttgtaagtataaatatagtccttggttctgtctggcgtttcacatgcctgtggagataaagtatagtgttgcagataagaatgcaggctgtagaacgaggctgcctgaatagaatccagggtctcccactcctagctgtgtaaccttaggcaagggtgcttcagttttctcaaatgcataatgggtgtaataatagtatctacatcattgttgggaggataccatgagataatccatgtaaaatgcttagttcagcacctggcacagataagcactcaaatattaataatgaaaaatagtaataataaagtagagatattaagtaatgtacctgaaaacacttagttaataggtgacagagctcgctacttgtcatacttagtgattgatgtataagtcagcaaaggcatttcacagaaccttttcattttagacatggaaaaagatagtgtaagacagagattcattcattcattcaacaaatactgatcctgtagatatgagcataataggcaggttccctgctttgctggagtggaacggtctaggggtgggagatggacaataaattcttaagcaacaaaagaaaatactgggtcacaagcaactgggtagctctgatggaggtaaaccaagggctctctgagaatgagagctgtggagctatcttgaattagtcagaaaagtatctttgtggaggggacattgagactaggactgaagtaactgattaatttgttcaaaatcacagaatcatattttaagggttaagggaggccaagagataataataaatcagtcatttgttataagcttgctaaaaatttttggtaattctagctaagacagtatgataatctgtagataacgtgtactggggagatctgtggtgatggcattaggcaatgttttataggagaattggtgaaagctacatccttgtgtggtcagggttttgcaagtcaagttttggttatgtgaagattaagtagaaaactattttatttttgttgtcactgaaaaaccctgaagtgtgctgtgcttgtaagaataaactgaacatatgcaaatctttgaggcttttcctttgaacattaattttgatttttcaaagccataattgtagaagatagaatacattaagtagaatatatgcttctaattaaaagtcttgatttacttattacagaaaatgtggtagatggaaaaaattagaaagaatttttaaaaaatgactcacagttccaccattcttaactatttacattttgagattttttttcattatctttttctatatagtcaacacaaataaatttttgttatgtgtattgtatattaaagcaatgacatgggctttttcttgtattaccgcaacttcatagtgagtatgtttttcatggactgtatagtattccatcctgtgcaatctttttcaccaatttcctatgcgaagttttttttctctcattacctgtttctctcaaaagtaggatctggaaccagggtacagtgctgcttagtgggagttctggctaatcatagtttttctgtgatgtctcaactttgtcagacaaaattgctttgcagtctcagggcaatttttgctaaaaacatgtcttaaactgttttggttttgacaagggacagttgaatttgaagatttttgaagtaaaaatcattgaggtgttagtgcttgatataattaaaaattcgaccacatgtaagaaataaaactaaaatgttaagatccttcaaaataaaattaggaaaatttgagtagtatttttgtagtgtcttaattccaatgtctttgtgacatattcatctttatatttctaataaattagtcaaagataatataacttttaaattagaaatgtttctcttagatgtatagagcatgaaacaaagtaaaatatatacattatttttaattagaaaagacacataataattgtattattaaattttcccatgtggtgtcttagtctattcctgttgcaataataaaaatactttaggtaattaataaataacagaaatttattgctcactattctggaagctaggaggtccaagatcaaagcatcagtagatttggtgtctggtgagggcctggtctctgcttccagaagggggcaaatgctgtgtccttgaatggcagtgtggcaaaaagggtctcacgagttctctcaggcctcttcaataagggcactaatcccattcacttcccaaagtccccacctattaatatcactgcagttagggttaggtgtcaacatgaattttggaggcacacaaacattcagaccatagcaagtgattctcggattgtttgtcttgaatttctgtatactttcaacatggttgaaagctgtatttctctttaaatatttaaattgagtatcactagattagcaccttgtatttaactctcatatgctgctggtagaattaaaaatatgatctctcaggctgggtgtgatggctcatgcttgtaatctcagcactttgggaggccaaggtgggcggatcacctgagatcaggagttcgagaccatcctggccaacatggtgaaaccccgtctctactaaaaacacaaaaattagccgggcgtgctggcatgcgcctgtggtcccagctactcaggaggctgagacaggagaatcacttgaacccaggaggcagaggttgcagtgagccaagattgcaccactgcactccagcctgggcgacagagcaagactccatcttggaaaaaaaaaaatgctatctctcttaagtggagtttcacaagatgtatcagaaacccttaaatagatttatatcctttacttcaatttgaaatctatgggttattcctaaagaaacaattggctagatatataaagattaatgaacaagaatgcagccttgcttataaaagtgaaatacaggaagcaaccctaatgtccagtatttaggattagttaagtcaggtgtggcctattcatataatagaatattgtgaagctattaaaattatactacctgtatttttaatttggggaaattatgatatagtgtaaatatatgatattatcatgaatttatttgatatttacagttaaatattggtgactgtctgccaaagagagtaatttttattttgtcattatgaaaattgagtcttcctttcttgtaattgaaagatactggaaccatttgtctcttgagactactcccagttttttttaagcatataaaatgatatttacctcccatttgctatggccaaaaagcaatatctaattcatgtaaaagtatcattataccattaaaatataaattaaaaaaaagactgagatacatttctattttgtactacttaatagttatctggtcttcttgattctggttgtggtattagatttcagaattttcaggaactttaaaatctgggggcttttactgagcttttactgtcacagctcccagagggctgctcagtccctctgccgactgaatctctggttctccagggaataagctgcagcctcattctcagtgagggagcagatggtcattcttccaagaagctagaaccctgaccctaagcccaatcttcttccgtaggaccgttcatggctgtggccagaccactgtgaggcagaacacttggttttccccaccacgtgtagacagatgggcatccgtggggcttctgcccagcccttccttggccaagatccctcgcttttgggattcaagagatcttttactgagaggattagtgtcttccctgtctgcctgatatcccagtttggggtcttctttcagacaagtgtctgaagaacatgccctcacttaatagatatgttctcacatccacattgagttggagatctgccccaattccaaatctcagtcttgcctgtggaagcccgatcctcctccacctgccgtgttgaggaatgctggaaaatccagtgagcaggttcacattggtacagtttgggttaggagactataaggaagaagtgaacaaaaggtaaggaagggagatattgggaccaaagtctccatccctgcatcatatacctaatatgtgaatatcagagttgtttgttgaaaccaaaagatggcaaaaggaggatcaggagtggaatcagaagtcatagaaaactggtctcttggggtatctgtttggttatgtgaatggtaattcaactcctattatcttgggaagaatgtacctgaaattaccaacctgccgttgattaatgaacatatccataaataactaatgaactgggagccaggaggaggcattaacataatgtgttgtcattgtgttaccagtgcagagtggatattgcagggctcagcacatttgccctgttgatgcctccatgagaattcattcattcattcagccagccagccaacctaccaataattacccaccatgaggcagacagagcaactgaatcctagggttgtaatggtgaacaaaatagagatacaccctcctaacctgagcggcctagcctgggaaacaaacaattaaaatgtgcgctaaatgctgtggtaggaggtcaggggctatgtcctggaccaaaggacatttgcactgagacctgacacttcaggtcttcaactcccttgatgggagttagccagaacgggcttagaaacagcaattgatggcttagtgactgattttacaaatgatatttgtttcttctttaaatttctttctaggatgttcacttctccacaatgaatgagtgtcactatgacaagcacatggactttttttataataggagcaacactgatactgtcgatgactggacaggaacaaagcttgtgattgttttgtgtgttgggacgtttttctgcctgtttatttttttttctaattctctggtcatcgcggcagtgatcaaaaacagaaaatttcatttccccttctactacctgttggctaatttagctgctgccgatttcttcgctggaattgcctatgtattcctgatgtttaacacaggcccagtttcaaaaactttgactgtcaaccgctggtttctccgtcaggggcttctggacagtagcttgactgcttccctcaccaacttgctggttatcgccgtggagaggcacatgtcaatcatgaggatgcgggtccatagcaacctgaccaaaaagagggtgacactgctcattttgcttgtctgggccatcgccatttttatgggggcggtccccacactgggctggaattgcctctgcaacatctctgcctgctcttccctggcccccatttacagcaggagttaccttgttttctggacagtgtccaacctcatggccttcctcatcatggttgtggtgtacctgcggatctacgtgtacgtcaagaggaaaaccaacgtcttgtctccgcatacaagtgggtccatcagccgccggaggacacccatgaagctaatgaagacggtgatgactgtcttaggtaggtaagaggacccaagcaagccatcattcccattcattcagcaaatctttacggagcatctgtggtgtaccaggcacttactaggcagtaagaatgcagcagtgaacaagaacggacataaatcgccacccacctggagcttacactctaataaggaaagataaaataagtattctaatgggggtaaacaaattaagtgaaataagatgagtctcctgtggaaaaatcaatcagggaaggaaggaaaaataaagcagggaa

SEQ ID NO: 3851 - DNA, 6000 bp, Homo sapiens
gaatgaataaaatgaatctcaaaaatcaagcaccatgtaactacataaatgtcatgtatcttctgataagatgcaaatgttgacatagttttaaagatagtatcttgcattgggccaggtctcttgagcatcctgcttaatgcagacctacctacctcagcagccaataggtggcaatccttgccctccacccagcccaggcaaaccagttcattagtccctttatgctagtcccctagtcccatctgcaacacacccttcactctacaaccctcccctatttccaggtcatctggtgtattgttgctgctaggaagtcggccctgattatagttaggcatcaatccctccacccactccataccagcaagaatctcagtgaggtttcattgtctacgcagaacagagcttgggaaataaaggagtgagtcatcctatggcctgggcttttttcacactgaggccttaacattcattgcctttgagcctctgagatattccctagctccaaacacagcttcctcccctcctagcctgttccccacatggctccttaactggccctcccggaatcccagctccctaaagatggtgcactcctgtttctctgaagaagtgcttttctttgcttctggacttcagctcacttgtgatgtccgcctccctagctaggccagaacaatcttcacagatactaaacttgggagagaatatctgcagctccaaaaaggtccttggccaaggcaatttcccaaaccataccttatgcctaggcccttctagaaacaagctgttcagctctggtttctcagcttctcccagcagccagctccctctccccctcacctcagtcacccagcattgtgtttatagcaccatacagctgtttccatctatacttgtttataagaccccagtggattttagtcaaaccccttgccattgaaggcgcttcactggctggctccaatttccctttcttgtcttcatcttcacctcccaaccctccactccatgcacctttcactccagtccagtcacatcaaagtcccagtcttctctgagcacaccttgtactttgtgcctctacctcttttttcatgctctttcctttccccaaaatgcgtatctcccacttccactgttattctgcttctctgtggaaagtctattcatttcacaatcacccttttctttcttccgctgtagaactttgtcagtctgacagtcagatgtgtgtttgattgcctttcctaccaggggtgaatgctaggtcttaaacagctctgaatttcccagcactactgcagtatccctttaactcatttgtttttctgtgaatttcccccacctctgcctatggactggaaggtcctgaaggtagttcctcatccttcatgtcctcccactccatctgggacaagtctttacccacaattcacttaagacaaggcttaccacggatgtcagacagatcccttaactcaggaaacatgcccaaatcactaagaaacagtgatttacttttcattcaaaatgataatggttataaagggctgtgaatcaaaacacctgagctctggcttggcttctgataccaacttgcttattaatgtgaggatcacttttctgtacttcagttcactcacctccaaaatggaactagcactacataccttatttacttcatcaggaaactgttcgtaaatgtgatcataaagtgggacagccacaggaaaggcacaggaactgacgatagaggcagaggcaggaggtcacagacatcaggatgatgtatgcacagtaatggatctgtactctcaggccaggcgagggctagcagttccctctctcagcttagcagtgagaaaggggaacttccatccagtaagttagggaacaaagcagaagcagcacagaagtttgcagaggtagtagcagaaaaaggaacaagcccactttccctgtgtgtgaaacaacttagtggttcctttaacaagggctgctgttatagagttcatgcatttgtccatgctttctctctctggctacttatgtggaagtaatagaaagaaggatcaccggtttgtctgtttactaggccatataactttgtttttttgtttttgaaacagagtctcactctgtcacccaggttggagtgcagtggcgcaatctcggctcactgcaacctccacctcccgggttcaagcgattctcatgcctctatctcccaagtagctgggtgcatgccaccatgctgggctttttcttttcttttcttttcttttttttttttttttctgagacggaatcttgctctgttgcccaggctggagtgcagtgcctcccgggttcaagtgattctcctgcctcagcctcccaagtagctgggattacaggtgcctgccaccatgcctggctaatttttgtattttttttaagtagagacagggtttcaccatgttgaccaggctgtctcgaactcctgacctcagatgatctgcccattttggcctcccaaagtgttggaattacaggcgtgagccaccatgcccggcctaatttttgtatttttagtggatacgggatttcaccatgttggccaggaactcctgacctcaggtcatccacccacctcagcctcccaaagtgctgggattacaggcatgcgccactatgcccagctgactttaaatgagttacttaactctcaagtctcagttaatctagtctgtaaattggggacaatagcagttattgtgataattaactggtatgagccacttacattgttcagcagttattaattataataactataacataataattattaatagttccaggcagccccttgaacagtgtagccttcagcatggctctggcctcagtgtgagttaccagtattgtgagtacgctggagcagggctagcagtggggtataattactgaaaccttataaccaagattccaagatagtcacaatttcaaagagactctcctgtttttccttaagtcaataaggacttgccaatttgattgggaaaacatggctaccatggaaagcacctcagcagctgcatatttctccatcagcccctacagtcactgaaaggtggtgcgaaggaggaagataattagctatggctcagggtacctgataggcggggagacctagattctactcctgaccttcccagtcccaactggccactgctgcacaagtccagctctaaaatgaaagagcaaattacatccttcgacctcagtagttctccaccttggctgtacactagaatcagctggggacgtttttaaatccttgtgcctggactgcactccagaccaattaaatcagtattttttaaaaagctctccaggtaaatgccactgtacactaaaagttgagaactgtttcaggccagggtttttcaaacttcacagatgtgataactacctgtattagcttaaaatattttctctggctctggagtttgatgctaacataccatttaaaaacatacactattttaacatctcggaaagcagggtaatcttctagtcagtggcacctaagacttgaggaaacacagacaccagcaacccaggtgattcttaggattaggtaagtttagcggaaaacaggtccctagggcagtacttcccaatctttaatgtctttagagtcacctgagatcttgttaaactgcggattctgaatcagaagttctggattaaagcctgagattctgcatgtctaatgagcttccgggtgatctgatgttgctggctcttgatccacattttgggcaacaaaattctaaaacatctccacctgaggaggctccgccagcaacactcatttaagtaaactgaaataattggcatagaggagtacaacctgtggagtcctaaatgtctgtgaggcagttgctagactgcaccctcatttttcccccaggaaagggcagctgggatgagagccagaaggagagagagctgccccaacctttgagaagccagagtctggagtccaatttcccaaagaagcagagttttttgtgtgaggcagcacaaaccccacactgaataccagcaaagttcatttatgaagtgaagttgggactcagctggctttagtgggccaaagggaagcaaccccattctcttcaccatacacccttttcctgcatttattcattcaccaaaccttttgatccacaaataaactacaagttctgagaggttcaaagatgagtcagatttggtccgttgagctccagggggagaaatgcagtgagggaaaagatttgtaaaacgacgtacaatatgaagtgataagtgctaataacagaagtacaaagagaggggccaatgcaaaggaacaatgctagtagcttcctggagcagcagccactgcgggagctgaaacattcctaatcttcccaaggaagggcaccacccaaaacaaatttcctggccaggaccagcctatggtaaacgagtatgctttgataccctgaagcccttgagatcaagaccttataatctggaggctcaacataaggaatgctttctacatatgtgccagtaatctctagctctatgatgcaaataaatctaaggaagcaagagactttcaggggatgaaccccttaaaggatggaagtagtcgtgcatcctatccttccgtcagaacccagcagatcatttccctagttatagaaacatttgagtctttaccccttgccatattgacaaagctcttaattggcttgacctatcacattgctagatataaaggctacaatccctagactaagaagtaggtctccagttgaagtagggagtctcagtcaatgtaggcagagtacaagaccctacagcctgctctctcacctgccatcgtacagaccagcttttaggggagccaagttgggatactcaatcccaacttttttccttctcttccatctcacatacaggaaaccttacgagagaggattaggggcctgaaaaagctgacaagacggcaaatatgggaagtggagccagtgctgaggacaaagaactggccaagaggtccaaggagctagaaaagaagctgcaggaggatgctgataaggaagccaagactgtcaagctgctactgctgggtgagtgagatgggaagatgagccagagaaggcaggggtccttcctactttcctgaagggttggtgggttctacctcaccccatgggaaggaagggtggcaggtcatttttcctctcctctacacagtctggctaggggatcaggagatctagagctgagttaatatggggcctaaacagccaccccaaggggatccagaatgccaaggctattccagagtttttctactcttgagcgaggaatagtgcaagggccaccatgaacccacccatttccaaatctaaccaaacctaacacatccttttggcttcaaggaccctggacttgcagactgtacccaatctgcagagaactctaagccaagaaatcagaagagaacaggaccttccctcaccaacaggctcacaagtcccaccatacagtcagtgccaacagtaccagagatagtcccactggtttttgccaagtatagtggttccttcttgctttcagtaaaaactttggaagtagggggctctgaggaaggaggaatggtgtctttatgtacagcagtcccttcctggctctctattcaatagctgcctgcaaagctcctgccagatggaaggttcatcaacttgatgagctcctaagcagatcactggtctgtgctgagaaaataaaagcacctcaatttgtcagggaaattgatcacagctgtaaataaaaccaagacaagaacatttgagacacgtggcttaggaaaacaaaccactggtaccacagaagtagggtagctggagcaggtagggtctacgtagcagaagattagatgcctgagctgggtttccaagcccccat

SEQ ID NO: 3852 - DNA, 6000 bp, Homo sapiens
agaaacgtgcttccctctggtggccaccattgagcatagcgcctcagctgggacgcaggagtcactctttcagacacttgaagctgacgctaccgtgctaagtctccggcagctgaaacgcttcctcactttctgagtgccttgagttcagttagctgaacccttctctttcccccagggcctggagacctcctgacacactcggtgtgggtgggggggtctggtgggtgaggctgagcgcccagagcagctccccttcgtggggcaggatttcctgttgctcagagtgaaggaaccttgacctccctttccaggcctcaccctccctcccaccaacactggcatggagtgaaactccttgtgctcagactacagcctgtgagtcttgggctccttggattggcctcagtggctgggccctggttagaaggcccgtgtggacagaggctccagatcagcccccggcgcgggaaagcccagcctgacccccggggcttgatggagaggcagagcccggagagtggtgggggaggggcctaggaagcgccaccttcagggctgaccctgagcacttgtcttttctaagcctcagctgtcggctagcaaacatgaagctctataaaaatgtaaggctttggggaagtggtgatggggccaagaggaagtgagcaagctgattttgtgcaactctgcagacagccgtggggtgggagacagccttgggcagaagccccacctttcgcctgcctgacatccggtcttagctgcccgtggaccagctctagggctccagaggccttttccctgggctcctgctaacactgcatcttgctgtttttgtaggctggcaactggggttttttagggttttctgagaagctgcaaaggatcagatgaatcatctctgctgccagcctctcagattattaagcggaaccccaagggcaaggttgcagccttgtggttgagctgtgcccagtggcatcagacccaagtaggccccaggccagggtttgggacaggtgaggcctttcccctccagtcactcttcctgtgatttaagccaatggtttctcctagatctttgcttccctgatggagttcaggttcttttagtagaattttaaaatttatttttaattaaaaaaaaaatagaggtggggtctcagtatgttggccaggttggtcttgagctcctggcctcaagcaatcctctcacctcagcctcccaaagtgctaaggttgcaggctgagccaccacacccagcctcttctagtaaaattgaaaacagccatggcctttcttttaggtgggaaattctcctgaaccacagttaactacagttaacatatatatatatatatatatacacacacacacacacacacacacacacacatatgtgtgtgtatatatgtatatatatgtatatgtgtgtgtgtgtatatatatatgtgtgtgtatatatatgtgtgtgtgtgtatatatatatataatatatatatatatattttttgtttttaagaaaaaaattgtaccttgatccaataaaaatggtttcctttctggcccagagctcaccttggggccccagccttaccagcgacctgctcatgcagtcatctctctggtcctgccatctcttcctagctcagagcagttgccaaatctacattatacttgtgctttgtgcccatagtcttggtggctactttcttttttagatctgagaatactgatctctactgattttgatagcatggcaacatcaaacccagggactccttgtacttttgaaaggtttgtagagtttatttgctcatttacttactgagggctgccattcggaacctgggctccgaagcagaagcctgggtttgaatgctggcttcgccactgcctagcttacaactttgggcaagttatttaaccccgcagagtctcaacttgctcagcataatggtagtatctatttcattcgagagcattgaatgagtctgtgaatagaagctgcttaacactgagtagttggtatgatgcagagcacttaagagtcctcgctgatttattgtttccttatatacccaatgcctagtttatgccacctgattcactgaagtgctttcctattcattcatcaaaaatgtactgagcacccatgatctgccaggcatcatagtaggggcgagaaatgcagaaatggaaagtggtggtccctgtcctccaggaacttacaggctaagcggggaagtcatatacacacagcacagtgtggtcccagaggagaggtgaagactgggaagttttcttcaaggtcctgttgggtaacagtcttggaggaaaagtatttgttttctagatggacttgggggagaagggccctgcaaaccagacaaagagtgtgtgcacaggggagaggaagtgaaagagaatgactctgagccacgagttgctcagtctggtgcagccaatggtgtctgtgcggacccaggtgacaggagactgcagaggctgggagacccatcagaagggtataagccactctaaggagtctggacttgatcctaaggcaatgtgcagaccaaatggtttagaaggggcaggggtcatcctgggcatggagctctggcgtggttcctctggttgcctgaggcaccgagtaggaggctgcagcatctcctacttgagatgtgatgaggcacatgaccaagagtggctgtgcgccatgggctgtgggtgcagcggtaggaatgggcaaatgaagtgaccttctgccccagcctctctgtcctctttcccagattgccttttggttttcaatctacggtcaggttccaggccaaaatgttaagtgactgtgaaagtccttctcctctgttctcaaatcaccccacccagcactgatggaccttgtctattcagagaacatgaaggaagggcttctcttgttcacagaaaagaaacccccatggtatgtgcagagaattctgagggtagaattcccagatgggcagaggtggctgggctggtgaccctaagtgtgtctcctgcctttattctctctagtgggttattctttcatgtggtatcttgcctacagcatgctgtgtttggacacaaacccctttccttggtttctctgacccagctgagatggactgattccaaaagaactcacctatgtactggggtaggggagggagggttttttgcagtatttaactaaggttcaaagagtgctatatagtgagaaaggcttcttttttttttttttttttttttttggcagagtgctgcctcctagaaatttctcttggtaacttccttctctgaagcacagataaagaaaacaattacagtagaaacatttatgagggacacattggaggccgatgaagcttttcaagttccagcagtgcagggatgtgggcagaactgacattggaaaatactagaatgatggaaattcagttggagaggactgccctttttaatgtctggggagtctgctcagggagaaatgacaagtctggcggggacaagtatgggatttggtaagacttggatcaacttgggatacagggtgggggtcgggagtggaatcaatgaatgatgccagagcagatcaactaacaagaggaccctgatgagccccaggcagaggcgtctcccttatgccccactctgaagtgtttgttagtaaacaccagaacgccattgttgttactgctgaattttattttgggctgtacatatttagatgcttaaggtaaaaatgataaagccctcaagccactgtgtgggtttgggtccaagtgttccttcttgctgcctctctaacacgcctggttaaaataatccctttggatggtgctgagaagcacctgaaccaagtgggtccccaaataacaatggcgtgcaagtgtctggttcccagaagttggtgactaggtaagcagcttcagggagagggggctgattcccagacagtcgcctgttcctgcggggatggggctgaggcttggggaatgtgggcaggaggatatgccatttgattctgttgcacacgttcttttcccttctttctgtatgtctggtcattctgctattctgtcgttcctcacataggttggacattggccggctgccagcataagtgccagtgtgattttgctagggtgtgagctgagaaagagaggtggaggctaagcaggtgtgatgcttctcagaggtgctgagtttttgcccttctgagcagggaatctttgcttatccctttgaccaaggatctttgctgcaaaggctgggtatcggctgtgctcagcaaagcgtcaactcgtgcaagaacttagcaggaatagttctggctaaggttaggaggctgccaccaaagtctcttttttgttcctctgcttctcccgtttgcctccttatcatgagatctttttgctaagctggcagaaagattgcatagtcagtgcttccagctctgctcccacctgatcctgcactgtcctctggtccctgaatgaatgaactctgatacccaatcttgtctcgagccttctctatgccactcatggctcctcttctgctctttccatctttttgctgagagttctgagctctgtacttcctcttggcccatctcacttcctgaaacacccctgaagagggttgcttatcttgatggaactcaaaaagccaaaaagctgcaggcagaggcgttgaggacatctgtttggggaactaagagcagcagcactttcagattcagtccatatagagctgtcctacagcattctggaaacttgaggatgtgcggtgcataaaggggctggaagtgacccacctgtgatgagccctttctaaggagaagggtttccaagagatcaccccaccagaaaagggtaggaatgagcaagttgggaattttagactgtcactgcacatggacctctgggaagacgtctggcgagagctaggcccactggccctacagacggatcttgctggctcacctgtccctgtggaggttcccctgggaaggcaagatgcccaacaacagcactgctctgtcattggccaatgttacctacatcaccatggaaattttcattggactctgcgccatagtgggcaacgtgctggtcatctgcgtggtcaagctgaaccccagcctgcagaccaccaccttctatttcattgtctctctagccctggctgacattgctgttggggtgctggtcatgcctttggccattgttgtcagcctgggcatcacaatccacttctacagctgcctttttatgacttgcctactgcttatctttacccacgcctccatcatgtccttgctggccatcgctgtggaccgatacttgcgggtcaagcttaccgtcaggtagcctgcggcgtggggtgggcagcaattgaggcagctgggaaatgaggctacaaagcccagagcccagactttttgagtaaaaatgtatccaaattggcccttgatgttgaaagagggcaataagtgtctttttgtgatatggtctgtgagggggttagcaacaatgggctgggactcaggagctagaatcagaggaatgctccaatcctttctccactgactaggggtgggtgctcaatccctccagctgtaattactaatccttggctaaaaatgatgaaatcttgatgcatctttaattagtaaaaaatgctcttcagttttagaaatgataaaagcctactagataagacttattattttaggagaagcaggcagataaacataagaggagataaactgatggttctgttgttttgcaaatgtaggttattattttatctttgcttcctattctgtgcctacttcaatgttgagaaagggattcttggaatatatatatattccaatatatatatatttattataataaatatatgtatcctatatatattcattataataaatatatgtatcctatatatattcacta

SEQ ID NO: 3853 - DNA, 6000 bp, Homo sapiens
ttagtgtctttcatctcctgttttcttatttaacctgttatctggtttatccaattttattggtatcctttaactgcttctgcaacaatcaatgatctaattctacttttcttctttctcccatttttagtttcattatttttataaagaattcttgcacaccaatattaaaaagccagatagtaaagttgtttaaaaaatggaaatatacaactaatggaagaaaaattacagtggccaatgtgtatatgaatagaagctcaaattccctagtaattagaaaggcacaaatgaaaatgacttggtattttttgcctgtcactggaaaaaattaaagcctggcaagtgtttcatatttgggaaaatgaggctctcatttatttctgttaggagtctaaattggtctgactgtgtgataattttgtactgttacacctctcagctgtcccactttatgaactacattatagataaactgctccgggggcatatataggaatattaatttaagtacttttgccagaagcaaacaattagaaatgacctaaatatttaacaatgggtctataaagaaattcaattatatttgcatatgatataattctttccagcaattaaaaagcataaactggaggtatagactttacacttcctatgttagtaccgatgctttttaatcctgaacaatttcatttccatttatatgatcagagggttttctctttgaaatagcaaaaattataccacttatctcatgcttttgttgtgagaattaaatgtgtaaatatatgaagtgttttaaaaagtgattaatacatagaaattattcagtagtgttagttgtcattataatctaaaaacaaaaacaaaaaatcataatcttaaataacaaaagatgcagattatatttatataaatcaaaacacataccaataattactatatactttttatgaattcatattgtcttagtttgtgctgctataacaaaatacctgagactgggtgctttataaacaaaagaaatttatttctggcagttttgcaagctgagaagttcaagatcaaggtgccagcaggttcggtgtctgatgagagctgctctctgcttctccaagatggtgccttgttgctgtctcctaacatggcagaaaagcagaagaaaatgaaccccctccctcaagcccttttataagggctctaatctcatccatgagagctttgacctcatggcttaatcacctcctaaaggccccacctcttaatattaacacattggtgattattaagttttaacacatgaattttgagggaaacgttcagatcatagtacatatgtatatgaggacattaaaaaatgacctggaataccatacacgaaaatcttaacaggtactaagtgtgatgaaaggggaaaaataatggacatgagagtcctctttttttcattaaaaaaatcaaaaagcaacataaactatatacttttaatgaatccatattgtcttagtttgtgctgttataacaaaatacctgagactgggtactttataagcaatggaaattgatttctcacagccctggaagctgggaagttcaagatcaaggtgccagcaggttcagcaggactatatttaatataaagtccagggactttagttttatccattgcctctttatttctttaaataaaaaaaggcagggaagcaatatcacaacctattgacagtatatatttctgagtggtagaattataaattgagcttgcttatggtttaaaacatttagcagaaagacagaaatcaagcaacatgaaggtgaagaccttgcctctgtttactccatgtgctcctagctggctttagggtgagactcttactgtgagtagcgagattagtgaatagacgtctgttcaccatggatcacatagtccaagaggtccccaaattagaagtgataaaatgcatctcaataaatatattgctaataatagttaaaataaagacacttacacatgatttaaggaaatgaattagagatgaatcagagcagttgtgtgggcaggagatccttttcatctgatgaaaatgttcaatgtctctcactgcttccacttgcacagctaactccttccttctgtagaactgtaatatctagtgctttggagcccaaaccactgtggcatcctccagggcagatggatatctctttgaagcacccccctgaattccctcccctgtttcattaggtaccactcctactcacctcttttcacattccatgaagaagtggttgaaatcactcagaatatgatggcttgtttctctttttctttgctattacagatttatacctttttcatatatttactgtcatttctgagggattctcaggagggaaaggagattttaaaatagttcaatttattttttcagacttcaaatttattttacgtagtaggctctctccttttttttttttttttttttttttactgtggttaaaaaacacgtaacacaaactattctcttcacagatttttaagtgtacggtacagtatagctaactatgggcacaatgttgtatagcagatccctagaaatttttcattttgcataactgaaactttatacctattgaaactttattgaataggaactcctccatttctcccatttctaacctctagcaatcactattttactttctgcctctagagcacactcttttacatactttctggctatcccatccttacaaagttttaaaaacaaataagtgttggatttaacattatttctattgaattttacattttgggttctagtccatcttttagtaaattgagataatttttattcttgaatagtccatcacatgaactcctttgggacagtcagaaacatgctttgatttttagccctcgccaagacatcaccctccattgctctacgttaaacttggggtttttcttttcatattattatctcctcaaggccccttggtatcaaataatgatttagactcttgtcccaaggagtctcttctacttgttttatattccctttattagatttaatagtcaacaacagtgtccacatgtctcaaaaatgataattaattgatttgctgatgtttactcagtcaatagatggcggaacttggacagtttgtttaactcattcagtatttacagatgtctatgtgcctgacattgtgcttagtgtttggaaggctgaggcaggaggattgcttgaagcaaagagttcaagaccagcctggacaccaaaactagaccctgtgtattcaaaaaatttaaaaactagctaggcatggtagcaagagtctttagtcccagttacttaggaggctaaggtgggaggatcgcttgtgcccaggagtttgatgatgcagtgagctataatcatgccacttcactccagtctctggtctgggtaacagagctagactctgtctcaaaaacgtgtgtgtctgtgtgtgtgtgtgtgtgtgtgtgtgtgtgtgtgtggtttagagccacagctttcaaacttttttgattatgatccatagtaagaaatatagtttacctgatgaccctgtgcacacttacatattgataattaaagtcaaaatttcagaaaacaatactttttacatccgatgcacttggatatttgtctattctatttattacattaaaaacatcaggtcataatgcactgcattgactttacaagccagtaacaggggttgatcaaccattgcctaaaaagggtatataaagagggagtcatttaaaacaactaatttcagataacagagaaaattatgagagtactgttcaattccaaattcagagcttttcttacggattattcagtgccactttttttaaagcttggactcatgcctaccttttaggcatttatttacagattaacttatcagcaccttgggccccgacaagataagacacaattcaggtaaattttggtaaatattccttgagtgataggaagcaggaaaagtttgaaggagaaggaaagacaagcctaggcaaggatggctatggtggggaggtacaaagaattacaaagcattagtcatccaagcaaagtataatcagaagaccactgacagaattaacagagttcagagataatatcattatactcaatccctactaagattttggtgtttggtctcctagatcacttttttagtaccttcacagacatatggattcataaagaatatatagtaattattcatatttgttttgatttatataaacagtaatcttgtctctcagctccagaaaaccttgcctggtgcttcctgaaggctcacaacatcccagcccggcctccatcacttacttataatgtgttttggggtcttgagggcagggagctttctctttcttctctgaattcctagcatccagctgagtgcctggcacttggtaagtattcacatacacattccttgaattccctagatttcagtttccttcactgtgaaacaaagtgggctaaacgatctccaggagcccttacagtcctaagaatctatgactttgaccgatctgaagtggtccaagacactttgcttcacaggaagctcacatcttccttgtgattggcctgagattaggagttcaaacaaccaatgacctgtgcacagtttagggcctaaccctgccctggccggttagcaagagagtgttgtgataagagcagatgaaagccttatgccacagtagtgcctgtagcagagaaaggattccctcctccacctcagggcccactgctgctgctctccagcctgcagtttcctctaaggctctggattggctggaagagcaacagagggctgggaaagagcttctatatatacctcaggaggaaaggcatcccagacagttttgaagttttcaaagactggctctgctgttaagaagttgtacttaaagcggaggagctaagccacctgccaaaatgtgcaaaggacttgcagctttgccccactcatgcctggaaaggtgagaaccaagttatttttgtttaagagatgcagatatggagaatctttactcaagggaggctgcccagtggtaacagaggtattgtagtttatggctaagctgaggtgaaacaggtgcttgactgtagattgggtattatctcttctctgtaaacaatatagagattttgaaagatccaagctaggagattaatacaatatagagtatttcatacatcatttaatatccagaacatcatttccttcaaggagatgcctattctataagtccttatttagagtaaaaactgtatggttaaggatatagattccaacattaaactgtctagattagaaccctggctctactacttactatttgtgtaagtactatttgggcaatttatttaacctctatgtagctcagtttccttatctgtaaaatggagataccgagagttctctacctcacaggctggttatgaggactgaatgaattaatatatatgaagcactcagaaccatgtctggcacctagtagactgtataaatgttaatttttattaatgtacagggactgggagagggaggcaagtttgcagtgaggaagaggaaatttcccattgttctttgttctctgacctcattagatagaagtaactggatggctagacagagaaaaagcccttgggacacaggggttatttattagctagcattctttttcagacaaatgcatcaaaatctttgaggctccctggttgtccgtaggctggacaatattctggagagaatcctaggtatctaggctaagcaaatagaagaacaaatatcttacttgttagaaaacttaacccaaccatcctctctgatggagagaagtagggatgtttctccttttattgagaatggatttgattaaattgggtttgatccctcgttatttaaagtaaataaagaagatccttgcacaga

SEQ ID NO: 3854 - DNA, 6000 bp, Homo sapiens
caagaccagcccagacaacataatagagtgttttaagctgctaaatttgtggtaatcattatgcagtgacagaaaactaataaaagttcatatgccaccaacttgatattcatcctagtttttcttcagtttttggaggttttttcttttttgagttaacttttctcaaatttgtaaaatatgtacttagtttcaaagccatacagcaaggaaccttcctagaaaccttgctttctttttcattccttctgtttgttcctttcccttattggaaaccttctttttattgtttttggtttgtttttccacttttaagtataagcaaatacctatatatttattttctttccttttctcacataaaagataacataggctgggcgtggtggctcacacctgtaatcccagcactttgggaggccaaggagggtggatcatttgaagtcaggagttcaagaccagcctggccaacatggtgaaaccccgtctctactaaaaataaaaaattagcctggtggtagtggggcgcgcctgtaatcccagcgactcgggtgactgaggcaggggaatcgcttgagtctgggagacagaggttgcagtgatctgagatcgcgtcactgtactccagtctgggcaacaaagtgagaccatgtctcaaaaaaaaaaaaaagataatgtatagcaaatattcctgcaccttgcttttttccacttaacaatacgtctttgaggccactacatgttagtgtatagagattttcttcattcatttgtagcactgaatcctaacttattcctctaatcccctactgacagacatttgggcatttttaatcttctgtaattacaaatgtatcccaaatatataatgttgctttttattggcaacagaagataaatgtgtacttgaggatttttttaatagatcaaaagataaatgtacttgaggatacttttttcccccgatacaaaatatgtggaattttttccaacatcaatcaattctctgacaccaattgggtatccaacaattcaattcaattccgacactaactgcctgagatagttcagactccacagattaagggctcagtcccatacactgtccccacttcaggcaccacatgaatgtccagggcctccagtacttctgaccgacttggcttcagatcaggagttcccatggctaataatttcctataacagctcacagagctcaagaaagcactttacttactttgattactggtttatgacaaaggatgcaattcaagagaagccagatggaagagatgtgtaggacaaggcagtggtacgatctcagctcactgcaacctccacctccccggttcaagcaattcttgtgcctcagcctcccatgtagctaggactacaagtatgtgccaccatgctcggctaatatttgtatttttagtagagacacggttttgccatgttggccaggctggtcttgaactcctgacctcaagtgatccacccgccttggcctcccaaagtgcttgggttacaggagtgagccaccgcatccagcccaataatgctcatttcaatatatcagccctagtggatgacatcatgaagtggtcagacacttgaagttatagacaggatcactgcaagtatgacacagatatataaatgtagaccaagtcacctaacttgtactagtaaatctgataccatgagtggcattgttaatagtgaggtgatttccaaaatactgaacaactcttggtgaggtttgagtaaatcaaggtgcaatcttccttcaattcacatagtacttgcattcctagacaaattgctgtacaacaaaaccatgcaaaaaaacccctcatggatatatgtaaaatagtttggtttcagacttagaaaagtatagacagtttttactgtcatgtgtgaaaggaactgttctttttgtgtaggactatttcatgtactgcaagatgtctggtatcctgggccgcacccaataaatgcctggggtgtcctctaatcattgtgacaaacccaaaatgcctttcaaaatgtcgtattaagaatcactgagtgagatgctttctgttccaagtaacagaaataaacccatactgattcaataaaaatatatgtatattgattggctcttgtttctgatcagtccagaggcacatcagtttcagggaagtttccatctgaggtcaaatggttttaccattctatcagtggaggcatactgtaaacaaataaatagaaaaattgatgcatattttataaatttggacacattttatgtagaaaaacaacagagctgtgaaagagtacatagattagagaatttcttttagattggtcaggggctgagtgcagtggctcacatctgtaattccagcactttgggaggccaaggtgagaggatagcttgagcccaggagttaaagacaagcctgggcaacatagcaagatcccatcagggaagacttctctaaggaagtgacatttaaggtgagatgtgaagggcaggaagggcttggcctgtaaagagtggaggaaataacattccatgtggaacaaatagcatatttcacagttttgctttcaccagttttatgtggactgctagactgaaatgatattttacataaaatatgttttatatataaattattcaacacacatgtgaggttcagttggacaaggcctctcattatcttactttataagtctttgtggatgtctctaaaacagaatggtttattaaactaatttgggaaaggagaattagtgtgtatctttctctttttctaaaaaaatataaatacattcttgcacaaaatcagtcacgtttttcacaattgtcacctatacaatgatatacggtgaaataattactttaataataatttgtctgttttctctgcatctgattgaattctgctcatagctcaatattagctccagaagggaaaaaaatcttaagagagcaattgaaaatgcatttgttggcagcaatttccatccctgaatgcacagtaagttctgagcttatgagctcagaaaaaagaaaaatctttgtgataaataatgcatttgataatgagcagcaggagaaaaaaagtgttttctgttgaagagttcaaaatgaaatagagtaagtatgggaaaaggttgctcagtatgaaggacatctttcgcatcatggatgggtatggagccacaacagccgtaactgtttattttttattctcattctcaccatgccagtctgtggcatatattttcagacctttcgtgaataccaattttcaaaagggtttagttctcagattctatgtcactggatgatttacttacatgacctcatttaaccttttcaactctacagataggaaagtatgagtatccccattttatatatgaataagctgagaggaaggttaactcactccctcaggctcatagagcttagccgacatctgagtcagtgtaaattaaataaatatcagggatttcaaaataagtgtctaaaatactattaagaacagaaagctttaagctccttcaagtgtctggcttgccgcgtgacctagactcttaagtggagcgtcagcttccagtttttgaccaaataaagcatttatcccataggaatattaaggcacccatttacttttttctccccattatcccatttgtccccagagcaatgtgggtgtttggcaggtgccagacagtaaattactgttctaaattgtgcctcagtggcccaataatattaaggaagcatctcccacagtgtcaatctgtagacaagggaataattaatgtatttatcaaagcagatggatttcagaggaatgtgaatcctgctctaagcacagcatcagggtttgtttttttttttctggagtttagtgaactgggctttgtaacttcttacctgattattttgctgccctgtttgtccttccttctttccctttttagcagttctactctgtgcttcaacttttcatccccttattaagactgctgcatagaaaacgtaggagtctggagacaggcaggcaaagtggggagtgaggaagggaaaacaaacattctgagaaggaactgttccgtcccccgagctgacagcgcccgctctttgttttgtgatgactgctccctggccttttggttccgagggagtgcagggcagcagtgtgaagacctgtttacgtccactccccactccccggggctggcttcgggacgaattcactgtggtattaacagagcccgggacagagcctggcagaaggcagatggatgctcgtgcccgtcggctggatgaatgaaaggtgagcagcaaaggcgataccaggatcgtccacggcgggactggaggaggagaatgggactgtgcggagcctgcgggaagaatctgaaagtgtctgtgtgatggagagagacatggaaaaggcgacgtcccagcggctggaactggggcggaggaacgggaacagggaaggcctgagttaggcaccacaaaggttttcaggagaaaagtggggcgagccgagagggtaagggcgagacaaagagcagcagccgaggctgttcgtgggaagaaatgggaaagaagcagccgggagggcgggcggacggacgcgaaggaaggggcgcgggtggggaggggcgccgggagctgggcggggcggggcagtgcggggcgcggggaggcggctcggggctccgggggccggaggggcccggccgggcgtggggggggcggggcggggcgcgggcgccgcaaagttacttggcctgcgcccgcccgggtccgcgtgctggtggctggcccgcgggaggagcgaagcggggctcggtgggctgaaacccgaaacctccagtcccggagcgcggcggggaggaaggaagcggcggcggcggtggccgaggcggggaggcggctgggccggggcctgagctgccgcggcggccgctcctcggtgagcacccggcgtggggcgcgggcgcgggcccgggcggagagggcggtccggatggagccaggctaaactcattgtgcgaggctgagggctcagggcgcgggccgggaagggtccccgcccccacggcgctccctttctccccgcgcccctctcggaggtcagggctgtcctccgcccgcactgcgccttgctttggagagctggagctctttgtgggaagatgttgggggcgcgcccctcccctgcggcctggggcttctgagaggcccaccccattctgctgggtgcagcccgccccgtttctccggcgccgcccgaagcccctaaacagtccgctggatgggagggcgtaggtgcgtgcccgggactctgccgatgcgggccgcgccccctggggccaagagactccacgtcccgctcagggcaaagggtgtggggagaagcggtcacgcccctcggctggaatccgtgaggaccaggtgagcagccttctcccagccgggactcagggcgctgtctccccgagcctgggcgggcggcgggtggcgcgcccagaagtggcccggcgccgccggatgggcggctctgcccctcagatctgcgggagggagattcggctggttcttggaaaggggagaactcgaccagccctcggcgccttctgggccaagcttaacccccgtgcaacctttggacaaaggcatatgggatgagaacgtctgttgggtaagtggggtgtgtcctgtgcttcccggaggtctgctcaccagtaaccacatagctgcgcattggcatcgctttatatcacatcttggaggctatttttgcttgttattgtactttcatcccttttgcaaagtgctttcatagagcaggtcatttgatccacctcccggtgaagccgtgaggaggtgtgtggttttggagggaaagaacctcagttccttgattgtccaatggagacaccgataacctccggtgagcctgtctcagcgtccta

SEQ ID NO: 3855 - DNA, 6000 bp, Homo sapiens
cccaaagactttgggagctgcccctggtctccctcccaggtgggaaccaggcttttccatgagcaaaagaagatgggacagcatgggctggaaagtgtggcaggggaacacagagctgaattctgagttttcctgaaaaagagatataaaaacccacatgctaacagagggacttgagcagagaaagggactctccacagccatactcgggaactgtatacacaagggactgggaagtgaagcagcagaaaaatccagagcctgtgatgacatcacagctaagggcaaagacaggaagtggaaaatgtgaatggggagggaggaatggagtgagcaagaaagagaggatacaaggaaacaaaactgcagaagacagaaggatgacctgaaacattgtgccgtgattccccaaggatgtgcttcattcttctcatagcaagccaattctgagttctagaaaataccacatggcaagccgacgtagtgtttgcttaggaacccaggtcctggagttggactatctgaaatcaaaacccaactcgaccacctaatagctttgtggccataggcaagttacttaaccaatctctgtttactcaacgtaaacagagtttactcaaatgtaaaatggggaaaatatattactgatcttatgagtgtaattgtgagcattgaaagagatacttcaagtcaaagcacacagaacagagcctggcacatagtaagtgttcgataaatgttagcttttattatttgtgttgaaacagaagccatctacccagccaacatttatggaacatatgcagaactgagcatggtgataggggctgaagataaaaaaagatgaccaaggcaatagtccctgccctccaggagtgcacagaggaaacagactgtacattgattctatcagtacagggcaacagggatggctcaaaggaggcctggccaactctgcttgcagatgcggggagggaggaggaattagggatggtatgatagaatagaaggcagttgagctaggtctcaaaaataggtagaaaagtcaagaaaagtcaataccaatgtatggttctaggacttaggctagtggtcacctctgtttaggggagaaatttgctggagcaggcatgaggagtgatggaagccatagcttgattacatattggttacatgggtgtatacatttgtcaaaactcattgaattgtactcttaagatttgtgcattttattatatgtaattgtatctcaatatataagtaaaatcagtttattgaaaaatatttttttaactgagtagtacaggaaggggaaggaccttcaggccaagagaattttatgctcaagggtttgtgggtataaggcagcatgatgcccaggataatgtgccaattgctgagtttggctggaatttagggtgtataaaggatatgagaccaagtggttagagccttagatgccttacagaggagtctagacgtcatcctccaagtctaggtttgggagaagtggggagggagggaaaagaagaaaccagagaggactaatatagcagcaaagcaagctgcatgcaataccctaaacagtaatcattaatcatagtaaaagtcatttcctacaaccaggctgaatttggtcaacttctcctacccaggaggagagggtgcccaaagtttttgtcatgaaccagtggggaaatgtccccagtgattgcctatttcacttctgctggagatgatcactgcctcctcattcagctgcttcaggatacgctcttaaatctaaaagtggcatccaattgtgtcccacaaccctaagtgcttctgcagcatttaataaattccttagtctttctgcacctttgctgtacctgcaaatgataagagcttttcctgtttctttcactttcatgcctcctcctacttcttctgcttttcactggctaccatggctccatcacttctttttcaatactgtcaaccgtctctaatcagcctcttcccttgacatctgtttctgtgacaaacaatagtttcctttcactttccctgctccccaccatgcagttctatttccttagctagattataaggtccttgaattcagggaagagccttaaaagctattgttttcccaccaacttgggaatatagtaaattcataagaaatatgtatttgtagattgatgattgaatttggaggacctaaaccactgtgaggatcatctgagctaaatcagaaaaatggaggaagagttctcatttctgcttaccattatcagtagacaaagatccccatctagacttctgcctccatggaaagggtagtgctgggggctgggagctgaaggagatgaaaggcaatatggctgggatgctgtgggacatttaatcttgactacggctttgcccagactgctgaccccagatgacccagggtgcagagccgtgcccccatgctgccatccattaaagagatcacatctgctctgggagtgctgggcaaaaatgaggtcaggttttgtccaagccagtgcaattcataagtgagctcaacttgctggatttacagcaactgtcgagtcatcctgcattaccgaaactgcagatatgaaccgacctgctgggaagataatttgggataaattgtgaacttcaaaaagtttctgcctggaaactgaagaggtaaccatggcaacaaagaggcaggttgaacttggagagggccgttcatctagagtagggagctttgtgctctcagatttgctggtctgtgcactgtgcatcaatgcctttgttttttttgcaatggcgcgatctcggcttactgcaacctctacctcctgggttcaagagattctcctgcctcagcctcccaagtagctgggattacaggcacccaccaccatgcctgggtatgtttttgtatttttagtagcgactgggtttcgccatgttggccaggctggtctcgaactcctgacctcaggtgatctgcccgcctcagcctcccaaagttctgggattacaggcgtgagccactgctcctggcaccgtttattttgctttctttatcagagcaggagaaagtactagctcaggaattgggagataggatccaatttccagctatttcctgttccagtacacttaactaagagtgcctcaggtgtacttaactaagagtgcctcagtatacactgcctatactgtattccaagaggcacaaaagactcactaattttccttattgctagcaatcccagtatccctattaagtaaaactgaaagctattataacatttattgactgctgactacatgttgagcactgtcatataagcaccttatatgttgtcacggatgctgtgcggtgccacccagatcccgtcttggggactgtgatcatcatttcccagggtgttagtctctctccaggaattgctcttgacaaagggcactgccttaagattaggctgtcttcttgggcagctgtatgcaatgaatggtctttatggggttaccagggccttgtcctcttgcttcagtggacagttccaaagggccagctgagcttccgggcattccttggaaccagctggggtctctgttgaaatggcatggccttcaactcctccctctgcccagacctgctttctttactccctcttaattctgataactctccccagtaaacctcctgcatgcaagtgtctacccgagtctagttcctaggaactcaaactaagaattaatttatttagttctcacaaccaccttatgaaataagttgttctcttcgtagagacaaggaaatggaggcatagaaaggttaagcagtttgcctcgtctcccatcagtagccagttaacagtgaacgtggccttcctgcagctgggtcttcagcaggtcacctggcagagccatgacttgaaacctgaaaatctaactctagaccctgtacttttaacctcacatacagcctcttaatagcaatcccaatgcctttatgggaagatgaggtgagaggaagggcatttattacctttatgtcagagatggagacaataaggtattaactgcttaaacccaggatcgtccacaggtatagccgtgaccgggtactaacctttgtgtgtgtgtgtggtgtgtgtgtgtgtgtgtgtgtgtgtgtgtgcaatggaaaaagaatggcaaattcacatttgaattttggagccaacacttactagctgcacatctttgagcaagttatttaataactaagactttgagcaagtcttacttatgtgcctagcacatagtaggtgttcaataaactactcatccctattccacttttctgtcatctccaactgtgatcttggacaagtttatttagctttctgattctcgatttcttcatctataaaatggagatgatgatgaagagcttacttagccccgtgtccatcatggtaagagcctcgtaaagggtacttatcagtataatcagatgctgttttgcccaggtttgcaccctgtgcgcctgtcctcaggacccagcaggctcagacttgcctgcgatcaaagaaagccctgtgtgcctcccagacccaccacccccgtgcaaactctctcaacacgacaccgctgcgtgactttcctgctgttactagaggtcggcaggtacttttccctaggaaactgggtgtgcacgtctcatccccgtgccaattctcttgccgcttttccttccacacgcggcgtcctctgggcggagggtgcagctccgcgtgctccagctgccgcgaaagttgcacccggcccagtctggctgcgggccccgcctccgccttctcagcgcccagccccaccctccgattggtcagcagtgcccagccccgccccgctcctccgaggggatttaaagcagcggccgctcagtctgggcgcttgcaggctgctaaacccaaccgcagttgactagcacctgctaccgcgcctttgcttcctggcgcacgcggagcctcctggagcctgccaccatcctgcctactacgtgctgccctgcgcccgcagccatgtgccgcaccctggccgccttccccaccacctgcctggagaggtaaggggaggttgtccaactgcttgggggaagtcccaccaactcttagggagtggagcggcaggcctggggacctgggtgggcgcggggatggggcgctagaggcttgagtagagaggtagaagcgcacttgatgccacgtgctcagattccaggagcagggagaaagcaaggggaagggaagcaagggcccgcggcttgctgccatccccatcctctgacaaactgcagtcgtgctcaggtgacctgctgaagacccggctgcgggaaggccacgttgacatttccaggcagcactgagcctgcccatttcttaagcatttgtttttcattcctcagaccagagctaggggcattgcctcctctgcccctggaagacagggagatttttttttttttggtggggtgtgtgggggtgggggctcccactgttgagggtgtgtccatattccagagagctactcaacagcttccaatccttactggctgggaaggaaaaagtaaagatgaaggcaggaatcagtttcccacacagttcagaaatacttctgaaaagaatgctgagttcttttctgaatcaacaggcacgaagagagatcagtgtgactttagggaaaagcccatatatgcagcgtgtgtattacccagaaagtgtaagacctaccacagcatagctcaaacattgcttttgttgctttggggttgatgatgctgataagagaagcactcttggcctggggacagccaagagtttccaggaactcttgaggctaaagtttgggtggcaccacccagagctcttctgggacccataaacctctccacactggctgagcaaatgagagaatgctttcatgttcctgatttgtttttcagagccaaagagttcaaga

SEQ ID NO: 3856 - DNA, 6000 bp, Homo sapiens
ggatggacagatactatgtctcattgtttcttttcttaatagtttttaggaaaactttccaaacccaaataaaccaccaagtcctggttgcttttctttgtctttggataatgtctttcacaaaaacgaagcccacccttgattatcttcacttacagggtaatgcctgtgggtccaatggaggctctggctgaatactaagctgtatgtgcataacacaaagctccatgggtctgagcaaagaatgtacaggcagctgtaagctgaacaattctcggagctcacaggggattcggatacatctgagttccaacccaccaaaggggaagagttcactgaacacacaggcattcaactgcgaccccagaagagtcacaccctagtaggaaggctaaactagtcctagaataaactaatcctataataatggctacgagcctttaagacaaccatcaaaaggatcgaacatctgtaaataaccaccttccaaaacaaagtccctattctttaaaagaacacagcatctactagaaatacaaaaattagctgggtgtggtggtgcacttatggcacaatatcaaatggtctatcatatctgtgattggagtcccagaaggagaagagcaagataatgggtgaaaaatttttaatttgatatattttgataaaaattgtaaacctacagatccaagaaatccaatgaacaccaagcagcataaacacaaagaaaaccacatcaaggcacatcataatcacactgttgaaaaccagtgatagaaaacttgacaatcagccatagaaaaagagacgcattacatatccaggaaaaggataaagatctgcagatttcttttttttttttttctttttcttttcctttttttttttttttttttttttttttgagacagagtctcactcttgttgcccaggctggagtgcagtggtgtgatctcagctcactgcaacctctgcctcttgggttcaagtgattctcctgcctcagcctcccgagtagctgggattacaggcgcccacaaacacgctcagctaattttttgtattttttagtaaagatgtggtttcaccatgttggccaggctggtctcgaactcctgacctcaggtgatccacccacctcggcctcccaaagtgctgggattaccggcgtgagccactgtgcctagcctggagatttcttcagagaaagtatgcaagcacagtgaatgatatctttaaacttcttcaagatgtcaatctaaaaaaaaaatcctccaaaaacaaaggcaaaatacttatattcagaaaaacaaaaacagacaatcaccagccaatctgtattaccaaaagaaggttaaaaaatgttctacaggcagaaggaaatgatatcagatagaaatctggatcttcacaaataaatgaagagcatcagaaatgataaaagatttttcaaaatcatttctaaatgtttcaaaagaaaattgacagcttaaagtaaaataatgttctgtggggttattacctatgtaaaagggagatataacaaaaataatacaaaggatggaagagggggaatggaagcacacactataaagaatctaatagtgaagaagaagtggcatgatgttatttgaaggtagtcgacggtaaattaaagatgcattttataaaccctagaacaaagaaagaggaggaaaatgaaggtcaatacttgagataaaatggaatactaaagtatactcaggcaggaaaaaaggaatgaagaataggacaaacagaaaacaaatagcaagttggtagttttaaacccaaccacatgataattacataagaagtaaatgaactaaacattccaattaaaagtagagatggggtttcaccatgttgaccaggatagtctcgatctcttgacctcatgatcctcccgcctcgacctcccaaggttttccttctttatccctagtcatattctttgttctgaagtcttctttgtttttatctatataaccactgcggattttttactattagttgtcaagctgacagatcgtcaagctgaattttaaaagcagatccagctctgtgctgcctacgaagatggagaatcccacttttaagaacaaagatacaggccgggcgtggtgactcacgactgtaatcgcagcactttgggaggccgaggtgggaggatcacccgaggtcaggagtctgagaccagcctggacaacaagttgaaatccggtctctactaaaaaggcaaaaattagctgggtgtggtggtggacgcctgtaatcccagctgctcaggaggctgaggcaggagaatcacttgaacctgggaggcggaggttgcagtaagctgagatggcaccattgcactccagcctgggcgacaagagcgagagtctgtctcaaaaaaaaaaaaaaaaaaaaaagatacagatagatttaaaaattaaaaggatataaacacatatcatgcaaacactaatagtaagaaatctgcagtggttatatagatataaacaaagaagacttcagaacaaaggatatgactaggaataaagaagaaaaaccttgggaggccgaggagggcagctcatgaggtcaagagatcgagactatcctggccaacacggtgaaaccccatctctaccaaaaatacaaaaattagctgggcatggtggcgtacgcctgtagtcccagctactctggaggctgaggcaggagaatcgcttgaacccaggaggaggaggttgtagtgagccgagatcgcgccactgcactccagcctgggcgacagagcgagactccctcccactccgcaaaaaaaataaataaataagaagaaagaaaactgatacccagggtcctggtgccagactttacactactgcagctatcctgggtgatgtccagagatgaacggaatcagaattacctggagggtttggggaatcacaggttgctgggccccacccccagagtttctgattccttaggtctgggtggggcctgggagtctgcatctctaaaagattcccaggtgacacgctgattctactggtcttgggatccactctggaaccacttgttgactgacctcttcctcctgtttaaaactgacatgatcctatcttgaatgatagtgtaacaattagaaagataaaataaggaaatgatgcgcttgaaagtgtagacactgatttcccttgtgattgattaattgagattgggatttgggataaaaggaaacctaggattctgccttagccaaccagtcgggggcgggaggtgggcaggaaatgcaggagaaataagattttggggtgaaaacaatgagctagggtttggatttgcttgaattttcaatgcagtactcatatatctttctcacttttaaaagtctgtgaggtggacatggactggcttcgtcggtttgccaaggtttaattttgtgccttaaatgggcacttgagagctttgtaaaaaccgatgtgtttgctggccccgtgtttacgggcctttgtgatctccgcgttcgcatccaatctggcccttgggctccgagaaggtacacgtgtgtgtagggcaaggtccaaccagtggggccagggatctgagcaacaagcgcgccctgtgtcctttgtggcagggaccgcttgtggacggcggatgaggatgaggcgcccagatcttcccgaaatatttcctaatcgttcatcatgatgttatgttgttgttttcacaaagggaattaatattggcctccttttctacaaatcttgccaacactgcgtgaaatgttttcgttgcttctctattcccaaggtttcgtattattttaccaagtcggaaaatggacggcgcttaaactgttttttccctgaaaggaagagggctgtaatcactaaagtgttttaaaatctccagcgcaaaagcctgcggtgccacagggacgaggcctggagagcagtcgctcctagaaccggggcgcgaagggcacccccgcctccagcacgcgccctccgccctcccggcctcgctccccccggagtgggggcctcgccggcccctggtccccgtcactcagcaacgtcgggtcagccttcgccgggttagtggcgacgcggccgcgcgaattcgcacaggtattccgcgtttctccgccgttccccgccttggccggaggcttccgaggcgtcccttggtgcagggtgggaagcggcccgcgccccaacggcccaggcgctggagctcaccccgagcgagggcggtacctgaggcttcggggagcccgcgctgaccgcggccccgtccccagacccctccagcaaccccggccccgccccagacccctccggtgatttcccccccggccccgccccgcagatccctccagtgatctcccccccgccgcgccccccagacccccccccagtgatttaccccccggccccgccccacagacccctccagtggtcccccggccacgcgggctccgggggggcggggcgggggcgcggccctttgctgggacagggggcgtgggcccgagtagcgggcggggggcgcgggcccgggctggggcgggggcgggggcggggagcgcgggagccccggtgacgcagcagtgacgtcggtggcagcgggcgggatttcccgggcgagaccccgcggcggagtgggcgcggccagcgtggaacgggggcgagggtcgcagagtcgccggctctcccttccccagtctgggcccccacggcacagggggccgagcagaagcccccagcgtccagggccgggggagggtccgcctgcgcccccaggcccgcgtggtcgggccctgcagggcgggaggcgcggcgcggggcggggccggtgacgggacgcggagaccccgcgggcggcgggaggggcacgaggcgcgcgtttgcacccgagcccggcccgcgccccgatgcggagcgatgccgctcggcctggccgccccccgcgagcaccgcgctgcagacgaagcccgcgcgtgatcccgctccgggtaagtgggcgcccggccggagccccgggtgtccgcggggagagcccagcccggtgcagccagacgcggaagggaaactcggggtgaaagtctccggacctagggagacggctctggcgccggtgtggtcctcacgccgccagctgctgctgcacgcgacacaaagacctgtggttccctcggcctcctctcccgggacctcccgccgggccccggggaagcccgcgcgcgggtgtggacagccccctcggagcgcgtccaggggcttccggggctgggggcgcccggtccctccggcatgaggcaggcgggggctcgggggtcccctcttccatttgtaggtcacagagcgtttgctgttttcccagcggggacgtcccccgtggaaaaggacctcagtggcaggagatggcgtggctggttgggcgttttctttggggaaatgtttctggcgagtgcctgaggaagccctcctggctccccagcagcccagacgccgcctcgggagcactcggggtgacgctggagccaccgcagctgagggtggttttcctcacctccttgatggcgtctgtccccgaggctggtgctgaactgaaatgtgcttcgttcgccgcgcgcgcccggcagcaaccggggagctttgtttggcttgattttttaaattgccttggaaataacgcgaaacggcgggagggtgaagtggggaggaggacagagcgtggtggggaaagactccttaatttaagatttgcttcatttcgagtatttggggctaaggtgttaggaaacccgaaaatgttaaagtttgatcaagtaataaagtggatgatggacgccgggcctcccaccgtctccccggccccgcggctgccgcgtctctcctctacccgtcgcctcccaggactgtcaaatgctggcaccgggcccgtgcctctcagccggagcaaaaggccgcctag

SEQ ID NO: 3857 - DNA, 6000 bp, Homo sapiens
ctgaggcaggagaatcacttgaacccaggaggcggaggttgcagtgagccgagattgtgctactgcactccagcctggtgacagagcgagactccatctcaaaaaataaataaataaataatctggtgagtggatcccagtagtgctttgctggaggcagatacaggagtgggagagccccttcatgagggtttggaaatgggtcctgatgcttttttgcagtaattaggttttgatgcaaactcaaaatccttagtgaagataaaacacttgatggaattccattatccttcccaaccaagtcctcttctgatagtaaggttggcacttagggaagtgctcacatcatcagaatagcatgatatccattgtattggcacagtacttttttttttttttttttttttgagacggagtctcgctctgtcacccaggctggagtgcagtggcgcgatctcggttcactgcaagctctgcctcctgggttcacgccattctcctgcctcagcctcccgagtagctgggactacaggcacctgccacgacgcccggctaattttttgtatttttagtagagacagggtttcgctgtgctagccaggatggtcttgatctcctgaactcatgatccgcctgccttggcctcccaaagtgctgggattacaggcgtgagccactgcgcccggctggcacagcactttttttgttgtcattataagcaatgataaaataagtatctttgtgtatgtgtgtgagtatatatctttgtgcacatttatttgcgagtataccaatagtgtaaatttttaaaatagtgcatgtgctgagttataaaagtaataactataaatttataagtattgtaaaagtatcctacaaagaaactaacaagtgtatgaaaactcttgctgcctatctcttcttcaaagtggtgtattataaattttttgttttcatgttacgaatgtattgagtgaaaacttgtattcatatgttttaattagaatttattgaagtatgaatgagattattcatcatttaatatgaatcatttgtatttgacttttacgtgaacatcctgtttacatttctgcctgctttgctattggttttctggtctctttgtcaatttctcaaagtttttccattcattcaccaaccacttatcatatgccaagcactactttggacactgaagatacaggcataagcaagacaaataaaatcactgctctcatgaactgtgtctaagtgggcaattaaaacaaagatacataaaatctaatatcagtaaatataaaatgtgacagcaaaatgatgagtgctggggagacaacatggaagaatacactttccattttcagttgattgcaaaaatgtcttcacagtgtggtaccattttttttttttttttgagacagagtttcactcttgctgcccaggctggagtgcaaaggctcgatcttggctcagtgcaacctacgcctcccgggttcaagccattcccatgcctcagcctcccaagtagctgggattataggcatgagccaccaagctcggctaatttttttttttgcatttttagtagagatggggtttcaccatcttggtcaggctggtctgaaactcctgacctcaggtgatccacccgcctcggcctcccaaagtgctgggattaccagcatgagccatcccgccgggcctatttttttaagactatgcttttcagaggagttttaggttcagaggaaaatgaaagaaaggtaaagagatttcctgtatacctcttactctcatatacctcagtcttttccactaccaacaagtcccaaccagagtagtacatttgttacggttcagtgaacctccactgatgcatcattatcgcacaggggccatcattatcgcactgacgcgtcattatcacacagggttcatcattatcacacaggggccatagtatacattagggtttatcattggtgttgtgcattctatgggttataatgacaagaatccactactggaatatcatatagagtcatttcagtgccctaacaatcctctatgctctacctgttcatctcttccacccctgacaaccagtgatctttttactctctccatagttttgccttttccacaaagtcgcattgttggagtcatacagtgtgtggccttttcagattgacttctttcacttagtaatatgcacttaaggttctgccatgactcctcatggcttggtagttcatttctttttagaactcaatgatgttttgttgtctgggtataccagtcatttatttatttatttttattttgtttatagtgccttttcttcttttctgtatagaaatttttaaatttatgtgaattcatatttatcagccatttgttttatggctgctaggttttgtatcttaattagaaagccttactattttactatttatccttactatcttacttttaaaattgttgccttttttataccgtacagttcatttaaacctcaatcttttgtttttgctttggggcaccttttggaattctctcaattgacttcttactcttatttcaaataaaagattttccaaactggatggaagagatgctaacatttttattgttgttgtatagctatattgtgttaggtcctgtactattcactttcacattcataatttcattttgaaaaagtaaaaattagcctatgaaaacacacacacacatgaacacacacacatatccagataattattcccataatattgtaatacctgaaccaatgctgtccaagagtttcttaatgatgtaagggttctatatctgcagtgtccagtaaggtggtcactagctgcatgtgggtaatgagcacttgaagtgtagctagtgaaaatgaggaactagtcaggcacggtggctcacacctgtaaccccaacactttggaaggctgaggcaggtggatcacctgaggtcaggagttcgagaccagcctggccaacatggtgaaacactgtttctactaaaaaaaaaaaaaaaaaaaaaattagctgggtgtggtggcacgcacctgtaatcccagctactcgggaggctgaggcatgagaatcacttaaacccaggaggcagaggtttgcagtgagctgagattgcgccattaaactccagcctaggtgacagagggagactctgtataaaaaaaagaaaagaaaagaaaagaaaagaaataaatgaggaattaattagctacatatggctagtggctaacatattgaacagtacagttctggaccattcagtgctgaaaaaaagaaagtcttaccatcttacaacctaattcacattgaagacatgagtaaggagacttaaaatatttccttctttgttttcagatgttttgagttttatacctattaagggataattaatacacaacctggatagctgtaaagtataaaattttgatgcatttggacacatgaatatatccctaaaaccacagccataatcaaaatagtagaaatttttattctccccaaaagtttccttgtgcctttttgaaacccatttttcttcattttccctcaccccgccccatccctagtcaccactggtctgcttcttgtcaggaatgagacctcctttcccccatccacatttcagtgaagatcacgagaggagactggatatcccacaccaacctggtagtaataacaccccacttctccaccctggagtggtgtcagaagaagcctaagggagcatcgagacttctgccatcaaacagtggtgaccaggccaccctcactgcagtgtcaaatttctaccctcagcaggtggtcatgaaacagcatttccctcttccggaggagtggtgtcatcaaaagccaacgacaacccagaatcgcataacaaaatacaaagatgtccagctttcaattttaaaaaacattcatcaggccaggctcagtggctcacgcctgtagtcgcagcactttgataggccgaggtgggtggattgtttgaggccaagagtttgggaacagcctggccgacatggcgaaaccccgtctctactgggaaaaaaaaaaaattagccgagcgtggtggcacatgcttgtagtcccagctacttggtaggctgagacacgagaatcatttgagcctgggaggtagatgttgcactgagacaagatcacaccactgcactccagcctgggtgacagagtgagacgctgtattaacaacaacaacaacaaaatactcatcgtaccaagaaccaggaagacctctaactaaatggaaaaaatatatatatcaatagtggtcaagattgagatgacagagttaatagattagcttacaaagattttgaagtatccatgacaaacttgtccaacttgtggcccaggacatctttgaatatggcccaaaagcaattcgtaaactttcttaagacattatgaggttggttgttttttttgtgattcttaaaaatctcatcagctatcattagtgttagtgtattttatgtgtaattcttcttccagtgtggccagggaagccaaaaaagattggacacccctgatctatgataaaaattatttaataataataataataatatgctttaagcatattacaaactagaaggcctcaggaaataaactgaaattctcagcaaagaaatagaagttataaaaaaatggaaactttaggactgaaaaggacaacatcaaaaaggaaaactcagtggatgggctcaatggcaaaatcgataagatggaagaaaccactaagtcagtgaaatagaagacagaacaacagaaattacctaatctgaacagcggagagaaaacagactgacaaaaaggagcacggcctctgggatggagatcttttgtgggtttataacaaaagatctaacattggtgccattggagttatgaaaggataggaaaaagataaggggactaaaaaagtgcttgaagaacctttcctcagctgccaccaaggtgctcggtccatccgcgtccggcagcgccagccccacactcacccgtgccatggccttcgtctcccagctcgcctgcatctacctggccctcattccgcacgatgatgaggtgaccgtcacggagaataagatcaatgccctcattaaagcagccggtgtaaatgttgaacccttttggcctggcttgtttgcaaaggcctggccaaagtcaacatggggagcctcctctgcaatgtaggggctggtggacctggtccagcagctggctctatctgtaccagcaggagcttctgcccgcctctgctgctgctgctccagctgaggagaagaaagtggaagcaaagaaagaagaatccgagaagtctgatggtgacatgggctttggtctttttgacgaaacctcttttataatgtgttcaataaaaagctgaacttaaaaaaaaaaagtacttgaagaaataatggcttaaaaacatcacaagcatagcaaagatataaaccttcagttgaagaagctgagagaagcccaaataggataaataagcccaacgaaatgcataccaagccacttaataaacatttgaaaactgcagacaaccacaaaacaaacatcttgaaagcagtcagggaaaaatgacacattaactagaagagaaaaatgattcaaaccacagcagcgttctcatgagaaaaaccgtggatgccagaagaaagtgccacaaaatttttcctttcctgctgaaaagaaagaactgtcaatccgtaatcctctgcccagcaaacatttttcctgaggcataacggggaaatgaaaacattctcagatgaaggaaaactgagagaatttgtcaccagctgacgaactctaacagaatgattaaaaggaattttctaaataaaagggaaacgataagaaaaggaaccttggaatatcagataagaacaaaacgtggtaagcaaacatgtaagaaataca

SEQ ID NO: 3858 - DNA, 6000 bp, Homo sapiens
tctcccactctgagagagtgaaatgcaggcacaatttgcacatgcttttttctttttttaaaaaaaaaagtggtaaaatatacataacataaaattttcctttctaaccatttttaagtataccattcagtggcattgtgtacatttacaatcttgtgcaaccattactactattcgtctccagaattttttcgtcatcttaaacagaaactctctacccattaaacactaacttcttattcttccctcttctcagcttctggtaaccaccattctactttctgtctctgtgaatttgcctgttataggtacctcatatcattgggatcatataatatttgtccttttgtgtttggcttatttcccttatcgtaatgttttcaaggttcatccatgttgtagcatgtactagaatttcatttcttttaaaatatggctgtataatattccattgtatgtatatatcacattccatgtatcattcatctgttgatgggcatttgagttgtttctattttttggctattttgaataatcctattatgaacataagtatacaaatacctgtttgagtccctgctttcaattcttttgtgtatatacctaggaataggattgctagatcatatggcaattttttttgttttgagacagggtctcactctcttgcccagggtggagcgcagtgacacgatcacagctcactgcaacctcaaactcctgggctcaagggatccttctgcctcagcctcctgaatagttgggtgagactacaggtatgtgccaccacacccagctaattttttatttttttctgaagagatggggtcttactatgttgcccaggctggtcattgtactcttggcctcaagtgatcatcctgcttaagcttcccaaagcactgggattacaggaatgagctcacaataattctatgtttaactttttgtggaactaccaaattgtcttccacaggagccacaccatttcacattcccatcagcagtacgacagggttctaatttctacacatctccacacaaaaaccaacacttgtttttgtgttttgttttgttttttgatgatagcccttctagtaggtgtgaagtggtatgtcattgtggctttgatttgcatttccctaatgactaatcacagtaagtttccttccatgtgcttttaggccattagtatatttttggagtaatgtctactcagatcctttgcctatttctgaattgggttgtgtggagttttttgttgttgagttgtagggggtctttataatattgatgccttatcagatatatgacttgcaagtatttctcccatttgctgtgctgtcttttcactcttttgatagtgccctttgatgcataacagtttttaattttgataaagtccaatttagctatttttctcctgttgcctgtgcttttggtgtcatacccaagaagttttcttctaaaagttttatagttttagcttttacatataggtctccaatcaattttgagttaatttttatatatgatataatgtaaggctccaacttcattcatttgcacatggatatgcagttttcccagcatcatttgttgaaaagactgtcctttcctcctttccccattgaatggccttggcatccttgtcaaaaatcaatggaccatatatgtaagagtttatatcttggctctctattctattccattggtctacatgtttgtccttatgctgtgtattaggctgttcttgcactgctgtaaatacctgagactgggtaatttataaagaaaagcgatttaattggctcacagttctgcaggctgtacaggaagcatggtgttggcatctactcagcttctggggaggcctcagggagcttttactcatggtggaaggcaaagtgagagcaggcatctcacatggcgacaaccagatagggagagagagagagagagagtgggatggcggagttgccacacacttttagatgaccagagctcacttatcacaaaggggatggcccaggccattcatgagggatccgccccctatgaccaaaacacctaccactaggacccacctctaatattggggattatatttcaacatgagatttgggtggggacaaacatccaaactatatcatgctggtgtttttcatttgtttgttttttgtttttttttttaataaaagattgtagtgttctgccattatcctgtcattacataattctaaaattaaaaaagaaacatatatccttatcattgcctgtttctgtcaagctcaataaatgtccttaatggttcatagtattgtaaaattactgtgtcaaaaatgcttaagcatttgtcaaaggcctcttactcctcctttgcattcactgctagtaggcattgccctggactttactctgattgagtaaaagccaaagtccttttattgaaatggccaaggtcctgcatattctggccattcactgcacacccacctgactggctgcatttcccgattctcattcttgcttccttattgttcctccaacataccaatacagtactcctgcccataaccaccttgtctaaataacaaccttgacagagcaggtgcatcaccatcatggacaagcactgccattttaaagttccccttgatcaaaaaccacctaaatccaaacagcatcagcctaatggctaaggtcagcatgaccatacaccacaaatgacatctccgaccagaaacattccaaccctaagataaacccctccctgaccagagacatgcgagccccgagataacctcccctccgacagagacattccaacttggcaataaacttcttctccaaacagaaacattccacgcctgtgataagctctctcactctaaaatccttaaatactcttagtctgtaagagagtgctcctgaccgaaatcggccagaagcccctcttaggtttattcttccaaataacactgtctgactgttgagctgctattagtgtttctttcctctttctttaactcttacaaactccttgccccatctcccatagctcctggctcaacctcctgagtagctgggaccacagacatgtaccatcttgcctggctaattttctattttttgaagagttagggggcagttctcactttgttgcccaggctggtcttgaactcctgggcttaagaaatcctactgcctcggcctcccaaagtgctggggttacaggaatgagccaccacgcctgacccctatttcttcatggcatttgtcagtggctgacaccctacgtatttatctaatttttgtttgttctcccaacacgactggaatgtgagctttataagggcaatgactcagcaatgaagaatgaataggaaaaaatatagcgagttctttattcattcattcaaattactatttattgagaacttactgtagactagacacagaaaacactttcgacattaaacatatagaacttgttaaatagttatgttttgttcagtggttgtacaaatctaaaattaacaattaaaagtgtgtgtgtgttttttaaggggtgggtgggtaggaagtctcacagatggcgagtccagagcagaagccttgaaggaaaatcaaggtgtcaaaggcagagcacactgccccttagctattgctcagtgcaccagggtggagagctgctgccagcctattagatcctctctccagggaattcagaatgtggattgatccaagctagtcattccctactgatctttcaaacagaggtgaggcacgcccgtatggagagcagtttctttagcttgcacaaaccctgtgttcgtcaccagtgtccaggacaggctgcaggtgtggctggggactgtgatcttcttgtagggcctccttagggattgtgcaaccacaaaggcagaagcagctcttgcagagtgtgatgacgttcacaacctatatttgacttgtactatattctcatcactacaggagaagaggcccaatgggaaatgtgtgctgttctaaatatagcacctgcctcctatacctgctagatttaggttgaatctttcactgcctgtgaaggactttagcaggcctcagtgaccggaaagatctacccacgctttcaagcacaggaaggacggtattggaaggccttggggtccagcccagggcttaaagtcagttccattggaatgccattttcagagagttttcatcccagactctccaagggtggcaggctcttgtatcagccctgggacatgtgtcctctagcagtcaggtagttaggcaggcacctgtctatcaatttgttgtttttcttctcagttttccggtaagactaccccgagctcttcaatgttttctttgcttttgtttacattgagtgtatgacgcgggatgggcttcgtaggctggttgtgggttattacagcttcccaggaaggggagaaacccaattcttgccagcacgtggtgggcgcaggcgctcataaatacttaggaataaatgaatgtataagtgagtgcatgaatgggtgagtggacacgaagctttcaaggtgggtgcagggaggtgggggtgtgaagagccatcgaggctaccctgcggccctggcccccaggctatcccgcgacgcgcgtccacgccgaccagcggaaggtgcccagccagtgggggcggggcgagctagccgcgaggacgcgcccgcgggggggcggggctaagaggacgcgccgggagcagcggagcgacgaggacaggccgcggggaggggcggggccacggggggtgcgccgggcggaaggggcgggaagagggcgggcccggcgcgcggtagcgcgggcccctcagtgcacaatggctagagcaggcggcggagccccaaccccacccagtgcggagcgcgccgcgagccccgccgcaagctgagcgcctccgcccgccaggcgcgccggcgccgggccatgtactcggggaaccgcagcggcggccacggctactgggacggcggcggggccgcgggcgctgaggggccggcgccggcggggacactgagccccgcgcccctcttcagccccggcacctacgagcgcctggcgctgctgctgggctccattgggctgctgggcgtcggcaacaacctgctggtgctcgtcctctactacaagttccagcggctccgcactcccactcacctcctcctggtcaacatcagcctcagcgacctgctggtgtccctcttcggggtcacctttaccttcgtgtcctgcctgaggaacggctgggtgtgggacaccgtgggctgcgtgtgggacgggtttagcggcagcctcttcggtgagttggactgggagaaggcagcctcccctctgcaaacttccactccccaccccgctgcccgctccgtgcgtccgccccccagcccgccccgcaccgcttcccgctcggccccgcgccccccgccctacaccgccccgctccccgctcgcctcctcaacgctgcccgaccccagccgcatggcgggtgccttcctcttcctccgtcccctcccgccccacgctgtccaggactccattcctgtggtctctcatctgccccccacgttgaccccaaaccccggcccgcctcctttcttatttgtttttacctcctaagatcactcaacaaggcacgaaaccacggctttttacactttgaggaaagagacgagggcctgtagagtcaagagattcaagaaaaaaagtgattaactcgtgaaagttggagggagtgatgagattagattcatgtactactatttgtttcctaaaatgagagtagaaaaccaaaataacaatgtgtaaaaaaaaattctcattagtacttgtaaacctttgaatgctttctagggaatgagacagtttcattcaggtcctcagaatgcaaattggcatgtgccctgtaagctgtttttactattttccgtcttatagatgggttc

SEQ ID NO: 3859 - DNA, 6000 bp, Homo sapiens
aacaccacaaactgggtggtggcgggcaacagaaatgtattttctcacagttctggagactggaagtccaagatcaaggtaccctcagggttggtttctgatgacgcttcccttccagctcgcagccatctgcctgcttgctgtgtcctcatctggcctttcctctgtgcatgtgtggaaagaaagagactggggtaggcagggagggaagatagctagtatttcttactctttttataagtattccaatcttatgacattaggctgccactcttataaactcatttactcataattatccccttaagggccttatctccaaatatagtcacattgtgggttatggtttcaacatatgaatgggtgtagggcacaattcagttcataacaccatccaaatgaagctgtagtataggcagttagatatgtgaatctgaagtttggcatagaggtgctggccaggaatataattcagagagtcttcagaatacggttcatatttggacccattagactagatactagctaacatacgtctatgggtttatgtcacttgatttttgacaagggtgtcaatagagaaagtgtaatcctttcaacacatatatccagttcaacacaactggatagacacctgctaaagaatgaagttggaccctaccttacagcatatacaaaacgtaactcaaaatacatcaaaagcctaaatgaaagagcaaaaaattataaactcttagaagtaatcatagaagtacattttcatgaccttggaagtctcactgttttgttaaatatgacatgaaaaccaaaaacaacaacaaaaaaaatagataaattagtcttcatcaaaattagaaacttttgttcatcaaaaagacattgtcaaaagagttaaaagacaatatacagagcgagagaaaatatttgcaaatcatgtatttcataagggtataatattcagagtatataaggaacacttacaaaaagacaaacaacccaatcaaaaaataggcaaaagacttgaatagacatttttccaaagaagacaagtaagtggccaacaagcacattaaaaaatgcacaacattattagctgctgggaaacacaaatcaaaaccacaatgagatgccactttgtatccactacgatggccataaaggaaaaaaaaaagattgtaaaaagtggaaaataacaagtgctggtgattatgtggagaaactggaacacaaattgcttgtagaaatgtaaagactgtttagctgcagcagaaaagtttgctggttcaatagtaagttgttcatagaatttccataagacctagcaattccactcccaggtatacccagtagaatcagaaacggagttcaaacaaaaacttgtatgtgaatgttcatagcagctctattcacaatagccaaaaggtagaaacaactcaaatgttcatcaacaaactaacccaaatgtctgtcaacagatgaataaacaaaaggtggtagagtcatagaatggaatattattcctctttaaaagagaatgaagtactgatacacgctacaacatagatgaaccttgaaaatatcatgttaaatgaaagaaaccagacacaataacatgtatgatataagtccatttatatgtaatatccaaaataggcaaatccatacatagagaaagcagattagtggctggcagggctagggagagctggcaaatgaagactgactgctcgatggctacaggttttccatttgaggtgatgaaaaagttctgacgcttgatagaggtgatggtacagtcttgtgaaagaacttaattccactgacttgcacacttaaaatagttacaatgataaatttatatgctatctgtattttaccaaaataaaaataaattgataaatttaacttattaagaaaaacattatctcatcactgatgtatacaccaataataaaatcaatggtttttttaaaaaaagagtctatagcagcatgtatcaaaattaacagaatgagcaaatgtctcagactatctccctcactacatgatagagagacttgattcttacgctccataagcagtttggcagtataaaaactaaaataatattccagtcataaaaaagaaacaattctgtgtgtgtaatacaatgaagttataattatccaatagggaaagaaatcccaaaagcttttttccctccacttttactcccctgatatatgccatcaccctcaggctccctcctgaaggctccaggggttacaatcaatgtcttagaattataaggactttatgtcacacttcaccctttagggtctgcatatactttctcattctggaaacaccatgagccattctcactcctttgattatcaattttcttacaaagtattttaagtgctttctgctagttcaatcccattgtgatttaaatacttaataatgtgtcctttagacatgaatttgaacagaatctaacacgtctgctaccaccgacttagagatttccactatttgcagggctttaaaatcccctggctaaactcctatttttttaatgccacacgcattgaattcatgaatgttatcagtctttttaataaaatattgcccattttacaacatttccaccctgcataaatagagatgatgctgctagctcaccattagtaagtgacattttgaattttgtcgtttgtttgttgttgttgttgtttatggtatttaagataaactggatctcagactttctggtaattccagttaaaattgataagcactgatccgtttaaatgatctgatttcctcatgtggcctttgatattctagcagcttgcctatgttctgcgatacagtttgtgactgcctagttaactcagacaaaatttgaactcaagacgtttccttaactttcagtatgctatctttgtcttaatggcacagtgtttgggatagggttgcattttgaaaagtgagtttttaattgtgacaattttggtgaatctctgcgggtaagcaaacctcttcctttactgaaaacgctatttttgtactaagaatctgagtatcttgggtatagctccagtatgactaagcagcccaggggctttggataagttactaaacatttctagaagtagatcagatcaccacaaagatctctttttcctcaaaaattctactaaactattacctcatgagtgaccttgtggttcctctcagcatcatttacacattttctgcatgttatcaactgtgagtcaacaaaatttttatctttccacagatgggatatacttacacccacgggtcataatgcagttgtcagtttaacctgttgtttttcagctcacctgcggtgactctatatacagtacacccactttgactgtcatgactcagttgtacctaactctcccaatcccagttcatcttttctctctcacattcacatgatgaaaacatccacgttttgacaggtctcaactctacctccctgattggtttgtttgttgttgttttgagacagggtcttgctctgttgcccaggctggagtgcagtagcacaatcatgcctcattacagccttgatctcgtgggttgaagccatcctctagcctcagcttcccaagtagctgagactacaggcacacacagccacactcagtcattttattttatttttttgtaaagacaatctctcactatgttgcccaagctggtctcaaactcctgagctcaagtgattccccccacttcagcctcccaaagtgctaggaatacaggcatgagccaccgcccccggcttgcctccctgatttggaggaggttggaatgtattctccaggatgccttctcccatagtattaatgcttccctggcctactatatgcaggccagatgattgtctcagtattctgacacagtaagtccacaatgggacagcttccacgtgtgaattttaacaaatgcctagagttttctgagcctcatttctatacatgcacaatggaaaacctacctgtatttttaaaactgaatgcacatgtctgttcatgtctattttgtttaattgacttccagttacagggataggtaaattctactctctgggattttaagaaggctgatagttaagttcacagctgctctgttcccctaatctgggtgaatcttaactataataaattgattctcctttttaaaatacaggctagaattaatgttttgcaaagaagggccccaaaggtcttcagggacatcggaagcacactgaaattgtccagtttctgactttatgcactgcccctgctaaatcgtgctcgttttattccaactgtacaaaagcagaggatagtccagacccttctgcatgactctggcagttccaagagctctctcctgacaacactaccgaaagtttatgctgagtccttccactctgccttcatattactctagtcctgcctcttccaccccacagaacctttctagcaacctgtttcatgatgcacgtccatgaatattgattaagggactactgtgtatcagacactgggttagacactggggacccagaggtaaacaaaagataaaactatggctccatggaatttatgatctagtggagcgagacgggtagcaaacaaaagaaataagagtagtttatttgttataagattatcaccttatataaaaataattcaggaaagagagagaagggagttgtgagggttttcaatattatataacacagtcagggagggcctcagtcagaaggtgacttttcaaaaatgacctgaagaaggtgaggaagggggtgtgtggatgtcttggggagaaagcactgtaagtatagcaaactgcagctgcaagccttgtaccaagacaatgagggtgttgagcagcagactgatgtgatcatatgtcttaatgtaatcctgtgattgctttcgtaggagtgagggaaaatttcacctttgtcctctgaaatttcacagaaatcaactgacaaatggcagattcataggagaaaagacatacacatttatttgatcatagttttacataacagaggagccttcagatgagaatccaaagatacaagagaaacttcccatttttatgcttaggttcaaagccatatggacagccatgtagaaatatgattgaacatgaagggcatgatctaatactgatggactgagtgaagaagcccagcaagacccatcgtgagattctttttggcctctctgagcagtgttccttttttcttggtatgcaataagacctctctggaatggaggtcttatgatctacaatccagtaaggtaggtcagataatttatttatggctagttttaacacagaaaggtggagggaaagttagagtaacatttttaggttttatggctggctttgaggaaaaggggctctggtttctatgtgtcaccttggggaagagggattctaatttctatggctaactgcggggaagaatgaggggccacggacaagaaggcaggagaaagagaaacttttgcttctgaagccttcatggtggggtatcattttctgagccccaacacttttttgagagtacttggaaggggagcaaaggagaagcagagagatgagttagagtattagatcaaaattcagatgataaatgatggcaagatgggccagagtggcaggagcaggggtggtgagaagggataaaaaactggatatagttaacgacagcaaaaacttgcagatgattgtggaatttgagagggcacaattttaatgcctgtacagtggttcatcacatgaatgaccaccctctacctgactaaccctttattgctaaacatttaggttgcatatagatgttgttactataatatttccattttaaaaaagcagtgctaaggattttgcatgaatgtccattttccccagacagtgaacaccccccacccagtcttttattatacagtccaagttggccgt

SEQ ID NO: 3860 - DNA, 6000 bp, Homo sapiens
ctcctgtctacaagtttaccttcctcccatttctcattcctaatgacaagggaaatatccagtgttatctgaagtggtcataaaagacattttttttctttttatgtgaggaattgaaacttatggctttagattatggggcttaccatcaaggaaagggcgtagcgtggtcagaggacaaaacttcttcctgcatttctcaggaagtctttgattagtgtgtccacctaggagcaattttttttttggggggggtgctgggaaatatacttaagtgattaaatccaagtgtagacatgagagctttacctaaagccaggtctaattaccatacctgagaatcagggagtatttaaaatttgagaaataattttctatacttgaaagtcacttatgtaggtaggcctcagattataataaataacgtttattgtgctatactatgtggtaggtatgaggttaagtatttttacctatattatatcacttatttcttacaaatggagcaagggagcaagcaagcaagggaggtattattatccctattttatgtatttatgtatttatttttgatttctattcttttggtttttttgttgttttttattgatgtatcatagttgtacatgttttggggtacatgtgatatttttgatacatgtatacaatgtgtaatgatcaaatcagagtaatttggatattcatcacctcgaatatttatcttttctttgtgttgggaacattataatttttctctgctagctattttagaatatataataaattattgttccctatgatttctccattgtacaattgaatactaaaatttattatgtctatctacatatccccagttcaataactataatttctctgctgtgcaatcaaatactagaacttcttccttcgaacgctatatccctaattcaataacaagtaaactgaagctcagcatggtctaggaactttgttacgttaacacagcaagtgagtgttgcagcctggatccaaaaatcaggcctggtcgacctcaaagtccagattattgacctttctaccataatgtatggaggtaagtttgtgaatttattcaaaaatcaggcctggtcaacctcaaagtccaaattattaacctttctaccataatgtatggagctaagtttgtgaattttcatagttttaggatttgaagataaaagaggtgaaaatttggaaatggtttctggacttttgaattttggcaaacagctatgtgataagtccaccctgcagacccacaacttttggaaataactctactgtgaccttcagtagcagaagctgctcctggggtggtagaacacaaggaaaacacacactagtaaaaatttcatgtgccttctttgttctgtacatgtgtttctcttgattagtatatggtagtatcctcaaatcatagtaacaagtatactttttccagtgaattgcatgtgtatattattgtatagtataaaaggcaatatttccatttattatcatctgtgcttttcaaagaaactctgtgagtccaacagggcagataatagaagcaactgccctttctctcccccgttaaatgcaacccaatgtcacagtccgtagcatccccagatgagtgtattaaaggtgagaaattcccaaagtcaaactcagtagcatccttgaatgagtgtattaaaggtgataaatttattttatttatgttctttttaacctgtgttctcagaaacagagactactgtatttcatcctaccttagtcttgcttagcagtttctcttctcctttgaggctcttttatttttaaatcattgttcatatcttctaatttcccctttctcccattctttccatatttttaatctttttttaactttatctctgttctgctttttctgtatttcaaattgatccatagactttagaaaaatgagttgaatgctggctgtaggctgtcttatccccagcaagaaacatgttgtaaagtcttagtaccttcccactggaagatcattagtcatggctactatgtttttaaatgagaattgttttaattatgcattttaaaattattggaaaacatgagggagaggaatgaaccataagtaataaagattattgacttgaagttaagaccttactatgatctgggattattagtcttacttgtcaatcaagaactatccactttctatttgtttgtgggtatctaatatggttatatacacagaagtaatgataattgatatgaaaaggtctcctcctgttatatcaatttaggtatttttcacacattgtgtacctcattcttctcctattcaattttcactaattcctaaagggtcaggtcaatgtccttggcataacctcctccacctgttcttaatggcaattgtatcttctgccctccaatatctataacacttttttctttaaaactctttgaatgtttatcttaatactcatttgatatatattgtataccacatatgattgtttgttatatgtacaatacatgttttttcaactttttttggttctttccatttacaggaattagagaaagaactaatcagtgtgaaggagaattgtcagtaaaattacaagaaaagattgagatcataattgacctttgaggataataaaatttaaagaccaaaaggatggacttcacagaaacatgaccttaggttgtttttgcagttgtagtaactggttatatgaccaacaaaatatgaagaatgggtaaacaaattctgatagtaatgatcagtcactttgcaaatataaagttactatttactactgtattgtacaggttcaataatctttgtgtacacattttatgtatttattgtcaggctgctatataattcagtatttataatagatactatgtatagcaatctatggttagttttggtcttaaccaggaaaaatcactcttttgagttttgctgtttttaccagattatttttactggatgattgctcatattatttgattattattgcaatttgtctttctggaataggaagcaagaggcctgaattctggttcctattctatcaattgtgtgaattctggaaactcagtttacttttctgggcctcatggttttcatctgaatgatgaccaacttggataaaatggtctttatataattccataggcatttcccttcccaagggcttgagtctttttcaacaattatagagttttccggtccctcttcccagtgcctcagcaccttgctattcatgttcatctgatcagttgtttgcatgctgacttacattaccctgatgggcagtacctgtggctgtttctgctccctcacccagtccataggcttctggttgtaaaaagtgtgcatcttgagactgtggacagttagctccagaggtgacagtataatcacttcacgtagaagaggatagagagagactcatgccagtggtggtgagcaagtattagagatatgatgtgtgcctctgtgagttttggggtctaagataaattatggcactaggaagatggtcctttgtgtcagaagaactggagttgttggtgcaaaaaagtatgatgtcagcatagcagttttatttgtacctcagcaacttctaaaataatctctattaagtgttttcaggaactactttctactataggaaaatgattgaggtgagtatccatctggacacagagaaatataacactgttttctgctcaccctccacttcacatataaatacaatatgtgttaaaggactaaatttctagtgtcacagtttgtactttatagtttgaagtcaataagaaagctcatataccttcctaaaagtcacttgttaatgtttgatattaatctaattttatcataaattaaaagtataaaactacaaatttcttaaagataaaatatccgaatggattcagtcaaattaagcatgataatatcaaatatcagaataggttaccatgcaggaggtactgagtacttaaaagggtggggaatgcaatgaacataaaagctggtaccaaggggaggaggagacagtgatgaattaaaacattatcttaactaatccaagtgctggtcttcaatactttcatgtgtatagacaaagagaaactgcagagatttctcacaacctctgtgtccattttatgcatgtatcttagcagaaacactggtgaaatccctccaaaacatatttattaggcatggaaaaagccttacatgacaggtggcataggctccttatgaaatcattgcaggatgggaagccatttagggcttcataattgtgaaagattgtatagaaactgaggcacttaaatagcagtaagcatgagaaaatgtggtagataatggtggtgattctatttcttgtgaaagtccacttactctagtctgctacagttgtgggctttccgatttcacataccccagtctctatattctctcaatccacagcctacctcaactaagtccgtcccaggcacctcttactgcagtgataatccatctgttaatcatgttttcctcttatgtctactttctgtcagagaattgtgggtgcaaactgggaagggaaggaaattataagaatatgtataagtacaaatggaatatgttggaaatgaggaatagttaatatcacaggtcatttaaacacctgatgaatttcatggatagtcaggaatcttgttcttacctaatctgttaattttagatcagacattacactgaaagtattgatgatgggtttaaatcaggttgcagctcacatgttgtgataatattatgttgattttttgtttttaatatgtgaggaacagaataactgtatactatttattcatagtgacattgcaatattgattttagtacatattattatcttcataatcacaatttcctccccattttcttagttctcataattttagccacagcccagttggctggaccaatggatggagagaatcactcagtggtatctgagtttttgtttctgggactcactcattcatgggagatccagctcctcctcctagtgttttcctctgtgctctatgtggcaagcattactggaaacatcctcattgtgttttctgtgaccactgaccctcacttacactcccccatgtactttctactggccagtctctccttcattgacttaggagcctgctctgtcacttctcccaagatgatttatgacctgttcagaaagcgcaaagtcatctcctttggaggctgcatcgctcaaatcttcttcatccacgtcgttggtggtgtggagatggtgctgctcatagccatggcctttgacagatatgtggccctatgtaagcccctccactatctgaccattatgagcccaagaatgtgcctttcatttctggctgttgcctggacccttggtgtcagtcactccctgttccaactggcatttcttgttaatttagccttctgtggccctaatgtgttggacagcttctactgtgaccttcctcggcttctcagactagcctgtaccgacacctacagattgcagttcatggtcactgttaacagtgggtttatctgtgtgggtactttcttcatacttctaatctcctacgtcttcatcctgtttactgtttggaaacattcctcaggtggttcatccaaggccctttccactctttcagctcacagcacagtggtccttttgttctttggtccacccatgtttgtgtatacacggccacaccctaattcacagatggacaagtttctggctatttttgatgcagttctcactccttttctgaatccagttgtctatacattcaggaataaggagatgaaggcagcaataaagagagtatgcaaacagctagtgatttacaagaggatctcataaatgatataataagcccttctcattaaacatgatatggctttatgtttctttctttgatatt

SEQ ID NO: 3861 - DNA, 6000 bp, Homo sapiens
attacccagttcttttcattaccaaggttaagatgagatttgagcaaattccgggcttcccttttcagttccttcttgcttttctcaggctgtgagtagtgaagtgcatggatactcaagcaagagtgggtatacacagagaagatgtcttgggcaggctggccttggctgatggtaaaaccaaatacctgcacctggccatagaggcaagtcacacgacagatcccactaaaagtaaaaccctagcagggagagaaaacagaaaaaacattatagatcatgtcactaatgactgaaacattctaaaatctttttttttttttttttgagatggagttttgctcttgttgcccaggctggagtacaatggcacaatctcggctcaccgcaacctccacctcccaggttcaagcaattctcctgcctcaccctccctagtagctgggattacaggtaagtgtcaccacgcccggctaattttgtacttttaataaagacagggtttctccatgttggtcaggctggtcttgaactcccgacctcaggtgatccatccacctcggcctcccaaagtgctgggattacaggcgtgcgccaccgcacctggccaaattctaaaatcttaacttgctattcacacatcaaaaggcaggtaaggccaggcacagtggctcatgcttgtgatcccaacactttgggaagctgagacaggaggatcacttgagcccagaagttcaagatcagcctaggcaacagagtgagacttctccttacaaaacatttaaaaattagcagggtgcagtggcatgcctctgtggtcctagctacttgggaggctgaggtgggtagactgcttgagtctcggaggtagaggctgctgtgaaccgtaattacaccactccactccatcagtaataagtattgggccaggcacggtggctcacgccagtaatcccagaactctgggagaaggaggtggggggatcacttgagtgaggccaggagtttgagaccagcctggataacatggcaaacccccctgcaccccacccccgccaccaccatctctactaaaattacaaaaattagctgggcatgtgcctgtaatcccagctactccagaggctgaggcatgagaatcgcttgaatccagaggcaaaggctgcagtgagctgagatcatgccagtacactgcagcctgggcgacagtgatactgtcccaaaaataaataaataaataaaaattaaataaaattaaaaaatttaaaaggctgcagccataaaaagggatgagatcatgtcctttgcagggacttggatggagctggaagccgttatcttcagcaaactaattcaggtacagaaaatcaaatatcggccgggtgtggtggctcacgcctgtaatcccagcactttgggaggccgaggcgggtggatcacaaggtcaggagatcaagaccatccaggctaacacggtgaaaccccgtctctactaaaaaaaatacaaaaaacttagccaggtgtggtggcgggcacctgtagtcccaactactcgggaggctgaggcaggagaatggcgtgaacccgggaggcggagcttgcagtgagcccagattgcgccactgcactccagcctgggcaacagagcgagactccatctcaaaaaaaaagaaagaaaatcaaaatatggtatgttctcacttatcagtgggatttgaaccatgagaacacatggatacatggtgggtaacaacatacactggagcctgtgggggtctggggaagggcgtcaggaagaatggatgctgggcttaatacataggtgatgtgttgatctgtgcagcaaaccaccaaggcacccatttaactacgtaataaatctgcacaccctgcgtatgtaccctggaacttaaaagtgctgggattacaggcgtgagccaccacacccggccgatatttgattttctgtacctgaattagtttgctgaagataacggcttccagctccatccaagtccctgcaaaggacatgatctcatccctttttatggctgcagccttttaaattttttaattttatttaatttttatttatttatttatttttgggacagtatcagcttaccacaacctccacctcccaggttaaagcaattctcctgcctctgcctccagagtagctgggattacaggcgtgtgccaccacatctcaaactcctgacctcaggtgatccgcccacctaggcctccaaaagtgctgggattacaggcgtgagccactagacagggtttcgccatattggccaggctggtctcgaactcgctacctcaggtgatccacccacctcagcctccaaaagtgctgggattacaggcgtgagccactgtgcccagctctctcttttccttttcctttctttcttttcccctccctccttcctttcttcctttctttcgagacggagtctcactctgtcgcccaggctggagtgcaatggcgtgatcttggctcactgcaacctccagctcccgggttcaagcaagtctcctgccttagcctcctgagtagctgggattacaggcgtgtgctaccatgcccagctaatttttgtatttttagtagagatgaggtttcaccatgttggtcaggctggtctcaaactcctgacctcagatgatctgccagcttcggcttcccaaagtgccgggactacaggcctgagccaccgcgcctggcccatactttatatttttaaactaagatcataccccatggcagctacagagaaagcatggtgaccgtgaactcggctctgtgctcctggttcagacagactctaccactctgtccttttaaagacccacagcttgccaagtctcttccagaacttcctgggttttgccttccctcctgcattagacagggaatctccaggaatggcatccacgttaagaatcaggctgcctgagttcgactcctagctctccctctactgtgtaagttacccaacctcagtctcctcgtctgtaaacacttagagagagggacaactactccgtaagagagctggatgtttaaatgggttcaaagcctaaaacacttttggaacccttaaatcctggaatttctgagctctcagtaattgcaaccttttttttttttaactattaaaatccctttcagagttccaggtgcggtggttcacacctgtaatcccagcactttgagaggccgaggcgggtggatcacaaggtcaggagatcgagactatcctggctaacatggcgaaaccccgtttctactaaaaatacaaaaaatatagccgggcgaggtggcacgcgcctgtagtcccaactactccggaggctgaggcaggggaatcgcttcaacccgggatgcggaggttgcagtgagccgagattgtgccactgcactccagcctgggggacagagtgagactctgtctcaaaaagaaaaagaaagaaagaaaacaaaacaaaataaagtccctttagctcgtaaggcctagggaccccttagcagggtacctgttaccctgctgctcaggggagcctagttgccaccaaccatcaagaggatggacttgaatccgactggcagccagagaacaggcccgggggaccacggtcctctcctaccctgcagctctcccggggctgcctctccagccctccctgccctcggggactactaccggcgccccccacctacctgctcgaccggcagcagcagcaacgcgcggccggggcccacgggccgcaccggtgggatgaggagaggccggtggcaactcgaggcggattcgagttcgggttcggactcgggttcggaggccggggtcgggctagggatcgggctgggggtcgcggtgttgggtctccgggccgccgccgcgcgcgacacctggcgggctccctccctccagtccacgccggacgcctgggcttgcagtaaccgccaccgtaggcgccgccgaccgcaccagcgcaggctcccgagccggcggcggggccggcggctgaggatgagctggggccgggccttgcggacccgcagccaagtggaacggcaggaaccccgctttagcagcagtcccgagtccgccatgctgggtcctcagggcctaccgcgcgagaatctcgcgagatcccgtcggtccgccccgctgccctcccagctgccgaaaagaggggcctccgagccgccggcgccctctgccggcaacctccggaagcacactaggaggttccagccgatctggtcgaggggctccacggaggactccatttacgttacgcaaattccctaccccagccggccggagagagaaagccagaaacctcgcgaccagccatgggccacctctccggaaaaacaccgggatattttttttctcctgcagaaaaagctttaggattggcagtttaaacaaaacatgtctatttgcataccttcggtttgcatgcatttgtttcgaagtgagcaaccctgggtaacaaggcgaaagtatatgacaatttgctcagaatcttaatgtcagaaaactggagactggggcaggggggtgtcgactcaaagctgtgtctcatttagtaaactgaggcccaggtaaaaagttctgaaacctcgcaacacccggagaaattgtgttccagcctcccacctcgccccaaaatgccagagctccttttctaagccaggtgaagtcacagagcgtggacagaacccacaaccgtccagaggaagggtcactgggtgccacctggtttgcatctgtgccttcgtcctgcccagttcctgagtgggaccgcaggcccggaatgtcaaggcaaacagtcctgcttcagccactgggctccagtcccaccccttttgggggcctgaagttaggaagcatccggcagctgccttctatttaagcaactggcctccttagaggccactccttggccatgccaggcgcgggcatctggccagcatgctgctctgcacggctcgcctggtcggcctgcagcttctcatttcctgctgctgggcctttgcctgccatagcacggagtcttctcctgacttcaccctccccggagattacctcctggcaggcctgttccctctccattctggctgtctgcaggtgaggcacagacccgaggtgaccctgtgtgacaggtgagtgaggggccagcagagccacacttagtgggacccctggctatagggcccctctggctgccatcctccaaacaggaccttgcctctgcctttgccccttgaactgtccccaggccttgttcatcaatccacttgccacctaagtgctggctagaccttcctagacacttcggccagtttccaattatttcacccttgctgttagaatgtgttgtattgtaacttcattgaaattggttcttggctttgtaccatacctaggtggccaggcctaagcaagggcagctttttccctcttctttttttttttttttttttttttgagacggagtctcgctctttcacccaggtgggactgcagtggcgcgatctcagctcactgcaagctccgccttccgggttcacgccattctcctgcctcagcctcccgagtagctgggactacaggcacccgccactgcgcccagctaatgttttgtatttttagtagagacggggtttcaccgtgttagccagaatggtctcgatctcctgacctcgtgatctgcccacctcggcctcccaaagtgctgggattacaggcgtgagccaccgcgcccagccgctttttccctcttctatcttctctccactcctacccatgttcaaagttccctagagtcccagatgacaagtaggattctccatggttcttcatggggtgggaagggaagacacatcccattagatgctttaggagcttgacaaatataaattaggttggtgccatcatgaagtcaacaatctaggtagagggaaactactgc

SEQ ID NO: 3862 - DNA, 6000 bp, Homo sapiens
tctgtgtacatgtttgtcccactggtctgtgaggcccccaagagctccctacttgaatagattttaaggatctatttgtagattgtccatccctccagattaaaactgaagcttggcctggcacagtggctcatgcctgtaatcccagcactttgggaggccgaggtgggcaggtcacctaaggccaggagttcgagaccagcctggccaacatggtgaaaccctgtctttactaaaaaatacaaaaattagccaggcgtggtggcatgcatctgtagtcccagctactcgggaggctgaggcaggagaatcgcttgaacccgggaggcggaggttgcagtgagctgagattgcaccactgcactccagcctgggcaacaagagcaagactatgtctcaaaataactaactaaataaattaattaataaaactgaagctcattgaagatggcagggatttttgttcactgctgtattctctgtgcccgggaaatagaagatgctcaataaatgtgtctattgactgttgaaaaggcaggaatttggccagatcatctttctgtccctagcacccactgaacaaaccctaagcccaggggaactgccagtaaataatggctgaatgaatgggtctatgctaagaatatgggcactgatgatgcctagacccttgggtcttagacaagggactcaggtgtggggattatctatgactgacacacacacacacacacaagcacacacgcacgaacaccccctccccgccaattcctccctccccaagggatttctccaactggtgaagacagaagaggcaaggataaaagtctcacctggaagtgagtcctcacagccatctggtggccacctggagaactgcaggtattgtcagccctagtcaaactttagcctcagccccttctgggaagaaggtgacatctaggccagaatggaaggcacactggacttggtgacagatggacctggcttcagatcccagctctgccatttactatgtgatttggggcaagtcccttggctttcctgggcttcacccaagaaatggagacatggtccctcacttttgcaggttgttgtaagccttgggctctggctgggcacctggtaggtgggaagggttggaggaggtgtcaaggaggtagggacagagggcatgaggagaataggagagaaggaactatctcttcctttagagagcaagtatgcggggaatggagacctgattggtatgagcacttttggtgcgtgagggagagcacatgaggttcacgtgaaaacccatagcccccctttagtctcttggctctcctgggtttctcggggttagaaatgtcactgcatgccgggtgcggtggttcatacctgtaatcccagcactttgggaggctgagcagggtggatcacctgaggtcaggagttcaagaccatcctgaccaatatggtaaaaccctgtctctactaaaaatacaaaaaaaaaaaaaaaaaaaaaaaaaaaaaaaaaaagctgggcatggtggcgggcacctgtaatcccagctacttgggaggctgaggcaggagaatcgcttgaacccaggaggcagaggtttcagtgagccgagattgcaccactgcactccagcctgggcaacaagaataaaactgtctcggaaaaaaaaaaaaaaggaaagaaaagaaatgtcactgcactctcttttcctctctggctgccttaggatcaacttcccttgcaaacaacaggataactatcaggatcaggaagttcatgaccaatacttcagtggaaatgatggtcttccgtgtccttcaccctgggaagacaacaatacctaagacagaaaactagtcaaaaagtagaagaccactctggatttcatctttgtatttagaacccattttgggctgggcacagtggctcatgcctgtaatcccagcactttgggaggccaaggtgggcagatcacttgaacctatgagttcaagaccagcctgggcaatgtggcgaaaccctgtctctacaaaaattacacgccttagccaggcgtggtgacacgtgcttgtaatcccagttactgtggaggctgagatgggaggattgcttgagtccaagaggttgaggctacagtgagcattgattgcaccactacactccagcctgggtgacagactgagatcctgtctcaaaaaacaaacaaacgaaaaaaaaagacagaacccattttggtggtgttaagacaactggcttggttatgatttatgattccttggattatgcaaagaaaaattaatccaaacacagacttgcaagacataaaagaaaaagacctcaagaaaacagctaaaggaactcaagaacagaatgacgacagccagggagtcacaagagtgtggtgctggtgctggcaaacaggaatggctttatctgcagcaatggtgaagatttttcaccagaggatcgataagctacgaaaacttaaaaaatatataattgccattcagagtagtagaagatagtccctgatacccccctttgatgccaacctcccagcagccttcacccatcgcagagaccagaactctgtagggacccagctctgatgggggagtaaatggatccctgaccctgagtcttggggccctgatgcccttggatcctctctctgacacccccaccttcctgggcaccaggcatattactattctctctgttttccttttttcctctggttgttcccttttaggtcaatcatccagtccatgattatttcttcaatacccattacatatcaggcactgttctctagcagaaatgggacatagtcagtatcctcttggagcttagattctagtggggctgacatgtagtaaaacaaacaaacatgaattcatttataatttcaagagtgcttcatcctccaaaaatgaataaatcaagagaaggggagggagagtgatggggaggccagtggcgatctgagagttcagagcagcctgtttcagaagtaattcgggagcagagacctggatgaagagaagggttgttgtcagaggggtcaggtgcaagagcccaggaggaggagcccctgaagccactcctcactctctgctcccgcccctgggtgacattatttacccctaaaacatcagttgccacctgcatgcctacacctcccaggtgtccctcattatccagctgtaacattgatggccaatggcaagtagaacccactcaacaaccccatgaggccggtactaatattatccctgtgttttagatgaggaaataggcacagagagctgaagaaactctccaaagtcacccagctaggaaatggagaaactgagattggacacttccaccccctaagccccctaaactcaccacatccaacctgaaatgaatcctcttctccagctccgaccccctcctcttcccatgttccctgccacttgaccttctgctgcctcacactcaaacccaaaacctgcctggtggaggctgaccatgggggctgcagtgatggtgctgtgatgggggtgtccagtggggcctgggatcctcaggcctcttaacctcatcttcccctcccacaggcctgcatgattccagggagcatcaaggcaagagacacagggagaaggagcagccagtccccctgccgcaggactggccacatctgtcacatctggagaagtctgcccagagtggttcccctggactaagggcagatggcgttggggaagagggagctctttctccttgctccacccatcaggatgcctaaaataggaggctgagaggggcctgccctgaggactgagctgccaggctttctgcttccaagttcttcccggctccccatctcctcctgcttcagggaagtgcacccctcaccccctccacgctggctttctagatactggaataaataattcaggttttgaaatcttgccaggcccacccctccggtgctgtgagggcgctattgggctgacatgagtgacgtcacccagctcttatcccagccccggcatcacgggacttgccctggcagcaacttacctgcctggtcactgtcagtccagaccctctaccctgtgcccctcaccctggagcccactcaccacagccacctgctatcttcgttccagggccccacagtcctcatggcttagcattgtcgcttcagtaccccagccattctgacagggtaatggtgacctgaagtcacctggacactccatgttcccaggccgctgcctctgccatcccggggtccctgaactcccccctgctgcatagtcaccctgacactgccatggttgccctgagggcttcccctctaccgttagcgtcccacggccatcaccccccaccccaagattctgtcaccatgctaatgtcgtcactgccacccacctccccgctccctcgtgctccctgtcatcgtcacctcagggccccatcatcttggaaaccctgtcattctcaccagggaagcccaaccagccccatcacaagctcttccttcgtcacctggatctcgtcagcctctctgccacccaagggtcccatcaccccacagcctagccgggccccctttccactcttccaccacgttccctgcagcctctctgagacttcaaggctctcgcaccggcgcctctgaaacccccggcccgcagagggcgccgcgtcaaggacagcgcgggcagactcgggagggggcggggccgcagccacggtcgctttttatgaatgggggagcgggcggtgcgaggccttattactatgccgcgcaacgcgcgctgcgccccagcgcgccgcgcccattggctgatcggaccgctgacgtcaccgaaccggtggccgggggcggggcggggtgactcacgccgcttctcccgcggccgcgggggcttctcggggtccacgcacgccctgcgccgccaggacccgagcggagcctccccgcggcccggccgcgcctggtcctgagcggtgagtagcgggccccgccgcgggcaccaggggtcctgaagggcacgcaggatgctggggcactgggccggcggaaggctcctagtggccggccggggttcgagttcgaggtgggaattctgggtttaggcgattctgggttagcaggcttgggcccaagtgctcgagtgctggggttgagttggatgacccggcgaagggtaagcattcctgcagggacccgaggccctggagggactgatggtcatctgaggttaagccggcaggaggcgtctggggcagggacccaggggtccgaacagcaggaggtgtccaatttaggaatccaggtatccaggcaggaggcagagtcaggcccaaaatccaggtgtccgggcagaaggaggcatctgactcagggatccagtcttccagcaggggggtctgcccagagacctagagattcaggcggaaagaagggtccagccaggaacagaagtctgggagggtggggggtggggggctgagttcccaggtgttaccgcgggagtgcggggtgatggctggcgggagcttcacgcgcattccctgggggcggagtctaaggctggcagtactgaaaatcgtgaggggtctgggagcctcaggcacgagctagcatcatcatctctgatgggagggagcggagctgctcagtctccctgatggggtagatgtttccctaccccaatcttgagccttcgggggcatcccctggatcctatggccctcttccacttatagtaccccttcttctgtctctcctctggtcacacacgtgggaaaaagagacctgcaggacctaggacagggatccccaggaagagacccctgtttagaggcctgggggcattggaggggacagcggtatcctgggaagagccccagggcatgaatgtggggataaggcattgggactctatcaggtatcctgaggagagactcccaccacgtatcct

SEQ ID NO: 3863 - DNA, 6000 bp, Homo sapiens
catgtgcaaagacacacataggctcaaaataaagggatggaggaaaatttgtcaagcaaatggaaagtcaaaaaaagcagaggttgcaattctagtctctgacaaaacagactttaagtcaacaaagatcaaaaaagaaagaagggcattatataaaagtaaagggaacaatgcaacaagaagaactaactattctaaatacatatgcactcaatacaagaatacccagattcataaaacaagttcttagagacctacaaagacatagactctgatgcaataatagtgggagactttaacatcccacgttgaactcagctctgaacgaagtggacctaatagacatctacagaactctccactccaaatccacagaatatacattcttctcagtgccacatggcacttattctaaattcaaccacaaaattggtagtaaaacactcctcagcaaatgcaaaagaactgaaatcataacaaacagtctctcagactacagtgcaatcaaattagaactcaggattaagagactcgctcaaaaccacacaattacatggaaatggaacaatctgctcctgaataactcctgggtaaataatgaaattaaggcagaaatcaagaagttctttgaaactaattaaaataaagagaaaacctaccagaatttctgggacacagctaaagcagtgttaagagggaaatttataggactaaatgcccacatcagaaagctagaaagatctcaaatcaataccctaacatcacaatttaaaaaagctagagaggcaagagcaaactaattcaaaagctagcagaagacaagaaacaactaagatcagagcagaattgaaggagatggagataaaaaagctccaaaaaaccaatgaatcctggagctgttttttttaaattaacaaaatacatagaccactagctagactaataaagaagaaaaaagagaataatcaaatagacactataaaaatgataaagggaatatcaccactgaccccacagaaatagaaactatcatcagagaatactataaacacctctatgcaaataaaatagaaaatctagaagaaatgggtaagttcctggatacatacaccctcccaagactaaaccatgaagaaattaaatccctcaatagaccaataatgagctctgaaattgagcctatataataaataaaataaagggtattcaaataggaagagagcctaccaagcaaaaaaaagcccatgaccagatggattcatagccgaattctaccagaggtacaaagaagagctggtaccattccttttgaaactattccaaataattgaaagggagagactcctccctaactcattttatgaagccagcatcatcttgataccaaaactgggcagatacacaacaaaaaaagaaaacttcaggccaatatccctgataaacattaatacaaaaacccccaatgaaatactggcaaactgaatccagctgcacatcaaaaaactaatctaccatgttcaagctggtctcatccctgggatgcaaggctggttcaacatatgcaaatcaataaacataatccatcacataaacagaaccaaagacaaaaaccacatgattatctcaatagatgcaaaaaaggtctttgataaaattcaacatcccttgatgttaaaaactctcaattaactaggtattgatggaacatatctcaaaataataagagctgtttatggcaaacctacagccaatatcatattgaataggcaaaagctagaagcattccctttgaaaaccagcacaagacaaggatgccctctctcatcactcgtattccacatagtattggaagttcttgccagagcaatttggcaagagaaagaaataaagggtattcatataggaagagggaagtcacattgtccctgtttgctgaggacatgattttatatttagaaaatgccactgtctcagcccaaaagcttcttaagcagacaagaaacttcagtaaagtctcaggatacaaaatcaatatgcaaaatcagaagctttttttttacaccaacaatagcaaagcagagagccgaatcatgaatgggaagaataaaatacctaggaatagagctaacaagggatgtgaaggatctcttcaaagagaagtataaaccactgctcaaataaataagagagggcacaaacaaatggaaaaacattccatgctcacggataggaagaatcaatatcatgaaaatggtcatactgcccaaaataatttatagattcagtgctattcccatcaaactaccactgacattcttcacagaattagaaaaaactacttcaaatttcatatgaaatcaaagaagaccccatatagccaagacaattctaagcaaaaagaacaaagctggaggcatcatgctacctgacttcaaactatgctacaaggctacagtaaccaaaacagcatggtattggtatcaaaacagacatatagatcaatggcacagaacagaggcctcagaaataacatcacacatctacaaccatctgatcttcaacaaaactgacaaaaacaagcaatggagaaaggatgtcctatttaataaatgatgttgggaaaactggctagccatatgcaaaaaactgaaactggaccccattccttataccttatacaaaaattaactcaagatggattaaagacttaaatgtaaaacctaaaataataaaaactctagaaaaaaacataggtaataccattcaggacataggcatgggcatagactttatgacaaaaacacaaaaaacaatgacgacaaaaacacacaaaaaaatgacaacaaaggccaaaattgacacatgggatctaattaaactaaagaacttctgtacagcaaaagaaactatcatcggagtgaacaggcaacctagagaatgggagaaatacctaatgtagatgatgggttgaccaccatggcacatgtatacctatgcacatgtatctcagaacttaaagtataataatttaaaaaaagttaaaataaaatattaatgactttcaaagaaaaaaaaagtcaagaaacaatagatgctggcgaggctatggagaaataggaatgcttttacactgttggtaggaatgtaaattagttcaaccaatatggaagacagcatggtgattcctcaaggatctagaaccagaaatatcatttgatccagcaatcccattactgggtatatacccaaaggaatacaaatcattctattatgaagacacatgcacacatgtgtttactgaagcactatttacaatagcaaagtcatagaaccaacccaaatgcccatcaataacagactggataaagaaaatgtggtacatatacaccacggaatactacacagccataaaaaggaatgagatcatgtcctttgcagggacatggatgaacctggatgctatcatcctcagcaaactagcacaggaacagaaaaccaaacactgcatgttttcacttataaatgggagttcagcaatgagaacacatggacacagggagaggaacaacatgcaccagggcctgttagggggtggggggcagggggagggaacttagaggacaggtcaataggtgcaaaaatttcatgttttttaaaaaagaaaaaaattatatatgcactcacatattttaaaaaataaaggaaagaatagtactctgtgtcattcatattttcagtatagcttatcacataattgccttttggatactggccattcatgtataatatttctctagtaaccaggttatctaaccaaaatgtttaattccctcaccataattaagtaacagtttagtttaccagttatgatcatatcatttaaaaaaatctcaatatctaccacaagggaaaactgcaatcattcctttctacagttaatggctaatttattttatcccgctttttcattttttgatcccttccaatttccaggaatttagaggtcccttctggttttagaacggagaaacagggttcgtttccatgtggtactgatttttcacataggtagtggcaacattttactacaataaaaagagcaaaagtcaataatagattcacataagtgtttagctacaaaaatgagacacagctaatgggtgtgtgtcgaagcaatattagataaaagcaattacagaataaaatggctcaaatcgtaattcctaatgaaaaatagattacttcatcataaatttatctccacgaaatttattagacgcatatctcttggggtatacatatcactagaaattctctctccagtggacttctaaaatcactgaaatattactaatcccttatctgcaggtgtacttcaagaagtcatctcatcccttttccttttcatattccttagaaagctggaaacagtcccagtcctctgtgtgacagtgaaccctgaggctgcgagtgttttcatttacaatactgggcttgaatacctgtttttaattccctggagatatttgccacaaaattctccctcaagcacacaacctctttctacctggtttctttatgcgtttcgagctggacttggaatgaattgtctgcaagctaccatccgacagtctaacacaccatcttaggctttcctcggctctccagactgctgtcttgcatccccagagatggcttggggataaaaatgagtttaaaaccaaactttctttagctggtccagcggctaagtgcagctctgatgcatccgagcacggtgccctcttctctcccagtactgctctgtgcccatggaaaagggggcggaggcgagagagaagaggaagaggcggaggtcactcgcgcgccccatccctcccaggctgccagcgcagctaggtgcagagggatcccaggagccgcgcgcgccccgcagtttccgcgctaagggaacgagtgcgcggaggggacgagcggctggaccacagccggcgcccgatcaggatctccgcgctgggatcggtggaacttgaggcagcggcggcgcggggcgccatggcacaccgagcggctccgtcttctgctcctcagagagcccggctggcggcctgggatgacaaggtaccatccctccagaggctgatcccaatgcatcggcttcgcttatctagacccagatttaatcaactcaccccctgagacacccagccacagcttctgctggctgagcctgacactgagtttggaccagattccccaagctagggagacgcatagagaaagaagggtactcgagctaacccatccccattctgagctgctctgcgggggattgggtagaaagggtctcagaagagggaaatcggcacagattccgcttctcgccgttgcggggttccctgcgggcggcactgcgagttcctcacccgggcacgtcctcactccccgtgcccgggatgagggagaaaacagccctttggcgtttgagcaattgcagaaagtttcagcgagttcgttagtttggagggaatgttgcgaggccaggccgaagggcgggggggatagtaacgggcgaaagtcgaactgtgagtaagacctggagaaggcgaccgtcctgggggtagcctaggcagttccactcgggctgggcgcaggaaaggctggctccggaattcccagcctccgggaaagctagctgctcgggaaacgccaatcgaattagctcagagaagagtggccgtggccttgtgtatccagtgtctgtgcctcaggcttcaaccccctagggaaagagtgacaagcaaatacttcgccttgaatgttgctactctgaagctgtaactggacaggatcttggccgaggtgcacagtgagcgtggcccgcccccttcctcatcgcgaatcagaatttctacacaggggcagctagaccagaaaaccttcccagagactcaccactctgcttttcatgggttcaacgtgtgtgtggtttgctgttat

SEQ ID NO: 3864 - DNA, 6000 bp, Homo sapiens
caaaccctccttaatgtgaacttctttcagcactgagcctgaatgtcttccagagccttattgatctaagtacatcaacctgttgtttgtgctgcctgtctgtctgttgcagttagtctaataagtctgttgggctattcaattctgtgtttggtagagtgcttatgttttgtactcagtacaccagaggtgtggaaacaaagcagtaatctgagaaccaattcagtgggagcaagtcctggagaacctttacctctgcaaagaatatttttccaaaaataagaatatctgggaagtagaaatggctgtggagctgtctaggagtcctatggatacatgagagccagaccagttctgtgaacattgaagtgaaggaatgagaaaaaagggttggttctgcatcacgtaaaaattgttaattgttaggaacttgtgtctgctgggaaacaaacactgagagggaacagggatgtaagagtcttaagagtttgatcagggacccaaacctctgaaaatcaaaagaggaaaaagtcggggttgagcaggtaagcctcagaccacagtgaaaatctgacagtcttgaccaacccaaagggaactaggaataaaagctgcccatgagaggaatcctgcactgggcggaaagagacaggcctaaagaaacccactaagcttggtcattctctaagaactacctgataaggtgaattctgaaggtggagtctgttagctaacttcattccttgccgcagaaccacaaggtttttattgaagggaaactcaaatagcatacctccctggctactatggaacattaaatagtttttaaatctttgggaaaagagtggaatgttgaatgaaaccactctttcaacctccattgtagccagtgggggtgaggagggagggctacaatcgaaagataatttaaaataatcctaatatagtcagtcattctgttaatcagcataattttttaatcatttgtggtttaggtgccctttctggaggttttacttgtcattgtgtttatgggaaattgacagttattaattgtttttaagcttgaaccagtccttattagaattcaaatgtatttcccactactgggtccaatatctatgtaatcatttatcttatagtgaattttactgtaagcgtaatatttacaagaagcaatttgtcattcctgggttaagtatagaaacttcaatattttctggataaatatgtcaaaaaaactaaaattcaagcaatagaagagaatgggaagcttatagtgtcttatattagacttgggaggtttgctatttggtttgactcgattatcattattgttttataaatataattttctaattattacccatcattaacattaatggcattaatgctggtaatccatctccctaaggatttcaaagtgcgatattttttctaagctaaatgatttccaggactccagcagcaattcccaccttgatttgctgcacccgaagtctccaaatacaattaattttaattcatataagaatatacccattttgggttaggaaatggggtggcagatactcacaaacaattttggaacatttccactccctaaatatttagatctctaatctaattggcactatatccccctttttgtcacggtagacagcactccttgtcatttaaacttttctctatgtgtgtgttcccaggtctggggagcctggaagaacgcatgtgcaagcagaaggctgaggcccaggaggtacaaatgacccatcatgcttatgcccagtgtttctcctttctgtgacctgctccccagtcgtgccctaacattccagttggtctgtctccagttcccactgatcctctactctatgctctgagcatatgccactgattgccccggctcgtggcgctctctcctgctgtcctgccctccgtcctcgtgttcattcaccccggccttctcctcctgcatcccttacttgcccaaacagctcctactctgtcgtcaagagtcacatgaagcatcatctagtctacagagaactccttaattacccccaactgtgttttgccttctttactttctttcctctgaatgttttttctttgtacagttgtccaatattagtatcaatctgtttacctacctgtttccatcacttccgctaaaaactgaaggcaaggacgatacattttcatatatataccctaggttcttgtgacaaaacactgcgtttttattgaataaatgaatgaatgaatccctcctcatcattctggtgaaccaggaggccagcacctccacagtcactctctgagttgctgctgcaaggtccctcccacactagcagcacaggtagggcgccatcctcattacccccacacagcgccacatacgccaaaggagctttctctctaccttaactgaaatctgacctttccttggcatgcttatcttcaaccagttactagaaaaaagtatctctgatacaataattaaaactactgtgaattcatgtgtcactctaagtgtaaattgttcacgtgttaattttgccagtagtgagtgaattgaaaaagagactgggaagccagtaaaacatagaaatgaacccctaatggtggcatttcaggaaataggagaagacagatgggaagatatttctggaccagagtgcttctgggtgcccttcacattgtaccacacaagccatttccattcctgtacagaaggttggatctgctgctacaacactctctggctctcctgagaacagtatttctatttttgtcttttataaaaaggtaaaagcacccttctttctggttgtcagggaacaggaaggagccccctctcatacaatgaccagaaaaagccaataacaaactcatcttttttctacattcagtagacaccatagtaacacttcccagtttacagataggcaatgaagttcaatggaaacagatttttaataattataattataccttacactgattaagtgtttacccaggtgctatgctaatccttttcctttatttcttacaccaaccataaaagtaaggttattttattatccacattttataagaaagttagctaacttgcccatggtcagacagataaatgtctgagtcacaaaactggtgtccagaaagttatgactcagacccctaaatatgccatctggaaggcatccctggtttcaataaggggcacctaattgtggttacatgtcaatatacaatctagcactactggtactattatcactcttctttatatgacaagacatttatatttacctttccttttctattcatgagagtacagaatacatcataatttctgcatccaatttttatattaaatgactggtaaaggaaatataaacactttgctgtgattttcaatattttttctgcaaaaatttatgaaacatctacaatatgtaaaagacattttcaaaatatttggggagatattttagaggaaatcgtatggtccctgattcaaaagagtttacaacctgaaaagtaatattaacacctcagtaacattacaagtccaacctgtgtacaagctgtgtccaaatagaaaaaaacctgagaagtcacccaaccacttagagagcaatcagactattggatgtcagagacataaaataactattgtcttcacccttttactttcaggcaattgtctcctaaacactgttatagtcactaagtctgcatactttagaaactccagatcgtcactaaatctcatggaaatgtgtattggcattttccttgagatttcttttaaagtatcacttctgtccatcaagtcagagtccttataagtgtagtgtgtttaaattctttatctttcctgacagtctatagagtcccaatagcagcaaaaatctaactgaactccctactactccctgcaaatatgctcatatgtttatgttgagagttttaatgccatttgttgaaatatatttaacctatatcacttggttcacaccaagttaatgctagctcctacaaggctatgatcaattcagtcaactagttggtttgactgatttttcctttgaattcacctaattgctgggctgtttaagtatctgcagatacctttacacaaaagaaggcaggcttcacattagcttgctaaaagagggttattattttcttctgagatctgctatggacttattgagtggctgttggcaagagtaatgatcatatttgccctctcctctttctcatttttaaaacaagaatatgaatataaaacaacccagaaaaactccaaagatgctaaatgaataagttaataatcattgtttatttaaagatacaactgtattgtacaaagagagggatttcttttaccctgaaatgccaataagaagccatatgaaaaacaaaaataacaatttaaagagatttttaaaaagctcccattcagtagtacaattgggttcttttcagataattaatcattaagaaatatttaagtactattttctatttacattgcagtatatatcactggctctttgaaagttaacagggattaattttctttcaaaataaatattccacttaactaattgtctgtgttctttcactgctgtctacgccattcaagccaaaacaccgatctcattcaaaactcagaatttcatccaaatttgtgtacctggccactaataaaagatttttggtatgctgtctaaaatcctaatgacaaaatagggagaatcataaaatgttcataaaaatcggatgggatcaaacatcagctaatctgagtatatttttctctatgattaaccagttcttaatgacaacatttcttatcttacaactgtgacatgaagagggagctgtagctcttctgagacacagttctgcaagaaccagcttatccacgctctccgatctcgtgtctgtttctctttctctctccctctcttgcgctgtccctcattcatgcactcttccatctttttgccattgtgccagctcaatttaaatgtatctgctctgtatctgttcaagtggagataatccatgcaaatcaggagccgtggctctcaatgcctggttcacagagaggactcagcttgaggaggtcactcgttcacagccgctcctcccattatatttttccccttattgcagaactgctgtatgtatacagtgactgaaaggactcaatttactgcaactgctgcctggctttacttacaacttttttttttttataaaggaacttacctccatctgtcttttcaaggtaggaagtctgattcttctaaagacgtgtgtaatgcctccactgtctgctcattatcaaatgtcacttgaatgctttatattgttgctggcattaggtacaaatactgtgattccaggtgcctcacgcttttgttacttaaccatataggtacaattgtttaagtgctgggtattataatgtttattttccctgcagcaagcttcagttttacaatgccagaaagattagagtatccactctctaatgtagaaatataatcctctatcaagttttccctcttagaaaaacattaatttctcagtatgttttaacttattatgtatgctggccaataatagccaagtgtaaaattcaaccgtaacaaattttttttttaacctggagccctcctgcagcattttctgtgaaaaataactaactgttgaaatgtttttaacaacagcaacaaaataatagattttactttattttgctgcaaagcaaaaagctgaaggccttattgctaacaggcctgtcagatagatttattcttcaccattttaaaattgttactaggctatgcagaagtattacaaatagttaggattcagttactgtcattatccatgtgattatttattgttttgagattgaaattgtattacagaaaagtttaatgtagcaaggctttaaaaaacctgaatgtt

SEQ ID NO: 3865 - DNA, 6000 bp, Homo sapiens
aaactgttatttatttttttgaaccactgtagttttggatcagtttgttacagcagcgtaatctatagcagctaagtcatgttcaggaaattgaactttaccaagggaggcagtattgtatagtggatgtatatggggccaaatagcatgcatttgaatcccagttctgctacttctgagctgtgtgatcttaggcatgttatttaaccttgttgtgactcagttttctcatctattgaatagatcctgagggacaagttcacctagagctcattccctttctagactatatccagtagcagggcctagaattccctgcccagtagccatgagcaggttccaaagtctgcatggacctttctggctttgtcctgatggctgactatacctaccagtacccttggtctgagatgttgccaaggggtggctgtgggacggtggtgtgggtagaactcagttgggcaggctagagtgttctacattagacatgaggcctctctggcgtgtgatgacagagcagagggtggggagagatgggggtgaattgcagaccagtggcacactctccaaagaagtcacattcaggtagcacagaacaacccatgagtgtgatgagaattctatttttttttttaagacacagggtcacattacgtagcccaggctggagtgcagtagtgcaatcatagctcactgcagccttgaacacctgggttcaagcaatcctcccaagtagctgggactaaaggtgcataccaccacaatggctaagttttaatttttgtagagacgagggtctggctatgttgcccagtttgaggcttgcctcaaacttctggcctcaaacaatctgcccacctctgccttgcaaattgctgggattataggtgtgagctattgtgtctggtcagaattctaaatttgagtctggctctccagttgtcatgaaagtatatttgttaagttaggagaatagaacatatttaatagtttgatagctggatttatgattttaaaatatttagacattggcaggcaaacttccttttgaacacctgctctgccctgcaaatttaggtggggggggtgggggagactgggtaccttgtcaccctggcatgaggaataaatgtaacaacagataaaaaatactcaaagcatggcttggcacatatggtatgtactcgacggcattgaaaataatgatgtttatgattctcctgaaatcttaaaaaggaagctggctgccctcccttcatctttctccatctctgtgggctggaatgtggatgtggatgtagcagtggtgaaataactcctggggggaattttatcttaaccttgacactaagaaaggacaagatggcacaagaaaaataaaccaagtgggctttacttatgatgcaaaactcttaaataaaatactaccaaatagaatcctacagtctatctttaaaaggataatatattgtaaccaaacagggtttatcagaggaatgcaaagatgattcaacttttaaaaatatatcaaatgtaacctactacatcaacagctaaaaaaaaattcacttcatataaaagtcatactagaaatagatagaaatgtctctaacttataaacaatatatcagaaaactataacaaacaccatatttgatagtgaattattagaaacactagggtaacaatggggactattaaccaaatcagtgaccataggagaatgagtgggatgaggagggagagaggccagccgaatggagagttccaacacgtctgcaactctggaaagaagtaagcttggtgggaaagaatctgtgggtgacccataggcgagagtggaaggcaggaatcagatgagatcaattagggagagagagtagggtgagaagagaaccaagaagagaagccaggaacactatcttaaaggagccatgacactggggagccagagactgagtctggaagggagcagacagaggaacagaagcaaagggaaacctggagggaaatggcactgaggaggagggtgttcttcacagagtcaaagtagagggcaaggatttaggagtcacgatttgctactgagaggctactgttaaccttggccaaagctgtttctgtggagcagggagagctaagggccgtgtgggtgggtattcaatggtaaaatcagaagtagaaggagaaaatgagcacttccatcaggaaggggaagtgagctgtgtgtaggcaccatgagaaggaggtgaagttccaggggagttttatgaggttgtggtgaaatcagcatttttgtaagtctgaaggggagcaagcagtggagagcagagagactgacaagagacagcagaaagcagatgactgatggggcaagttcctgctgaaggtgggaggaaagagatgctcataaaagtgaattactgtttcaccgtggagaaaacataaatgaaatcatttacactgccattcacttattaattcagtaagtattgattaagtttctactatgtcccaggcactgacctggtgctggaaataagatagaaaaaattcccaccctatattatgtaagttcattaacttaaaacaaaaggaaaaccaaatccagaaacaaacaaaaatttggcccctgtcaggccagcgctaagggaggcatggtcttggaggaagtgtgtgtgactgccaggcactggagtccctcagcaggaatgctgctcgtctcaaaggcaacacaaagtggcagctgggaccagggatccagaatttgaataccctcccaccacattctatcagagagtcctttaggactatgttaatgtgagagaaaaaactttacttcaatggcaagttttaactatgaatgattaggagagtctcctttctcctgaaacattgctcttagggacagagtggaaaagactcctggacatatgggccagaactacaatgcatgttacagagaagaggtatacgccatgtgtcataactagaaaggagaaatgcaggcttgctgtgcttaatgcactcaaaacctcaataaggacaaatggcaataggcaaaaagatgatgacaaatactcatctcatttacatcagtaaacttgatatcgaaaccttcaaccctctgaatagcaagtcactggttcttttctttcacttccccctccggcccctgcccctgccccaaccaatttcattcagatatagcttagctggaccaaatctatcaagtcatgcttatccttaatcctcatcagagttcttgaagtcatcaactaaccatattgattttgaaatagaaaaagaaaagcagagaagctgtgttttgacctctctcctgaaacattgctcttagggacatatgacccagaactacaactgcaatgcatgttagatagaagaggtatatgccatgtgtcataattagagagaagaaatgctaaattcatgaatagggattcacagaaagttttaacagaaagggcctttgaagtgactgactgtgaacttatttgacaagatgaaaataatccatcgcaaggctacatgatggatgctcggcttagtatctgggtgtgctgcaaccccacctaacatttttttctattatgccatgttaccatattcccatattgagttacattttcaaatacatgacttttccagtgaataattgagagaactccttttctgaaaaaattcccacatggaatggataaatgaacacttgcaccaaagaagatgccaacatcagactgcaaatctccaagacagacaagacaaaaagttctgaagtgaaaagtcatctttgttcacactgtggattattcaggtttcttgctttccccctgacacacatttttttaaaattgactttatttttttagagcaattttagattcatggcaaatttgagtgaaagatacagagatttcccatgtactccctgcccctcgcatacatagcctctcccattatcaaaatcccccaccagagtggttcgtctgttacaattgaatgtacgttgacacatcattccccaaagtccatggcttacactgatgtttcacattctgccactttgggcaaatttataagtacacagatccactattatggtatcatacagagtagttccactgtcctaagaatcttccgtgatcatctattcattcctcctttccccctaactcgggcaaccactggtctttttaactgtctccatagttttgccttctcaagaatgtcatagttggtagcatacagtatgtagtcctttccagttggcttctgtcacttagtgatacacacttaaggttccttcatgtcttttcatggctggacagctcatttctttttagcactgaataatattccattgtctagatgtaccactgacatctgctttaaatcttttgcccatttcatttttaccctctaaccatttcattactaaaacacaaaacaaactccggaaaggagtttgttgatgagaaaacactgaaagtacgatttaaattgaggaatggagattttctgtggataattgtctatgttccactttaccaaagaaaaatgaatttcaagtagtgcataaagtaattctcgttaaaaaatgtgggaataaagagatcagtcctgggtactgggaatatatttatctcacagaaaaatcttgcccacaaaatgcatcagactgagatgaaatactctagggtatattaaattttattctaatattgaagggagggaaaaaaaggacggaaagaaaaatgaaacaggatgaaaaataaggtgattgggagagagaaaagacagagaaacttgttaacgacaggactttctgagcaagatatttttcttccttttacaagttggaagctattgaataattcatgccaagcgtggaaaggctgtcttttccctggatgatgtataactaagcaggagagagcttcgagtgggttcaccacatcagccaccactcctgcttctgagcacagggtgctctcctcttgagctcagcttctgcttttgcagccaagcattcttgctgctgctgcctgcctgcccacccgcctgggcttgcagcccgccactttactttctccagccctgataccagctgagaagtctccctgcagctgctagttcctgcccaggaccatgtgtgtggatgctgcttgggagaagcgggcacttgctcctggcactgatcccagctgagtttctcctgttgatttctggaccactgatgctgttgctgaggaggtatttcccggcatccctccccctgagacaccggctaaggaccagcctaaacgcaaggtaaccttcacctctttcccatgggattttccccagctgggatatctctgctttctcctggaactaggtcctccagctggcaacatatctctctctctctctctctctctctctctctctctctctctgtgtgtgtgtgtgtgtgttgggggagaagaggagactgttttaggtattgctctgtcctagggcttccccgatacctgctgaatccaatgcaaagtggcctttcccctggctctggagacatttccgaggcaggcacctgtcatctgccacccccgtcctcctcctcgagctccctttctccccctcccccagcccattattctgcttcagccttttgtgtcagtggcagagggctgaagggatgtctttgcccttctggcaggcaggacagtgtcaggatggaccgcgctgccagaagccgacgctagcgagggaggtgtgaagagttggccagaatgaccaactcctcctccacatccacctcctccaccaccggtggctcgctgctgctgctctgcgaggaagaggagtcgtgggcgggccggcgcatcccggtgtcactcctgtattcgggcctggccatcgggggcacgctggccaacggcatggtcatctatctcgtgtcgtccttccgaaagctgcagaccaccagcaacgcct

SEQ ID NO: 3866 - DNA, 6000 bp, Homo sapiens
tcatgccagttagaatggtgatcattaaaaagtcaggaaacaacagatgctgaagaggatgtggagaaataggaacgcttttacactgttggtgggagtataaattagttcaacattgtggaagacagtgtggcgattcctcaaggatctagaactagaaataccatttgacccagcaattcccttactgggtatatacccaaaggattataaatcattctactataaagacacatgcacacatatgtttattgtggcactattcacaatagcaaagacttggaaccaacccaaatgtccaccaatgatggactggaaaaggaaactgtggcacatatacaccatggaatactatgcaggcataataaaggatgagttcatgtcctttgcagggacatggatgaagctggaaatcatcattctcagcaaactaacacaacaacagaaaaccaaacactgcatgttctcactcataagtgggtattgaacaatgagaacacatggacacagggaggggaacatcacacactggagcctgttgggggtggggggctaggggagagatagcattaggagaaatacctaatgtaggtgacggattgacgggtgcagcaaaccaccatggcacgtgtatacctatgtaacaaacctgcacattctgcacatgtgccccagaacttaaagtaaaataataataataataataataataataataaaagatggaggtggtggatgggtgaagcattttctctgtagtgtagggaattctcacaggtatgtagctccttaatcctcacaatgaaagaggcaaatatcattatttcattttacagatgaggacactgaggttcaaggaagttaaaagaacttgcctaaagtcacatagcttagaactggcaatatcaaggctgaacctaagtgtctgttccaaggctcagtcatgttccactaattttgaatgttggcaaacgaggagagagagatattgggacctaggatgaagggaagaaagagtttttggtagagaaaacacataaacatttatgtaagttgaaagtaaagagtcctcagaagctaagaactgaaagtacaagggagaataagaataattgagccaagtctcagaaagtttggaggaagcagcatgctgacctgggcaagagtttgccttggaaaggagtaaagttgcttttatttctgaaacaggtgggaaggaggtaagggtgggtaaagttgctattaagctggagcttggagaggagggaaattgagatggtcatactatttcctccttgaaataagaggctagttattctcctgtgaatagacaagtaagggaaagcctggatttttaccagtgactgggtcaggggagggaagaggggagaaaagggagttggaaagtgactggagcaattaggaaagagagtaaggctcaggcttgtaatcccagcactttgagagtccaaggtgggaggactgcttgagcgcaggagttcaagatcaccctgggcaacaaagtgagactcctgtctatacaaaaaataaaaataataattatcaggacatggtgactggtgcctgtagtcccagctgcttgggaggctgaagtaggcggatcctttgagggcgggagatcaaggctgcagtgagctatgatttcgccactgcactccagcctggatgacagagcagagccagaccctgtctcagttgaaaaaaagaaaaaaaaaaaggaaagggaaaagagtagagttgcaatatttagcagataaaaaatatagctcatggctgggctcggtggctcatgcttgtaatcccagcaccttgggaggccaaggcaggtggatcgcctgaagtcaggagttcgagaccagcctggacaacatggtgaaaccccatctctactaaaaatacaaaactagctgggtgtggtggtgcatgcctgtaatcccagctattcaggaggctgaggtaggagaattgcttgaacctgggaggcggaggttgcggtgagctgagatcacgccactggactccagcctgggcaatagagtgagattctgtctcaaaaaaaaaaaaaaaaaaaaaagatagctcacacagttacatttgaatggcacatttatgacaaatttttgtttagtgtatgctccaaagattgtgtggtattttatctgtaaacttttaaagagaaacactaaagcatgtgtaaagaacaacaaagccactttgaaatcaaaaattggaaatggagcaaacttaaggtaggaatgttgggcttgacttctaggcagcagcagacagggagttgtactggcagtcaggagatagcttgagaatgcaatttttagggcctccttggagagcaatgggaagagacttatatgggaactagagacttggaattggccaggacgccattgctggaaacatttgcctactatctaattttacctaagttgatcatctacaattacatctcataggtgtgtactaaagatgaatattattaaataacaatctgaaaggtttttggactctgtaaaacactttatcaatattgaatgttaaaaaccagtggtattcacaagaaaacaactgatatccccaaggaaattcttgaacctgtttgaggtttatcatggtggtctggagtagtggttaagagtctgcagcctgtcccacattaagcaagctgcttaatatgtctgggagtcaatttccttgtttgtaaaattagaataattatagtgcctaacttgtcagattaaatggattaatatgtgtaacactatgtgcaaatactaaaagtacaatgttacatgagatatcataggcagacaatgagaagtttcagaaaacattcattaatatgcatatgtatacactttgtatgcttacgtagaaaatgagtggttttaaaaggacattcattagcatacttttatatgcattttgtagacttgtacagtcagaaatgcagcaaatgtaaaactttaaatctagaagtctgtttccctctaggaacatatatttcaattccttaactatttattgactgatagcgtttgagccacaaggcaaggcatttgcaatatttaggttttggaacccagctctgccactcactagctgggaaatctacaagtcaccttagttgtctgaatgacacttctctcaacaataaaatggccagcaatgcttacttacttcacagagcagtaaggttaaattaacctagcacatgcttgatacagactaggtgtgaaatttcactttgattcctttggctttaaagaatgcataaattagtgtgggtggaggcgggagaagggggggaatgccaagtcccccgttttgttgtgctgggtagacacaatatacctcttcccctttaagtgaaataagtcttcaaatccaattaggatctactctggagtcttagaggaccgttatcttggtttccacattatatgcactgtactgttgttgaagctgtgggtatgtattgggtgcgtcgctgtcgatgaatgctttaaaacagctgtgaattaactgtcacttcttttttttttttttttggcaaactcacaaaatcccagaagtcaggggtctgttgtttgttcattctgcctccttctgagtcattcaggtacagggtgtgtctgccaattgaaactgcacagcggaggaagtttttgagttcacatctgccgggatgggaacgcagtgcgaccagggactgggtggaaacttttacaacagtaatgcaagggcagaagcgtcctgtcctgagcttgtcacgcaggcagatctgaccaagtccgcctctcagcctcacgttcttaagtagcatctaagcaaaagaaaagggtgggcaaagtgctagtaatgagatttgaggcctctgagtcgactcccaagcagaatgtgagagaagggtgccggctcctgctgggcagctgcagttgctccgcagctcctggccgagaatctccccctttggaaattcctgagctgcccaggcgttttgaatctctcaggactcagcagcagcccaccccctcaacgacctctccattggccagaatctgggacacacagcctgactttgtgctcagctgagggaaacccctcgcccaacaccaaaaccggcgctggttcatttctctgtgcactctgggaaagccactgcccctcagaccgcagttgcgagtagcacgaggatctggggtggcggggggagtacaggaacctcccggttcattctccctcccgggctgcttgtctcctccgtacctctcgcagccccttcccagcctctcctccccagagcgccgccgacactcgccgggccgcggctcaggttttctgctgctcgcgcgaaagtggctcggggagctcctggccacaagctcagcacaccgatcctcctagggctgcggggggtgtgggaccagggcggtgcgctacgagactccgggccgtcctctgcctcctcagacttttcgagagaaaagttttcaaagtctctccaccttttttttttttcaggggctcgggagaatcctctccacagccagggatcagcgtctatctgggcgagggcagtgatttatacagtagaatccaggggttaccgggctccgccccttctctctctctctttttttctttcatttgttgtttggggaggaggggttcttttttttttttttttttttttttttgcttctgccccagatctttcctggacagtgcgtctcagcagttcagatccgggggcccccagctgacagagggcgtggggggttaaggcattaacccctcccagcctcttcctgaagaaaccacccagccttggcgcggcgctgggtgacttcgcgtagcaggcagggaactggccgcggcgagcgggactggccattggagtgctccgctgcggagggaggggaccccgactcgagtaagtttgcgagagcactacgcagtcagtcgggggcagcagcaagatgcgaagcgagccgtacagatcccgggctctccgaacgcaacttcgccctgcttgagcgaggtagggggcggcgaatggcgggggtcgcgggcgcggggagcccggttgtggtagggcttaggtgtcagaaacgaatttttaagtcgaacgaggcaaacaaaaacttagaaaacatgcatctccgggcgctgaaaatttgcatctctgggctactaaggagcccatctcgatcagattgttcttgggcacttgtgatttatggagttcagaaaaaaggttaattcccaactgtggaacctacgggtgtaggggcagtgaaaattgcagttggtcggaggaataggagggaaggcgttaaattttggaaatcctatagacaaagaatatggtgggtggtgtggagcgtgggtaatggcttaaattagtactgcccaggagcagggtataaaattagttgggggaaaatgcggagcttcttggcttgagcagcctctgctgttcgcggagttgctgggattgttctcatctctattacctcattttattgcattgctgcattaccttgaaatatttaagcaacttagaagtagacttctgctgaccagtgccgtcttagaaagtttctttgtaactttctagtcctaggagaggagtcaacgtgttgggggactgcagtaaataaaactgcccacgcaaatttagcaatgcaccagggagcagtttaatgtgagtttctgaagagtagttttgcaatcgaaattagaaatgtggtagcatgtattatggctgtcatgagtagtttgatttctctcttttgtgtatgttttggctaaactaaacaaagcaaaaaatatttatgcaatcaactaatgtacgaaacttctgggatttgctgcaatctgttatgaatggttttaactgaatacctttaaatttacttgccctggcttggggtggggggtggggtgggggggcgcggg

SEQ ID NO: 3867 - DNA, 6000 bp, Homo sapiens
actgcagcattgacctcctgggctcaagtgatcctcccacctcagcctcccaagcagctgggaccacaggtacatgacaccacaccaggctaatttttatttttttgtaaaaacagggtatcactatgttgcccaggctggtctccaactcctgggctcatgcgatcctcccacctcagcctcctgaagtgctgggatcaaaggcatcagccaccgcaccggatctccttttattctaaaaggtggagttatcaagtccacattcttgctgaggaaactacacaaccaatcttctttcttttagtcaagggagcactgttactctgatagattttgttgggggagggaagcaacaaatgttatttacttggttattcaagtttgccttgattcagtgtggtcgtttataattcagggaagtctagccaccctggtttcatcttaaagcaaagtttggcctatcctaacaaccccacatgttgtgaggctatgtacattatcagtgctctccccctactccaacacactggaaaatggtcaaggaagcctgtcagcagtgtgatcaccagggggtttcatctagtactgtggaagtgatgtggtaaaaacttcattgctgtgttcccagcatccagcaaagtgcctggcataaaataggcatttaaacataaatgttatggagcagatcacagtatgtttttaaacagatcccttcctctctctctctctctctgtctttctctctctctgatccaggatccccagcaagactaatgtgcctttttgtttttcatgacattgacatttataaagagtctgggctagttgcagaatgtctcaaattctggatttgttccagagtgcttttttaaaaatataaatcaggaccaggcatggtggctgacacctgtaatcccagaactttgggaggccgaggcaggcggatcacctgatgtcaggagttcaagaccagcctgaccaacatggtgaaaccctgtctactaaaaatacaaaattagctgagtatggtggcacatgcctgtagtcccagctaatcgggtggctgaggcaggagaattgcttgaaccctggaggtagagattgcagtgagctgagattgcaccattgcactccagcctgggcaacaagagcaaaactccatctcaaaaaaaaaaaaagatatatatatatatatatatatatatatatacgtatatatatatacatatatatatatacgtattttatatatatatatatatatatatatatatataaatcagatgaagttattcccatatttaaaaccttccacaggattcctataatatttagaaaataaagtccaaactcactaccctggcttacaaaggtctacattgccttttgtatgttttcttctttctcactgcagccacagtggccttcctccggtttctcaagtccacaaagctctcaaatcctgcaaaatcctcgcaggactttgcactggctgttgccttttcctaatgtgcttttccctgaagtttgcttgaaggctggctccttctcataattcaaatcccagtttgaatgccgttttctcagagaggacttccttatcttagcccccaatctgaagtaaagtagtcacttactcactctcacatcacccttcttgtaactctctgcatggtacctatcataacctgatatttttctttttcttttttctttcttgaagcagggtctggctctgtcacccaggctagagtgcagtggctggatcatagctccctggagacttgaactcttgggcctcagcctcagcctcccgagtagctgagactacaggtgtgtgccaccacaccaggctaataaaaaaaattatttttgtagagatagggtctcactatgttgcccaggctggtctcaaactcctggcctcaagcagccgtcccaccttagcttcccaaagtgctgcaattacaggtgtgagcacacccagtcctgatatttcttgttgtttatttttgttgagctccaagagatcaggggctgtgttctgttgtgctcactactatattccctgtacctagaacagctcctgacacacagcagaagtttaatacatacttgctgaatactgtaatgaataagctgagagctgaggatgaaaagaagccaaccatttaaagagcttggggaaaatctaggcagggaggaggtcctgagagaaccttgaggcttagtccattctagggcatgaagaatgccctgtgtacttggaggaaagtgaggcagcaggaggaaaaaataggagagaagagagaaattggcaggggcaagatggcttaaggccttttcccccacaggaagtttggattttattttaaattaaatgggaaatcactaaaggtttacgagtacgagagtgacataatctgacttatgccatttaaaagatatttttcaatttgagtgattaggaagatggaagtaactaatatcagagatagaaatcacatatgtaagagaagatttgcagggggtaaataattctggacatgttgaatgtaatgttgtacttctggctgggtgagggggctcatgcctataatctcagcactttgggaggccaaggcaggaggatcctttgagcccaggagttcaagaccagcctgggcaacatagtgagaccttttctctactgaaaaaataaaaatagccagacatagtgtcaagctcctgtggtcccagctactggggtgtaggggaggggtgagatcggaggatcacttggccctgggaggttgaggctgctgtgcagtgatctccagcctgggtgacagagggaggtcctgtctctctctctatatatataaaatttcctttgtggctttcacagtatccatactttaaaagaatttataattaagaaggaattaatacctacctctgaaacagtacagccaaccaattccattgttatttacaagaacctgatattaaagatggttgtaacgataataggtatcaagtatggagcagtttctatgtgtcaggccctatgtcaaccacttaacaaccttacctcacagaagcatcatagcaacccttattagaagaggctttattatgttttacaggtggggaaactaagactaaagaagataactcattcaaggtcaatcagcaagtaagtagcagaattggaactcaaacccaggtctagtttgatgataaagctgttcctttaagcaatttgccataacatgcacctaatgggaaatgttgcttggatcactggttatggccatcattcacggagatactgaacccggagttttctttaacatagcctttaccctgtagaaacatttaaacttcatttcagaagagaaatatctatttgaaaaataatctaagtaaattcatcagatgctttaccccagagagactctggtcttggtattttggtttttgttgttgtttgagacggagtctcgctctgtcgccgaggctggagtgcagtggcgcgatctcggctcactgcaacctccgcctcctgggttcaagcaattctcctgcctcagcctcccgaatagctgggattgcaggcgcccaccaccaggcacggctaatttttgtatttttagtagagacggggtttcaccattttgaccaggctggtctccaactcaggtgatccccccgcctcggcctcccaaagttgctggtattacagatgtgaaccaccgcgcccggccggtattttgtgaagaacaaactataaggtgactactattttggggtcaccttgacatggaggagaggtgaatggaaataaaacttattcttcccagtgtctttagaatgtaggcgctgaaactgagtgaaactgagtaaaactgccacccaattttcctgggaaccagcgattctgtagtcaacagaagtttgcttttccaacagctggaaacgccagggttgggcacagcctcaagaactgaggctgccttgttcagactttcacacggtccctctgttccttccacagaggcctctttttcttctatatcccgcatctgccgcttgggacactcattctgtagcgcagcaccaagtcttccaaaaaggcggcgctggttttgcgctccttttttaaagggatctaggccagcctctatctgaactctgtacgatgttttttgtttgtttgttttgttttgtttttgagatggaatttcgctcttgttgcccaggctggagtgcaatggtgcgatctccactcacggcaacctccgcctcccggattcaagcgattctcctgcctcagcctcctgagtagctgggattaaaggcatgcgccaccactcccagctaattttgtatttttagtagagacggggtttctccatgttggtcaggctggtctcgaactcccgacctcaggtgatccgcccgcctcggcctcccaaagtgctgggattatagccgtccgtcacagcgcccggccaactctagacaatatttattgctctactttttagtgtctgaagaagaaagaagaggacaggaaagaaacttcagtctgagggttgaggacacgtcccggagcagaggaggaccaagctcccaagccccctgtcaccttgacacgcagacggttccccaggactgcgaagaggggggcaaccagcgccccgccccgccccgctgcgccgcccgccattggccggtccgaaagacgcggggcgttgtcggtttgaatgagagcgcctggagccggggcgcaggcgcagaggagggcggtgttgagaccggcggagcggcgggacccctaggtggcggagggacgctccgggaaagcgaggggcgctacgagctctggcccacgtgacctgccgggggcgggagcagggggcgcgccggcctcctgcggtgcccctgccttggggaggggccgtgaccacccgtctgtcgcccgaggcggccgccgctgcaccttcaccgcgtacccgggacccgcccgcccgcgggaggtgagcgcttccgcgacgcgggttctgaggcgtttgaggggctctcggagggaggtgacagggaggggtgcgtgtgcgtgcgtgtggggcttctgtgtccagaggtctgggggtgacgtcctttgttttgggcaggaggcgggctgggggcttgcgggacctgtgggcgctgcggggacgcggcgtcgatgctcaagaaaccagaaactcggcttgaggagttgctgcttttttgtcggaaggtcttcaaatgagagtaaagcgttaagagcctcactcctgagtctttttttttttttaagataaaaactatactagagtccagcgacttcttaccactctgaatgtgagtaacaaattgtgaatcaaagcccgaatccccgtggaattcattccgaggctgattgcaatcacttggagtcgggcgcgtcctacctaaaccaggcagtttatggcaaatacctgccttgaccgtgcttaaattagtgaacttttgggcaccaactggtcgatttaccatagaaattggtagttgctgcaaaaagagtaagtaaacataaaacgttaagaaaactctttcctgaaatctatagaataccttcgaataaaaaaaaatctgtaatttccttgttttaatagtaaccagttagagcatttgaactagtagcatttgaactctgttaaagaaaacgagtaaggatggaaattttattggccttaatgcataatttaaccacaccgtagaattaaacgaagtaggttcttggctttcctttctatcgggtttgcattggagcgttcgtggggtgtgttggaagtcagcaggaccaacagagctgagttttcaagctgccactttagaagggtgtaccgaagatttctggcctgataatagccggtgtgattgcttctgataaataccacttttgattgggttctcactattcaggagcagctttagttgattgtttagaag

SEQ ID NO: 3868 - DNA, 6000 bp, Homo sapiens
cattaggtatcctttaatcagataaatgcagaatgtggcacttcaataagaaaactggactcttcagtcgatgtcaacaaaaaaggaaagagagagagagagagagaaaaaaaaaaaaaaaagagtgacatatgaccaaatgtaatccacgaacttgaaagcagcagctgtctaagacctttgggagacagtaaggaatttggattggactggatattagatgataccaggaattccccttcatgttcctggtcgaagcagcagtcctgtgggtgtgcaagaaagggaagaaggggaggcacttggaaaatattggtcaaaaaataaatacctgaaatgaggaaggaaggatggatggatggatggatggatggatggattgatgactggatggatggcagagagggctgaccagatgtctctttatacctggagccaccatctggtagcccagctgggtctctaggctactctaagggcagctctaaactcattcactttacccacaaaactgcattcctggccaggcacagtggctcacacctgtaatcccagtactttgggatgccgaggcgggcggatcacaaggtcaagggtttgagaccagcctggccaacatagtgaaaccccatctctactaaaaatacaaaaaatagccgagcatggtggtgcatgcctgtaatcccagctacttgggaggctgggcaggagaatcacttgaacccgagaggcagaggttgtggtgagccgagattgtgccactgcactccagcctgggcaacagagcaagactccgtctcaaaaaaaattaaaaaaaaaaaatactgcattccctgactctcaggagctgcctgcggaggggcccagggctcaggcacctcattttcctctcattcttcaaaaattgagagacataaagcagagtgtcaacaattattgaatccagacaccaggcacagtggctcacatatgtaatcccacttgagaccaggatttgagatcagcctgtgcaacacagcaagaccccctctcaaaaaaaaaaaaaaaaaaaaaaaaaaagctgggcatgggtggcctgcacctgtagtcccagctagctactcaggaggctgaggtgggaggatcacttggggctgttctcaagcagtcaaggctgcagtgagctatgatcacaccattgcactccagcctgggcaacacagtgagaccctgtctgaaaaaaataaaataaaaattgttgaatctagcaggagaatatctgggtatttattataccattacaccattcttttgatttttctgaaggcttgaaattttcccaaataaaaaactgggggagattttttaaacctaaaaatgtttattagtttaaaaaaaaattactttcactgccgagcagagactggtttggaggggaggtgaccacatgaagaatccataaaatcctgactgagtatccccctctgtgacagacctgaagtggggaactgagaaacaacagagcccccacaaggagtgcaccttccagccttgaagaaagtggggaacagtgggcggggcacgacaggcaagtgtagaccgaagggtgttcagatttctggccacccccatcccccagtctgctggctcctggttccttcacgccacccaccccacagtccaggagctccaggagtcacccatggccaggttctctccttctggtttctgtgccctttctaaagcagcacagagcccagaaatgggatcgggtgccagggcctctttctctttccagagaaactgccctgcccacccacaaaaggtcaccatgaccgatcccatcagcagcctccctccccacccctccttcccagcaggccattggttccagaatttcaggccacagggatctgcccaaggcagagctcaccttgttcttcctcaccagcgtgctaggccacagcagagccaccccaatcttcagctccagccaagctgatgcttgcatttcattcattcctttcattcattcatagtgtactgcttaagagagtgggctctggggtcagattgccggggtccaaatcctagctcttccattactagctgtataatcatggagaagacacttaatgtgtagattaagtgacttaactgatgaattcctcttccaggaatgctgttcctgattcttgaagatgcagcccaagtcccgtctcctctagaggccctctgggatttcctccaccctcactgctctgtcctctgaattcctttagccttttctctcagttgcttctggagcacttcacccatgcgaccctgttgtgttgaaagccagggccatgccttatccagggggtcctcaggaagcaacctgagtaaggaaatcccaccagagctaaaggacagccgcaaggctagccaagcaggtttccttccttcccagagcctccactgtgaagtgggaggtttggactagaagaacaataaattctcttttaacagaccccaagcccttgctgccccttgatagcacctaaaagctatgcagaagggaggcctaaatgtcccttacacacaggagggaggtccataggttccttacaactggaaagctccatgaagcaggcagcccttccctggggatcagggaggcctccaccagggcaacccctccctcatttgagactctcagtgatgcatatgaaacttggaaatttccctcctgcttttgggagttggaagtatctgaggaagtgatggggagagagctctgtcctgtgcccccggagggaggactggggaggattaaggactatttgccaaatgtgcttggggatgaaggaaagggttccttggatcccccaacctatctgcctttgggtggaaaggccacccacctggaaggggcttctgagctcatgccttccctggcaacccctgcctcaaggtgcaaggccccagaaccaccttccgtgatccagagccagggctactctttcctcccacccagaaagcttattttagcaacaaagggagcgagatgaatggagagttgcagcttctccacgggttggcttgggccttcaccagaaatgagagtctcattacccaaccccaattcaaaggataattaacagatggtataatttccaagcattctctgcaccacatggctattaggtgaagaacaaaatgcccacgcagcccctagatccttccaaactccagagtctgaggaagtctagagaggcagagccctgcggaggcgtgtaacccacgcctccatctccagagctgcccttggccttgctcagaggaagaaagctcctgtttggtcaaaggggagggcatttccttgagccatgggtcctcctcctacttctatccatcctgccaggagcacagtctaaccctaatctttcttgctgtacccaaggcccatctcctttcctgtttccccaggggaaaagagaaaagctgatttctcatccttggcctcactgtgtggtcacacagacactccttgggcctggggctgggggatcctctgctgtgacccagtgagagtggcaccactgtgaccgggggcagtggtagaagggagcacctgatccagtgcttttcagatgggttcctccagaccctcaagttgcacagagcagcccagggatttcttggttgggggagtggtggagaggggcaaggccctgaccccctcacttcaacccagcagcactactcatctgttctatattctggccttccacttcagatttcttttgaagaaaagaattctactgctaaataaacatttgagaaccattcaccttattcaatcccctcattttacaaaaagggacattgaggcacagaatttgagcaaggtcacatagctgtggtgttggaggctgggacccaggcccaggcatccccccaggccagggcatccccccagggactacctgactgggcccctggctgctccaggatgtagggaagccttttctgggtcgcctgcacggctcctgcctggctctccgtgtggtccagcttcatgtctggtcctcttggagaacccctggaatcctgcacaccctctcaaatgaagctgccttggagagggtcaggagcccgggtaccaggtaggcctcctcgctggtcacaaaactgtggcggaaggagggggtagccgcaggacatggacagggaggcaggaggggatgagaggccgcctctctagacaggacctcagggggcagtgtaagccccttgtctagaatccaggaagcctgtgttaaagctaggctccaccgcagccggcctccgaatctggtgacagtgtgtttgcaccacctggcttccacccactctgacccttctaatttacttccctggaaaagcccaagtggtgtccaacatgaggctggggtcattcttccaacagcccgaccccaaggggcatgctggtcagacaacagcctcgctggtggggtggaggggacggtagggagcgagtgggcccggtgactcattgtgggtgcttctctgggattttggaggctttgttgtgttgctcagggcccttttaactctgtctgacctatgggaggggacagcaacgagggcttttatgactggaatgaactggaaacttggcctctgagagcccttaaaatgttttggaaacctctaggcatacttagggtacttccaccatgattatcatcggctgtgtggcttccgatcgctaattcgcaccgggcatctggcgaggccggcctggggaaattgggatggagggtcctgctggagggaatcctggcgctttgggcggaggagtgctctgggtggggcccacctcctccagcgcggccggcgttgccgctttaaggcggccgcggcgcgagcaggtctatggtaatgagccgccgccgcgactctgcagagctcgcccgcccgccggggaggcgagggagcgcggggctgggcccggggccgcggcgacaggcagcagccgcggcggggacgcggggcgcgagcgggcggcgcgggaccgtcgggggccgccggggccgggccggggtcggggcgcacggctacgcgggcgcaggtgggcgatcccataggggcggagggggcaccccggctccggaacccggggcccggcaaggccaggggcgccgcggggcccccgggcgcaggtggtgagtgcccggagcgcaggtggaggcgcggcggcagcccgcggtgctcagggtgacccgggagcgggtctggctcagggggcagtgggagcccgggctcgtcggagggtgcagcgcggggtcccgccgagccatccagacgcaggccccgcggggcgcacgggaggcccccggggactggcgccctggcccgggcatgaggcgcggcggggccggcaggagccggaggaggagccgccgccgccgttgacccggccgccggccgggagctgggagagatgcggagcccggccaccggcgtccccctcccaacgccgccgccgccgctgctgctgctgttgctgctgctgctgccgccgccactattgggagaccaagtggggccctgtcgttccttggggtccaggggacgaggctcttcgggggcctgcgcccccatgggctggctctgtccatcctcagcgtcgaacctctggctctacaccagccgctgcagggatgcgggcactgagctgactggccacctggtaccccaccacgatggcctgagggtttggtgtccagaatccgaggcccatattcccctaccaccagctcctgaaggctgcccctggagctgtcgcctcctgggcattggaggccacctttccccacagggcaagctcacactgcccgaggagcacccgtgcttaaaggctccacggctcagatgccagtcctgcaagctggcacaggcccccgggctcagggcaggggaaaggtcaccagaagagtccctgggtgggcgtcggaaaaggaatgtaaatac

SEQ ID NO: 3869 - DNA, 6000 bp, Homo sapiens
cattaatgacaagctgaaaaaaggagcaggactccggaggcttgggttctggttgcacctcctttaccctctagctgtgtagcctagccctgggcaagttccctttccactctaggcctgttcatctgtaaaatcaggagttagacacctgacctcctgtgatcctttcagctttgctactctggccctatgtcaagcttctgaagcagggttgtgctgagcagtggggatttgtgtctgcctccccaggcttcagcaccggggatgaccccacccaggtcctggacagtatttcccagagaaggggacagagcccaaagccatggggaaggaggtacgtggcctgggtaagctgcgtcctggcttggaggatgtgaaagaagttccagggggagataactcccctccaattcagagcaattaaagtgccaagttttcaggccccagggaagggttttggggaactcccctttccataactgtgcttccctgtcttcttccttgcctcatccccatagtatagatctggggtttgaaccccagttgctcaactgtgtggctctgcaaaagtcacttaacctctctaagccccagtgtccatatctgtaaatggaatcattgagactaacagagaagattgtgtaagactactcacacgaatacgcctagtgctgtgcctactgccagagctcccttcccgagtctggaaaaggactgttagggcagatggcccccaggccacagggcaaatgactaattcgctttgcccatgcactgggtgtagggcagggcctgtggagggacaggctgatgatgggaaggttggatgggaagaacatgcagaggatattaccctgattgctagtgaggaagggccactcaacctgtagacctatttattgtgttattaataaataggagacccaggagctctctgggacttttctgtggggttccagcattgagcccctgctgatggacaggaggtgggcagcatgggaagggccctggtccatagcaggcctggcctaaacatgcactgtgggtgttcctgccactcttttgagcctggttcatccgaggcccccagtttctaatctggttgggaaggatttatttttgggtccctgtaacctagcaatgggctcacatgaccagtggcagctgcaggctgaatataccattggatctcagctcctggcagggggtgtaggccagacagtgggggaataaagagaatggaagggctctcacctctgctttcctctgcctccctcctcagccccttggcctggctcccagatgctgggcagggtgaggtgagtgcttggaaagcaggcatggctggtgctggtacaggggggccccaggaagccaggaactgagctgtggtgtggaggtcccagctgtaagcctgctgtctggttggcaggggcgggggggttgggtgcccatgcggatggaggtggatgccaagaggacacaatgccagcagcttggcgggggaggcctggctagggagtaggcggctgacaggcagtctatgttgtgggatctcagggacatccctggtcgatgctggaatcccaacgttctgcttcttctctttgttccctgttaaattgttaatattcctgggaaagaacacattaagttgctatcagtgcaaatgggtttatcaacctctttcctgagagcagattctgacacaaggcagagaaggagggtagtgggtgccactgagcaggcaaggggctctagggagggggcagtggcaacataagaagtcttcaatgtttattgaagaagtggatggatgaatgaaagataaacttgattggcttccaggtctcatcctggggcagaaaagggtggatgggcagacacgaccctgtcacgaggtgctggtgcacaagggttgggtaaaactgtaccagggagcaagtctaggatgcaaagatcagtcctcagcagcaagggccctgccatgataccaagggaaggggtgccactgttggaaacagggcctggtccccgtcctgtaacaggattcccttcctgggtgtgtgcacagcatagtgagccatggatctcttatgtggtttgggggatcacactcagtttctccatcttggtcttcttgccccctccattgtgctaagctttactaaaaggagggactggcaggtggggttgggggtgtgctgtcagtagctactccacaccctgactgagatcatttaataagatacagcataagaagtgcctcccaaagtgggccttcaagaactagtagcattattattattattatttattattattattttttgagacagagtctcactcttattgcccaggctggagtgcaatggtgcgatctcagatcactgcaacctccacctcctgggttcaagcgattctcctgcctcagcctcctgagtagctgggattacaggcatgtgtcaccatgcctagctaatttttgtatttttagtagagacggggtttcgccatgttggccaggctggtcttgaactcctgatctcaaatcatctgcccgcctcagcctcccaaagtgctggaattacaggcgtgagccactgtgcccagccagcatgattattattattatttattatttgcccacaggctagaataagcagttcccccgccgacctcctgagccaagatggttccaacagctggaacatgctgcctctttggtactgcctttcccaatagctctctgggaggggcttcaggacacggacgccttgcctgctggccaccacatgagctgtgattacctgtgctagctccctgaagctggagaggcaggctatgtttgttttgcaggctccctaccactattagataagcttggaagtgaagaattttgcccattttcacagacagccaactcacaggccaaggtcttaccaccaaccaatagaatggcgccaaactggaaccaaggttttctgactccagtctagcgctctttctaaaatcctgttccagtgggcccaggtctgctccagttcttattgaatccctcggaaggggccatgccagtctgggctggggccctgcaggaagaatgtgggtgctgagcagggacaggctttacctaatcccagacaatctgcttgatgccaaattaatcttgccaacacaacagcacagggcttcctaaaaatcactttgctgtctacaggttttcaatttggtatttccatttgaatttcttgtacgcaggtatgcctaattttgaggtctgttttaggctttctggaaggcagtgactacttctatgaagatagcttttagggctgtagtccacagtcttgtgtcaggccactggagaggccacggaacgaagggagaaggaggaggaaatacttggacttcaaacagatctgggttcaaatatcagctcttgcacttattagctgtgtgatttggggaaagtcacttctcctccagcacccggttcctcacttataaaatagggcaagtcatggctgcctcatagattggtgtggggatcaaagaaactgtatgtaaagggcctggcactcataacagctcaaaaagtggtggctggtgacagcggcacttgctgcatcggctcttggtttgtcagtggcctctttgtttttgacctggggcttggggcagccaacttgtcccagtgaggtccttgggtaactcattgttcttatggctctttgggttgggtctggtaaacaattccagaattccctttttccttcttagaggcagaaggagtccctagataggcaagtctcagggaagcaggctctggagtaggggatcatgcctgaattccctgtttagactcatggctctgccatgtggagctatgtggctttgagcaatctctttatctctctgggtctcagaaacatggataccttggcctgtaggatgtcctacagctttgcaatgttaggattctatccttgggtatcagtcatgtacccgggtaaatgatcattttcttcatagctagagggaggccatgccccttcattgcgtctctgaaggcccatcatgccacagatgggcgatgctcagtggctgatgctacctagctctgtccagtcccacaaatccagatcagtgtgagcattcctgagtccctggcccccactctgtctccttcaggaagcagtgttgtggtggttcccatggtggctcggggggatgttagatcctcccgccccctccctgccaatctccatcagccctcacagccccagttccaataaacatacaatctaagcaaataataataatgtgcttttgggaggcaagggcagggttaagacaaagccttcagctgcccttcaaacctgagtgctgctcctaaacctgtcccccatacgcattaggcagcttccaaaggggccaaaccttggaccatcccctggagcctcagccgcctccctggcctaagccttggggccctgggtctgcgctgacctgcctgcatcagcaccttggttctgatgtcacacagaaccatgcatctctcctatcttctctttgaactgctaagaaatcaaggccaaaatgcaacttgcccaaggtcacacggctagtaagtgccatagccaggccttaaacctggattttctgactccatgtacttttttttttacttcatcaggctggtcaagagggtctcccctacctatcatttcctggccccacgaaatttttgagacgcaatccagcagcctgagagaagtgagaggagttgagctcactgccaggcaccttgcctggggcattggtgcccacctttttgctccagaagtgactctgaggggctgggtgggaagcaggaggccattaggacccagaggctctcggagcactctgctttgccggctgcctctcaccgctcactgcagtgcttcaggcttcagcagccttggagaagcatcagctgagaggagctatcacatgggagccgggactgctcagcaaaggtaggagttgccgactaggccaggaatgggggccagacccagagcctggtggtgagtgccaaggtatccccacagaagggtggctttccaaggaccagccctgcctacattccggtgagcagtttgatcaggagatgggctctcaggtatcccaaaggcggtattggggtgtgggcatctctgaagcccagagctggggggttgatcatctcctgccggcaggagtacccacatcctgcagacaaacagcattctccatctgtcttgctccatgtcatggacatgggtctcccacattctaggaatgggcccttcagcatacaggctgatgggcaactgtgtcctgggcgtgggcaactctgctgaggagaggtgttgtagctccctggaaatcttccctagcttaggaggggcacgctcttgtctgaaggaaggccaggctcaggtctttgggatggaagctctggatctggaaaacaggtgcatgtgaatcccaatacctctgtggccttgggctgggcacttatgcacatcttgcatcctgtaacttgaccatgcccctgctagaggcccagacctcaggccctagtggcaaagccttctaggtactgaaggtcctggaggtaagaggggtgctgttggaagtaagtagtgggggaaggaaagcatctgttgggggagtaggcataatgatatgacctgggagaggagtgaggctccctgggtttcacctatgaaactgttacaccacagccctcccctccataaccccagtccattagtgagggagtgcccattagccagatacactgatctgtctgttaagaggtaaattggaatcctggcatttaggagtcactgtggagacactggcaagcttgagggagctatgaaaaagagcaatgtccaatgccttcttgctcagggctccatcatggcttcgtggcatccctccagctccacgtggaaaccaggt

SEQ ID NO: 3870 - DNA, 6000 bp, Homo sapiens
ctttgctgtcctttactttctgttgcccctgctcctcatacttgtggtctactgcagcatgttccgagtggcccgcgtggctgccatgcagcacgggccgctgcccacgtggatggagacaccccggcaacgctccgaatctctcagcagccgctccacgatggtcaccagctcgggggccccccagaccaccccacaccggacgtttgggggagggaaagcagcagtggttctcctggctgtggggggacagttcctgctctgttggttgccctacttctctttccacctctatgttgccctgagtgctcagcccatttcaactgggcaggtggagagtgtggtcacctggattggctacttttgcttcacttccaaccctttcttctatggatgtctcaaccggcagatccggggggagctcagcaagcagtttgtctgcttcttcaagccagctccagaggaggagctgaggctgcctagccgggagggctccattgaggagaacttcctgcagttccttcaggggactggctgtccttctgagtcctgggtttcccgacccctacccagccccaagcaggagccacctgctgttgactttcgaatcccaggccagatagctgaggagacctctgagttcctggagcagcaactcaccagcgacatcatcatgtcagacagctacctccgtcctgccgcctcaccccggctggagtcatgatgggccgctggacactcggagggatatggggctggggccagttatgattgcaaggaccaccttgtgggatcaccttttcccagctggctagggctgaggctggggtctctgcacacagcttttgcttagtgtttcctgggtcaggaacagagccaacaggatgaacgtgtgcaaaagccttggacttggctgtgatctttgactgctaggggagggaacctgggtatggtgagacggtgacgagagaaaagggtcacaaaggtgaggtgaaacctctcaattggtgaaatttccatgcttccagaagcagggaattctctaagggtaggagttggaggatacagggcagcaggccaggtttggagttattctaggggccatttaggatattttatttttcagtgtaattgtccagggcagtaattgcacccaagcaaggtaagaaaatgacccatgttttctcatttccttgctaggtttaaaaagaactaaattatagccaagtgtttccacttgagttaatagatcatttttctggttttatacctgagatttccttaaaatgagaggaccagtagggtgtattcctttactgagtttggccagaaacaaggcaaaatagaaattagggtacatggagtagaagataggaaagctgactgcagctctctctctcccacccttcaggaaaagcccttctgttctatttttctgtctctctcctgcacacaggagatcaagggtagagcctgatcttagcagagacaagaataaggcaggatggctttcctctcttttaggaggaagaattagaatgactgggggtcagacgggcgagggtggaggttagcatttgaattggtaaagtagctggaaacagagaggccaggtaatcagcctgatcaataatactgcgaatcttttctttccaggactggcctccctgatctctctcctcatggcagcgacccacctccagtcccctggacaatcgggtacaagagacttaaggttgggcatgggaagggtggggtttccatgatccattaaatgccttcctactcccattcatcgctctcaaaattagcttcagtgacaaagacttaaatctctctcctatctgcagcactgggttggagagagggcacgggagttggtcttggctgttcattgattgagactgtaggaactgtgttggttggtattggtggtggtattttcaacaaacagggaataactgcaaactggacaggacacccatctgggaccacctgtccatcctacttccctcaattgaatcaggtaacactaacggatcaaggcagggccagagggtggtgtggtctctatttgaacaaattcctggctcactgagcatcaaaaggggaaatgggctggtgggagtgggatagtctcccatttaagcagctaataaataatttttatgataaaaggttatactgataacaacattgactcctttagttcaattcagtgcataatagttgaacacccactagtccctgggacccacacagggcgtgtggtcattgcttttaaggagttcatagtctaagttgatgagataccttatattttcacaaagcactttgatttgataaagcactacagaatgtgcttgagaaatatattggagaatatgtccatggctctaacttctgagagttcagcccgtggcagcaagatgcataccttgaagcttcctgcagattgtggaaagcataggggttgtaaatgaaactctctaatgaagaaaaaaaattaaatgaaactgggcaaacagctttccccctttgttctaggaaaatttctaggttgtcttcctaccactagattattataccagtctagtgcctattacattgtggaagttccctaaaaacatagtatatatagggaggagagtcctttgtgattgaaaaacatgttcacctctcctccctattaaaataaatgcatacagaggaatcaatcattcctagacagggaaaaaactcttctttcaaacaccactgatcagctattagatccaaggaattgccagcaggtggcagtgtgagcccaatggaaggaggaaaggcgagtgtacgtggtgggaggaggaaggggagggcattaaacattgcctggcagccattttgttaatttattttgccttttcctttgactttgccctccagcccttccttcacatacatcaaagaagaaagttttaagagcaagggtatctttaattcaggctgaaatttcctgacactgtgatctcactggtgtttattacagagtttgacatacatgggttcatttgccatttatttttccctgtaggagtggatcatgaaggaaataaaaatttctcttttattatgctgagaactttcccaacaatttctgctatgaccaccttccaggagttttctagtcaccagatgccttggtaaagttcaatacgtaatctttggctctgaaagctgttcctggacaaaatctgagctaactcactgaagaatcaacagattgaggcaaccatccggtcagttactttttcctgcatcctgctggtgttggggtaactcccaatcctagatgaaaaccttagactttctgttgtcaggtgtccccaggcaatatcctacgggggcatgatagaaaagggtaactctggggtcagatagatgtacttactcactgtgtgaagttgggaaagctgcttaatttctctgagcctacttcctcacctgtaaaaatggggatcattattacctacctcacagggttgttgtgaggattaagagatgggatgtgggagcacctagccgtatctggcaaataggtactcaataaatactggttttacttccctttcctcttgccctttttccccaaaagtattgataatggaaaagcagtccctttcattcttaacagtcatttgggaatgactgggggacttttcaaaccttgaagaattggcattgctaagagttaaggtggacgaggctttttaaggtggctctaatcctctaattaaatccttctaattaatgaatcatcactatataaacctctctgttgggaccttactttctcaagttcagattctattagagaaataaatttacaatcacagggaaaggttttagggactgagttcccttcgctagaacgtatagtaattgtgggcttatttgcctgaaaagttgatttaggactaccttcacgcagtatccagggttattagtgaaagatgctatctgcctgggactttcacagtggacttaagtttcaggtgatactagggctgagaggcaaattttactagaacctctccttttgcatgttatcgcaacaggaaattttagtaggagattcacaggatgcactggtttgtttcggggtgtggaattgaagttgacttatcttggttttagttctaagaccctaaggtaggaagatctgaattatactggagagaagggcagcatggaaattttatggaggaactacaggcttacctttcaggttatcgagtatctgctagcgatttcaagtggccttttgccaatataggagttaagcaaatctcaagcccacagaaatacgtgaatagcaaaaggaccaggggacattttgagaggagtcagtgggccagagacggcaaaaagttattgctgaggtcctaagcacagtcggtgttacgatctcagatgtgagacgtgaacggcgcccaggccggatagcttgttcccattccattgatctgagataaccccaacggaggcagtgtcccatacttgggtaggggtcccgagtctccacagccagagatcaaaggagttttctggcaggcgagaaattaccagcagatattcccgcgcgggatgtaggctttaatttagaaatctccgccccaaaactggcatcttgaacgcgggagggcattatgagttagaggccccggtttttctccatttatccaaatcaggtagccgaaaggtaaatgaggcttcaagttgggcggcgggcagcgaacttgacagaacctcgaaactctgcagatccgccgcccaacccagccgccagctccccgtgacttccgctttcggtctcaactcctctccctgaggagagtggtttaaacggtgaaggctgcggggcgtcgccggaagtgtcgtaaacgtcggatatccggttcttctgggcgctaagggagctgacggagagggccaccgcccagcaatagacggtgcctcagcctgccgagccgcagtttccgtggtgtgagtgagtccgggcccgtgtcccctctcccgccgccgccatgggctgcacgttgagcgccgaagacaaggcggcagtggagcgaagcaagatgatcgaccgcaacttacgggaggacggggaaaaagcggccaaagaagtgaagctgctgctactcggtgaggggctggaggcggggactgagtggtggtcgggagagcctaggcgcttggaaggcctgaacggggtctggtcgggccgacggaaaggaccctaaagggatctggagggcgtgccgggcgtggggcggggtgttggggttcctagctgaggccccagagggcgtgatgaggggggtggggttttggggttgcgggaattaggctgtagagggtgtgactccgggctagaattgcgtttagcagagagacttgggagtatgggccggtagatgttgagggagtaggaatatgggaaaagctcataaaggaagagttgatactaggaaggttttacgttgggttggagcgtgttggtaacgagaacggcatagagtatatgttgggcttgtataatggtttgtgagtttggagcgtcgtggttctttggcaggataaagctagcaggcttgaatggatggtacagagactggaacagaatggtcacataaggacgttgacatttgttagtaagagagccatttgaactgttggaagaaccctggattatccaggaacatgaagataggtaggtgagataaatgacaagttatcaggtataaaggaaaagagcttgggtgcagaggccatctctacttttccaccgtttcctatcatttttattttcaaagttttataacgtcttcttctgtttttacaaaaggatgggaaatggtgtgagctgaagaaatttaaagaatgatttctttgaggtttgtagcagaagatctagtgaacaagagattacacattggaggatgctgaatagttgctata

SEQ ID NO: 3871 - DNA, 6000 bp, Homo sapiens
cacttcttggtgagggccctccttctggttcacagacagctgccttctcaccatatactcacctgtcagaaagagagtgtgctggtccttcatctccttggaagggcacaaatcccatcatggggcttcactctcattacctcatctaaacctaatcagctcccaaaggcccctcctccaaatactatcacatcggaaaccagggcttcaacatatgcattttgggggtacacaaacaggatccattttttcaatattggatcactaggagtccatagcactccttgtgatccagttttgggaaaatcaaaaggtatatgtgcattggtgtgggtatgcatcacgttaaccaagaataagaatgaatatcccagactttggaaatatgccagtgttgtactcctttgcaactgtcttaatgtcatggtggcaaatctcaatccagtggtaaaggtgggcacttctttaaaataagcaaatgtccctgctggtagttatcccaaaaagaagttagtcctggagcaagaagtggtggggcagtagggagagctttctgctctgcctgagcacagacagcaggggaccagaagtttggaacagttcatacattaagaatatgaacatcctttactttgaacttcaactaatatattccatttaaaatttaatctctacacattcttcccctttgttcacaaaatatatggatcaaattcattctgcatgataattatattaacagagaatcccaaaattagttttaataaatggaaaaagttggtgttatatatttcaaataatgccgctgaatctttccaaatttgggagctctacaatcatcaatcttttcagtataatttgaataactgacaaccaaaacttttaaacatacatttataaatattaataaataaatatacattgaaactaattaacaatgaaggaaaactgaacgtaaactcataataataataatgggtaaaaattattgcatacttactataaagtgcttattttcctgagggctttatgtatattaatcttcataatagccttatgagataaggtactattactatctctattttttagatgaggaaactgaagtacagagagtttagtaacttgcataaaaccacacaactatttaatcttctttattcctcaggaacacggcctcaagaacaaccaagcacttgatacagagttaactctaactcatatgaaccaatcagtgcacaccaggtcagcaccaaggtcaatatatccaaaatgagattgtataagaggaaaggaccggaatgcacctccaagaaggtctggcaaagtgagaatcagctaggcaagaggttcaaagtagactcaaggaagatgaaggggaattcttgagccaaagcacaagtggttggaaaagatttttaggcttcctgaggctgtggagtgagcatatctagagaaaggggggtgggagtggaaaaaaggaaagagcaaagctagcaccactctggcccttagtcccctttctctaggcaaatcagaactggcattttcctagtgtgaaggcgctgactcactctaggaaagttttgaggtggggagcagagtctcacaaccagtccccagtcagtgtgcataagaatctcctgggaagctgttaaaaatgcagattacttctaaaaaaaaaattgaatgcacaaaagcagagagtagagtggagattaccaggggctgggggggggatagttgggtggggtaggggagatgttggtcaaaggaaatttcagttagataacaagagtaagttcaagagatctattgtacaatatggtgactatagttaataacaatgtatccatttttgaaaatctctaagagagtagattttaagtattctcaccacaaaaaataagtatctgaagtaatacatatgctaattaccttgatttagccattccacaatgtatacatatttcaagacatcattttgtgcatgataaatgtatataatttttatatattatgactcccagattcctcctcagagtcactttcagaaatcccaagtccactggtctacattagggcttatgaatctacattttaaataagccccccaagtcgttagagaaccacactttgagaaaactgcacctatacattttctaggtatcaagtatagatactgtccatgggaccattgggaaataaacacttttcctctgaatacttggggtttcctgtccagcttacactggtgacttagtggggcaaacaggggagttcagagactcagtgaacctggcacagtaggcaaaactacaagataggatgtctatccatgaagggagacagcgggagtaggatgccacagaattggtgatatcatatgtctcaaaagatcccagacttacaactgcatgtgaatctacaactatgtcacagtaagtaaaaattttcaagagaaaatccctaacagagatcatccagccactggcatgagcaggtgctatgtatgtgcatggagaagaggtactagggtgtctcccagggatctagtgttagtgtcaactcctgggcccagtcctttgcattaatttggaggaaggggatgaagtagttagctgtcagtatgtggatggtgctgggaagtgtgagagtaccgtaggtatgaacattgcagttgctatgacaaaggacagtaaagtggtgtgagcaaacactcatccaaaggacacagactgatcatcttgtcagtcgactctttgtagcacatctatgggactggctgccaatctctggatgagtggcaaacaatggctactagttatgaacatgacatattttgaaaagctcccttggaaaaagcacaaactggggactcagagcccagatggtgtgactgtccatggaggcagaaccaaaagatcccactattctaagaggatggcagcagctagagtggatcgggagaatattaccagcggtagagatgggaggacaagccattttagtgtcagagtccaccaccagcagaagagacttgctttgaaaggagagtcaattggatactaaatgctgtgcgaaggtttctaaagacattcctcaatcaaaatcaggggataaagcagtcgcttgaatcacctaggcctgtcctttacctggacacaagtggtacagtagggagaattctgaatagtgtcacccaaagctttgcataggccttaggccagcaggtattgcacacctttctctgctattcctcgttactgatattctgatccccactgtgcaccccagtaagccaccaaggtaaactgcttgccttgatagtctctttcagcactctgcactctacacactcttgaatgtcagttaggtgctgttatgtgggaatctacctgcttacctaatagacatagcctggacacaaagttctctggtttatgacactcccattgtacagctgcctccacagctccttgaaattctggatcagggattggacatctgacaggtagttttgactgcttggtatcacagagttcaatccaacaaaaggaagacatgttcccttgtgtgtaatgaatctgcaggtcacttattcaaactatagtagtctgaactcagatgctggatgtcaggtcccctcaggattgtcttcctgcgtcttgactgcagccactcctacacagggtgatttcctgggctggagccagtttgcaggactatgagactatatagactacaaagcctagctaggccccaggtcggcggcagagtaagccccacagcaatgcgttaagccttcatgaaatgagtgttgaatgaatgaggtagtgattcagtgtatatttgatccactgcaacaggtgggaagggggcagaggcagctacttcctaaaataacccttcttcagactcttaaagaactgatccttgttttgaattaaaatctatcttcaattaacttccagtcctttgccctacagataattcgtagtgccacatcagttctacccattctttcacatgaagacagatgtcatgttctgagtcatctttcttcgcctccttccagcagcccttatctggtggctcacatttgagcgagctccaatatgtctctgtagaatctctctcttcttttttcttttctttttttttttttgagatggagtttcgctcttgttgcccaggctggagtgcaatggcgcgatctcggctcaccgcaacctcccctcccgggttcaagcgattctcctgcctcagcctccctagtagttgggattacaggcatgcaccaccacgcccggctaattttgtatttttagtagagacagggtttctccatgcttgtcaggctggttttgaacttgcgacctcaggtgatccgcccgccttggtctccccaggtgctgggattacaggtgtgagccggcccggcctgtaaaatctcttcaaagtgtggtacatggagtgcagtactccacctgtggcctgactgatatgcagtacaatattatcactaaattgctacagacagtgtgcttttcattgttgtcacagaaatgtatttggttagttatatttgttcatatctcatctgactttccagtcttccctcactttgtacagtcatatttgccgagtcaagtaaaagttataacatttaggacacaatgcccgacttactataattaccattattatcttaggatcattacaaaacagaattaccacttagctctcaggccctacctccttcagcctcagaaacgttaacgctaccttgcattgctgcttttagcaccgcccctaataagccccgcccctggggcttccgcggcggaagcctagcgtccgccccacccaccccgagcccgaggcggggctgtggatgtagccgctgattggctgactggggcgcagcttgacggcgtcgggctggagagccgcagtcccggctgcagcacctgggagaaggcagaccgtgtgagggggcctgtggccccagcgtgctgtggcctccgggagtgggaagtggaggcaggagccttccttacacttcgccatgagtttcctgatcgactccagcatcatgattacctcccaggtgagtcaccgcctcccgccccgacacccgtccgcctcccttcaccgaatcgccctctccggtcctccgcggtgcgggctggtccggggtctcgctcctctcttacgcggcctgcgccagtcactctggcacacagagagggtgtgcgatttgctgcggccggttccctcagccccggctgtcaggaggctggcctgcggccgtccgcgtccccacccggcatccatccccggaatttcggtccacttttggaagcggtccgccgacctccaggctaagagccggcgccgccagctaaggcggcggttctaggagctcctcgaagcttccgggctgcgccaactgatcctggactggggaagcctgtgtggttctgggcgcgcggtgtgcgacgcgccaatactggatactgaggacacgtcagtgcaggctttgctgttagatgtcaaatcctgaatccgggtgtggagaaatttgctgcttcaaagtatcagtataaggtaatacctatgcttgaaagtataaggtttcgtttttgcactgacacctcgtcctttatcctctgcttagttacccaccttttccggatgtttttctgaccctcatttcttctccattggccaccttcatttgtttgtacagtcaacaaacatttatcgaccattatataaagctctgagcgtaaaaacatgtaagacactgtctctgctcaatagaagtttcgtctagttagcctcttgcttttaccatgtaatctattgttaattattgtttcttcctagcattcatcatagcactggcatcatttatgtctgtgtttctgattttgttttttgagatcctgccttgttcatagctgtatccccacttccaaatgcaggcattca

SEQ ID NO: 3872 - DNA, 6000 bp, Homo sapiens
cccaggctggagtgcagtggcgtgatcttgtctcactgcaacctccacctcccgggttcaagtgattctcctgcctcagccacctgagtagctgggattacaggtgcgtgccaccacacccaactaattatttgtatttttagtagagatggggtttcaccatgttgaccaggctggtctccaactcctgacttcagatgatttgtcggccttggcctcccaaagtgctgggattacaggcgtgagccaccacacccagccttccttttgggaaaatttatattgttttcctcccttacttttttttttttttttttttttttttgagtctcactctgttgcccaggctggagtgcagtggcgcgatctcggcacactgcaagctccgcctcctgggttcacgccattctcctgcctcagcctcccaagtagctgggactacatacaggtgcctgccaccacgcccggctaattttttgtatttttagtagagacagggtttcactgtgttagccaggatggtctcgatctcctgacttcatgatccgcctgcctcagcctcccaaagtgctgggaatacaggcatgagccactgcgcccggccccccttattttcttaagttaaatgtttagttcacttatttataattcttttttttttttttgagatggagtttcactcttgttgcccaggctcgagtgcaatggtgctatctcagctctctgcaaccttcacctcccaggttcaagtgattctcctgcctcagcttcctgagtagctgggattacaggtgtctgccaccatgcctggctaatttctgtattgttaatagagatggagtttcaccatgttgaccagggtggtcgtgaatttctgacctcaagtgatcctcctgcttcggcctcccaaagtgttgggattccaggtgtgagccccgtgcccagccttataattctcataaaagtcttaatttcaccaataacatttctcttttgatggccaagtgaggtgactcatgcctataatcccagcactttgggattccgaggctggtggatcacttgaggccagggcaacagagtgagaccccatctccacaaaaaataaaaattagccagtgtggtggcacttctgtagtctcagctactcaggaggcagaggtggcagaatcacttgaatcgagaaggttgaggctacagtgagacatgatcacaccactgcactccagcctgggtgacagagcaaagaaacataaaataataaaacatttctctattgatacaacggaatctgattttctaaactcaattcaatagcactttgttctactgttaattgaaaaactctctctaaagtgagatacgttaggctgaggtcatttttcctttctgttgggtgcatggtcaaaaaattgacatatgaatcaattattctttcctagtggtcatttaggtattattaggtcatttactaccaactctaaagcagtgacaccatggagagcacataaaatccatagagctaggtcccataacctctctgtcagtctcctctccttgctactccccctgtgtttcagtggcactttctagctaagattcagtccccttttctccagatggtggtgctacattcccatacctgtctccagagtatctccctcaaactcatttagatcagcccaaccttggaaaatgccaaaccgggtcatgctcttttggcctaatattctttcccacagcagtaggagttgtgatgggaaaaaaagaaaagatggagggtgggctttctcagtgtctccagtattcaccacatcaccccaggggtactacctcaagcatttattgaataatttttccaaacaaggagatttcctgtgagggattctgatgtcacctctaaaaatagttttagaaatatttttccactttcttacaaggggaaatctatcaaaaagaataatggagcagctattcaaaaagaataatggagcagctattcaaaaagaattagagtgtatagccccatttctagcccctatgaggcctggctatactttgtgccatgtgcttggattgccatgaggttacccagtgtttttttgttttttgtgggtttttttttttttttgagacgggggtctcactctgtcacccaggctggagtgcggtggcatgatcacagctcactccagctttgacctcccagtctcaggtgatcctcccacatcacaggtgcccgccaccacgcccagctaattttttgttgttgttgttttgtatttttagtagagtagctggaaccaagtagctggaaccacaggcatgaaccaccatgcctggctaattttttgttatcttttgtagagatggggttttgccatgttgcccagactggtcttgaattactgggctcaagcaatccattcgcctcagcctcccaaagtgtcaccatgaccagctgatttttttttttttttttttttgagacggagtctcactctgtcgcccaggctggagtgcagtggcacgatctcggctcactgcaagctccacctcccgggttcataccattctcctgcctcagcctcccgagtagctgggactacaggcacctgccaccacacccggctaatttttgtattttttttttttagagatggggtttcaccatgttagccaggatggtctcgatctcctgacatgcctgtaatcccagcactttgggaggccaaggcaggaggatcacctgaggtcatttcaagaatatttttgatgctaggcgtggtggcttatggctgtaatcccagcactttgggagggtgaggtgagagggttgcttgagcccaggagttcaagacaatcctgggcaacatagggataccccatctctcctaaaaatacaaaaattagcctgtgtggtagcacattcctgtggctgaggtaggaggatcacctgagcctggggaggtcgaggcactgagccaagattgtgccactgcactccagcctgggtgacagagtgagacctcttctcaaccaaaaaaaaaagaaaaaaagaaaaaaaatttttttttttttttgagatggagtctcgctctgtcgcccaggctggagtgcagtggtgtgatctcagctcaccaaaatctctgcctcccgggttcaagtgattctcctgcctcagcctcccgagtagctgtgattacaggcactcgccaccacgcgccactaattttgtatttttagtagagacgggctttccccatgttggtcaggctggtcttgaactcccgacctcaggtgattcgctcacctcggcctcccaaagtgctgggattacaggcatgagccacctcgtctggccaagcagttatcttaattgccagattagcagggtgattctgggtgggcagaggagtagacatggccccgagagacagtgatgacacagtcacacaggagcagccatgaggccagaaggtagcctgtggggctcacctgaccttgggctgggcactccccttctgccaccccctttatactcatccctggttcgaaagccccaacatgttggcacccagcctgtatcactctcacctctgggtttctcctatgtgttcacaagcccactgctgatttattgtcgcaaagggcccctctcttccctcagcactccaaaggaactgaacatcgaacgttatcttaattagctggcagagggcaagaaggggctgaatatattggaatccttgagaaagccttactcttttacctatccacctcctgccttctctttgtccccacctcagctccttctgcagtaggtagagatgtaggcaatgaaaggggagggcccaatgaagcattttttttttccagttatgattgagatcatggggagacaggatgaggtgtggtgagggcgtatctcaggatccttagctctgacatggggtttgcaggagagagtagggggaccgctgagctctgtccacagactagagcaggaaaggggggaaaggcggcgatagaggttagcaggaatgtttaattatcaggagcaggaacagaactgagggcatgcccaggtccacacaggccctcataggcccagtgttcccagtggggaggaaacaggaagctgtgacttcctctctcttttccctccctgctcttagcctcaaggtcactgctgctgagatgaattccaacctgttttagttggcactgttccctgggcatggtaatagcctctcagtacccttctgccacaaacaccccaaacttctcctttgaaataatattcatacaaattgctatttcacatgtgttctctcattgcatcatgccactcctgtgaagcagacttacctgaaaattttaagcaagaaaacaggcttaggggagtaaagtaactctcccagtcacacggctagtgagcagcaggtctgggactccgcagcctccgctctttcctctcttggacacccatgctgattccctgcctctatgccacctcccaggccccttgctttgggccccaagggaacactttctgcagaggagggaggcctctgcactgttaggaacagaggcagctctagtttggttcctgtcatctctgggacagggaacctccagctctctccctggggtggaggcttggggctgccctccatagcggggtaactctcccttctcccctccctctctgccatttagagcccctcttacaggcgggcgcatgcacatataccctggcattcaggctgtgcctcgccctgccccacctaccaccaatcttgaccaacaggaaggtggtgggttgtcctttccacacccctccctctgaggtgtgggcgtgggccagggctcaccagaggccccagagaagcacttaattctacagcctccttcctagagccttcagtggcctctgccagtctggcagacacttgcagacctctcttctcagcaccaccaatctctgatgccctgcgatgcccacactcaatacttctgcctctccacccacattcttctgggccaatgcctccggaggcagtgtgctgagtgctgatgatgctccgatgcctgtcaaattcctagccctgaggctcatggttgccctggcctatgggcttgtgggggccattggcttgctgggaaatttggcggtgctgtgggtactgagtaactgtgcccggagagcccctggcccaccttcagacaccttcgtcttcaacctggctctggcggacctgggactggcactcactctccccttttgggcagccgagtcggcactggactttcactggcccttcggaggtgccctctgcaagatggttctgacggccactgtcctcaacgtctatgccagcatcttcctcatcacagcgctgagcgttgctcgctactgggtggtggccatggctgcggggccaggcacccacctctcactcttctgggcccgaatagccaccctggcagtgtgggcggcggctgccctggtgacggtgcccacagctgtcttcggggtggagggtgaggtgtgtggtgtgcgcctttgcctgctgcgtttccccagcaggtactggctgggggcctaccagctgcagagggtggtgctggctttcatggtgcccttgggcgtcatcaccaccagctacctgctgctgctggccttcctgcagcggcggcaacggcggcggcaggacagcagggtcgtggcccgctctgtccgcatcctggtggcttccttcttcctctgctggtttcccaaccatgtggtcactctctggggtgtcctggtgaagtttgacctggtgccctggaacagtactttctatactatccagacgtatgtcttccctgtcactacttgcttggcacacagcaatagctgcctcaaccctgtgctgtactgtctcctgaggcgggagccccggcaggctctggcaggcaccttcagggatctgcggttgaggctgtggcccc

SEQ ID NO: 3873 - DNA, 6000 bp, Homo sapiens
tggaaagggccttcagagacttgtcagccctttggagtgtttagggaattaaaaatggagccaaccctatcattgccaaccctgtgataactgagcaccaccaaccccgcagtaaagcctgatcacttggggatcgtccaagtgaaatcaaaccttcccactcagtcagcggttgctcccatgctgctctacctccaggtctcctgctgcaagacagagagctcctgaaactgcatctccatctcattgcttcctgcgctttcttcctttctgtctgtttaacctcattttctttctcctttgatctcattgcctttctttcctctcccccttttctaccttctctcttatatccatgccttctctctaccctcttctcacattccttcctctcagacttcctgctctgctattaattctagccagcggcctgactccataggctggtcatacataagccagatctcaattgctttgctcatgaagctgacatagcagatcccccgtcaccaagttgcgtgcacacgcatgcatacacacacacacgcatgcgtgcaagcacacacacacacacacacacacacacacacacacacttctctttcttgctttgtattatagatgagattctacttaggggtaggattcattattcatgaagggtgtggtcaggtgaggcatgttggaagcaaaatgcgaattaggtaaggtggagtagaagagagctattggcaagagaaaaattacttgagcagtgtgtgagtgggtgggtgagaaagtgggcagggtggactcagaggttgggaagctgctcctgagaggagaagcctctgtctctacacaggaacctacctgacacatgaggcaaaaggctccgacgatgctccagacgcggacacggccatcatcaatgcagaaggcgggcagtcaggaggggacgacaagaaggaatatttcatctagaggcgcctgcccacttcctgcgccccccaggggccctgtggggactgctggggccgtcaccaacccggacttgtacagagcaaccgcagggccgcccctcccgcttgctccccagcccacccacccccctgtacagaatgtctgctttgggtgcggttttgtactcggtttggaatggggagggaggagggcggggggaggggagggttgccctcagccctttccgtggcttctctgcatttgggttattattatttttgtaacaatcccaaatcaaatctgtctccaggctggagaggcaggagccctggggtgagaaaagcaaaaaacaaacaaaaaacaaaaccctggagtgttaggaggagagtgaaggtagaggggtgaggaagggtaaggggcagggctggtttcagctgggggctctcaccagccctcctttcagcctctacaacagagcagcttcccagacttctccaggaacccagaaacgggatggttgtcggcaaaggttgggagtggcttttcctctggtagccacacacctgagcactacggacagggaggcaggtgccaccttgacacctctcttccatagcaatgggaaagtgatgagtgcgggagtcctgaggagatgtggcctgcagacaacatgcagccatgcagggacccaggactgtaacctggggaggacgcgggtccctgcaaggaagagtagatttggagaggaaggatggaggtggactctcaccccattccccccggaaatgaacaaagccgggccctttccataggaactgcccttggagatagcagagtgtggctgcccctccttgctccagcagcagtgggagaggcactgctctggggcctgaactgcctctgcttccccccctgaggggcccctcactcttacccaagactctggattgttgcacggcaaccactcctcccatggcattgctcagcaactacttctcccttcccggccaccctgtgcccccttcctggtcccaacgccagcccttcatccttcctccctcagcagccaggcagacataacaacaaaactactaaaaggagcttcactgcagtgagctgtttcctgcccaaactaagggaataatgtgaactgtgtgcatgtgtgtggtgtgtatgcatgtgtgcatgtgtgtgtgtgtgtgtgcatgtgtgtgagtgagtgagaggcagagcgaggaactgaggaggagggctaagagccaggggtcctgggcaagtggacagggctgtgggacatgttggggaggctttgggaatggggtattcctagtcagggttcacacctcacctgggatgttgttccatgctggtatttcctctgccacccccaatgcccatcggtcttggagaaaggagtccccgggtgtgtgtttgcccagctgtccattctatctctcccttaaacacagagcattcagcccttccctggatttccctcctctgagccatggagtcagtgccacagcctttgctatgcacctctcaggcctctccttggcgttgaccctggaaagacctaccaccacctattttttcccatagtctgtacccagtgagttgaaggctgggtccccacccttccttttgatttcctgtcttccttctcgtggccccagctggttgctgtggagatgaggttcctggtcctccctgtcctggctggactgccccgcctcagatccaggatgcccttggcatcgctcccaccctcccccagcttttcctccctggtctgacaatgggcatgcaaaaaggggcagctgcaatctagcaggcctgcccacccccttcagttcaggtaatacagttgtgaatcttccagccgctggttagggccttgggcaccacaggcagcccctcacctaagccggggcctactcctcttacaacagcaagagagccctggggccccaggcctgttgagcttcttgtctcccagcacccgcttttgggaaaatgacttttcctcttcaagctgaaccactctgtccatattacacagaagccatatttgtacgggggggtgggagggagaggggctgttgtgctgtgtgtgtctgtccaggggtgggggggtgggggaagggagcagggaggggaccgtgtatctttataatctttctaactctcctgtgctaatctcagaggggtcaccctcaatatatctggattatccgtgtcattcagctgcctcctttctggtcctcttgctgctgctgggatgtgtgtatgtgagggtcttcttcccataccccttgcacctggtgcctggtgcctcaaaaggtggtgtgtcccttgccaggccactctcaagaatatctatgtacagcaacaatataactctacaagggagagaagtgtgttcacttccttttgctaagcccttcctttccagagagtgtcttggggggcatctgactgcttccccccaccctctgccaggcattgctggagaatgttaagacggcgatggagatgccatcaaccccaccctgcagagcatcaccagacaccaccagaccaaattcactttccagccccttcatgttgaacctgaaacttgagctagtgtcttgggagaaaagggggaaatctctacgaggtacccatccttctgcaccttaggtctgaggtgcttggccccctaggaagccctacatgaatgggacagaaggtccttaacaacactggagatgaagcagccgatgctgttttggacaaatgaaacagcgtcccctaaccagccctttctatctcattgttctgacttggacacgccatggctcaccgctcccaaagtccccactatgtctccctagctgaggaaataaaagcagagaggggtgatgaaacagtgacgatcctggggaaacagctgaggaggggagggagggggaagaagccactaaaaaagtgaaatgtgcttgggagaatcggcctgcctgcagggtagatgccctttctctctgctggccagctctgcccctcagtgagaaactttacatattgctaagatgcctggccaatgaaacagttccagagactttatgtcccccagtagaaatatgaatagaaatcaccctgtgggcaatggtcccattttaaaatatgctgtcccattgtcccctagagcctactttaacttgtcagaccatgtattccacttcatatgcaagaggcatgcactgagcccataggtggctaggcaaacacccaatagctccctgaaatggcttcattatgcagcctcgacagccaccccaaccctcccactctcacactgaaacacccagacctagagatagctagacacacccagacacccgccaagcccctcacatacagatatgtgcacaatgatacacagcaaacgtacacagagttcagtacacacaaagagctcacgcccacgtgcacacacccctcagttgggacagagttgaccaccaccacctttctcccaaacacatggcttttgaactgcctttccttggatccagttcaaggggatggaggagcagtgagagtcagccgcccttccactccaatttcccagcacctcccttatctctgcctcacaagtcacccagcccccctctcttccttccttgtgcttgaagaatctctccttgctggaaagccccctgttttctcaatctccctttccacttcggtaaaatctctacttgctggaaagccccctgttttctcaatctccctttccacttcggtaaaatgcccactttctggtccccacctttttcctgagtgtagtcccaaccagccaaatccaacctcaaaacaggaagacccaaggccagtgacccccataggcctgaggcttgtgcaggcagtgggcgtggggtaaggcttcctgatgccccctgtccctgcccagaacctgatggccctcattagtccttggctcttatcttggaagcacaggcgctgacagccgtcccagcccttctgtctgcgggcctgaaccaaacggtgccatggggaactgtctgcacagggtgagtatggggccaggccccagagtcccttatccctatgcccctcatttcccgtgctgtttgcccctcagtctttatatctcttccttttcctcctcatcttttctcccttcctgcttttttcctcttccttcaaagtctttttccttctctccttcctatgctagcctcctagctccctcttgtgtccctccctttgcctttgagtcagttccatcctggtctcttggtgccttttccttctgaccttgcactgctcctccagccccagctgccctggcttccccaggactgttcctgctccggctcttcaggctccctgctttgtccttttccactgtccgcactgcatctgactcctgcagagaccttgttctcccacccgaccttcctctctgtcctcccctcccacctgcccctcaattcccaggagactcttccggtgtaactctgatggcctcctctgggtatgtcctccaggcggagctctccccctcaactgagaactcaagtcagctggacttcgaagatgtatggaattcttcctatggtgtgaatgattccttcccagatggagactatggtgccaacctggaagcagctgccccctgccactcctgtaacctgctggatgactctgcactgcccttcttcatcctcaccagtgtcctgggtatcctagctagcagcactgtcctcttcatgcttttcagacctctcttccgctggcagctctgccctggctggcctgtcctggcacagctggctgtgggcagtgccctcttcagcattgtggtgcccgtcttggccccagggctaggtagcactcgcagctctgccctgtgtagcctgggctactgtgtctggtatggctcagcctttgcccaggctttgctgctagggtgccatgcctccctgggccacagactgggtgcaggccaggtcccaggcctcaccctggggctcactgtgggaattt

SEQ ID NO: 3874 - DNA, 6000 bp, Homo sapiens
ctgtgagaagtcaacaatgttatggacataccattccctggcacatggaaagctctcagtgccttctccaccaccaccctacacagacattgctccctgggtcactctgaggtcaacatcaagtcactcttgatatggacacagagccctagctttaacaataggattctcatttgttctttgtcaatagaattcccttttacctaggaggtcttgactttgtaactgggcttctcttatagtccctgatcctatgttccagtaaaaggaaactaactattctccgagggtcttccaagtattacttcctggatatacccaggacattatttcaggctctgcttatgtggaactagacctaagcaaagtggtgtctatgtctatggggcaatcactcagatttcactccgagtgttctttttgtggttaataaaccactaagagcacctgtctgcatttctcctccagattccctttatttatgccctccttactgacctgccaaatacatctcacaacatcattctctcttctctcctagttgcctcagagtcactgcaagaagtctcagggttcctgtgtgcatcaattctcacatgcagtctgaataaatactgacaaaagcatctacaagtattttttaaagtaccataattcatttgaaagcaccaattactaattcatagttctccttttcagaacttatttttcctatcaataggtacaaatagtacaactattattatccaaatattatcaatttggagattcaagaaatatttgaatgtaaaaaggggttttcatacacagacagtttggacacgccagctctaggtgacagaaatagtgtggaagatggtgtgagagtagatctaactttaggaacctcagttaaatctgttttgagccctatccggggccctgaaagactcccattgacaattccaaagccttcttaagaggtctagacccaggatcctaaactaaattgaatgccataaacaaactataataagaactactgaaatctgttccccaaataaagcagtctgcagaactagaagattttgcattaggttcttttggctgttttgccagctttgtttctatagtcactccacatgtgttcattttcttctagcataaaatcccaatatatttgctattggtggcagattggactttctgtacatccctaatctgtaaaattagatactgctactgacttcggagggttatttggaggcctatgtgagacaaaaatctgtgaaagtgtttgataaatattaattgctactgaagtggtatacctgtcctttttgccagataccacatttttatatcatcaacccagttctccatttctacagtcttcctaatttgtcccaaagcaatagtatcataaagtcttgagctctttagcccaattccactcctttcctgttgagatctcgtagccaccaatgatatctgatcatgaaccattaatatggagatcattttctttgcttcatctgttacaagaagaagctatgtatatttgtaaataatcagagagttggcatgaatgaacctgatgagagcagtttatgaaattattggttctttcctctcctttgagccacacattgattcagttacaagccctattgatttccctcaaatgtctctcacatgtatccctcccctctgggccaattgccacccctctagatcagtcccaattatctctgttacatcagcagcctagctggtttttcttcctctttttgccaacttcaaatccatcttcacaccactcacaggtcaatgtaccaaatcccagtgcagggtatggtgttttctttttttcaacaaggaaggaaaatcaccagaaagaccggaaaagggaaaaaaatggttagcggttttaaaaaaaaaaaaaagtatcacttccttaagacgccacttgctaaggaactttagagtctaagaacaggagagataagcgagaatcacttgagaggctcttaaaagtgatacattcaaatactcttttgtaatctgttctcactttacctatacaatgtaatttttcataatcaacctgagtctaatcaaggactgtctcctccctgtctcacttacagttacatttcagttattatgattgtctatcacctgcaactaaaccctgagctcctggagggttggtgcagcacctcatccatttctgtatttccagcaactagcacagggcctgacatatgctaagtgcttaaagaatgaatggatgcagataaataaatatcacatgaaagactaagaaatttttaaagaagtagtaaacaactcatggaaagtattcagtgagaagtaagtttagagttgggtcttgacagacagttagaagcttaccaaataaagggaagaaaaatccgggtaaagagaacagtgttcaaaagctaatttgtttcctagcctccaggagagaatctttggatctaaagatggtgtgcttccaatcctgaatgccacagggcaaggacaggcagcatgaactgccctctgcagaatgacgaccatatttaaatacttcttttccaaaaagaaaaccagattcttatactagatagagttcctgcctataagcaaaaggccctaaacttcctgaaatccaaggtggtatggctctaagcttgagctgcctagatttttcaatatggatttctaagatacatctgtaaaaaaataaaaaataaaaaataaaccacatgcacatatacacactcacaatgtacttattcaaacaattaaaaatcaactaaataaaccagcttcctcaaatgttatttcaacttgaagcaaaaactttccccaggctccccaagcgctagcctggaattgagtaaatgagccctatacataatgagacctccaggtacctgatacctgcatcctcccagccccaggggggtggctgtcagaatgtcttcagggagtgacccccagaagcccagctgcctgatcctgggagagcatctcctctggcttcaaagacttttccacacagaggggttatcaagaatgcctatgactctcaaacctgactatattcctactagtgtgtgtttatgccctgcctgctcagcctcaggtcctgccgtaggcactcttggtcaccttgctcaccttggtcaccctatgcctatccattgtggccaagggagcctgacatttcaatctttactcctcggcctcctccagcccagctttcccgttgtgcctcagtgctaagcagagtcatgtgagtggtctttagaagaaggactgaaatggggctcattacatatgagctgactttaatttattgtagtatttcaggtcctatcacagctggacaggtcttcataagctatatttgctcttccttccatttcctttgaagaattatagacttccaagagtggggaggatgctaaccaaatcataatagccattcttctacctcaagacagacaagtttcagccagataagatgatattttagccgtgtgtttctcaatgggaactttattggtatttggaagaagggaattcttccttgggcagaatcaccacaagttttgcaggacatttcacatcgtgaatggccaagagcttctgtgctcattattgtaacagttaaaagctctgccaagcatttctgatttcaccatagaggcaccataccactccgtggctggactactacatagtttttgctcagaagcctcacagaagacaaatgtctttagacatatattttagtatcaaatgattttctttattggaaaatattctctattgcagctttactttctttttagcattcttagtgtaaatgattaacagctggtcatcaacttcttttaaatagatttttatgaacttgaagaaagtctccgtgcgtactaaccttcatcattgatgtgatttactttatgcaaaacttctctttctgaatatgcataagcaaatcagaatataatttaaataccctagagaagcttactgtttaaagagataaaaatgtgaaatattacataaattgaactgatccccttccttcaacaaaatgatgtatctttggtgtagctgtttttttatattcagggtttgcttttgctttaggtgagggacacttaaatttgctgtatctttcctgatacaattgtttatctctgcagagtgggtgtaggcttactcacaaagttgtattggctataaatttgccttctagtttagggaaggtaaagatgtagcatagtttataacatacgtgaatcagtgctctgaactgtcagcagacttccatcactcagacagaagtggggagaggctggtggttggctaagattttcctttttcttcttgaagacaagatgaacctttctactttgcttctaattcttaaaggatgcgcaaggaggatgattcatagtcttgaaagaaaagacatcactagtccatccctaaacaaattattttcaagcacccaatccatgcataatttggagctagtgaaatatgaaaagatgtaaaaggtattataaagttgctaagtgtttgtatgaggtgaggcagcaataatggggtaaaaataatccaaataaacatgagaacctctgagtgtaatacggttttatgaaggcctgaaaatgtgcactcatctctgaagagtaggaaagaaataagaggagaaaagagaagccattccagatgtcagggaggaagagtagatatgaagtaggagcatgtatggttatacagtgaaaaagtgagactatatgattctatgatgcatggaaaattataacagatggtcacagagtaaaaatattttaagtaaagataagtaaacccagggattaacttaatccactaggaaatacatcaccagatttgtaactgagaactattgaacttcaatcaatttcagaaatgtgcttctactgctttactgggactatgtgacttttatgcttttatgtttcagatttgggaaccaatccatgaaaagagagaactttactctcatcactgactttgttttccaaggtttctctagcttccatgagcagcagatcaccctttttggcgtgttccttgcactatacatcttaaccttagcaggcaatatcatcattgtgaccatcatccgaatggatcttcatcttcacacacccatgtacttcttcctgagcatgctgtccacttcagagactgtatatacattggtcattctcccaagaatgctctccagcctcgtaggtatgagccagcccatatcattggcagggtgtgccacacagatgttcttttttgtaacctttggcatcactaactgcttcctgctcacagcaatgggatatgaccgctatgtggccatctgcaaccccctgagatacatggttattatgaacaagaggctgcgtatccaacttgtcctgggggcctgcagcattgggctgattgtagcaataacgcaagtgacatctgtattcaggttacccttctgtgctagaaaggtgccccacttcttctgtgacatccgccctgtgatgaagctctcctgcattgacaccactgtcaatgaaatcctgactttgattatcagtgtgctggtgcttgttgtacctatgggtctggttttcatttcttatgttctcattatctctacaatcctcaagattgcttcagttgagggccggaagaaggcttttgccacctgtgcatcccacctcactgtggtcattgtccactacagctgtgcctccattgcctacctcaagcccaagtcagagaacaccagagaacatgaccagctgatctcggtgacctacactgtcatcactcccctactgaaccctgtggtatacaccctgagaaataaagaggtcaaagatgctctgtgcagggctgttggtgggaagttttcctgaccatgtaggaagagttctcctgaggctgtcaacatcc

SEQ ID NO: 3875 - DNA, 6000 bp, Homo sapiens
gttttttttgctgaggttcgatgaagaatggatagcatgtagccatgtagattagacaaaaggatatgatctagtggtaaaggactcagggggaaacacagcaaggcctgtctattcagattcttcttgatctctctctctctatgtatagcattctttcctcctgagtatggggcaggactcttcttcaatgagggtcttcaagggagaagggagaaagtggcctttttagattttatggcttgcttcggggaagaggagttctagtttctatgacccatcttggggaagaggaattctggtttctgtgacttgctttcatgaagaaagaggagtaagaggcaggagggcaggagatggtcagaaagagacttggctgcttctgagggcttccgctctcctttagttccaagtacttcttagcataccaaagcactatactttggcatatggttttctgagctctaacactgcaatcatgctaaactcctctatgaccttcaaacattccacttgcttttattctttatggttgtgatggcatagaggtcaatagcaaagaccctggagtcccactgtctgagctggcataacattactaccacttaatcaatgtgtaagctcaggtaagtacttaagtcctctatgcttcatctgtaaaatgagaatcattgaagaacattctctcaggatggatcatgaggaataagtgaattaactggcatatagtgcttaaaccagtgccttgctcagttagtgacagataaaatcatctgttattactgtgcccactattgtgatgctcttctcttctttgtacaacgactacatctctatttatcattttagggtctccttgtgaaaaaccactccagattcaaaagattgagtttaatctctatcctctgtgctttcctggagttttgtaaagtaaatcttcacttgacatcatggataggttcttggaaactacaacttcaagtgaaaggacataactaaaccaatttttttctcatcaacgttataatgaaatggcattgatgaaatgatggcattcaaggacctgctgtaccttgtttcacttaaagtcactgtttccaataatctattgatgacattgaggacttactatataataataaatatatatataatcgacgaaacaggaatcaaactgctaactctgctaactggtctccctgcttccacactctgcccactcatctcagtctttctttcacaagagtcagaatgatcagatgagacccctcctctgcttctgtttcttccatggatttccactgcactctgataaagtccagcctcttgaccacagcctacaaatccttgcacgatctatcgtttacttttccatctccttttatgctactttcatcttgttctcaattctctagctatgctggccccttcttgttctttcccatttttttttaatttttaaaatttgtatatatttatgggttataagtgaaatctttttagatgcataggttgtatagtgataaaatcagggcttttagggtattcatcacctgaatgatgtacattgtaccccttaagtaatttctcaccatccgctgacttcttgccccctgggtattcatcacctgaatgatgtgcattgtaccccttaagtaatttctcaccatccgctgacttcttgccccctgggtattcatcacctgaatgatgtgcattgtaccccttaagtaatttctcaccatccgctgacttcttgccccctcatccttctgaggctccattgtccatcattccacactctacatctatgtgtacacattatttagctcctacttataagtgataacatgcaatatttgtctttctgtgtctgtcttgttttacttatgataatggcccccagttctatctaggctgctgcaaaaggcatgatttcattcttttttatggctatgttctttcccaatttagataaagaacactcgcacttgctcttacttctatttggaatactaattcctaggcttcttgcattgctttctccttctcacccatcaaatctcattttagataccacctcttcaaagagggctttcctgaccaccttggctgaattagcccttcaccatctgattactctctagcacatcacctgcccattttattcatggtacaggtcaaaatctggaatcacctgatttgtttattttctgactccttctactgagatgaaaactctactagagcggagattttatctgcttgtatcaggtactgcttcaaacagcacctgatacagagtaggtggtcaaaagatatttcttaaacaaatgaacaaataaaaagtagatcttttgagagtaaagctcttccacactaccagagtcattcaggaatgacaaatcatagaataacagaatttgatgctttgtgcatatcagagaaagaaggtggaaggttgtcaaggtatcatgatgtaccagtcctcgcctcctcaaacacaatctgcaagtcccacagtgaaaaagtaagttaactcatgtgaagcgttttacaaacacttttttaaaagtcttaaaactcctaagaaagcaagatttaatagtcaaagaagtgagtaaacatgaaatgcctgaacagagtaatgagctaagcacaaagttagagacatgttagttaatatgtcttgaaagcagcagctcctgctttcaaggagcaagaacaaattgggcaagtgaacactccttgaataaaatgtgtaaaattaattttgggttatgttctatactgtgtataatagaatgataaaaattatttgactagcactttgtagtttagaaatatctctatttacacagtttaccttatttgataagactgttgagtgatgggatagcatggtggacaatccacataactgagtatcgagacacctgtatctggacccagctctgttagtaagaagctgtaacctcagcaagtcactttctctttctgggtctctatttcctttttggtgaaatgagagtgttaggctagattgcctttgaagtcccattttgtctttaaagtcccatctattgcagtgatttatatttaactcatgacaaatcaggcttctcttattctaagtgcaagacataaaacttttattgtggaatttcaggcatcagtaaatctttttgggtactcacttatgttcctgaaatcaatctatttgagtgatcactcttttaggtgcccaggtaaacaaagaaggccatggtctttctttgagtgaccttctttcccttttaattagtctgacctctttaatgtcagttctgactgattcatttccctggtccatcttccttggtctgagggccttcctagtttcatattgcacttcagttccttccacaccaccatcaaggatggctgtcaacattcatttgttctatgttataattcaaggaaaagttgcccagtagctaatccaataaatgccctcttatgggcggctagagactttttcctataatttaaatgcatcttctgtagattatggtccctccaccactttacatttgtctgctgtctccttgctctgctagtcatggaacgtgttggtagtgggggcagtgtgggatgttcaagggcacgtattgggtagggccacatatgggcattgctttgtgccattctttctatatttttggtattttgcatctcactggaacccaactatttttcatctcttccacctaaactatttgatgcctctgtttcttatatataaagtatagctcactgtagcctatgatcaggaacctatctgctttctaaatgaaagctgttttggtcagatctagcaattaattcccttcttccacttatagctttcctctgtaactctggtgtaggtatttggtttatggctataagatgtgaaacacctgaatgattctgtccatgcaggcatttcagttcatgatattgtatgtaaaagatactgattgtctaggtgttcagaaacacctatagggcttaatattcttacaatcagtttgaaggctggtgatacgcaaagcaaactacatatttttctgcctgctctctctctttctctctacatctctctttctttatcttttgaaatatcagtttggagacttagaattacataagacataaacccatttgatataagaattgctgtgtatatttgctcatctactccctcctttggtcctcgagctgccggtttagactttttacaggacgcaggcatgtgaaggagaaactgtcagtgctaggctgaattctgttgttaccaagatttctagaaaagtattcctcagtcaggttgattacagatatagcaaatctatttttcctagggtagtttctgtatgctgccgggcttataactgtctgtcatccagctatttctctccaccttcttgtttgcataacaaccaaggcaacttccgcaaatcactgcgtggagacgatgatcctgccagctcccttttggaaatcgtgaggatcagatcttggaccatgtataatatgatgcttctaatccaaaagaggaaaggcattgggagtcagctcctaagtaagctccagaattcctgctggtacttttccttccaggaagcaacttccttgatattttttttttacaggcatatgaataaaaactatattttgcagcattgtacactttttttccttttctagaaattctaaacctctgacattggtggagacattgagtacattttttcccatatccctacttttcagaaggattttctctgctcgttcacttaacattgctgatgcgtcagtcttttcttcctcatctctttcaggggctggagaggcagagggagacagaggagctggtactgcagagcggtcgtctgattggctggacggtcgtagctgggctataaaagagacccctacaggcttagcaggaagacgctcagaggattctgacaatatctttaccggagaagaggcaaagtacgctcaaagccgaagccacagctcctcctgccgcatttctttcctgcttgcgaattccaagctgttaaataagatgtgcaaagggcttgcaggtctgccggcttcttgcttgaggaggtaagattgctttcagccattaaccatattaaacttttggctagactttctcagttatttacatgttgtacttactaacctagttctgtgcaattagaaacagtgtggtcaggagagcacgactttctaactttcctccaagactagctagatattgtgacttaagacatgtgctccccaaatttcagcccttatgtgttgttttgtgtgacctcagttttgagaactgttctattctttaagccaggtctaagaaagctagttttaattaagaagcgagatgaggtttgaggctatgtacagtgatctgtaatatctccatctgtgattactactgctatttgagcatccctggagtacatagaagcctggctctgggctttctgattgtatgctacaacttgtttcaggaaaggtaccccagaatgaggtttggctccatcatcagaaaggcactatgctttccgtgtggtggtgcagtaactttcactctctatgttcttataagcaaatgttacaatgagatatgagttttaaagccagatcttccttatctctctgccccatctctagttcttgaagtgtctcatatgagtttggttgagaaatattgatcattacaaatcagttaatagttttgtagaagatctcatcttaaagacattgttttgttaatatactcccttgatttttttaaaagaccttacagacatacagctattcatttgtttttggtttgttcaaaaaaggtataaagaaatgcattcagagaaagatcatatattagccagttgaaaattaaacacaaaatgagtgcatattacattacttaatcttgcagtcaaaggtaaaaagtca

SEQ ID NO: 3876 - DNA, 6000 bp, Homo sapiens
gttcatgtcttgatggacacttaggttgattccgtatcttggttattgtgaatagtgttgtaataacatggtagtgcatttatctgtttgatattgctgatttcctttcttttggatatatacccagcagtgggattgctggatcatatgatagttctatttttaaatttttgaggaacttccatactgttttccataatggctattttagttttacattcccccaatagtgtatgagtgttctgttttctctgcatcctcaccagcgtttgttactttttgtctttttggtaatagccatattaactaggtgagattatatctcattatagttttatagttttgatttgcatttgccagaggcaaaatgagtaatttttcatataactcttggcaatttctatgtcctcctgtgagaaatgtctattcagatcttttgctgactttttaatagtttttttctgattattaatcacttgtcagatggatagtttgcaaatattttcccattttttaggttgcctgttcaccgtgttgattattttctttgctgtgcagaagctttttagcttaatatcatcctgtttgtctatttttgttttgttgcctgtgcttttgaggtcttactcaagtagtctttgccaaaaccaatgtcctgaagcatttcccagtgttttcttgtattagctgcatagtttcaggtcttacctttaagtttttaatcaactttgacttgatttttgtatatggtgagagataggagtctagttttatttttctgcatatggatatccagtttttccagcagcattgatggaagacactgtcttttcaacagtgtattttcttggtgcctttcctgaatttaggttgactataaatgtgtagatttatttctggtttctctgttctattccattggtctatgtgtttttatgccaatatcatgctgttttggttactataactttgtagtgtatttggagtcaggtagagtgatgcctctagctttgttcttttttcttaggattgccttagctattcagggtcttttgtagttccatacaaattttaggttttttttttctatttatttgaatgtcattggtattttgaaagggattacattaaatctgtatgttgctttgggtgatattgtccttttaacaatattaattcttccaatccatgaacatggcatatctttttaatgtgttgtttggtttgctagtattttgttaaggatttttgcatctatgtttctcagggatattggcctcctataattttttttgttgtatgtgtccatgtctgcttttggtatcaagatagtgctggcctcacagaatgagtttggaagtattctctcctcttaactttttaagaatagtttgagtggagttggtattagttcttctttaagtgtttggtagaattcagcagtgaagccatcaagttctgggcatgtctttgatgggagactttttattattgcttcaatctctttactcattattagtctgttcagattttctatttcttcatggttcaatcttggtagattgtatgtgtccaggaatttagccattttttctaggttttccagtttgttggcatatatatttttcacaagtctccaatgatcctttgtatttctgtggagtcaattgtaatgtcttttcatctttgattttatttatttgagtcttctttcttttttgcttagtctagctaagggtttgttgattttgtttatcttttcaaaaaatcaagtttttgttttgttgatctttttatgttttttaggacttttaagaataataataacctatttcggtcccattttcacaagtctgtgattataggcaagttatacttactatctctactatctgctttcttcatttggaaaatgataatgatgatacctacttcatagagttttaagatttttataaaggaaaagtatataatgcacacagcacaatgcttggcatatagaaaatactcaacaaatgttagttatcttccatttttatcttaattttcctggtgtattttaattctgacataatttgtaaattagttctaagtcacttttaagaaaaatgctgatcccctaagaagtttaaaatagtgaatgtttgtctgtagtaagtcaaaataatcagaaatgttttaatgtccatcaaatatttgattaaattaatttgcattgttctaatttaggtatgtgtagctcaagcacttagaacaaatttctttgaccatttgaccttttttttcatattaggataaaaagtggataagcaatgtttttatttattctaatttctatgctcttttgagatcatatttgaccttcagtattgctctgaatagattttggtacagtagtgttagttctattgctttgtttgtacagttaaatacatcaaactcagcaattttttgtgggggtgatggggattggagagattagtaaatgatttctaagttctgttaattaaaatgtaactatatattttagagagaagttagtagtcatatcactttagttcatgaagacttggcaaatttttaataattaataagttttttctgccaatgagcattagattactgctgactttttagtgtcatagtaccttgtggtagtttctttacagggtttacaggagtatggcagtttattttttctgtcttgtccatacgaaataatctttacaaatgctataaggagaataccttgagaagttcataaatgccttaatatattataaagatcggtcagttccattgtcttcttttgtcagtcttgatcggagcttgccgagtaagtctataagcctgcatgtgcctggcaactgttacctagtgacagtttcagctgcagtagccattggctgtgctgttgattggggcaggagggccgagtcacctttctgatggtgagtttttctgcatcagcccaggatgaggaggaggagtagggcttgggctcaggtggagtcattgatgctgagagattgtgaagaatatactgacagcatccttgtagctgcatcacagtaaatcggacttctgaatcaagcagcccagcctagcagctgataagagtgaatgtaggtgagaagcattaccttattcctgtaacaagagaactgttttgtgataagtgaaactaggaatgtagaagaagaaatatcctatggctattataaaagaagaaggacttgcctgaatgacttggtggtgcaccagaaaataactttcagaagaatgctttctgttaagctgctgcattgttcctggaggaaatgttatttctaatgcatgttatttcttcaaaagataggataacaaagaatgacaggagactctctgaaatgacttcacttttaaaaaatactttggcaaatgttaacctgatatcaaaatgaccttggaagcattttggatggattctatcctggcagccttgcaatgtttcaaactctaggatttaaagttcatcttgatactttagaggtattttaaaataagactatcttgcaacctacctaatggcccctgtgttaattgagcacttgctcaaaatagagtacagaaaaatagaagaggcattttttaacatatggctgctacataactgcaaatgtaataaacaaggtaattttccactttcagaagatatagttgaagtaatgatttaatgtgttaaatcatctactgaaaatagaaaaggtatagcaacatagaacatgaagcctattagaaatacctaagtaataaataatggcagcatttctggtcaaataagctcggagtatattggaaagttttattgtctaactttatatttacatatatatgtgagatatgggtatacagttgcaaaggtgagaaataactgtgagctacatattttattatcatgctccattataaggaaggtggtatatgaaataacaaatgttattttaagttatagatgccaaattaatagcaaaaataattcattttgaaaaggaagaggtataagttacgttgctgttagtaccaccagtaactgtaatggattaaaactgctttcatctaaatgctttaaaaatgcatgcagaattaaaacttcagaagtttattacattttgccaggtgttaattcattaattcattgtatattctcttttctattggaaaatacttttttctcatgagagttatagggcaatctggagtctgtttgttacctctattctgcccatgtagagatgaatcttttcaaattaactttgatagagttgtttttcttagattttagaaaaatgagaaataggttataaatttgaccccccaacatcaatccctgaactaagcccaaagacactctttgccacaatgaactttttcttagcttttcaaccaaatttgagatcttaaattatttaaaatctaaaatatgaatgcatttttcatcatagataaagcaggaagcctgagacagtttcagagtttttcttttctcattctttccagttgctccctaagaaactgcctctcttaggagaacagcccacagaagcttttcttcctttggcaattcattttttttctttttacagatttaatttttcatagtgcaagataataagaagtctattttctctagaagtgccttatgtctgcaaaaagttctttgagggcaccagaggaaactaattagtgacctcttttcacctcctttctagcttatccccttctctccaccccttaccgccccccccccacccccccgcccgaaagctgaggtgtgtcactgctgaactgaggctggtgaagagacttgagcactctctgggactctcagctgtgacagaagcactgacactgtctactgaagcaggttctgaaacactcatgtgcggtgtttaacagatgctgggcagggcatctgcttgctgtagccaagtctgcaggtgtctttaaatttccaagccatgaatgaatccaggtggactgaatggaggatcctgaacatgagcagtggcattgtgaatgtgtccgagcgtcactcctgcccacttggatttggccactacagtgtggtggatgtctgcatcttcgagacagtggttattgtgttgctgacatttctgatcattgctgggaatctaacagttatctttgtctttcattgtgctccactgttacatcattatactaccagctatttcattcagacgatggcatatgctgatcttttcgttggagttagctgcttggttcctactctgtcacttctccactactccacaggtgtccacgagtcattgacttgccaggtttttggatatatcatctcagttctaaaaagtgtttctatggcatgtcttgcttgcatcagtgtggatcgttatcttgcaataaccaagcctctttcctacaatcaactggtcaccccttgtcgcttgagaatttgcattattttgatctggatctactcctgcctaattttcttgccttccttttttggctgggggaaacctggttaccatggtgacatttttgaatggtgtgccacgtcttggctcaccagtgcctattttactggctttattgtttgtttactttatgctcctgctgcctttgttgtctgcttcacttacttccacattttcaaaatttgccgtcagcacaccaaagagataaatgaccgaagagcccgattccctagtcatgaggtagattcttccagagagactggacacagccctgaccgtcgctacgccatggttttgtttaggataaccagtgtattttatatgctgtggctcccctatataatttactttcttctagaaagctcccgggtcttggacaatccaactctgtccttcttaacaacctggcttgcaataagtaatagtttttgtaactgtgtaatatacagcctctccaacagcgttttccggctaggcctccgaagactgtctgaga

SEQ ID NO: 3877 - DNA, 6000 bp, Homo sapiens
tctatgacatttgacattgttgatcactgcctcctttatgaaattttcatctttttatggcttccttgacactactctctcctgatagtcttgctgcccaccctgactacatctcagcctccctccttgacccatcttctttatcaggctcacgggaggatgttcccttgggctcttttccttttcactctattctctctctcggcagatttgccagacttaattatcacttaaatgcaaatggttcctcagttttcagtcttaacttctctttctagagctctagatcagtatttccaactggagtactgcatgttccattgattccttcatatttcccacatctcatggaaccccagacctgctctctactttcatttctcatctcagttcatgacagcagcatctacccaatcactacagttagagtcacacgtcacatcttcttctgtccatgatcctgattggctggagctgttgcatccacagtcagtataatactcatagcactcaagagcaaggactctgcatctgggttgccagggctcagacccaggtctattactcactaggggggtgctcttgagtaagatgcttaacctctatgtctaactttactcatctataaaatgaagataacaatagtagctacttcttagagttcttgtgaagattaaatacatttatatttgtaaagtgcttagaacagtgcctggcacatcataagtgttacatagctgcttgttaataagttggtcttgagtttgtccctgccctagtccatccttcacactgctgacagatgtttttgaggggttaccaatttttatgttaaatcaggggccagtcattatgttaagtgttttatatggagaatctcatttaattctccaaacaacttgtgagggaggtgtgataatacccatttaagagaggaggaaactggggctttaagagctagtgcactttgccgaaggtcacatagtttgtaaatgccagagttgggattttaattcaggcctgtttactcccagagctagtgctcaaaaccaggaagctacgctagcctgcttttccaaacctaagttagtcactcactgcttaaccttcttcaaagacctcacactgcctatgccgtcaggaactattccttcacaatcttgttgcaacttaactttatttcctacaactttactccatggggcttcctgtttccttcttccttctccctctgttggcctcttttcctttgttccttcaacctttattgaatgcctgagtgccaggcactgtgctaaattggagaaaacaagagacgagcagtttatcttcaaggacctcatagtctgatacaaactattattgacaatacagtaaggggagtgcactcaggcaatgtgggagccagactgggaagacaagggacaggagcagggagagtgtattagtccgttttcatgctgctaataaagacatacccaagattagataacttataaaggaaaagaggtttaatggactcacagttccacatggctagggaggcttcacaatcatggtggaatgtgaagaaggagcaaaggcatgtcttatgtggcagcaggcaagagagtatgtgcaggggagctgtcctttataaaaccatcagatctcatgagacttatccactatcacaagaacagcatgggaaaacctgccttcatgattcaattacttgccaccaggtccctcccaagacatatggggattatgggaactaagagtcaagataagatttgggtggggacacagccaaactgtatcagaccgtttctttgagaggggacatttggctgccttaaaggatactctggtcagaaaatttcttgtcattctttaacaattctgactttgccttttgccttagggaatctttggggtgtctttttccctgtcagatgattgactaagactggatttcaaaatcagcttctctgatccttggatgtttgtttctttacacatatgtcaattatagcatgtatcgcactgtagcctaagagctattggtctacctgcccatcttttttttttttgtttgagagagagagtcttgctctgtctcccaggctggagtgcagtggtgcaatctcggctcactgcaacctctgcctcctgagttcaagtgattctcatgcctcagcctcctgagtagctgggattacaggcatgtgccaccaggcctggataattttttttttttttgtatgtttagtagagatgggttttcaccatgttggccaggctggtcttgaactcctgacctcaaatgatccacccacctcggcctctcaaagtgctgggattacaggtgtgaaccgtcatgcctggccccatctttttgactaaattgtgatttcctccaaggaaaaaacagagtcttaatttatttttgaacggtccttcattcctaaagtgacataaccggaatatcataggtctcaataaagttttgttaaatgaagggttgcttgcctattcacaaaagaaagtataagtcagggggctcttctgattcagagtaaataagagagtcggtgttccataattactaagtatttgatggttctatcagtaaaatacccaaaaataacgctgggaatgaggaaatgtatttatttacttattttgagacggggtcttgctctgttacccaggctggagtgcagtggtgcaatcttggctcactgcaacctccacctcccgggttcaagtgattctctcaccttagcctcctgagtagctgggactacaggtgtgcaccgccatgcccggctaatttttgtatgtttagtagagatggggtttccccatgttgggcaggctagtcttgaactcctgacctcaggtgatcctcccgcctcggcctcccaaagtgctgggattacaggcgtgagttactgtgcctggcaggaaatttattattaaatctacttctgtggataaattaagttgtcatgtcctgggtggcagggctctggatcaggcatgagaaaaatcaagaattttagagctagttttgagggtttccttactttcttgggttgggccatggttccagaattttgtgcacaattaaggcatagaggtacggtgctgctgggagcagtgtgccatggtccaccagggttgctactaagaatttcccattctagtccatgactggctaaaggcaggaatctcttttgtagctgtccctggttcccttttcccaggcacaacatacagccatttcctttctgtggtctcgcctccttcctggtagcacacatattcctttttgcctgtctctttctcctggcaaggtttacctccagcagaggggaatctttatggtgagcagacggaggtctgaggtgagaggagtcctcactcttctttctttatttttttgaccttgattaccctttcaccagaggttaaggcttttatacagaaaaagccagaaagactcatagtctatgcctattttccatcttgtgtcatccctctcctggggaaatgattgcagaatccctattggcatgaattaaggggaagagaaaggggaaaaaagtacatggagaaaaaaagacaacagcagagaatgatatctcagagcactgctccaggcatagcagttccctagtaaatcttgaaatctcatcaaaattgtgagggttaggctgagcaaggtggctcatgcctgtaattccagcactttaggaggcctaggtgggaggactgttttagctcaggagctcaagaccagcctgggcaacatagcaagacccacatctctcccaaaaataaacaaaaaaattagtttggcataatggcatgtgcctgtagtcccagctactcagggggctgaggtgggaggatggctcacaaacctatgtgaggtaaggctgcagtgaaccatgatggtgtgactgcactccagcctgggcaacaaagcgagaccaaaaaaaaaaatgttagaatcaagggacaaagtacatgtaagaggtttagaatagcacttggtacaggaacagtgagtgctcaataaattattattaggtctcctccacccagggtaggacctgggtttctgtcctgaattgggacttccaagacaatcactcccacactcaatgtagtacagagctctgtgagtgatctctgcccatgttccccagggacacttcagcctgggtgctgggcctgtttccggttttactggggtgggcttagagctgtacttctacggggttctctttcctctcaacgttggtttccctcccaaccctcacccccaaccccaggaagctcagtttacaagtgcggtcggtaccctcatttggtgtttttattggcttttctgatagcccctggactagacaattacattgaaattcagaagcagcatgcactttttggcattgatgtctttaattaaattcaataagcacttattgagcacctagagtgtgtaaaatactgttcctttaaatacatttagtcctgaactgttttagcttcttagtttggattagtgctgatccatttcttaaaggttttatgaagcataaatatcaaaatggaaaaatatttgcacagttctttgtaaatataaacgtcttgtgtggattattgttgctacagtattaatattaactgcagtaacaacactgctgcttcccagacaggcggtagaaagcagctgtaggccaacaggagccagactgaagagatccagggaggtgcctccagcacgtacggcccacaaggggcggagtcttaagaagcgtacccaagccccaccccttacagcacccccttcgtcagggcggtgtaggcggttaccatggcgatgacgtccagagggcggggaggggcggggctatggagaggaggaggaagatggcgggcgggctgctctgaagagacctcggcggcggcggaggaggagagaagcgcagcgccgcgccgcgccggggcccatgtggggaggagtcggagtcgctgttgccgccgccgcctgtagctgctggacccgagtgggagtgagggggaaacggcaggatgaagttcgccgagcacctctccgcgcacatcactcccgagtggaggaagcaatacatccagtatgaggtaccggcacggctggggtgtgggaggactcggaggggccaccatctcgccagtcctgacgtccaccgccgccttccgcttcagctggctccctgtgcccgggcagactttgacccgctgccgcggggagccactgcggcatccccgccgcggccggccgcctcccggctccgctgtccttcccctcccccgcagccccgctgccgccggggtaacggatatgcaggcggagggccgggaggaaaggcgctgcccgggccggggccggggccggggaacggtgggagggtgagctgcaggtgggggagtcacggtgcgagggcagccccgggtcgcggctgttccgcgctaatccccttctccccactcgccctgacctctcgtccccaccctgggcgagcgccccctcgccaaggttaggtcttgtttctctctctacacctctcaccaaggaatccttgtcttccaagagaagcccctccagtgatttccttcattccaaagagcccttcggctttttcccacttgcccactgttgacaaaggctttgtaacggggttgaaacttgacttaagtgtgtatcacatatgtagtggttatagtttttgtaaacacgttgtaatcaactattctgctttgataataagactctttttactgattgcatgaagtctacagagtaataacatctttgtttttgcctcttgttttggaatggagggaagagaaaggagagaagagaattattaacatttttttattttctgctaagtttttgctagctggggagaaaattagtatattgtaaacaatataccttacctgtgtattacagaaatcatg

SEQ ID NO: 3878 - DNA, 6000 bp, Homo sapiens; identical to SEQ ID NO: 1554

SEQ ID NO: 3879 - DNA, 6000 bp, Homo sapiens
aatatatattttaaatttaataaatgatgttaggaaagctggatagaaatatgaaaacatcgattacacaccaggtaaattttaaaatactaatgaaaattattttttaatgacagactgaatcttcttacattgtcaaagagaaagtaacattctaaactctgaaattgctaatagcaacaaatttgactatatgaaaatgtcaaactaaaataaataatagctaagaaaagaatttggaaaaatatttgaatcaagtggaataaatcatgactcatcctaaatatatagtttgtacaaattaataagaaatacatagattataataaatatgtgaaggacatgattagaatggttcacttaggaaataaatagattttccatcttatttataaacaagtgcaaattgaaatgaggtaccattttacctcactgcctattacaatggaaaatatatgttaccgatgaacatctctaagaagactgtgttgaaccttatactctcatacaatgccagtgacattctaaactgctaatcactgtaaacatttgtatcaagcaataaaaattttcattgcctttgttacaaaatttgtatttataacgtgttttacaacatatttatataaatgttatatttatacatatttatataaatatgttatatttgtacatatttatatgtatataaatacatatttatatgtacttatacaagagcatttatgttataaaaacaatataaaaaagtcataagtgcaattattcattacaaatttctataacagttaaaaatactagaaacatcctaaatatccatatttaagggtttagaaaattaagcaacatagactcatgtggatttatatgatattaattgagaatactgtgtacactctaattacagatacgactttgaaacacctgtgtaaaaaatgtgaagaatatctgaaatggaatatttaaaaatagaaaatctaaaaataatgagattacaaataaatacttttgaaaatgtccttcactggctaagtttggttgtgtaggggtagcaggtccaagatgacgactacttctttattctgtaatgtattagatggcttttatgattaaacataaaaaggcaaatacaatttacttaaaatgttaagattctttgtacagaaaaattaaaattagaaaaaataagttataagaacttaaatataacctgtaaaggggcagaaataaacctactctcgaaaacaatttagcccgaagcattggatatttatttaaagtatctcctctgttttcaggcttgtgctaatcaccctgatgagtagaaagaagctccccctcgccctgagaagttcataatcccatgggcaaggcaagacggagccacgtaacagttgccctggctccagcagtgcagagagaggaagtcctcttagggatggaggttagagaaggctcccaggggtgggatggaggaagagggaagacttcttctgctttgtccacacctgttagagagcatggccaggattcccagcctgtaagggtgagtgtttctattagttgacttgtgtgtaatcctgtggggagtcctcctgaagggtgaaagagcagtcttgtgaagttggccttggtcactgaaaccgggctgggcaccccaggagaccgggcctaaggcagtgtccctggctctgacctttgctgtttcttctcatccagacaagttcagtaaggcccatggacagcacccaggcctcagcagagaaaattcagcatatgctctgggccacagacttcccttgggtatgagatgatggcccaggaagcaagtagctctgtgatttttaaaataacctacttctacttcccctcaacccccttcctatattcccctcttggtctgcttgccccattctttgttttcacccggcggcttctctgctgttcatctctagctttcaggatcactcacactctctgagcccgcagactgaggtgtgcctgaaggggtgaagtccagcaacactgggtctgtctctgatggtctctgggctctggcaggcaagcactgcccctgctagccttctaggggaggaggctgcagccccctactccaccccggatgtgggcaccgctcaccagcaaccacatgctcagacattagaaaagcggctctggggtgggtcttcaggggaaaaccaagcccggaggctgaaaagccagtgaagggaaggtccagaccattcattccctaggctcttctcttccctgcccatcttgtaattggtgtgggagaaattcttgacaggagcagcctaaacactgcatacccaaccctctgtgagctctaggaccattttctttttgagatggagtctcgctctttcacccaggctggagtgcagtggcttgatctcagctcactgcaacctttgctcctgggttcaagcgattctcccacctcagcctcctgagtagctgggacttgcgcgtaccgtgcccggctaatttttgcatttttagtagagacagggtttcaccatgttggccaggctggtctcgagctcctgacttgaagtgatctacccacctcggcctcccaaagtgctgggattagatgtgagccactgcgcccggcctctaagaccattttccaaatccttcctggggatctccgtgtgccagagggaccctgagcgagggtgaccttatgtcccagtttgcccaaaatagtcctggtttacggcccaggttaattctgatagtgcccctttcactctcagaaacatcctggttagatgataaattatttcatgaccccacttcaacatcaaactgaacacatacacacatgtgcctctctgtgttcttggcagttaaggggacagcgtccatatagtccctaagcagagaaaccccaggcttatctttgactcctctttgtgagacctatgatgttacaattatctcttgaatataccctcccatttctgtccccactgctcatgatctatttcagacacaaataattacaacctactatggggtctccctggcttgagcctctcccttctccatagttctgccagcgatcttttcaaaacacagatcgatgcctcctggctccccatgacctatagattgaaatccaaatcccctcatgatcctttcctgcttcatctcctgcccccaccttcctaccctgggctctggcagactgcttgtcccctgaaaagcccacattcctactcattttggtatacttgttccctttactccctcctccgagtctgaccctttcttctcttttctgctgctcttatttgactttcagctccttcctgggactgatctcaagtgtcatctcctcgaaggccttttctgattcagccctcccgtcaaaaataatcactccccctccactaaaccctaagagggcttggtttttaacatttactacaatttggcccctgcataagattacataagattctgcttatgtaaccatctctcctgcctatgcaacaaactgcgaaggccaagaatggcatctcttgcagtgcctgaaacagtgcctgcttcatggaggagttcattgttaacaagtcttaatcgaacaaaattgataatccacctcaaattttccacaccgggttgcccggcacatcagccactcatacctgggaacactggggacagactcagagggcactgtgacatcagttctaccacaatatcttgtggaagggatatctgctaagaagaattcagatgtaagtggctgcatgcctccttcaggagaaagagcaagctttccctcacccatcctctcctccttaggtcccactgcctcctcagggtcagacttcattccccctcgtctttatgaatcctccccttactctcagtttctcagttcagaagggatcttgctgcctccaagctcctgactcataatttaggacaactaatctggtgtttcattaggtgtcatcttttgaactgagcttacatctgtgtctggcttgacaggttttttaggataggagaagacagggaagaggcagatgtgaatcccaggtttcacccctttccagcaggatgatctgactacaccccttcctcgctgccttaaaaccctttcgcgtggcttcatgaggacctgactgggtcagagaagccactcatagggtgaagacatgagccccacatctcaggacgctaacaactgcttgactgcccagggcgggctcccccacccacccagatctgctgtgtcccggcagtggagtctttcctagggaacaggtggatttggggtggggcgtgccttaggccccatactcataaaatcccggggctctgtcttctcacctctaaaacagagaagacagcagccggtgggtgcaggtgggaaggggtgaagtggaggctgagaagaggttagggctctcgggcacccaccacctcttgcaacgcgaccctgagacagtggggcaagtatcccgatttcacgaacaaagaaactgagcaactaatagaggaatgggccacgctcctactgggaggccgggcaggtctcccagccctgaagacttttcctcccaagatttagatgtgaagccccttttgcctgtccctgcccttacccctcgggtcagccccaaatcggaggccaccatctctctcacagaagcctgcccctcccaccccatcccctcctccctcccctctttcctgcccacccatttgcctccggcttgggtggcaggaagggaggtgcagggccgggcgtgaagagcaaaccccctcctgctcagagctgctgccgcctgcgcccagggctgcactccgcgcaggcctcatagccaggccatggcccccacagagccctggagccccagcccggggtcagcgccctgggactactcggggttggacggcctggaggagctggagctgtgtccggccggggacctgccctacggctacgtctacatccccgcgctctacctggcggccttcgccgtgggcctgctgggcaacgcctttgtggtgtggctgctggccgggcggcggggcccgcggcggctggtggataccttcgtgctgcacctggcggcagctgacctgggcttcgtgctcacgctgccgctgtgggccgcggcggcggcgctaggcggccgctggccgttcggcgatggcctctgcaagctcagcagcttcgcgctggcgggcacgcgctgcgcgggcgcgctgctgctggcgggcatgagcgtggaccgctacctggccgtggtgaagctgctcgaggcgaggccactgcgcaccccgcgctgcgcgctggcctcgtgctgcggcgtctgggccgtggcgctgctggccggcctgccctccctggtctaccgggggttgcagcccctgcctgggggccaggacagccagtgcggcgaggagccctcccacgccttccagggcctcagcttgctgctgctgctgctgaccttcgtgctgcccctggtcgtcaccctcttctgctactgccgcatctcgcgccgcctgcgacggccgccgcacgtgggtcgggcccggaggaactcgctgcgcatcatcttcgccatcgagagcacgtttgtgggctcctggctgcccttcagcgccctgcgggccgtcttccacctggcgcgtctgggggcgctgccgctgccgtgccccctgctgctggcgctgcgctggggcctcaccattgccacctgcctggccttcgtcaacagctgcgccaacccgctcatctacctcctgctggaccgctcattccgagcccgggcgctggacggggcctgcgggcgcaccggccgcctggcgcgaaggatcagctcagcctcctcgctctccagggacgacagttccgtgttccgttgccgggcccaggccgcgaacactgcctcggcctcctggtagctgccccgggccgctggaggtgggcggcagcggagcatc

SEQ ID NO: 3880 - DNA, 6000 bp, Homo sapiens
caccacgcccggccttaatttttgtattttttgtagacacagggtcttgccatgttgcccaggctggtcttgaactcctgagctcaagatagcctcctgcctcggcgtcccaaagtgctgggaggggacagccaccacacccagcatttaatcctaatcttcacaacaagcctgttattatcttcacgttgcagatgaggcaaccgagggacagaggttacatacttgaccaaagtcacatacacagttagtaagtggcagggccaggaattaaatccaggcagtctgattccagagtgtgctcttggctggagaatgcatggcacatggaatctgctcagtacaacattcgctcatttttttcatgggtggcacttccacaccagctcagatgccctcagtgccacctcagtgcttccctcccacccggttccaactaagtaccttttcttttcttttttttgagacggaatctcgctctgtagcccaggctggagtgcagtggcacaatctcggctctctgcaacctctgcctcccaggctcaagcgattcttctgcctcagcctcctgagtagctgggattacaggcgtgtaccaccacacccagctaatttttgtatttttagtagagacggggtttcaccatgttggtcaggctggtcttgaactcctgacctcgtgatccgcccacctccacctcccaaagtgctgggattacaggcgtgagccaccgcgcccggccccagctaagtaccttttctgtagccagcactggggaaactcccagggagaggaatggggaattcctgggatcatggagagacactcccaagggctaggaaagccttccatctctgcctggcatgcttctgaataggggagatggctccagcttgtccagagagaggaatcttcctaaagtagaactacaggtaggagaaaagtacttttgggggacccatgctgggcaccctccaggggggtggaggggaagagtaggcacatcccccatccctttagtctcagcccctgggaacccaccctgtcccctatcatctcttttcagatggccttctcagacagccacagaaggtctgtgggcaggacctgggcagagtgggatgggttaagatccgatggggtgaagggctgaggccaggcccttaactaccatcactggacatttggttccacctagtggcctctgatgttccaaccgttctcacagagaccggcacaagggggtgccctttcaggcattcagtgtttattgagcacctactctgtgtgaggccaaatgtgaggtttgatggaggcatatccatgagcataaagaggctgggcacggtagctcacgcctgtaatcccaccattttgggaggctgaggtgggtggattgcttgagctcaggaggtctagaccagcctaggtgatacaggcagaccctatgtctaccaaaaaaaacacaaaaggctgggcatggtggcatgtgcctgtgggcccagctacttgggaggctgaggtgggaggatcagttgagcccaggaggagttgaggctgcagtgagcctagatcctgccactgcactccaatctgggtgacagagcgagaccctgtctctgaaataaaataaaataaaataaaataaaataaaataaaataaaataagaagcagaaggtcaggcagggtgtgtgcacctgtagtcctagctactctggaggctgaggtggaaggattgcttgatcccaggagttcaagtctgcagtgagtatgatcatgtcactgtgctctagcctgggcaatagagcaggactctgtctctgaatttttttttttttaaagagcagagaactaacatttattctgctcacacgtaccagccctgggcttgggtccatactgtattggcacgtgcctgtggagcactgaggatcccacagcagagacaggactgccaagtgcctggcctggtcacttggcttctctggacttccgtttccactcctgaaaaataagaaggttggtgtagattatctctagcatctcttcctatgttagaattctgtgaagtcacacaaaggagtggttaagagtttcagctttgggctgggtgaggtggctcacacctgtattcccagaactttgggaggctgaggcgggtaaatcactcgagctcaggagtttgagatcagcctgggcaacatggcaaaaagcctgtctctactaaaaatacaaaaattagtcaggtgtggtggtgcacatctgtggtcccagctactctggaggctgaggtgggaagattgtttgagcctgggaggctgaggttgccgtgagccaagatcatgccactgcactccagccagggcaacagagccagaccctgtctcaaaaaaaaaagagttttagctttggagttggacaaacctacatttggatcccagctgtcattcactagctgtgtgttcttaggaaagttgccttacctttcagagtctagggtaataatataaagattaagtgacaattatagcaagcatttagcacagagtgtggcacttggtgagtggtgatgctgcagatgatggatgattctagttacccaaatccccaaatagcacacctctcatctcctctcctctcccctcccctcccctcccccaacttcctttccttttctctttcttttttgatggaatcttgctctgtcgcccaggctggagtacattggccgcaatctcagctcactgcaacctccgccttccgggttcaagtgattctcctgcctcagccttctaaatagctgggattacaggtgcctgccaccacgcgtggctaatttttttttttttgtatttttagtagagacgggggtttcaccatgttggtcaggctggtcttgaactcctgaccttgtgatctgcccacctcagcctcccaaagtgctgggattacacacatgagccactgcgtctggccctttttttttttttttttttttttgagacagagtcttgctctgttgcccaggctggagtgcagtggcatgatctcggatcactgcaacctctgcctcctgggttcaagtgattctgatgccctagcctcccgagtagctgggattacaggtgtgcactgccacatctgtccaatttttgtatttttagtagagatggggtttcaccatgttgtctgggctggtgaaggtggtaggtttcaatgacagcagcataatgccgtgggagttgggaggagggaatgatctgactcactctggggcaggtcttcgagttaattctccagtggattctcctaggcatcgtgtggtccgtcctcagaactgtgcctccctaatgtggctgagtggattcactacccaccccatgcttgggctctgcctcgacctctccctcccatgcacagccaaagccgctcaaagctgctggttttccttgactctgggcttctctccatcacccactgcctcccaacagaacccccggtctctgcatcctcctgttccagattgctaggaccccagctgcccatcagggacccctctaaaataacttagttgagtcattgtttgcctacttaacaacctgtgatattctccattgcttatgggataaaatctaaactccttggcttggcatacaaagtcctttacagtccagttcctcctctgctgatatttccaagctctttgtcccaagtgcccatgctctctccccacctcccttgcactctagtcccctcgacagacttgctctcttgcgggaacatcacccacttccacatcacccagcctttgtgtgtgctgtgtcttctgcctagagcaccctcccttcccgtagtctgtcaggcaagctcacagccatttctcgggatccattcaaatgtcacctcgcttgggaggccttccagatcccccccagattttcttgggttccctcagcatcatgacctttgcctttcatagcatctatcatgctgaacttacacatttacttccttctctggactgaaagctcattggtggcagagatcctttacatttttgtattctgagtgtctggaacacaacacgtagtcagtaaagacgtgttattgcaaatgtccacacatcttgtgtctggctcagaatatggtgttttaggccgggtgcggtggctcccagcactttgggaggctgaggcaggcggatcacctgaggttaggagtttgagaccagcctggtcaacacggtgaaaccctgtctctactaaaaatacaaaaattagccgggtatggtggcgggcactacagtaactgtaatcccagttactcagggggctgaggcaggagaatcacttgaacccaggaggcggaggctgcagtgagccaagaccgcgccattgcactccagcctgggcaaccgaaaaaaaaaaaaaaattagaaatctctggagtcagatctgggttgtgggccttgctctgccttgtatcaactatgtggcaagtgactgacctctacaaacctcagatttgtgatctgagattaatcaagggttaattgagaaaccagctgagtgctagcacctagtaagtgttcagtaagtgacagtgatggttattgctgagttttgaatggaggagctgccttagaatcaggagacctgcgccccagttcccattctgccccacctccctgtgtcaccctaggcaggccacatttcctccctagtttcaggggcctgaagcagatgccctcttagggccccacagcctgacatgctgtagggcctgagaagcggcgtcgtggaggacgagatgtgtgagggcagcaaagagtgctatgtgtccagcagagggccctgcccggcctgtggccggaggctgggagggagggcaggcgagtgatgccagacgcctgactggaggcggatccagccggccagctgcctctctggagcccagctcttgggccccctgcactcacctgctcttcctgggctggctgtctcctgctcatccagccatgcggtggctgtggcccctggctgtctctcttgctgtgattttggctgtggggctaagcagggtctctgggggtgcccccctgcacctgggcaggcacagagccgagacccaggagcagcagagccgatccaagaggggcaccgaggatgaggaggccaagggcgtgcagcagtatgtgcctgaggagtgggcggagtacccccggcccattcaccctgctggcctgcagccaaccaagcccttggtggccaccagccctaaccccggcaaggatgggggcaccccagacagtgggcaggaactgaggggcaatctgacaggagcaccagggcagaggctacagatccagaaccccctgtatccggtgaccgagagctcctacagtgcctatgccatcatgcttctggcgctggtggtgtttgcggtgggcattgtgggcaacctgtcggtcatgtgcatcgtgtggcacagctactacctgaagagtgcctggaactccatccttgccagcctggccctctgggattttctggtcctctttttctgcctccctattgtcatcttcaacgagatcaccaagcagaggctactgggtgacgtttcttgtcgtgccgtgcccttcatggaggtgagtgtgtgttctgtttgagctctgctgggaggctgcaatccagggaagggactcaaagtctccatcaggtctttggaaatggaatttgtgggtgtgcaaaacctgagtcttggagctctgacttgctcctcctttaccttggagaaggagacaaatacggtattggtttctggttgctctcaagagaagtaggcaggccagggggacaggcgggtgtgtggggcccctgggttccagccccagcctgatcttctgcttcgggagcaacctcaaggcaggcctttgccactttctccagaccctaagctgccctctcccttcctcagcccttctcccctgtcccaccca

SEQ ID NO: 3881 - DNA, 6000 bp, Homo sapiens
tacagatgaggaagcagagaaacaggcagccttaacaggggagagccagccttggagaggatgtgttgtgagttgggggtgggggtgccaacgtgccaggtctcatttctcacttccaaggccacccttccctggcccagtcttagttgccctttctaatagattctaaaagtttgactcctccttccggaaacttggggtttgtgagttctaatcttcagtctctcagttgctatgagaccctgtgcaagtcccaaaacttctctggacctcaatgtccagagaagccatgttttggatgaaaaactagaaagtgggagaggcagggagcaatccactttgaatctcctgctcctggtgtgggacagagaaagctccccgggagagctgctcagctgcaggcagtgagggaagggaaggagggaaggggaggacccaggcagcacccagaccagggtggggaagagaagggtgaaggaggggtacagtgactccaggaagtggggtcccctggggctctcctgtgccagccttgctccaaagtggagcctagtagggtgggcccatcagaaggcagacccggggggtcgccggaggtgggtgaatgtgtgggggagccaacaccccagttcaaaggaaaggcaggaaacagccctaggcaaaagaaaaaggaaacctctcggctctggcagcagcgggcatggggcgcggccgggtggggcggctggcggaggagaagaaagcctggctcagagcagagttggcccccagcccacccccactccaccccgccttccccccattccatgggctctcaaccctgatggccccacatgcgctgcagcctgcttcctgcactgacccacgccccccgggggagagacacacagggcacagaaggtatcccaatggggaggccctgctgggcgcaggcttgagtctcagctccactgttgatgagctgtgtctttgggcaaatcacttaacctccccaaagctccagtctctcagtctttaaaatggaaacactaatagtatctacctcaaagggttgtgaggagaagcaaatgagacaaagaaagcaaagggttttttatgctataagggcttacaaaatgtttactattaatattgtttttcttattgccttcagctacaaataaactactgtgaaaagggcccagcagagctactggtgacaggacggggagttaggatggcagagtctcatcttctggagccccatcagatcacccttccttccctcccaccctcctcctttactaacaaagcccgtcccactgactttcagggaaacaggcctttcaagcagccagttctgctcttgggctcctgggccgggatggtggaggaagtgatccttctcccaggggatgcccggaggagctggggctaagcctgccgcctggtgggagactctccaaagaggaagaatctgggcttctaggttagcactgtctggagagtacagcttctccccagaaatcagagttccttgaaattagagtttctctgctatagcccaaggaaaagcaggggtgaatgggtcatttgggattgggagtgttgttgtgggggttgggggcagacatgccctgaggggccgtgaggatcctcctctgagctcattcttaatgggctatgtgaccttaggctagtgagtcactattgggagcagggccaagatcaaggagcctgctggggcttcagacaccttgggaaggtgcaggagatggagtggcggagaaaatgccaatctcccttccccatgttggaaatggcaacttcttttagccaaaccgaaatgaactcactgacctgggggcttctgagaatcgtggggtcccctttgtactaactagtccattggcaaaaatggagtgatctccagtccctaatgacaattcaggtctctcctcccgcccttcagacatgggagaacaggtcccaggaggagaaaaacacccgagaggccaaacttgggcagtgagcagagagttattttggaatcagcaaaaggacatggtggggggagagctcaggggttggcactgtgccccccggagccatgccagagcaggccatgggcaggccggcggctggcgggttggaggggagctgggcccggctacttaaggcacctccagaactgaagtttcctttgtgtcccatccccagcccccgcttctctgctacaatcttttgtctcctccagaaaccatcaggggatgcctatgctctgtgtcttcaattctccccatccctgggagatcagggccctctctgattaactgtgagatgtgaatttgaggctgggaccagggaagcatcttgcgcccagctctctgcctctcctgtctgctccagcacggtgaggataccttcctggttgatattttcattccctgaactgtgatcttcttccagaaagacactagctcatcaggaacgttcattcttgggacccagtcttgatggccccccataggttcagagagacatacataggaatccaccatcaccctgatgtctcttcctttaccaataatagtaataaccagcgtttattgaatgattggcatgtggcaggaagtgcgctcaagcactttatctgcatcatctcacataaaccccatgagagaggtgctagtgttatccccacttaccaatgaggaaaccaaggcttttcagtgctaaggagcttgcctaagacaacctgccactagttgctggtggggggatttcagcccaggcagcctccctcctacccactttatctactgcctctcagaggcccacagctgaggggtttccaaactccaagggaatgagcaggactctggctgcgtcaaaatctcaggccaagcaccctctcaaagcctagttacagttcctgtctttctgggggaaggatcagtggtttgccccatttccctcccatccaccagcagtggtttctgggagcccatctatgggggctacttggaggggaaggtattggggctcagcacagaaattggggactctggggagggtaagacggaatccttgagtgtggagattatcatcagcgttgatgttgaggacctactgtctgctggatcctctgggaggcagtcagggtgatgactgtcagtgagagaccagccaggtgcacgtgagaagtgaactcactgtatcagataatcctgggagcatccagggaggaccagaggtgaggtccacaggcattcaagggagaaagaggaccgaggtggccagggaaggcccaggggagagagaagaggcttgagtcctgaagaccagaaggacttaactcagggccaggagaaggggaagccatgagcccaggttagaatgaggaaccacattggggcttttgtacttcatctccacgacctgttctgtcccactccctggggcagcatgttctagagcagggttttctgccctttttccctcagggcacacattttaaaaacacagacacacacatacacaaacacacaaacgcaatccaaggtattcagtgtcctgggttaaaccaacaaggcctctcaggcgaaaggcacccagtcaaccctgggcagcatccagccatcccaagggataggagaccccatctgggcacacacctggaagcgctgctatagaagaaagagtgcatgtttgcagccaagcagacatgggttcgaggctaagttccagctctaaccagctatggctatatgtttcttcacctctctcagcttctgttttcttgctttcaaaatgggcatacggaaagatgtttataattagacacagtgcttggcacatagcaaatgcccaatctatgggagctatggttattatctatctagtctccccttgagaggaggcacttgggaggagcggtggaggcaggcctgcagtggcccttcatttcacctatttgactctgcctgcctagagcttgccgagaatgagacccagagggtcggtcctaggacacaattcctctcaccctctgcttctgccaccatcctttcccctttgcccttggaggtgctggaggaggtgggagtgtccccgagagtgtccagactgcataaggtggcagaaaggtgctgagtgtcttccattgcaccagtgtcagggacttggatgtggtccccaggcccaaagccaaggcagatggactcatggagggggaggagcagaggagcagtgcggagtcactctctccatgtagcacccccagctcagtgcattgctggggttcttgcagggcagatgaagtgcttctttgtataggggaatatgtgggtgaaccaggaaaatgggagcctagtacatggaggtttattccaactccctgtgtgattggcaagttagaattgcccccctacctgagttattattggctcctgagaaacaggccaaaggcagcccccactaagaagcttttagcacctcctataggaaggaagccttcccagtgaatccagtgtgaggattcttttctccaggtctctggacctctcccaacatgctccatgttcctttgcacgaagaagaacagcgcagttcggtagagtgtatgtaagccccggttgccatcagcacactgtgtggattctggcaatacctgtcatccccactggtgctgcggtgcccctcatgccccttgttaataaccaatgatagtgccacttgaactcccaggctgttgtgaggagcaagcattcattcattcattcattcaatcactcatttgttcatgtgacaaatgtggattgaatgcttgccctctttcctctcccctggagccttggagagagagataagacaagcgcaaataactgtgacctgttgtaggaagtgagaaatacacccaggcagggccagatactgcgtagcaggcggggcacagaggagggaacgcttgtgtctaactgatgctcctaatgcggaagcccctgaaaggcggttgtggtgcaaaggaaaacccacaggccaaggaatgggaagaccaaggttgacacttgtttgtcaagtgtcaataatcatctctgcccggtgagttgttgcatgaagcaagatcctccttggggggtgtttagcacagagggggtgcgattttatttcctgtgaaaataccaggtagtattatgttcactatgtctttgtagggtgtgtgtgtccccatctgtctgtatgtttgtctgattgtgatgctctacttcatcagattcagggttccttgtggacaggagctgtgtttctttgcatcaggagaggggaactcttttagggcaggggccatgcctcctccttcagtctgggagcttcctgaaggcaggatctgtgctcgtggttccttttcttgggatcacatcacagacacctccttcaagcacacacacacacctccacacacacacacacctccacacacaacctccaaacacacacacacctccaaacacacacacctgcaaacacacacacacccaacacacacctcctcctaacacacacacctccacacacacacacctccacacacacacacctccacacacacacctccacacacacacctccaaacacacaccacacacacacctccaaacacacacacacacctccacacacacacacctccacacacacacctccaaacacacctccacacacacacctccaaacacacacacacctccaaacacacacacctccttcaaacacacacacacctccaaacacaaacacacctaacacacacctccttcaaacacacacacctccaaacacacacctccttcaaacacacacacctccaaacacacacacacctccaaacacacacacgcctccaaacacacacacacccccaaacacacacacacacctaacacacacctccttcaaacacacacacacctccaaacacacacacacacccctccttcaaacacacacacacacctccac

SEQ ID NO: 3882 - DNA, 6000 bp, Homo sapiens; identical to SEQ ID NO: 508

SEQ ID NO: 3883 - DNA, 6000 bp, Homo sapiens
ccttgaataaaagggaactctttgtgccttactgcttacactgggaaatgttgttttcccatcttgaagccccagttggaaaatctgttctccttgagtctcaagcctgctggctttcagacaggaactgacaccattagctctcctggttctcaagctttcagactcagactggaactatactttgcctctccttggtctccagcttgccaattgtagattttgggatgtctcagcctctataaattatgtacctaatttcttataacaaatctcctctctctctttctttacacacacacacacacacacacacacacacacacacacacacacacaaatctcctattggttctatttctctggagaaccctgactaatacagggatggtaaggtgttatagttatagttaagagtccttatcctttagaaatacatatatgaaatacttacagataaaatgatatgatgtctgacatttgcttcaaaataatcttaggatggaaggaaatggataaagatttagatgaaacagactggctatctgttggtaattgttaaagctgggtgatggaagcatggggtttcctcatgctattctctctgcttttgtatatggatacagttttctttagtgaaaaagtaaaaaatggaagaaaacgaaaaataggaaattgaaaaatattagtagtatggggaattactttttctcataaccactactgtagaataatttgactctttataatatgtgtgtgtgtaaaactaagtatcttttaaaaattaaaaagtgaagagaacctaccataaatataatatgtaatggtgaaactttagatgcattctcattaaaggtagaaacatcaacgattcctgctctttgacattgtactggagtcttagcctttgcaataagacaagaaaaagaagagctaaatagaataggagaaaaaaattattgttgtttgcagacaatactgtatgtatagataatccaaaattatttacaaactgcaggaaaactgctggatataagagcaagacacaaaaatcaatattgttcccatatattgggaataaccaatagtaattagaaaatgtggtataacaaaattatatacacaatggcaacagaaactgtaaggtacatagaaataaatctatcaaaaggtgggaagacatttttgaagaaaattataaaacattattgaaggacataagaatagacctgaatgaaatcataaatatatcaattatttcccaaattaatctctaaagtcaatgcctcaaaccagaaactcaataacagaacttttttggaacccaataaactgataccaaatttcaccatttcaaaattttgagaaacattttaaaaataagaacaaagggaggcttgtttttaccaagaattaaggctcattagaaagctgttgtacctaaaatagtgaaatattgggatagggatagaaaaataaattaatagaataggccagagattccagaaatagcctcatataaaatttgaaataatgtattatacagatgatagttgagaaatgatggacaattcaataaatggagtaattggcttgccctgctggggaaaaaatgaagttagattcttactcaacacataatagaaaaataaattccagttggattaaagctctaaatatgaaaaacaaaagttaaatttgttagaagaacatacagggggaaatatttctattctcaaggtacagaacacaagacacaaaaagccaaaataataaaaggaggaattgattgcatcataatttaaattttctgtgtaacaaaagaccccatccaaagcaaaaagatagtgacagattagagaagatattttcaacatatcagaatatatacaggtcctacaatttgataagaaaaacaatctaataaaaagttgagcagaagatatgaatgatttacagaagagaaaatccaaacaacaaataaatacaaggaaagatactcaaaatactcagtaatcagagaaataaaaaagcaaaatgagatgctatttttacacctaccagattgataaaaattaaaaagtctgaatatgaagatgttgggaaactaaaatgcagcttgttggacaactaatttaatacaactaatttagagataaaattcaggatatggtcctatttagttgaaaactcatacattatatgacacagcaatacttatactcagcatatacttctagatatacacctgggagaaattctgacacatgaacacaaagagacatatgagaacattcactgtagcactttaaaataaaaataaatgggggaaaagctggaaataaattataaaagttgaataaatttctggtgaacaaaatgtgccatatccatatgcttaaatactatgcagtagttaaaaatgaatgaactagatctagcctatgtatcagcatagacagatgtcaaaaataatgtagaatttatttatttatttatttttggagacaaagtttcattcttgtcatccaggctggagtgcaatggtgggatctcagctcactgcaaccttcttctcttgggttcaagtgattctcctgcctcagcctcccaagcagctgggattacaggtgcccaccaccacgcccaactaatttttgtatttttagtagagatggggtttcaccatgttggccaggctggtctcgaactcccgacctcaggtgatccgcccacctcggcctcccaaagtgctgggattacagacgtgagccaccatgccccaccataatgtagagtttaaaaagcaatttccagaatagtacaatgtatcaattattgagagtaagagaatggggacaagcatagacagctgttttgagaagttctgctgtgaaatggtagggattgtaatagctggaagtgggagtatagtggctaaggagagttataattatttttttaaataaatattactacagcttgtttgcaaatgggtgggaatgatctggtagacagaatgaaaatcataaagagcaaaatccttgggaaggtggaagcttgggctccaaagcacagaaggaggatgctactatattttaggcagctaaatggtaagtggtcatgggatggaatgaaggcgctgaatttgtaggctgttgaggaggtagaaccttcaagaagtaatgctaattggatgtctggtgacattataaaggggagtctggttaaaaggcaggacaaaggccagatgcagtggctcatgcctgtaatcctagcactttgggaagccgaggcaggtggatcacctgaagtcaggagttcgagaccagcctggccaacatggcgaaacccccctctactaaaaatacaaaattagctgggcgtggttcgggtgcccgtgatcccagctacttgggaggctgaggagggagaatcgcttgagcctgggaggcagaggttgcagtgagccgagattgtgccactgcactccagcctggcgacagagcaagactctgtctcaaaaaaaaaaaaaaaaaaaaaaaaagcaagacaaaaggacttctctcctgtcacagactctgccctttctgagagtctgggaccctactattgtcactcctaaattttgtttgtttgtttgtttgtttgtttgtttgtttgtttttgagacagagtttcactctgtcgcccaggctggagtgcagtggtgtgttctcggctcactgcaagccctgcctcccgggttcacgccattctcctgcctcagcctccccagtagctgggaccacaggcgcccgccaccacgcccggctaattttttgtatttttagtagagatggggtttcaccgtgttagccaggatggtctcgatctcctgacctcgtgatctgcccgcctcggcctcccaaagtgctgggattacagacgtgagccatcgcgcccagtctgtcactcctaacttctaatctgctctagggagagtcccaatagtccatcttgcatactgaagattaagtgaatttcacagccaacaccacacaataccttctctattgagctgtaagctgcctctggactggatggtgttttgtttttatttttaccgtcagcaccagtgcctctcacatagaatttagccaagccggttaggtgttaagtgctgctgctgcgctgtcagaagggcacacggggctggttctagaccggcctctgctgcttactcgttcagtaatcttctacagcaagttcttgaacttctctgggcctgttttctacctcgccgagtggttaactgcgtttaggatcttggaagcacctaagcacgaaaagcacataggccagaagttaagatgtcccttggggacgcaaataccgggaatttctccggctgttcccaccgatcaagcaccagggctctcaggtctagctccttcgtctccccacccccacatataccctcactttttcttcctttccctatgcctcgcagtccctcaacagggtctgcggtcagacgtcactcccaggtgactggcaatcagggatgccgcctcgctcacctggccacccttgaagattgtggatcctgcaccggctagccggctggcagagggcgcgccaacagccgccagccgaagtgcccccgcgtaggtgggaggagtgactgcctctcaccatcccccggggatgcacctgtggagagacggcccgagagttccagggtgagtgcgcagaggagcttatctgcctgcctgcgggtcggtgtgtcctgccggctgctgggcgctggcctgcgtcgcctgcttgtctcgctccctgtccctcgtccgctaccccctctgccccccctccctccagcagccggcctctcggtcatcccgccgggtgggtgcctgcgaacctcactcctccctcctctgcaggagccaactggcgagccgcaggccgccgggctcggcctgggagcccataaaacccgcccgagccgcgccgctgcgctccagccgctgctcaccaggcagagcgagcgggcttggctggggcttcctgccctgagcgcgacaccgactgccccggaccgcgcctccaagcaggctgaagggcttccgctcttggcttccagaaaagtttggagaaagagaatttgaggcggattggagggtggtagcccctccccagccttctttccctcccagaagcctcactctgcacagcgtcccccattcttcccgtcctgattccccatcttcctgacccctccttctccctctcctgggtcgatcccagtcacattttctccttccgaatctcatcctccctcctcctctctatcccagtcctctgaacgatttccgcctatttgcaagccttctccctgtcattctcaacgcttctcctttctctccacctcccctgccactccattttatccatcaaacctctccacttgcatccacaccctcccttcatccttccctcccagcaaaccttgctcatggattctgggcctctgtgggatgccaaccccacccctcggggcaccctctctgcccccaatgccacaacaccctggctgggccgggatgaggagctggccaaggtggagatcggagtcctggccactgtcctggtgctggcgaccgggggcaacctggctgtgctgctgaccctgggccagctgggccgcaagcgctcccgcatgcacctgttcgtgctgcacttagccctgacagacctggccgtggcgctcttccaggtgctgccacagctgctgtgggacatcacctaccgcttccagggccccgacctcctgtgcagggccgtcaagtacctgcaggtgctcagcatgtttgcctccacctacatgctgctggccatgacgctggaccgctacctggctgtctgtcaccccctgcgcagcctccagcagccaggccagtccacctacctgctcatcgctgctccctggctgctggccgccatcttcagcctccctca

SEQ ID NO: 3884 - DNA, 6000 bp, Homo sapiens
ttcagggagtctaggttgagatagctcctccaaaatgaaggatgagatattacagctgacaccgcctcctacaggaagcagaagcgtaatgctttgaggtcctatttatggaagcaatatttgtcacattagtgggcttctctgacccacttatggggtgtctcaaaagggagctaattttgagaaggggctcaaggcagaggagatgctccatttggttcaggctgcaatgccatctgttttgtcatccatgactccgtggatctaacggtgctcaaagtgtcaatggcagattggagaggtgtacattacctgtgacaagccctgttaggagaatcacagtgtcagttataagggtttgggaacacatacatgccttatttgtcaaataactatttttcttttgagagaaagagatggcttgctcctgggctgtggaagagactgaatgtctcatcaagaaggcagattaccatggagtctgagctgcccgtcttgagctgcatgttattttgatccatcaagccaccaagtcaggttccccaaaacacccagctctactggaggctctcagcattcaggtggacatgtctacctgccctgggtatggaagacatcttctgtccccagttagcccactgcttattcaatgggctcatggacacagtgaccatgcaggcagggactgactgatccattttgtaacaatctggacttccccaccaaggctgacctggcttttcatgagtatcgccagccaactctgagcctttcaagaggtttcaaactcaggggaagtcctagacagccacctgaaagcagattatatagacctctttaatcacgtaggatatcagcaatttgtccttgctgtaatagacaatgtttctgaacttggactgactttctttgcctcctgtgcctgcgttattgtcccgggactttctgaatgcattgctcatcatcatggtatcctatacaatattgctctgaccaaggacctcactttatactaaaagaagaaacgtggtaggctaatttctgtccctcaagtagcagctggccttatccagtggtggaatgaccaattgtaggcttagttattgtgcctgcaggacaacaatgcacagaaaggtagcattggtgtcctataatatatagaatttcttctgaacccaaagctgacatatcgtgctatttgtcctgcagtcaggatacatggctacaggaaccaagagaatggcacctttcactaacactcagtgacttacttgcaaatttttttgtttcccgttccttcgcctctaggcttggctagtttgaaggtcttagtaaccaaggaggaactcttctaccccaggagattcaagtgtggtttaagtgaaataaaagttgagaccctggctatttcagactcctcatgccagtgggtgaattgtaaaaaatagtatgatggtgttggctgtgatgacagtaactattaagaggaagtagagttgctgttatatgatgagcaataaaaggtgaatagacagaattcaatcatggtagtgcctcttgctgctggcatgtccagtggcaaacattaacaagcttagattcctcagaaatcagggctacccctgactagctgagatccctgatgaagggaaagggaaattttgtaacgtccattaaggagagcaattacagctttatgaccagtcagaaaaacaacaactctaacttatatttttttcttgctgtgtcatatgtatgtattttataaattgatgcaaaagtaattgtggtttttgtcattacttttaattgcaaaaagccacaattactttggcgccaacctaataatgaattctcctttcctttacatttttttcttctactattttatacaggacaaactagtgatggataacttaataatttagtccgtaagatacagaatgttgagatgagatggtgacagaattggaggaatggctatcacccagagctcctgggcttggagctggacacagaaaatgatgatccttttgggggaaagagggaatgtgtttttctgttttcttccttccttccttccttccttccttccttccttccttccttccttcctttctccttccttccttttttcccctccctccctccttccttcccttccttccctttcttcccttccttccttcctgatggagtctcactctgtggcccaggctggagctcagtggcgtaatctcagctcactgcaacctccgcctcctgggttccagcgattcttgtgcctcagcctccctagtagctgggattacaggcatgtgccaccacacccggctaatttttgtatttttagtagaaacagggtttcacttggttggccaggctggtctcgaactcctgacttcagttgatccacctgccttggcctcccaaagtgctgggattacaggtgtgagcacctggcttggaatgcttttcaattgtacaagggttattaagtgggagcatctttattgtattttcagaattgtaaagatgataagaaacatttgacactaggtagtcaaagaggtgaactgttgtagccatctggcattctttttgtctgctttgaagtcatgataaagatgctagtttttcctaaatccattcgccccttcatccataattacagaaccatggctttcagctgtgtacaatgccacgtggactaaaactacgtttcccaatctcttgtagccagcttgctagggtaattaagtcctagcaatgagctaaaagtggatgcattatgtggtctttctgggaaggctccagaaacaggagaaaacaagtgctctttagtcttcccctgttcctcctaacgctggcctgggatgtggactcaatgtctggagagccagtagccctcctggatcatgaggtagaatccatgcacactggagggagaaatatcagagtctggacctctgttgacaaacaatattccttcagtgtaataaaatgtatacggatgcttttccaatgtgccaggggagagactggtaaacaagcctagtttctatcataaggacacataaataagtgtgttgcgggggaaactaacaatcaggcaaggatattagggaagcacacaggtgaaacacctagcctaatcctgagagtttggtgggtggagagttctggagaggctctctgcaggaagttacaccctcatggatagctaggaaggaccagctgttggaggaaagggcagaattttcttagtctaggggagtcaggaggtgttaacactgcttaacaccttggaagagataaggcagggaggtaagctagggtaggagtttagactctaaccccagaactatgaggagcaagggaagggcatttaagcacgggagtaaagtggccaggtgttctttagagcgatcattccatcattccacttgcgctgttcagaacggggattgaggggaacgagatcagaggcgtggagcccaattccgtatttcctcttgaaatagcgatagggagagagggaaaggatagaaaaactggaaaaggagctccacgccaaaggcacacttggccccagtgaaccacctggaatacgctgggagcgctgtaaccactaagtaattctgagcaaaagctagggtggattctggatatgccaggccgtcttttggaaaaagaacacacaattaggcacgaagtggagtaagaaaagaaatcacaattactggagcctcggaaatccgagtttcttctgtttaccagaaccgcttgcccagcaatgtttccagagggcgcccggctttccctcttttcccagagcactccccagctctcccaagacaagggtggcgtggtgccccggggcaaagactaagtcgctgtacagcctcgaggagcgagctgctcagcaaaagcaaaagagaagggctctcgggtggcggggacagaccctccttcggcatgggttggatcggacaaggggggccgtgtgccgtcagctgccccacttctctctgaagcccagtgggctccatccactgacccgcggcccgcgcgcctcccggcaccggctacatcgctgggaggtgaggcgctgggagcgcgtgaggctctccgggagaaaacagcccagcttgcatcccagaggaggcagcagccgcaggcaccgtctatttcctcactcagtatacaaatttgacctcaaaaatacgaaccctgtctttggcatgtctgcatttagaaataaacatcattccagacgccggccagttcatagccacagagtcgtaaagttttatttttaaagggggggacggaaaggacttgtaaagttttttttttaaatttgtttttaaataaaggaattaacttctgcaaaacaagcaatcagcagcagaatgcgcgaggccacgagtgcgatcccccgaggcgcggggcgcggctgggaagttttgggggcgcgcggcgcggtgccgggaccggggaggaggcgcgcggttctgggggcgcgcagtgcgggagcgcgcggccccggggatggggaaggggccggggacgggtagcgcgcggcccctgggatggggagggggcgggaaggggggaagagacgcggggctctgggggcccgcagtctgggagcgcgcggccccggggatggggagggggccgggaggaggcgtgcggctctgggggcgcgcactgcgggagcgcgcggtggcgaggatagggcgggccggggttcgcggggcgaaggcgcgcggtgcccgggggagggcgggccggggcgcgcgggccggggcgggggcgcgcgggccggggcgggggcgcgcggggccggtcggcgcgcgggggcggcgggcgcggcgctgccaatcgcagacaaaggccgtcccagtgaatcatgtggtgccgggggaggaagtgcggcttgttttctttcctccagtctcggggctgcaggctgagcgcgatgcgcggagacccccgcgggggcggcggcggccgtgagccccgatgaggcccgagcgtccccggccgcgcggcagcgcccccggcccgatggagaccccgccgtgggacccagcccgcaacgactcgctgccgcccacgctgaccccggccgtgcccccctacgtgaagcttggcctcaccgtcgtctacaccgtgttctacgcgctgctcttcgtgttcatctacgtgcagctctggctggtgctgcgttaccgccacaagcggctcagctaccagagcgtcttcctctttctctgcctcttctgggcctccctgcggaccgtcctcttctccttctacttcaaagacttcgtggcggccaattcgctcagccccttcgtcttctggctgctctactgcttccctgtgtgcctgcagtttttcaccctcacgctgatgaacttgtacttcacgcaggtgagtttcagagaggctcctggaggcgctcacctggcggggtggtccccgcggggcgcccgaggcaggggcgatggcagccgcgggggcgggtccggccctagggctgagagtgtagggagaaggcgccggctctggggtcgtccgaaccctgtcctgtttgcgggcatttgtcataggaaaccccctgccattcccaaaaggggcaaggagaaggcaggggagggctggaggccgccgctcactcgctgcccctggctccgcatcgtgcggtggattcggggcgcttctccgtgcgcagcgcgaagcagcagcgcctgcacacgccagttagtacggatggaaggtgtgcccccaagggaggcctgaactctagaatttgccctgcctccccaggcacctaactcccggcctggaaaggtcttctgcacgttggcctccagatttgggcctgacactgctgttttgagcgttggcagggtgagaccatgttggttttgatgagatgttttgaacctccggcttaggagctctacagaactgcggcttactaac

SEQ ID NO: 3885 - DNA, 6000 bp, Homo sapiens
gtttataattcaattttattttctgtattaccttttttgttgtgcgttttgatgtcattctttcattggttacacttaaaacatcatccttaacactgttaccttaaattatcaaacgcaaggatcttatatttatccttttaaggctgttattctatatttgactttaataaacagtataagccccacaagatactcttattctttatgtgtcaaacagttagtcttttataaattctcaatcatttaccctttctggggctgtttattcttgcttacatttctgtgattcaatgtgagactatgtcccttcagcttgaagaataaccctgagtaaattctgtagtttatagtcagctaacaatgaagtctctcagtttttgtcagtctaaatctttttcatttttcgattcttttcaatggacacagaattctggtttgatagtttttatttgtttctttctgtacctgaaatatatttattatcttctaccttccatgatatttctgctgaaatcaatgttcatttatattgttcccccaaaggtgatttttttaaacctctggttgtttttaaattttctttttcgtctttcagcaatttgactctcataggcctagatggggttttctttgcctggggttcattgagcttcttgaatttcttggttgatatctgtattagttcattttcatgctgctgataaaaacatgcccgagactgggcaatttgcaaaagaaagaggtttattggacttacttccacgtagctggggaggcctcacaatcatggtggaaagtaaagggcacatctcacatggcaacagacaagagaagagagcttgtgcagggaaattcccattattaaaaccatcagatctcatgagacttattcactgtcatgagaacagtacgggaaagacctacatgattcaattatctccctcccacaacatgtgggaattatgggagctacaagatgagatttcgatgtggacaaagccaaaccatatcaatacctttcgagttcttcaccatgattttttcaaatgttgtttctgctagtctctctctctctctctctctctctctctctctctcttctttctgctctctctggatattttctattgatttctatatgagaccatcagtttatttgtgtagtatccaggtggtttttaaacctatgtaattacttcttgatttagcaattcaacaaagttcattttattatttttatgaaacctaatatcctgctgaaatgctctgttttttaatccattttgcccatctccacggtagttcatggttatttaaaagcccttgcctattagttccaaaatctgtgtcatttcttgagctctattgactgtattttctttctttctttctttctttctttctttctttctttctttctttctttctctctttctttctttctttttttgccatcaggtactcttttctgcttctttgcatgtctggtaagttttgattgcatgcagcatttgtagaaattttagcttatgttttcttcctctcataaactttgagttgtgttctagcaggtggttaaatcattggtagatcaccctaaccctacagaagcctagtttttgcttcgttcagtcaaatctatttcagtttattctttctcttaggacatcatccttctatctaaggagtatccttcaagggtttcatcctaatgcctgaggtgttcaccaaagtctttccattctgactggaaccgaactccaacatctcctcagaattgtgtgatctctaaaatgtccactcaaatttcagcctctctgccactgcactgtatctgtcaggtctctagaataatgcctctggacacatgcagcctagcaattcagctaacgaactgagaggaattgccacacagacttccggtgctgcctcttggtactcacctctctgtcaccttgcttacctccagaaaccttagttactttatatagctccaagctcttgagctatatgccctctgctcagtgaaactgcagctctctgcttattctcaacctcccaaaacttctgctgaaaaaaatatcccctgaggaaaaataatccatgggaatgggctcattccatgtgcctccagttaccccaaattgcagcactatgttggttatggttcagaagtaaaaaatgtttgatatagtttttccaggttttatagctattttatggtagaaaggcaagtgagtgctattagctaattgtccagaaccagagtctcatttcataactgcataaatcctttgcttatcttgtgtatttttttaaacaaacctaaaatgcaggatttctaagtattttccagttctagctgatttccttcattttagatgaaaatccaaaggtaaatactctttggtttctgatttttggcatcttgtaaataagcattgcctccagtttggttcattctcagatctattaagtatcccatttatattttcctctgaaatataatttgataaatctgctgaatgatcgggcaccaaggtcaggaccaataccttattcaagcccagcatgaatccacttaccaagaaactggaggcaactctgtctaaactgtaatttgtttgatacaaacatgccatctacatttaccttgtccataatgataatgggaaggttagctgaaatcaggaaatactgtattatgagtttagtgactatttacaagtggaaatgaatttaatctggtatgatttattttactaaattgtagttgcttccttttcttttctcactagtcacaaatgatttatttcagtatcttctccagaacattgccagaggccagtctcaaacttaaccattgtatacataccagaatattttcattaaaaattaataacttttgtctttctctgaaaactacataatcactacttgtccattcttttggtccttgcctgttctttatggatcaatattatcaaagctactcctgtttccacaggcaaataacaattctatgtaatgggaaagatattaaatccgaattcatgttcctcttactagctatataatggacaattaaattattcctttaaattcctttctcctttagtacacaaggataaaatactcatttgattgttttaaagattaaagaagtatctgaaagtaactgttatattttcttctgagaggtatcccaataaaaaggctacaatattgttattattattactattctagtatcctggatgcaatttacctaagcctagatattttaattaatttaagtagccacatgctttctcactagctattttcccagcatgatctcaatcttttctacgcaaagtttagtctcttctctcctaaagattgttctacctagagaagaatataggttcagaaaggaattcatatactggtgtttctctaatctcttagaattacttaatttttcaaagagctctatcttttcctatttatcttcttgttccaaatagaattaaaatcatttgctgcctttaatattgttaaatatttcatttcatactatgcttcaatttcttgcttttttcttctttttatcttcctccttccttcctttttctttcttttcttctttttcagttatcattgttatgcttgtcctttcttgtgagattcctctgttatctttccttatgtgctttttaaacaaaacctcgagagtgccgtgggacagcctcattggtatcttttcaaatttggtatctctccactttttccttacatagttagctggcagtagtacataataaccttttctgtctctctctctttctttctttctttctttctttctttctttctttctttcttagattttcattcctcttgagctttaaaagactggctagcaatgttatatctttcattttattttctgatttaaaaaagtgtgtgtgtgtgtgtgtgtgtgtgtgtgtgtgtgtgtgtgtgtacgcgcgcgcgcgcgcgcgtgcacgtcagtgtcttcttcatggatgcttgtcttattttctcccaaggtgtaactgtccagggagggaaaagtcaagtcgtcctctattacactgctctgcagaaacagactcactaaatgtcaaaaagtagatgcatcagactgttccttagagaaaggtttgccatggagtcgtatattgtaactgagctgaagttcactcatcgataagttgtgcccaaggaatcgaattccttccagtccttctaagcagtccagggaaaccaatttaaaagcgaacacaacaaaactaacagaccggcaaaatctatctttgaagcgccgcgggaggcacaatttgggaacaggtgaggccatgctgggtgggtgaggcccccctctctcctgcttggtgttccgctttcagccaacccaccccaggagtaccctgggatctcctcgccccctgccaggcggagaacgcggagcccagcgggcacgcgggaatggagctaggcgccggcagggcaactgggcatgctcagaagccgggcaggttttggtctcaagcacgcagcctgtgcattacaccagctctctcagtccggggaggaggaggagcaggaggaacgcgaggaggaaggagaggaggagcggccagcagtagccacgaccgccaccaccaggcagaggaagagttcgtggggaggaaaagacctctcctcccccttggagcgccttctctctgcttttggagaaagggaatacacgataaagaaggagacggaaagaagagaaaaagtgaggcgggagacagagggaaaagggcgtgaacagaaagggccggagcgtgcaggggagcacagggcgcgggggcggcactgccgagccgggagcgctgccgcttgggcaggtgccgcggccgctgcccggaggcggcatgtgacgcgcggccgcagctgcccgcgggcggagcgctctcagaccccggagcgcacaccgcggggccatcggtgccatcgcggatctccaggctcctcatcagtccgccggggccgcagcagcgcttctgggaagacgggcgatgaactgaagggcggctccgggcaggggggcacgatcttaaggacagtcgctccctgaacgcggagccggaggagacgaagggaaggtggagcggacgccacccgcgcaccgggcaggcgcggagaccggcgtgggacagccacctggagcgcagctgccaggtagggacggcgcccgccacccaggcgctgggcagagcgggtggcggtagcggctgacctggtttcttgccttatctcgttgcgaaaggaggaaaaagttttcggcgcgggtaggagaggtcttgtgtttggagtccaaagaaggggctgggtagggacgagagaggctgttgatttggggaagatgggggcacttgaattccgacagcgcgatctggtgcggagttggagttctgggactgagggtggggaacgcccgctggcactcaagtgccccgaaagggacgggaatcatgcgagcggtggccgggagagagtcggggacgtcccaccccgctctccctcgcttcgattctctcttcgccactgccggatctgaggctccaaagtgcccgagcatgaggagctactgggctccgggtgtgtttgtgagcgcactcgtgtgttgagcgtttgtctcccatctccccatttggtttcctgtcatttctaagaaggctaaagctggcacccgccaacctcgcagtggggccgcaagttcggattgcatttcagggggcgagaaggcaaatttggcacttcgagtaacacttgggcgaaggtacctagcctagtgcgcatctttactgacccggggagagtctgcactcgcgaggcagcggccgctggactgcaccggttctcctctttggaacacttcctcagcatagcctcctaatagcgaggttaatttttgcgtgtttttaaacggcgggggcgggc

SEQ ID NO: 3886 - DNA, 6000 bp, Homo sapiens
gtgcctgtattccaagctactcggaagctgaggctcgagaattgcttgactccaggaggctgaggttgcagtgagctgagatcacaccactacactccagcatgggcaacagagcaagactctgtctcaaaaacaaataaacaaaacaaaacaacaacataaaaaacaggcaggactaattacacatacatttataaacttcattgaggtgcttatcttttctaactcttctaggtcatagcacacaactgttgttattcaaggaaattaaaataggattaagtgatctgtttatgaagaatctcaatattcacaaaaattaaaataatcatttatatattgtcggtgacatacttctgcatttattttacaaaagggaaaatctaagctcattttattcaaacaagtagttgttaataagatggaaaataattttttaatgtttgttatttgttttgatgatcataaagcatcttgaaagacagaaacctggactaatgtatttataaattttataatttacgtattaatatgtgaaagtatatatgtatgtatttatgcatattgagggaaatgttatacatacagaaggtgcacaaataactcttatgtaaacatttaagtaaccactatcaaaatataaataaatgatatgaacacctactatcccacatatagaattaatacattatacttcaatttcaacaagttaaccaaacacgtaaatatgaaatacaaccttaaagacacattgttgatgttgactagatgatacttctattttttacatttaaaatatagtgtttcaaattataaacatattgagttttgtgacaatatttcattacttattattttggaaagtcttagaattatacattttattttctataagtttaatctaaataataaatgcaatagacagaaagacaagttccacagttcattcatttcattcaaatattcaacattcttgagcaactgctatgcactaggctctgttccaggcagttggttataccagtgatcagaacaaggatctctcattgtgaagtaaaaattctggcatagaatgaaaataaacagtaaatataaccagtgtgtttattatttaatgtactagaaggtgaaaagtgacatgcaaacatgtgaaaatggagcagagcaaggaggaccaggaaattagggtttaagtgggagccctacaattttttaaagggtgtgcaaggataggcctccttgggaaagtgacatttgagaaaagagtagatttgagtaaattatgtggaattaattaagattatgagactcaagatggagccaagggcccactcaatatactgaatatcatcgattatttgaagaaagaaatgcccagcttgtaaaacatgcccactccaaaaactggctaagagtattttgatgttgattacaaaacatgcatcactaactctcattttattatgcaggtatattattgttagattaagatttacactaatattttttctttattattaattcattatttctttttaggttaaaaaatagagaattcatgatgggccatcagaatcacactttcagcagtgatttcatacttttgggattgttctcttcttccccaacaagtgtggtcttcttcttagttttatttgtcattttcattatgagtgtaacagaaaatacgctcatgatcctcctcattcgcagtgactcccgactccacactccaatgtattttctgctcagccatctctccttaatggatatcttgcatgtttccaacatcgttcccaaaatggtcactaactttctgtcaggcagcagaactatttcatttgcaggttgtgggttccaggtatttctgtccctcaccctcctgggtggtgagtgccttctcctggctgcaatgtcctgtgatcgctatgtggctatctgtcacccgctgcgctatccgattcttatgaaggagtatgccagcgctctcatggctggaggctcctggctcattggggttttcaactccacagtccacacagcttatgcactgcagtttcccttctgtggctctagggcaattgatcacttcttctgtgaagtccctgccatgttgaagttgtcctgtgcagacacaacacgctatgaacgaggggtttgtgtaagtgctgtgatcttcctgctgatccctttctccttgatctctgcttcttatggccaaattattcttactgtcctccagatgaaatcatcagaggcaaggaaaaagtcattttccacttgttccttccacatgattgtggtcacgatgtactatgggccatttatttttacatatatgagacctaaatcataccacactccaggccaggataagttcctggcaatattctatacgatcctcacacccacactcaaccctttcatctacagctttaggaataaagatgttctggcggtgatgaaaaatatgctcaaaagtaactttctgcacaaaaaaatgaataggaaaattcctgaatgtgtgttctgtctatttctatgttaaatgcctgaaggatactcatgagaggtttcctagaaagaaatcaaagcttctatcttaccacatataagaagtgaatatttcagaaacattgttaataataaacaataatatgtgtttgtgttgtaaacacgtacctctaaaaatgtagtgttccttctgtggtaccaattataatcatgcaacagttacaggaagtagaagttacccaaggcgtcctattccctaacaccaaaattgtaagacttatgagaatatccctaaaaatacagtcacacatccattgtataaaagacaaatccatgtttatttttataaaactttgttaaattatattgctaacaatcacttatcaaaaattcacaaattccatatgaaatcattattctttgcctggtttatcaacacctttatttagtaaaattttacagatacacatatatatgcacacacacatatatatgtacacacatatatacagatataagttgtgttaaaattgaattactcatcctatgctagaagcaactatacaatattagataggaatatcataaaaattgccttatttcatttatacatacaggatgatgttttacaaactcttctagcaatttatcctaatagttatttcaaagaagataataaatatttctattgagaattcatttaatttttttccttttttttttttttttttttacaaacactaagacacactttgtaagtttaaaatgtatgggccaggcgcggtggatcacgcctgtaatcccaacactttcggaggcctaggtgggcggatcacgaggtcagcagatcgagaccatcctgactaacacggtgaaaccccgtctctactaaaaatacaaaaaaattagccgggcgtggtggcgggcgcctgtagtcccagctactcgggaggctgaggcaggagaatggcgggaacccgggaggcggagcttgcagtgagccaagatggcgccaccgcactccagcctgggccacagagctagactccatctcaaaaaaacaaacaaaaaacaaaacaaaaacaaaaacaaaaaacacgtatgaacagcttgagtcaaatctgccttctggcagctgggcaccaagtctgctcccccgcaggctcctgccttccttcacattgcactgctcattgtgtggttctggtcctgggacctggtggtaggggctggagaatggggattgggcagcccagttccgctctcctcatgcagtgtcctgcgtctgtcatctgcttgggttgtggcttgtgtggaaggaccacgactgaggttgccaggccagcaaagacggggtgcagaagagtctcagccagagtgatgtgctgggcagcgtccaattttaccaccctccgcatcaggtcaaacagctgcacgtgctccagagagtcttggagcatgtcactcttcagacgtttgcagttcttcacatatgggctgtcagagctgttctcatcccaaactaggccccatttgtagaaatatttctgcttcttggtacaggagatcacgcgtaatgggatgagccgtagggtcttcaacatcaccaggcgctcttggttttcacaggtctggaagagtgtgaaacctggtagtacttaaagagaaggtagcccatgccctggacatggcaggggcgtgtccagcccagatcaaggatcagttcaggcaggcgacagtgaccgtggtcaccatggcgatgtggtgcccacggtcagaggtggcattggggaagtcagccactcggacgctggtgctcctcactgacttctcatcgctcctgtgctcgctgtagacggtgtttaactcagaatccacatgcaggatgttctcggttttcaggtgtgcgtgggtcagccggttctcgtgcagaaatctaagggtgtggcagagctggtgggccatgtgccagacatgtgggaggggaatggctggatgttattctccttcgggaactcaagggttttcctgcccaggagctcaaaggtgatatgcatggaccgcggagggtgaaccagtcacaccccaagacgcacagcagctggttctcttagtccttctcgtttatttttttcgagagcgttgagttttggcggtgccgcctcccggtgcttgcccacattgcagatgaccctccggcaacccgagacgtccttctggcagggtccaagcactcacccccttgccacaggcgccttggcccaggttcccacttgtctttattgctcttggggccaatcaccgacccggccaccaggtggcgcctgtttatcatcttccgcacctgcgccctgggctcactcgctggggctgccggaggacgcgctccttcaggacccgctgcggccaccaggtggagcctctttatcatcttccgcacccgagccccgggctcactcgctggggctgccggaggacgcgctgctgcgagaccagccgcggcgtctttggcagtagtgggcgtgcttgcgggtccaggagggcccctctcccgcgaccgccgaccacgatgagagcgtgaagaccctctcgaaaggaagggctctgctctacacactggtgtctcctgcggaagggcagctgggcacgccttccagaccgaggtatcagacgagaggccccctggggacggggcggttaccgcagtctcccttcttgctcccgactgtcagccctcctcccctcccatcagcagctcagggatggggctggctctggggcctcctcttccatcaacccctcagctacggggctggttcaggggactcctcccctcccatcagcagctcagggatggggctggctctggggcctcctcttccatcaacccctcagctacggggctggttcaggggactcctcccctcccatcagcagctcagggatggggctggctctggggcctcctctcccaggctcagctgccgctgggacccactcccctgagcgcctctcccctaagtaatgttattcatagcaaaaactagaaaaacacattttaatgaaataaatgttcaggttaattttattatagcatgccaactaaatgttttatactatagaaataaatatttaacaaaatatgaagatatatatgaaactttaatgaaaaatgattagcctttcacaattggaaaattaaaaacaatagtaataaatgttaaccatattttggtgaattggacatcataacatattgtaggcatacatgaaatatggtacaaacattttaaaaagaacagtgtggcaatatatattaaggaccttaaataaactatgaaattatcttctaataatacaactatttaatgttcataatttagacataaaataagcaattattatatattaataacattttttccctgacaattgagtttttttacttgattccagtcctgtaacagtctcctatccctggtgtgc

SEQ ID NO: 3887 - DNA, 6000 bp, Homo sapiens
ccgtgcccaccatcgtggtggaggacgcgcagggcaagcggcgctcctccatcgatggctcggagcccgccaaaacctctctgcagaccacgggcctcgtgaccaccatagtcttcatctacgactgcctcatgggcttccctgtgctggtgggtgacggcgtcgggtagaggggcctgtctctgggacagccctggggctgctcatactccaggcatcaggtggttgagtcctcagacccaatcctttgagatgggcttgatcatcgtccccattttccagatttggaaaccgaggttcagagaggtgtaaagacctgcctagagtcagggcagcctggtgggacttgaacccacatccggcaactgcagggcccagggcctagctgctacagtgcagaagagtttactccccttgcccaaggcccatttttttgtttttgttttactttatttatttatttatttttgagacagagttttgctcttgttgcccaggctggatgtgcaatggcacaatctcagctcactgcaacctctgcctcctgggttcaagcgagtctcctgcctcagcctccaagtagctgggattacaggtgcccgctgccacgcctggctaattttttttttgtatttttagtacagacaggttttcaccatgttagtcaggctggtctcgaactcctgacctcaggtgatctgcccatctcagcctcccaaactgctaggattacaagcgtgaaccactgcatctggcctcaagggccgtttgatgcagaggtaggatagcatacccatgggtttcctggtgggtccaggtcccaggatggacagagggagctttggtgccgtaggtaggtaggtaggggcgcaggatcaggagacagagcaaggccagggcgggcctcaaatgtctgttggggagttgcacttgatactaacggctggggaaggccaaggtgagggctgctgtgagaaaggccttgccgacaaaggtctgaggtccagaggggctgcctggggtcctcttggtgaagctgggaccagcttggcccaagaatgaagtctggactcagtagccaacccctgccccctgcaggactctacgcccatccccgaaaggtctgcagtgagacagggagaggactggggcaaagaccagcctgaggggtttcatccaagcagcaggcaagactgccttccctgagccattgcaggacatgaggacatgagctccagaatggtgactcggggggtggcagcttcagagtcagggccttgctcaggaggcagcccccactgccccacccccagcaggcctggttctccccagctaagggtcctcatgtgtacagtgggggctggcagcccggtccctgtgcagatggagggcaggggcttcatgaaacagcagagacccacaaggcacctcgggagcagagtgggggcagtggtggggagaggcggggctgggagggagtcagaaccacccctgcgtctcttacggacggggaagagggtacagcttgtggggccactccatgctgctgttataaagcgtccggagtcttcaccctctagagcatggcctgttcttagcccattttccagatgaagaaactgagccccaaaggggtttagcagctttctgagggtcacgtggcccacaaacggcagaatcaacatacccacatcctccacactttcactcttttgtggcagtcacttaagcatcactctttgggacagagcaacgagggctatcctgggagaggaggaatgcagggacccaaaagcaggggtagggctgaggaggccactggccgggaagggggtggtagaatcttgaacaggcttgagacctggttctctaagcctcagtttcctcatctcaaaaaggggatggcagccgggcacagtgattcatacccgtaatcccagcactttgggaggccgaggcaggaggatctcttaagcccaggagatggaggctgcagtgagccatgattgagccactgcactccagcctgggtgacagaatgagactgtctcaaaacaaagcggggaggaggtggtaatccatgccccacttctctccatgggcagccaggaggaagacagagcaaggccacccagtgctgcccagtagccaggtagctcccggaaggcggggcctcccactgccacgctccagctcttttctccccaagggccccttctccttggcagatacccacctgtcagacctgccgtacacatggggagaccgagactcagggggagcttgtgtgatggtggggggtcctgcaggtgccaggccgagccctgtgcccacaggtggtgagcttcagcagcctgcgggccgacgcctcagcgccctggatggcactctgcgtgctgtggtgctccgtggcccaggccctgctgctgcctgtgttcctctgggcctgcgaccgctaccgggctgacctcaaagctgtccgggagaagtgcatggccctcatggccaacgacgaggagtcagacgatggtgaggatggcctgagagtggccccagggagagtggcgtctaggttaggtcattggggttggcaggaaaacggctgtcaggcaacgccactaaggaggtgacttcattctcaaccaccagacaccccgtgtcacccccaaatgtacttgaatgtccaagggacctaagccaggttcccacagggcactctcctatctggcttggctgccccaggttccaagtaatgggatgttctggttaacagagagcagggtagacatgtctgcaagtgctccagcggagctcctgggctcaccccccaacctcagggatccccagcaagctgccctgggggctcctgcagaccgaggtcctgtctggataccgttaccagcaatcccattaccctcagcccagcccgtgctctgtccaggcactgccagccccttgcgtgtgttatttagtcctcccgaggtcacctctggtcccaccccatgtcctagataaggaaattgtctcagtgagtgacctccctgcccagtctcacagctaaagggtggcatatttgggatttgaacccagaacccctcccattcccttttcagctaaccagccccctaccttgtatatgtctgttgggggatctcagggggatccctgggattccctcccagatgcccccaagtttccatgaccctaaggctctgcccccccacccaccccccaccctacagagaccagcctggaaggtggcatctccccggacctggtgttggagcgctccctggactatggctatggaggtgattttgtggccctagataggatggccaagtatgagatctccgccctggaggggggcctgccccagctctacccactgcggcccttgcaggaggacaagatgcaatacctgcaggtgagcgcagggctgggggagaggccgcacctgcgggtgacagggtgtcctgagctccccgaggcctctccactcggagcccatctcacgccttctgcagtcgcaggggtggctgtcaccatccgaggacgggctgtccaaaggtcacacagcttgtgtgggtgggccccaaccgccacccccatggtccctgtcacatgagttatctcctgccggctcagtatcctcaacgagcgccctccccaaccgaccccagctgtctgacacagccctgcggctcgaagagactgcaccaaacctcacagctcccagccagactgccccagcgcgcagcctggtccctgacccacggaaggcctttccccagggtggagaagggtttgtccccgtttcccaggagggcagctcggggtaaaagccagccgcgtcctgacaggtcccgcccacgcggcgcttctcccacgacgatgcggacgtgtgggccgccgtcccgctgcccgccttcctgccgcgctggggctccggcgaggacctggccgccctggcgcacctggtgctgcctgccgggcccgagcggcgccgcgccagcctcctggccttcgcggaggacgcaccaccgtcccgcgcgcgccgccgctcggccgagagcctgctgtcgctgcggccctcggccctggatagcggcccgcggggagcccgcgactcgccccccggcagcccgcgccgccgccccgggcccggcccccgctccgcctcggcctcgctgctgcccgacgccttcgccctgaccgccttcgagtgcgagccacaggccctgcgccgcccgcccgggcccttccccgctgcgcccgccgcccccgacggcgcagatcccggagaggccccgacgcccccaagcagcgcccagcggagcccagggccacgcccctctgcgcactcgcacgccggctctctgcgccccggcctgagcgcgtcgtggggcgagcccggggggctgcgcgcggcgggcggcggcggcagcaccagcagcttcctgagttccccctccgagtcctcgggctacgccacgctgcactcggactcgctgggctccgcgtcctaggaccgccggcgcctccccacggacgccaggcaggccaggccgctctccggggccgcagcaccaaagacgcccgcctccgccccgcgcgcagacatgcgccacccctcccaggggtgagggggcgttggcctcagcgtttgtcttccggctcctcccagctggccttgtcccaggggcgacggctgccccggacgactgcgctgggcaccgcatgtcccgggccgagtgaggtcgggcctggggagctgagtgacatcccaagcttgggcttgggtagtgagtgacatgtgcacacgtccagctgcgccatcaccagccctgcgcaacaggacgtcgggagcagggaacctgagacagggccactgcgggatcggacaaagccccgctttggagaggctgagctggagccattggcctccccaggggctttccacccacactgcaccataaccgccacacccttcggggggggggagggtacagagggtctctaagcacaggggtgttcagagcccgaacaagctttgatcaggtttccctgcttccgacctgtcctgcctcagtttccccatctgtgatgagcaggtgaccacgttaactctcagggctgtttgaagtctcttggttgtaggccctcgccactgagtggcccaggtgtgagaggtagtctagagccctctgcggcctttgtggaggtccgttttcagcatgtggcctggtgtggctccctaggcctgaggcctcccactctcagtgccccctgcccccttgggaacccacactccaccccagctaagcacaacactgtggaccaccaccaatggcacctgagccaccttgaccaccattagtgtccccaccctcattactctgccgtcgttgcctgtccccaccacatcatctccctccatggctcccaccatgacgctggcaggtgcaagcggagagcacgagggcagcagggcctggccttccgtgtccctgcgtcatccccagcctcactccccacccgtgcaggcctggccaggaagggatcctggcaggggcttccaggttctcagctcaaggcctggtcccgggcaggcgtccaacccctgggagcaatgtatttctttgccttccatcctgggcagaccccttacaggcctgggcattgccatgggccctgggtcttcccaggctaaggagaaccaggaacagctataaccttgagctagtgaaatagggtagatgagaaggctgtctcctccagacccctacccctacacagtggccccacaatatgaagacctggggtaattccaaggtgagcatagagcctgcctgtgcccagttccttctggccctcaggtggccaagcccatctcttcatccttcagatagggtcccactcccagaagaagctgctggggtgggggtgggaggctgcctaagcctgtctgtgcttcagaggcccctccagtccctggct

SEQ ID NO: 3888 - DNA, 6000 bp, Homo sapiens
gttgcaagaagtttctagcaccacatcttataacaactaccaaacagaaataagtcatccagggagcaaaatttttcccagaagatgtcactggttagaaaatgggtcacagggacccctcttggtaagtttggctgggagagctgcgaagaacagacaggcaatataccaagccttactccttgggattgggcacctgtttccaataaaattaagttggtaaagatgaaagaatgcctgctggaaaggccgggtggggtggctcacgcctgtaatcccagcactttgggaggtcaaggcaggcggatcacaaggtcaggagatcgaggccatcctggctaacacggtgacaccctgtctctactaaaaatacaaaaaattagccggacgtggtagcaggcgcctgtagtcccagctactcgggaggctgaggcaggagaatggcgtgaactcgggatgtggatcttgcagtgagccgagatcgcgccactgcactccatcctgggcgacaatgaaactccgtctcaaaaaaaaaaaaaaagaatgcctgctagaaacaacagtgtctggcacagaaggggtgggacttgagggaaaggtgtttcagtcagagagagtggcatgtgcaaaggcccagaaggtaagagaatagcccattcatgggactgaacaacatttgttatgcttagagcacagacgtgaggtgagatgagatcagggagatcgtaatggcatattgaggaatttgggtttcagtcaggacatcgtattttcctagatggaccaaagtcttcccacttactttctggcacattttagtgacagacccactgggaagatcagcagtggtcccagcccattctcataaccctgcttggagcaatctctgtgatgacgtggctggggagaggagtgtatgctgggcattgacttgaggcagtacagtcaagaccggcctccagggtggggctgtggctatggcagtgccatcctctcccaccccttcatccatgaataggttaaggggagctctctgggtagggaaggcttgctggaggagtgccagggcccagaagaaaatgaaaggctggatgagccacttttcttgttttctgtaaatagtggagcagataggctccccagctgtggagccaactgctggcaagaggacctttgtgggcagaggtgaggtggaaggagccagccaggtatgggtagaaacccggcatatgggccagtaacatcaactctgagcctcagcatcctggtatgtaaagtgggaactgcacctttaaaatgaagtgtaggctgggcgtggtggttcatgcctgtaatccgagcactttgagaggccgatgcaggcagatcactagaggtcaggagtttgagaccaccccggccaacatagtgaaaccccgtctctactaaaaataaaaaattagctgggcacggtggtgcaggcatggtggtacgtgcctgtgtcccagctacttgggaagctgaggcaggagaatcacgaaccccggaggtggaggttgcaggcagtgagccaagatcttgtgccactgcactccagcctgggtgacagagcgagactccgtctcaaaaaaaaaaaaaaaaaaattgtaaccactgaaagaaagcatcagctgttgttgccttcggcattccagtcacctgaacgcccgcaaccctatggctgtggcttctcagctgcttcctggagcagccacagccagcttcactttctggcccctcccgcttccctggggccccagtggaagtaggaagaaatgtgtgggaggttgtggatgggtctgggcctgctgtaagggtggaactcaaggaaacaggatttgcccctctagatttccttctccctctccccaacctcaacctagcacatctggatcatctgcctcttgctggaggttatcagtgcttctcaccattagaactgggggctcggagctcgacaagggccctgtggaatgagtgcaaaagggcgtgaagtcacccacctccttgagttttctgctctaccactcattagcattgtgtctctggcaaatcatttcccctctctggactttagctgcctcctctggtaaaatgagggtaaaaacaccgtctccattcctgttttgcaaattagtgagattctgttcattataaaacaaatggaggcaaaccttccaaatggagacaatatgcctgcatttggcatcagacagactggagtttgaatcctgactctactgtgtgtggtatcctgaggactgaggaggtcagggaagccaggtgcccagcacagtggggtgcacagtggccgttcctctctgccccactcctgctggttgttccctgcttaaataaagggatgaaagagctgaggattgaggacacctgggaagcttgttaaaaagacatttctttttttttttttttttttttgagacagggtctttgttgcccaggctgcagtgtggtggcacgatgatcatggctcactgctgcctcaacctcccgggctcaaactatcctgcctcactatgttgctcaggctggtctcgaactccggagctcaagtagtcctcccacctcaacctcctacagtgctaggattataggcataagccaccgcacctggcctacaaggacattttctgatctccctgaagattctgattcagggtggggtatgtgtgtgtgtggtggggagacagacagctggatctttaacaagctcccaacttaacccagccagggatggagccatcaggcagggacagccagtcctccaagaggtggggggtgggtagagcttagggttctgtcagtgatgccattatcctaaccacatacctgtggcttagtggggctgccattcctctggtgggagataggcaagcatagctagaaacagcctctgaaggattgaaccctcctctccttggcttcctctggagtccttccaagcctgtattgctccatgggctgctaccttggaatcgcctgggtgcttgttaaaattttactcttcctggccccatcaccagcactgctatatcagaatctttttttttttttttttttgaaatggggtcttgctctgtcacccaggctggagtgcagttgcaatcatggctcactgcagcctcaatctcctgggcttgaacgatcctcctacctcagtctcccaaatagctgggactgcaggtgcaaaccaccatacttagctaattttttttttcttggtagagatggggtctggatttgttgcccaggctggtctcgaactcctggtctcaagtgatcctctacggcagcctcccacagtgatgagattacagacatacaccactacgcctggcctaagcctttatttaattaatttattttattttttatttttttgagatggagtctcactcttgtcaaccaggctggggtgcaatggtgcaatctcagctcactgcaacctcgacctcctgggttcaagcgattctcctgcctcagcctcccgagtagctgggattacaggcgcccaccaccatgcctggctaatttttgtatttttagtacagacggggtttcaccatgttgaccaggctggtcttgaactcctgaccttgggtgatccactcacctcagcctcccaaagtgctaggattacaggcgtgagccaccccgcccggctaaacttttatttttaacaagttctccaactgagtctgatgtggggaaaggagttgacccctaagcctgggacactcaacaggagcttgggtaaataaagtgattttcatttactgaattcctggtacgtgccagtcatcatgctaagtgtgaggtagggagtatgtgtggctcttacagactcaggaaataggctcagaaaacattcactgcagggctcaagctgaggaccagaggcggcggttaagccctcatctggcagattcttagagctggcatttgagaatgttcacctatgccatggcccagtttgctttcctctgtggcctgacacctctgctccctgctaagcccaatattttggttgtggtagggggcggtggggagaggtattaatagaaatagagtaactttcagtgcagaacgtgcaaagctggagcactgggtgcagtcctaggcttttgccagaactctgaggtgcaagggtttgtcttctccctcagcctgatggctatggggacagggatggctttgtctccctctcagccggatatggcttcagaaggcagaaacttctctttcccagaggctgggcatttctgaaggcaggtctgtctccccttctgttgagggcacctgtgggcagggctttgtcacacccattgtactggcctcctgtgggcaaactggctgtgtgtcccctcagacagggtgccttctgaaagcagctttgggtctttttcatcaacttggggctcactggatttggggctgtacccattgaattgaagcccgggctcccgaggacagggctgtgtccccatctcccccaggctggggactcctgaggacagggctgtgtccccatctcccccaggcttggggctcctgaggacagggctgtgtccccatctcccccaggctgggggctcctgaggacagggctaaaaccttctctaggtcagggctcatctccccctcagtcaaaggacccagttcctctctcccctgccagcccaagcccagcccttcctcccagaggggcgcagcatcagaggggcccagcccagtattgtgggatgagctggtgtgcctggctggatgtgggtattcccggtgaccttggtgttggggccccgccccaggagctggcttcctggcctcagctgccctgcccacccagcagagcccgggggcaggcctttcctaatccttcatcctgctgctgctcattggagggtagagcagagtgagtcacacacctgtgcctgggcccgtcctctgcctcctgtgcactcattacctgcttcctgagctccccgagaagtcatccaggacctccccgagaagccgtccaggaaacatgctctcaggggacccccatctgcctcagcctctttgtcactgcctggaccattgtccctgctgtttctcaggtaagaggctggtggcctgagggaagggctaagtttcggccgctttgtctagctgccctgcagaatccccagggctgctcagattctggaagggtccacagagctaggtgatgtctgatttccctcctgttggcaccccctcaaggacacatggcccgtctttgttgcccacagacacagcacaatcctctcacccctcagggccattcacacacactcaccaacagacgcagcattcctcacacaccacacaaaacacatcctcgtcacccacagaatcccttcacaacacacaacagaccctcatcatccacagatacaacccatgaccctccctatacacatacacgaacgggcaccaacggacaatattgcctcacatgatgcagatcctaacccaagggaaaacatccttacagacacacaacatgcacaactgcactgacagatccacaccccaacccggaagaccctccacccactcactgcaaacaaacctactccgcaaggtctcacaaatatcttccctacacacacacacacacagacacacagcaatgcaaccatctgtacatatcacagaactccccttcccctagatgcacccgccctactgttcagtcagtaggtcagtaatcccatccccacttcttaccctcccgagctcatgcactggcagccaggccacacagtggagcaagaagggcagagctgagccgggggtcccagccgcactaaagagcatgacaggagaagctagcactcccagctgtctcagtgctgcttcctatggccctaggacttagagcacactgataataaaaacacaggtggatcacctgaggtcgggagttcgagaccagcc

SEQ ID NO: 3889 - DNA, 6000 bp, Homo sapiens
cccgtggagcgtgtgttccctgacgtgtgggcagggtctgcaggtgcggacccgctcctgtgtgtcctccccctatgggaccctgtgcagcgggcccctgcgggagaccaggccctgcaacaattcagccacctgcccaggtaggcccatcctcctccccaccccacctgcctgcagggttaggtcctgcctgggacttgggcagattaatctccaaaatggttggttgcctcctcctttcattcaacaaatgtggctgttccccacaccatgcccaactctgcgtaccatgccagcccggtgcagggcactgggggcacagatggatcagaccagggcccatgctactgggcccggttctgggcacatcattcccccagtgcctgcatcctggtaaccaaggctcgtgtttttacccactccgctctggccatatcagtagcttgcgcactttcccacctccctgcatttgctgattcttgtcctatcctttctccctgaccttggctattcaaattcagcctgtctttcaagatctaagacaaacgccacttccctgaccttcccctccttcctttggacaccccctctcaagggagcctcccctaagcctccctcagttgagtgtgtagttgttaaggaaatgcatgtgcttgcttgagacggcaagggcagggtagcctcagccagtcctgctccttgctccctgagtgggtgaagtgaggcctaggccatgccagtggtgctgtggatttagagcagggcctacctgggaagggctcttggtacctgggggtatggcaggagtttgcaaaggcctggggcaaagctgtgttccagcgtgtgagctcggtgtgtcggtgtccatgtagaggttcatgtttatttgtgtgtctgtgcgcttggggctgggaagggcgcttctcttgcccccggactgctgtgttgtattcaggctctgggtctaggggtgggtgggatggggaggggtggaatggcgtgggtcctgggtcctttcctgaattttcctgtgccctcaggagaggaggacccctggttcccctcctgttggtcctggcccccttgtccaggcgtccacaggggctgtcctatgtgaattaggaccggaagcctgtgtcttgcacatcccttcaaagggtcgcgccttggtggggccctgggagatccccctggcaacagatcccggggcagagccaatgaggagcagccgcagagctgcggagctcctgattggtgggcggatgggcaggcgccggtggtgggcggggccatggtgccgcccagccaccggccacgtgcttccttgcagtgcacggcgtgtgggaggagtgggggtcctggagcctgtgctcccgcagctgcgggcgggggtcccggagccggatgcggacctgcgtgcccccccagcacggcggcaaggcctgcgagggtcctgagctgcagactaagctctgcagtatggctgcctgcccgggtcagtagcacccgtgggcttccatgagggcgctgcccagcccggtggggggtcgggagacctggggaggcagtcaggtccagtgacctgcccctgggggccccttaaactttgaccaagcatggggagactggagaagtatgcctgcctgtgtgcgaggtgaccccctagccctgacttgacccctagccctgacatgagttagtaccctgtgacgccatcaagaggggacagctctttctccaagccctgggctgcccttgcattttggtgcatggccagctggactgtgagaggacacaaagctgggctgaagtgctggcaaagatcagaagacacccctgcagccccttcccttagccagaagtgagttgtgccttgtgctaagaggagaggtgtcctgtatttctggagctggtggcaggcaggcagcatgaggcccaggcaccacctgctcactccagccttcctcataaccccctcccctccccactccagtgggtctggcctggctcaaatctgaatgcctagcaggctctgggtcttcctgtggttctccacaccaccagccctcacacatcctgctcaacagccacccctgcttgtgtctccccatgcagtggaaggccagtggttagaatggggtccctggggcccatgctccacgtcctgtgccaatgggacccaacagcgcagccggaagtgcagcgtggcgggcccagcctgggccacatgcacgggtgccctcactgacacccgggagtgcagcaacctcgagtgcccgggtgagtgcttggcacagtggtggcaagttgcagctctgaccatgggggtacctgggcccactcatatgcctcacctctcccacagccactgatagcaagtgggggccatggaatgcgtggagcctgtgctctaagacgtgtgacacaggctggcagcgccgcttccgcatgtgccaggccacgggcacgcagggctacccctgcgagggcaccggagaggaggtgaagccttgtagtgagaagaggtgtccaggtactgccctaatgaccctgggggctgggggccccatgtgtggacccagctgaaccttacccctgcacccacagccttccatgagatgtgcagggatgagtacgtgatgctgatgacgtggaagaaggcagctgctggcgagatcatctacaacaagtgccccccgaatgcctcaggtaaggggcaggtggctttccccaccaccaccacccctgccattctcattgcccccttctgcgcccccagcctctctgagatacggaggagtgtgggtgagagctcggcccccatgcccagacctctgtcctattgccctgcagggtctgccagccgccgctgtctcctcagtgcccaaggcgtggcgtactgggggctgcccagctttgctcgctgcatctcccatgagtaccgctacctgtatctgtcagtgagtgcaccctgctgggctggggcacagcagaatctgtctcagactctgctagggggtggagggagcgtgattctcgctcgttcccacgtgccttggcatatgctgtgcccacttctgcctggctgtgcctctccttgtctggcaagctcctactcatacctcaaggcctgactctcaagtgtcttcttttatccctggtgcctacctctgcgctcctgcagaatgagctcctcagtcattaggtgctcatccaagtgtctgtgtgtgctgctagactggggcctccttgaatttatttttgtgtccccagcatccagcccagggccagtcatggggtaagagtagcatcagtgaatgtgtgtacatgtttgactgtaattgggtattaattgtgtgaatgcatttagagcttgtgttgagagagagtgagagagagaaagacagtgtgtgtgtgtgtgtgtgtgtgtgtgtgtgcgcgcgcgcccacacacatgctcattacactccagaatgtacatgacccctttgggatggggaggtaccctgttcccatactgtgcttatatcttttatatgtacatctgaacaccttttttctctaggtgtttctatttcagtcttttttaaagtaccctttgggattctctctctctctatgagtctctttctcggactctgtctcccctgtgtgcccctttgagcctctctgaccttttccccctttctctccccgtggatgcaagcagtgggtggactggagtgggatgggccagggtctggttccagctcctgacacttcagtgactgtggccccctcatcacctacagcttagggagcacctggccaaggggcagcgcatgctggcaggcgagggcatgtcgcaggtggtgcgcagcctgcaggagctactggcccggcgcacctactatagtggggacctgctcttctctgtggacattctgaggaatgtcactgacacctttaagagggccacctacgtgccctcggctgatgatgtgcaggtactgcctaggaggaaggagggcggagggtggagaaggcccaaactgaagcgggaggccaggcccctaggcagagtctgctgtagaggcggcaagtgtggctatagtgggggaagccccctgttccctggggctaggaccccctgccactcattgctctctcctcagcgcttcttccaggtggtgagcttcatggtggatgcggaaaacaaggagaagtgggacgatgctcagcaggtgcggggcacagctgccagcttctcctcccgtgacccaccctgccttggacccttacacactttctgtccccaggtgtcccctggctctgtgcacctgctccgtgtcgtggaggacttcattcacctggtgggcgatgctctcaaggccttccagagctctctgattgtcacagataatctaggtagaaggagtcaggcaagggtgggggtcctgaatgtgccagaactcaagacgttctgtctttcctctacctaaccccgtatttgtatctttctgtccacattctaccctctccttcatctatgtgtggtctgtttctctgtgtatgtctgtctctgtgtttgtaccaacttcggtgtccacatctacctttcctggtacgtgtttcccctacatctgtctcttcccctggtctgccaccctttgtttctgcccctctgtctgtctctgtccaccctcctcccactgcagtgatcagcattcagcgagagcccgtctcagctgtgtccagtgacatcacgttccccatgcggggccgccggggcatgaaggactgggtgcggcactcagaggaccgcctcttcctgcccaaggaggtgctcagcctctcctccccagggaagccagccacatctggggcagcaggcagccctggcagggggaggggcccaggaacggtgcctcctggcccaggccactcccaccagcgcctcctcccagcagaccctgatgagtcctcctactttgtgatcggtgctgtactctaccgcacccttggcctcatcctgccgcctcccaggtgagtcctggggatgggtggctggggctgctgagggtccaggaaggcccaggtaagggaaggaggactgagccagtgctggctgcagagagatccatggcagcctcctccaccttcaggaaccccttgcctggctctggacacatgcttctcaaatttatccatactgctctcagaggctgggctgccacccagcgggtgagggacagagctctagacctcacctgaagtcctggaccccactgagttaggccttcccctgggccttggctccttggaagcctctgcacacccatccaaagcggcttcagggtttctgactggggctggcacccgctggcaggagctgacttcggtacctgtcccgcaggcccccgctggccgtcacatcccgggtgatgacagtgactgtgcgcccccctacccagcctccagctgagcccctcatcactgtggagctctcctacatcatcaatgtgagtggagatccatgcagagaccttgggtgcacctcaacctgggtggccagaggcctggctggtgggaagcactctgtccctgatggtgggctgaaccctggacctgtgtgggagctgctgtggcccccatggcatgggcagtggtggggtgtggtgagcttccctccctagactgcactcatgtcttttgctccccaggggaccacggatccccattgcgccagctgggactactccagagcgtgagttgggtggctcctctgggtgaggaagggagcagccctagggccctttgccagaaaggggtctcctgcctaaaaggcaagagggatttttggtgccatcctagcctaaggggtcaagaacgtatcctgggactccctgctgttgcctcgtggatgtggccttactgtggatttagcctgtccttgggcagtggccaggactgggggcagggccacgtagctggcctggggctcactgaatctctccccta
